United States Patent Application Publication US 2008/0050393 A1 - sequence listing, part 44

SEQ ID NO: 143505 - DNA, 3590 bp, Homo sapiens
gtttgcttgttttttgttttgatttccccagataatcttagctctctaaacttcccgtggcataagataagtaaacggtttgtgtggctggcacagagtagtgctgtaaacaagcacaacttgacactgggccatatgaggatcatcacagatttaaaggcatacaacaccattcaaaacacagataggagccacaatgggaagcaaagtctgaaggtgccatgggagggttagatagggagggaagaagaaaaagaaaggagagaaagagaaaaaaaaagcccagcagatagaattcaggaacatgttcatgacagactgtacatcaatagaggaaattccccaaggcactgcagaggagtagtgcagagttataacaggcagaagacatctgaaagggggcatgagctggggtggggaaatagggtttccaatgcttcactgggtgtggaaatagatgggcttgactttcccagaaaggatcttgggcacttgcacagagatgatctctgccatcatttccggaaagtccacgctcaccatgtgtgacttgattagcaggtcaaaagtgaactgatgcagctctctcgcaataggctgcacggagtccaggagcttggtgagctggtagaagcgtcttgagcaggatgtgggattttttcttttgcatgcaatgatacgatcgagttccttgatgtagttcattcgaagttcatcaaagaatttttgatttttcagcccatccactggaataatgctgaagagaagcaaaaaaaaaaaaaaaattagcatggctttcatgcacaggaattcctggggggtgatttggagccatccaaactcttgagagaggtgcctcattcggacacactggctgtacatccgggacttgtgcatgcggtactcattgaaaaccagatcaggggcgaagtagagcatcctggagttgacattggtgaaggatcgccagcccatggcaaacaccatgagccccatccaggagtactgaatgacagccatctggtcgtccacgtgtaagttgcggaagccaggcaaggccttggcccacttgaccacgtgtacaagctgtctctctcccagttcattgaggctagagagcaaggctgcaaaggagtcgggctggttgttgtcgtgtccagcacacactacacctggctcaatggcttccaggacattcagaaagatgggctgacattcatagccttcaatgtgtgacactgtcagcttctgggttgtctcctcagtggggctggtggtgctggaagcctctccttcctcctgtagtttcagattaccaagtttcttcagcttccgggctcccagagtcatccctgcttcataacatttccgaagacgacaagatggacaatttttccttcggaatttatcaatagtgcaatcatttctgctggcgcacaggtacttctgtttcccttcagcggctcttttgaagaagaccttgcagcttccacatgtgagagctccatagtgacacccagaagcttcatctccacagatcaggcaggtcttctggggtggaaagtaatagtcaatgggcaaaacatggtccctggcagtctccaaacgcatgtccccgtaaggtccggagtagctatccatccaggggcccatttcgcttttgacacaagtgggactgggatagggcactctgctcaccatgccgccagggtaccacacatcaggtgcggtgaagtcgctttcctggcccgccagcccctgagggggccgagtgtagccgtagggggctacagctcccgcctcgccgccgccgccgccgccgccgccgccgccgccgccgccgccgccgccgccgccaccacccccaccaccaccacacggtccatacaactggccttcttcggctgtgaagagagtgtgccaggatgaggaagcggcggctgagggtgacccagaaccgggtcccgctgcacccgcgccatgcaggctcgccaggtccccatagcggcactgcgccgccgcagccgcccaggcgctgccgtagtccagcgggttctccagcttgatgcgagcgtggggatggggaggcggcggagggggcggcggtccggccagagccagtggaaagttgtagtagtcgcgactctggtacgcagctgcctcgtccagtgctccggacttgtagagagacagggtagacggcagttcaagtgtcccggagctccctgctgcagcgctgccagagcagcctaggctctcgccttctagccctttggtgtaacctcccttgaaaggggaatactcagcagtatcttcagtgctcttgcctgcgctgtcgtctagcagagaacctttgcattcggccaatggggcacaaggagtgggacgcacagcgggtggaactcccaaaagtggggcgtacatgcaatccccccgaagctgttcccctggactcagatgctccaacgcctccacacccaggcccatggacaccgacactgccttacacaactccttggcgttgtcagaaatggtcgaagtgccccctaagtaattgtccttggaggaagtgggagcccccgaggcctccctcgctctcccgctgctgctgccttcggatactgcttcctgctgctgttgctgaaggagttgcatggtgctggcctcgctcaggatgtctttaaggtcagcggagcagctgcttaagccggggaaagtggggcccagcagggacaacgtggatggggcagctgagtcatcctcgtccggaggtgctggcagctgctgcggcagccccttgctggcggccacggcggctccaggctctgggacgcaacctctctcggggtggcactccagggccgactgcggctgtgaaggttgctgttcctcatccaggaccaggtagcctgtggggcctctacgatgggcttggggagaaccatcctcaccctgctgctgctgctgctgcctggggctagtctcttgctgctgctgctgctgctgctgctgctgctgctgctgctgctgctgctgctgctgctgctggctgctgtgcagcagcagcaaactggcgccgggaggtgctgcgctcgcggcctctgggtgcctggggcccgggttctggatcacttcgcgcacgctctggaacagattctggaaagctcctcggtaggtcttggacggcggccgagggtagacccttcccagccctaactgcacttccatccttgagcttggctgaatcttccacctacttcccttaccccgcctccccttctcttgctcagaagagttcaacaggctgtgatgatgcggtagtcgctgcagctagctgcccacctgcgggaagctccagagaaggaaacttgcgggagcaaccacgcaaaaagcgctctgacagcctcaaagtctcgtgcagaagaagacacacggtggacaagatctgccctgctaggctcacagtctgtctcttaatacttgaagggtagattcaaaagatgcccagatcttaaaagaaaaaaacaaaatcctccaccttccaaattcagtgtccactgaagtaggtgcaaataagaactgagttatta

SEQ ID NO: 143506 - DNA, 1620 bp, Homo sapiens
atgcacggcgagggctctgtggctttggaaaatgctgccgaggtgtctcaggtggagccaaagattcttcctttctggggtgaacatggtctccccacaccaatatctgctcctttgtggggaagtgatgtggggcagaaagatcttgggccttggaatcagatgtatgtgcttccagtcctgcctctatggccctcgagcaagcaacttaacctttctgtgcctatacaaaacaggacccccatctccacccccaagcaggctagccaggggcttgtcagtgttgatgagcgactgtgccaaggggttggccaaaagcacaacttaaagccactgatggacaacgccctgtttctttgtcttgcagccgtctccaacctggacatagagagtaagctgagtgtgtactaccgcgccccgtggcaccagcagcgcaacatcttcctcccagccacaaggccaccctgcgtggaggagctgcaccgccacgcccggcagagcctgcaagccctgcgcagagcttttattgtgctgaatgcagtatctgccaagtcctacttgaaggcatctttgattaagggcctagtcttcccacttgtgaaccatccagagttggcaggagatgaaggtaagatactgaagaattccaagaagactggagggggcagtgctggaggagaagaaagcaacatagggcctggtgcaagcccatgcaggatggggccccttcccagaagtcctgagctagagccccggaatcctgccctggaatctctactggagctaccctctggcccttctttaagacgttcaaatgtcggagcagaagaggagaaggaagaaagggttgtcctctttgtcttgggtagtttgatgcctcagaaggagagcaaaggcgaaaacgttggccagccaaccctgcaggctacactgacagtgaaggcccagggtgtggctacagagggcaaggaagggtgtggcatgaggaagaagagcatggaggatggggcacccatcgtcctgcatctgcccaggatcctgctctgtgccctgctctccaggccatcaccacactcagtggaattgcaactcatttctggtcatggcttgcttactgggtgtaccccaacagcccggaggctatcaacttattcccgccccaagcaggtacagatgcagcctcaggacctagggcctgtgcacacatcccaccctgaagtgacaggacagctgcctgaggttccagaacatgattttagccatggggactcctgcttttgttggaggaagtctgaatctaagaaacatgtactcagcactgatatacagaaaaagcacatactactcacaacaatagctaatagtagtttagcccagaaaatgtcagatattgcactaaatcctcacaaccaccctatgaaaaacaccctcaggcaacagaacaaatggttgattgaagttttatttcttcgccccatttctccaatgctgggttttaaaagtagggaaatagctaaaaagcaggtaatggaagagaaaagagaaagaacaatacgaggaatagatgttgccagaattaacctgagccctgtcctctcacattctgatgtcaccctgtga

SEQ ID NO: 143507 - DNA, 599 bp, Homo sapiens
atgctgccgaagttcgacccgaacgagatcaaagtcgtatacctgaggtgcaccggaggtgaagtcggtgccacttctgccctggcccccaagatcggccccctgggtctgtctccaaaaaaggttggtgatgacattgccaaggcaatgggtgactggaagggcctgaggattacagtgaaactaaccattcagaacagacaggcccagattgaggtggtgccttctgcctctgccatgatcatcaaagccctcaaggaaccaccaagagacagaaagaaacagaaaaacattaaacacagtgggaatatcacttttgatgagatcgtcaacattgctcgacagatgcggcaccaatccttagccagagaactctctggaaccactaaagagatcctggggactgcccagtctgtgggctgtaatgttgatggccgccaccctcatgacatcatagatgacatcaacagtgagaatgacaaacagccacgaaagagtaagatgagaacttcattcagtccccagattccagggcatgaacactttcactaccttctgcttcttcagcacgttcactgccagttagctttgacattaag

SEQ ID NO: 143508 - DNA, 507 bp, Homo sapiens
atgtggaactgtcttacaaacaagctgttattccaagaatctcttcaaaaaacagcaacaaggctttcagctttcagctgggaggaggccaaggtgcaactttcttgggtcgtcctgaatctagccacctctgccatgctgccgaagttctaccccaatgagatcaaagtcacatacctaaggtgtactggggatgaagtgggtgccacgtctgtgttggcccccaagatcagccccctaggtctgtcttcagaaaagccctcaaggaaccgccaagagccagaaagaaacagaaaaccattaaacacagtgggaaatatcacttttgatgagattgtcaatgttgctcaacacatgtggcaccgatctttagccagagaactctctggaatcattaaagagatcctggggactccccagtctgtgggctgcaatgttgatggctgccaccctcatgatatcatagatgacatcaacggtggtgctgtggaatgcccagctaattaa

SEQ ID NO: 143509 - DNA, 1272 bp, Homo sapiens; identical to SEQ ID NO: 120911

SEQ ID NO: 143510 - DNA, 3003 bp, Homo sapiens
ctatcctgtcgtcatggaagtgatatcgcggaaggaaaatacgatatgagtcgtctggcggcctttctttttctcaatgtatgagaggcgcattggagttctgctgttgatctcattaacacagacctgcaggaagcggcggcggaagtcaggcatacgctggtaactttgaggcagctggtaacgctctatgatccagtcgattttcagagagacgatgcctgagccatccggcttacgatactgacacagggattcgtataaacgcatggcatacggattggtgatttcttttgtttcactaagccgaaactgcgtaaaccggttctgtaacccgataaagaagggaatgagatatgggttgatatgtacactgtaaagccctctggatggactgtgcgcacgtttgataaaccaaggaaaagattcatagcctttttcatcgccggcatcctcttcagggcgataaaaaaccacttccttccccgcgaaactcttcaatgcctgccgtatatccttactggcttccgcagaggtcaatccgaatatttcagcatatttagcaacatggatctcgcagataccgtcatgttcctgtagggtgccatcagattttctgatctggtcaacgaacagatacagcatacgtttttgatcccgggagagactatatgccgcctcagtgaggtcgtttgactggacgattcgcgggctatttttacgtttcttgtgattgataaccgctgtttccgccatgacagatccatgtgaagtgtgacaagtttttagattgtcacaccagtcacgcgccgcggccgaaaagggagggcactgtgtctctttgcctgaagatccctctccagccataggaacatgaggggtgggctgtaagttgccctgagaacagctctcaaccaaggacagacaagagttgctggataaacatcctagtttccttgggccttggtgggacagttctgaagtatgtcctacacagtctctcataaggtccccagaaggactgaccccagtggccatcagcggtaacttagttgatcctgatacataaccattcatgtgaataacgtttgagttaataccatcgatcgtcatttttgaaccgcgtgaatcagtgaacaagtaccatttgccgttcattttgaaaacattcgcgcgctcgatttcatcagttaccgtgtttgaagtgatcagcggcttcattacttttttcaatgtgtaatcattatttaactctatgataccgagggcgccgttcgctaactcagcatcgcgttttttagcgctctgctgaagcttctggctttctttacggaagaagttcgtgccgccgccgtagtacgctttgttaaataaagattcttcgccttggtatccgttttctgttcccgtgttggcttcgaatacaaggtatttatggcctttgtcttcaacgtagtgagggtctctcagcgtatggttgtcgccggatgtataattgccttcatcgataaactgctgaacgttctgatatgtttttccgtctccgtcaaaaatcgttttgtgatcttccactccgttgattttgagtgtgtcatcagattttgacacatttacctgcgctgttgtcaggctttgtttgccgtaatgtttaccggaatagtcagtgtagaataaacggatttttccgtcagatgtaaaggttgcagaaccggaccattcttgcgtctgatctttcaggatcggatcgttggcgtcgaacttatcgctgtctttaaagacacggcccgcgtttttccagctgtcgattgagttgtcgccgaccttttgataaaacatgtagattgatgtgtcatcagcgtctttcgggcttcccgcaagagcaaacacaacgtgatagccgttgtattcagctactgttccgtcagcgttttgcagcggccagctgtcccacacatcaagtccttttgcagactcaatatttttaatcgttgattgatcgaattgaggcacttggtatttttcgttttgctgctgtttagggatctgcagcatatcatggcgtgtaatatgagagacgccgtacgtttctttgtatgctttttggttattttctttcgcgaaggcttgagtcgctcctccaaccagctggcctctgttgtcacccgtcagctcacgatccagtccctctggatggtgacggtcagcgccgtgccggccaggtttgccaaggccactagggtggtcaccagtgcacagcaggccacagtgagccagccatcccagatttgttccatctgcctcttgtaggggagcacaaagcattagggacagtggcaacaaggccggggaccggaagccgttctggcttgcccaagcgagggatttaaccaaccggttgttcctttccatgtttagtgcttccttcaggagctcttttagggcaggcctggtggtgacaaaatctctcagcatttgcttgtctgtaaagtattttgtttctccttcacttatgaagcttagtttggctggatatgaaattctgggttgaaaattcttttctttaagaatgttgaatattggcctccactcttttgtggcttgtagagtttctgccgagagatcagctgttagtctgatgggcttccctttgtgggtaacccgacctttctctctggctgcccttaacattttttccttcatttcaactttggtgaatctgacaattatgtgtcttggagttgttcttctcgaggagtatctttgtagcattctctgtatttcctgaatttgaatgttggcctgccttgctagattggggaagttctcctggataatatcctgcagagtgttttccaactcggttccattctccccatcacttttagatacaccaattagatgtagatttgatcttttcacatagtcccgtatttcttggaggatttgttcgtttctttctcttcttttttctctaaacttctcttcacgcttcatttcattcat

SEQ ID NO: 143511 - DNA, 804 bp, Homo sapiens
atgaacgacacatggttgatggcagagttcagacaacaattatttggagcagaccaggagcaaagacagctgattagaggatcagtacccagggcggtaccactcaccaaccagctggcctctgttgtcacccgtcagctcacgatccagtccctctggatggtgacggtcagcgccgtgccggccaggtttgccaaggccactagggtggtcaccagtgcacagcaggccacctaccgaaggaggggaaagggtcttacaaacaagctgttattccaagaatctcttcaaaaaacagcaacaaggctttcagctttcagctgggaggaggccaaggtgcaactttcttgggtcgtcctgaatctagccacctctgccatgctgccgaagttctaccccaatgagatcaaagtcacatacctaaggtgtactggggatgaagtgggtgccacgtctgtgttggcccccaagatcagccccctaggtctgtcttcagaaaagaacagagaggcccagattgaggtggtgacttctgcctctgccctgatcatcaaagccctcaaggaaccgccaagagacagaaagaaacagaaaaacattaaacacagtggaaatatcacttttgatgagattgtcaatgttgctcaacacatgtggcaccgatctttagccagagaactctctggaatcattaaagagatcctggggactccccagtctgtgggctgcaatgttgatggctgccaccctcatgatatcatagatgacatcaacggtggtgctgtggaatgcccagctaattaa

SEQ ID NO: 143512 - DNA, 812 bp, Homo sapiens
  misc_feature (1)...(812): n = a,t,c or g
cggacgcgtgggcggaggaggccaaggtgcaaactaccttcgggtcgttccggaatccggtgtttattcgacacccagccgccttccaccattgccgccgaaagttcgacccccaacgagattcaagtccgtataccttgaggttgcaccgaaaggtgaaagtcggtgcccacttctgcccttggcccccaaagaatcggcccccctgggtcctgtctccaaaaaaaagttgggtgaatgacatttccaaggccaacgggtgaactggaaagggccctgaggaattacagtgaaactgacccattcagaacagacaggcccaagattgaggtggttgcctttctgcctctgccctgatcatcaaagccctcaagggaaccaccaagagacagaaagaaacagaaaaacattaaacacagtgggaatatcacttttgatgagattgtcaacattggctcgacagatggcggcaccgatccttatgccagagaaactctctggaaccatttaaagagatccttggggactgcccagtcagtgggctgtaatgttgatggccgccatcctcatgacatcatcgatgacatcaacagtggtgctgtggaatgcccagccgtaagtgacattttcattgttacagtaggggtgaaaggggggccacccagtgtattcacagagataagctgggaagttttggaaatggttactggtggggtgggataatccttttaaactttttactgannnnnnnnnnctttcccacagagttaagcacaaaggaaaacatttcaataaaggatcatttgacaact

SEQ ID NO: 143513 - DNA, 480 bp, Homo sapiens
agggcgaagccgcgctcggtgaaagttgaagagggggaggcctcagacttctcgctggcctgggattcctccgtgacagcagcaggaggcctagaaggagagccagagtgcgatcagaaaaccagccgtgcgctggaagacaggaacagcgtgacaagtcaagaggagagaaatgaggatgatgaagacatggaggatgaatcaatttacacctgcgatcactgtcagcaggacttcgagtctctggcagacctgacggaccaccgggcccaccgctgtcctggaggtaatgcaaaacagccccaggactctgacaggtggttacacgggtaattggacatagcaacagcttgaagcctcaagtgagattaaagaattaataatgtaattttacagttaatgtcattttattgtggtgtcttgggtaccctgtatccgccttttaaatacaattaaaaataaaagcaacagctttccggc

SEQ ID NO: 143514 - DNA, 672 bp, Homo sapiens
ttactgcgtttccaaaaggccttccagaaattcagggtgcacatccacccattcatggcctccaggacagcggtgggcccggtggtccgtcaggtctgccagagactcgaagtcctgctgacagtgatcgcaggtgtaaattgattcatcctccatgttctgcttcatgttgactaaagaacatcgccagcagtttgaaatccgagttaagtgatggtttgaggaggagcagcccacttgtggggctccaaacaccctcttggggactgacgggaagtcggcagaaagccggcagaccccgagcagcagcatgataagtgagcttgcacttgcctgcacaggggtgagtgacagccagaccttctcattgcctgcagcatgtttctcctggcctggggctgtgtttagcatatttgttgtgggtaaaatgatctgtgcagactgtgtcaagtagggagtaattacctgcaaaacaggaaccattaaaaccaccttcaagggcttttggaaaaagataaatgccggcaacttgcgtgcgtttgggagccccttcttgacccacatttggccaaaattgggtttaatgaaatgaactctcgtctgcagactggcccatccgggggtgtccgcgccgcgcccccgttcccggctcccgctcagggacgtacccat

SEQ ID NO: 143515 - DNA, 594 bp, Homo sapiens
tgagcttgagtcctgtgacctctctgaactctcttactctttagctctagtactgttttgtagaggccttacaacctttatgacatcgatggccctgtcgtctgcccatcaaggcagttctgattttctctgacagccgcctcctgcctgggcagactcccatccagtgctgtatagaacatgccgaggggaagcactcactctttcactgatgagtatgatgggagctgcactgtttcccggatgcgtctcataaggctgaagatgtttccttccattcctggtttgtgcagagtttttgctgtgaatagaggtagaagtgttggcaaatgtttttctacatcgaatgacgtgcccatatggttttcctcgttttgctaatgtattgttttaatttttttttttttttttagatggagtcttgctctatctcccaggctggagtgcagtggtgcgatctcggctcactgcaacttctgcctcccaggttcaagcgattctcctgcctcagcgtcccaagtagctgggattacaggggcccaccaccatttttgtatttttagtagacatggggtagaagcgacagagaattta

SEQ ID NO: 143516 - DNA, 1137 bp, Homo sapiens
ctattgacgggctctgatcctttgccgtgggatgccgctgtgactgacgttgccgtgtgttgcattttttgtgtttctggtgaggactgtcttcaggtctgttcgtagcgtgtggttgctagaatgagatgtctgttttgaagagagaacagctgggttcttctcgacccacagggatgcacggcccaccttgtaggttggagcgaggagcgtggaggacaagatcatctctttcactgatgagtatgatgggagctgcactgtttcccggatgcgtctcataaggctgaagatgtttccttccattcctggtttgtgcagagtttttgcttgtctccctttagttctctcagctttgcttcgtggttttgaaggtctctttgcaggtatatgcacaatagctgttttcatgtccttgtccactaattttattatttgtcttatgtccgggcctgtttttattggttggtttttctcctggtcagtgtctgggcgtgtttctattggttggtttttctcctggtcagtgtctgggcgtgtttctattggttggtttttctcctggtcagtgtctgggcgtgtttctattggttggtttttctcctggtcagtgtctgggcctgtttctattggttggtttttctcctggtcagtgtctgggcgtgtttctattggttggtttttctcctggtcagtgtctgggcgtgtttctattggttggtttttctcctggtcagtgtctgggcctgtttctattggttggtctttctcctgggcagtgtctgggcctgtctctattggttggtttttctcctggccagtgtctgggcctgtttctattggttggtttttctcctggccagaggtggttttctcccgcttcatcgcaggtctggttgtttttgtcagccattttgtattttactttattgggtgcaggattttgttatattcctttaaatgctgttgagacttgttttaggttgcagcaaagttaatcatagaccgtttcctcctcttgaggctggcgtttaagctgcgttccggcggctcctaacacggcttaaaagagcggccgttggtgtgaagcccactgttcagcccggacccttctgaccctgcttgctggtcactctt

SEQ ID NO: 143517 - DNA, 1065 bp, Homo sapiens
tctggctgcgcgcggagcgggctccggagggaagtcccgagacaaagggaagcgccgccgccgccgccccgctcggtcctccacctgtccgctacgctcgccggggctgcggccgcccgagggactttgaacatgtcggggatcgccctcagcagactcgcccaggagaggaaagcatggaggaaagaccacccatttggtttcgtggctgtcccaacaaaaaatcccgatggcacgatgaacctcatgaactgggagtgcgccattccaggaaagaaagggactccgtgggaaggaggcttgtttaaactacggatgcttttcaaagatgattatccatcttcgccaccaaaatgtaagtagctccctgttcagtgtcctggaagtcggcctgttcctgcggggattggagtcctctccaaagaggcccgtggctgtggccgtggcgccctggtccgggcgatccatggagctgggagggagtgagatcacagatttggaggtcggctttgatccctgatccccgcctcaggctgcagatgcgagtctgtttccagctccaggggtgggcggtgcacgtaatagacttagtctttcatcccagctaattggctgggaagctccagagtcctttgcagggagaggctgtgagatccaggctggagctcctgggctgggagtgcctggaccctcagtggttgttggcgatgaagacaggatttggtgcccacaagaccccagccctggatgggatggacgtgcagaagcgccaccactccgagtctcactggagggtttatcttgccccacctcactgctcttcctgtgggctctcgcagtctctcccacccggggctgcgtctgcagccgggcaggcatagagcaggggagcagcagagaaggcgcgagaagaaagggctgaggccaggttcgacattgagcctacagctaagttagtgatctcagtcagttcagcaaaactcaggagagggaggagagggccgccacgtccctagccgtcccattagctgggaaatcggcaggccctttctgtggtgagttccc

SEQ ID NO: 143518 - DNA, 919 bp, Homo sapiens
gcatgaccatgcttacgccatgcttggcacgagagctcggatctgatcgcactgagactacagcagggacccagcactccacatccatctggggccccagccctgcctagtccccacctgatggtatggtgaggaccctgccatgtcagccaccacagggtggcagctaccccccagccgcagcggcccagcctctgaacatctgtctcctcaccttggagcagaggccgcagcatgtgtcgcagaccagggctgggttggggccatggggaaggggtcctacctgcccccgcctcccggtgatctgggcgccgctcacaaggcctcccctggtagacccccggggtcggacgacggtttgcaagaagagagtccctgctgggccaagccaccgtatgttaagagcaagcctgcctgctgcggaccacgtccccgtgctgggggtggtaggagcccgctcgccacccatttgtaaggagggcttcatttctgtgtgcagtgccgcggacaggctccctcggctgaaaccgcgccctccttccaggaaagaaaggggtaaggggcgctgccggcctcctgcctgtcggggctcagcagatgcgtgcggcagtgccatggggataacagctcagatccccagctgtggcctggcccccgccccgtgaggacttgagctcagaaggtggtgctggcaaggttggggtgacagctgtgtccctaccgagggcatttctggttgagaaggaagcaggctgggcctggccaaaatgtaagtagctccctgttcagtgtcctggaagtcggcctgttcctgcggggattggagtcctctccaagagaagaaagggctgaggccaggttcgactttgagcctacagctaagttagtgatctcagtcagttcagcaaaactcaggaga

SEQ ID NO: 143519 - DNA, 774 bp, Homo sapiens
atgcgcatcgagacagtggtactggtccatcgggtaatggcgttatttatggcacttttactggtgttcactattatctggttgcgggcgcgactgctacaaccgtggcggcaactgctggcaatggcgagtgccgtcagtcatcgcgattttacccaacgcgcaaacatcagcgggcgcaacgaaatggcgatgcttggaactgcgttgaacaatatgtctgcagaactggccgaaagttatgccgtacttgagcagcgggttcaggagaaaaccgccgggctggagcataaaaatcagatcctctcttttttatggcaggctaaccgccgtttgcattcccgcgccccgctgtgtgaacgcctgtcacctgtactcaacggcttacagaatttaaccctgctacgtgatatcgaattgcgggtgtatgacactgatgatgaagagaatcatcaggagtttacctgccagccagatatgacttgtgatgataaaggctgccagctctgcccgcgcggcgtattacccgttggtgatcgcggcacgaccctgaagtggcggctggctgactctcatacgcagtacggtattttgctggcgaccctgccgcaggggcgtcatcttagccatgatcaacaacaactggtggataccctggttgaacaactcaccgccacgctggcgctggatcgccatcaggaacgtcagcaacagttgatcgtgatggaagagcgtgccaccattgcgcggagcctgcacgcaaacgaatcctag

SEQ ID NO: 143520 - DNA, 1017 bp, Homo sapiens; identical to SEQ ID NO: 129767

SEQ ID NO: 143521 - DNA, 2568 bp, Homo sapiens
atggcctttaacacgcaacacgttgccatcgtggggcaatacgttgtgatgtaccaaccatgcacccatcgggccattggcattgccagtcaccggatcttccacaataccaatcgcaggcgagaacatgcgaccatcggtttcgtttttgcctgggcggatctggaacgggaagaaaccattgcagccaatctttttgctgatagcggtcagcgcattcagcggtggctccaagcccggcgtaccttgttccagcgaaatacgataatcatcggtgtgcgtttcgatagtacgccgatgtttccggccagcgagtttgccaaatgggccattcctaaacctaaacttggacgtcaatggggcgataccagcagctacctgcaagaacgtgccctggacgtacgcgacgtctgcttccagttactccagcaaatctacggtgagcaacgcttcccggcaccgggcaaactgacgcagcccgccatttgtatggctgatgaactgacccccagccagttcctcgaactggataaaaatcacctcaaaggattgttgctcaaaagcggcggcaccacctcacatacggtgatccttgcccgttcgttcaacattccaacgctggttggtgtggatattgatgcccttactccgtggcagcaacaaacgatttatatcgacggcaacgccggggcgattgtggttgagccaggggaagccgtagctcgttattatcagcaagaagcccgcgtacaggacgccctgcgtgagcaacagcgtgtctggctgacccaacaagcccgtaccgctgacggtatccgcattgaaattgccgctaacatcgctcactccgtggaagcgcaggccgcattcggcaatggtgcggaaggcgttggtttgttccgcactgaaatgctctatatggatcgcaccagcgcaccgggcgaaagcgagttgtacaacattttttgtcaggcgctggaatccgccaacggacgcagcattattgtgcgcactatggacattggcggcgacaaacccgttgattatctgaacattcccgcagaggcaaaaccgttcctcggttatcgcgccgtgcgtatttatgacgagttcgcgtctcgtgtttacacgcaattaagggcgaacttcgggcctcgaatgctgcgccgttcgtctcgtgtggcgcgggcctgcggcgcgcgcggggtgggggctggtgttccggcgggtgtcttcggcttcttcctcgtgggtgctgtgttgcgggtccctgacccgtctggcctggttccgtgtcggcgtgtgcgcctccggtttgtgcctgttgctgggcggtggtggctgcagatatgtattatttaccggtacaccggcgtgggcactggtctggtggggcccccggttttcccggctcgagtgtccgcgccgctgtttacccgcggcaaacttggacacgcaaatcctgcgccctttggggacgcccgatgtcagggctttcgctttccatgggggaagagtattccggcgttacgctggaacaagagtaatcgcgcaccgactgcctggccagacccgctgccggaacgtcagtgggaatacgcatcgccgaatgtctggtatctgttaccgatcaccgccaagcttatggtagaaacggaggcctccggctggctacctgcggcgctggatgaatgccgcctgatgcaaatgcgctccgaaatccgctttcacggtaaaacgctgctagcgctggtggaaaaagcgcagacattgccggaagatgccttaccgcagccgatgcttaacctgatggacatgccgggttatcgtaaagcgtttaaagcgattaagtcgctgattactgacgtgagcgaaacgcataagatcagcgccgaactactgcatcgcgtcggtccgctagttgtgcggtaccggaccaatcaccatatctttttgcaccgctttgcacatgtcataaatgagcgggatcagatcccaggtgcgttttgccgcctgaataccggcaatacgcgcagtggcaaatacgtcgcctttgtggtggcgaccatcaataatcatcgccagcgtctcgctgcgcatggtgacaaaggcttccgcccgcgcttcacgcacggtttccgctttggcggagacatccaccatgtgcgcttcgccagcggcgttgatatgggtcagttgcgacatacttatttcttcaaatgtggatggaaattacacggacgcgtacgggcatccagctgcggcgcgatgatattttcccatgcggtacggcacgctttggtcgaacccggcatggcgaaaatcagcgttttgttggcgacgcccgctaccgcacgagattgcaacgtggaagtgccaatctcttcaaacgacaacatccggaacacttcaccaaaaccttcaacttcacggtcgaacaacggcagcaatgctttggacgtcactccccttatgggttggctcatgcccgttccagctggaaccgccgcccgtgctgatgttcgcaagccgggaagcgttctgtgcgccgctccgttcccgcagtag

SEQ ID NO: 143522 - DNA, 2178 bp, Homo sapiens
tcaatgagggttagagcatatgcgtctgtcggcaaacagacagggaaatacttgtgctggacgtagcgtaaacgcctgatccgtccaacggttcggattttgtaggcctgataagacgcggtagcgtcgcatcaggcatctgttgccggatgtttgtattgttgatggcaactgcattccgtcggttttttccatgccaattcccactccctgagcggttgatgacgtatccagtgccagaaaaccgggttgttcgctgtcttctacccccgtgagcgtgacttttacgttgtatcccgccggccctttgcaatctttcagcttaaagactacgggtacacgagcggactggcctgcaacgttcaaatcctgacgactgaccgtgggaaagcgcacctctgccagatattggccatccaccaccagcgcacaggatttacttaataaattaccggagaaatgcagattattatctgccgcgaataacgtgctactcattgccaatatcagccccgctaacaggacgtaaccaccggacggtacggcctccagcttcggcttttgcgtaaaatcagtggcgttgatagcaagcggagtattgagtttaaaacgctgaccatcgtgctgaagctcgataccaaaaccgggtacatcagtttcaattgctgcatcattaaaactggttcgtgtaccagtccaggtgagggtcatctcccaatctggatgacgggtcgtcgagtcacaagtgagttcatatggcacctctttacgaccatagttgccgttgatgtcgtcgataatgagatcgcgaaattcgacttcaatggttttaccaccgctgatgctacaggttggcggtgacaataatgtcccgtgaaaggtgatgtcttcatcagcagcatgagctatggcgaatgagttatcggcgctattttctatccgaatgcccagcccggtgatattggtactgagtaccgtttcgccgttaatcgttgaggtattgcccttaagttgcatccgcaagtcgttagcaagactgtttgtgcagttcaacgtgtatttcgcatcggaggtggagatccccagcagtacatcgccttcgcgacctaccgcttcaacgtagcgggagaaaatatcattgaaaccgaaatcattaccgacgcaggaaatatgactaacgtcagaaatagcaatcgccgggtagcccggacggttttcacggtagcgaccggtcaactcttcggcaaagtgcatagcgtcgcaatgggaaccgccgttgccgcaggaaagcactttgccacccgctttaaagctgtctgctaacaggaccgccgcgcgctgaatggcgtgaatattggcgtcatcttttaaaaagttagccagcgtttccgccgcttcgttcagttcgttacgaataagatcctggctcctacaagtaaggggcttaatgattcgaatcttgctcggtacccgatcagtgagcaacattacgcgcgagtgcgcaccttcaaacagctgttgtcgagttttcagcgtaaccgcgatctggttagcgtcggcgcgtatgccaaaggcagcgatccgatgctcgataaagccatcgccctgtggccgcagctggagggcctgaaagatctggcagaaaaagaggtagaggatgccgcgcgcctgctgggtgaaatgcgtcgcggatgtcagcaggcggaagaacagctcaaaatgctgattgattatcagaatgaatatcgcaataacctcaacagcgatatgagtgccgggataaccagcaaccgctggatcaactatcagcagtttatccagacgctggaaaaagccattactcagcatcgccagcaacttaatcagtggacgcagaaagttgacattgcccggcgacgttgacaccaccaaattggctggcgggaaatcagcggcagaaacaccggtagtcacaccttcagctgcttcaatggtcacggtaaaaccggtgccataggcgctggtgttattttctaccatcattggcagatcgagttgtttacggcgatcttcagtaatgcacaggcaaacaataccgctaccgtggcgaatggtcagcgccatctgctcaacagtcatggtttctgccgggaagatcatatcaccttcgttttcacggtcttcatcatcaagcaccat

SEQ ID NO: 143523 - DNA, 2448 bp, Homo sapiens
ctatgggcggttctccacggtgacctcgttaacataggggatcagccccgcaattgctatgccgctttcaaacgcgcccggtgggagttctgattcaaccgtgacgatatgctcgaacgtgttcttgagtttattgatgtgctgaatatgactgaccaacgctgcttgcgaaaggttatcgacctggtaacacaacacgccaggcagacggacagcggccttgctgctgcgattttcggactgttgttgaataaataaatggcggaaatgacgcaacgccagcgactgcgcgtcgttgccgagatgttgttttacctcaatacgattaagcggattatgctcatcctctttttttacctccggcaaagagaacacgcgggcaaccaatagcttgtgttgctcaagatgagcggcaaatatagccagctcttgttccatctggcgaaaggtagtgttgagtcggtttattttatagcacagtcgtggtgacttgaccatcgtgcgcgtagtgtcaggcagaggtaaattgcgggatgttatgccataacggccagctaaacgagaagcgggcaccacccagttcgctggtgtcacaattaaccgtaccgcccattgccagtgcggtacggcctccagcttcggcttttgcgtaaaatcagtggcgttgatagcaacgcggagtattgagtttaaaacgctgaccatcgtgctgaagctcgataccaaaaccgggtacatcagtttcaattgctgcatcattaaaactggtttgtgtaccagtccaggtgagggtcatctcccaatctggatgacgggtcgtcgagtcacaagtgagttcatatggcacctctttacgaccatagttgccgttgatgtcgtcgataatgagatcgcgaaattcgacttcaatggttttaccaccgctgatgctacaggttggcggtgacaataatgtcccgtgaaaggtgatgtcttcatcagcagcatgagctatggcgctactgacacaaagcagggttaagaaagtctttctcattgatagtccaccaccatggtcaaactggcgttaaactcgcccgcagcaagttgcgccccgcttgccttcacaggtacagccttcaactgtggctggttattgatattaaatggcgtccagctattttcaccgacggcaaacaatgagttatcggcgctattttctatccgaatgcccagcccggtgatattggtactgagtaccgtttcgccgttaatcgttgaggtattgcccttaagttgcatccgcaagtcgttagcaagactgtttgtgcagttcaacgtgtatttcgcatcttgccgataattggtgccatcaacgttatcagcaatcatattgccgaactctacctggctgcccttgattgaacagggtggcggagcatcgaccaacacgcgcagaattaaatccacggggttactaccagccgtagcgattaattcagccctggttccggagcctcgcccatatactttggtcttatcccccgttcgccttaggctgtcttccctgcagttcgttgctggaaagggccgtgccagttgttcaccgcctctcctccgccgttgcccagaccgggcgtcgcgggcaacggggacgaggaggagggaaaggagacagatacgaatcgagcttgatagggtaaccccatcggaggtgtcatcttcggtttcataatctatataaacagaattcgtatcattaggttttaatgtcattagcggatttttactggttgctaaaccttcaatgagtacgccaacgcctttggcggcagtgcttccagtaagcgtattaccaagcagttgtgtgttttgagtacctacttttccagtgacgagttttgtttcaatattacgcacacgaatacaattctgaagcgagatatcaaagggaacaggtgaagcgccatttttaattgtcccagagctatattctcccattctaaccgttgaaccattgactgatggcccggtaagtatggaggtaaaacatgttggtaaggttaatttgacattattcagtgtgaaattgacataaatgtggttgctgtgatctacaacttttgtaccaggactgtaggccttaaacgaataaaggtaatttgatgaactggataactggacttgctgattaagtgtaggatcgaaattagtatctgtataaaattcaacagttatgttgtgtactataccaccaatagcccaaaacttatcgtagtcgtctgctttgttgcaacccttagtttgtagatcgctgtctgtgacggaaaagaaaaattcttggttggaaggatctccgatatagattcctggcgattgaatgtcagttattgtatcgtatgcagaccagaaccttgatatgacatggtgtatcagaccagcaacgatgtataaaaagtaattcgccat

SEQ ID NO: 143524 - DNA, 2790 bp, Homo sapiens
  misc_feature (1)...(2790): n = a,t,c or g
ggatgcggcggcggtgtttgtgccgtcagtgcttacatgccgctcaacagattgcccaacgcgcaggaggccaacaatgaatacaccagcttcgaaaactgcattaagtgcaccgtctgcaccaccgcctgccgcgtgacgctgcgtaataacgatccgaaactcccttatctggtcaaagctggattgaagatgaaaagggtaacaagatcacctcgccgttactgtgctgccgccagtgcaacgcatcgattcaatgatgaacgggcaggtaaagtgcagggaatgccggatatcaacaaattgccagccgatcgtgaaacatgttctactttaacgtgcgcgagatcccgccaaaatcaaacaaacccataccctgcaaatcgcgctgcaaacgcgtatcaagttgttctggcgaccaaggcgctggaaaaggtcagtatgaaaagtccgtggcagcacaaggtgagctcacccgcagcggtcaggcatttaccgtcaataacccaacgccgtactacgtgattatcagcaacgccagtgcgcagaaaaacggtaatccagctgcagggttctcgcctctggtcattgagccgaaaaccacggtaccgctgaatgtgaaaatggatagcgtaccggtgctgacttacgtcaacgactttggcgcacggatgccgctgttcttccagtgcaatggcaacagctgccagggcagccaggtagagttcggcaatatgattgctgataacgttgatggcaccaattatcggcaagatgcgaaatacacgttgaactgcacaaacagtcttgctaacgacttgcggatgcaacttaagggcaatacctcaacgattaacggcgaaacggtactcagtaccaatatcaccgggctgggcattcggatagaaaatagcgccgataactcattgtttgccgtcggtgaaaatagctggacgccatttaatatcaataaccagccacagttgaaggctgtacctgtgaaggcaagcggggcgcaacttgctgcgggcgacgccatagctcatgctgctgatgaagacatcacctttcacgggacattattgtcaccgccaacctgtagcatcagcggtggtaaaaccattgaagtcgaatttcgcgatctcattatcgacgacatcaacggcaactatggtcgtaaagaggtgccatatgaactcacttgtgactcgacgacccgtcatccagattgggagatgaccctcacctggactggtacacaaaccagttttaatgatgcagcaattgaaactgatgtacccggttttggtatcgagcttcagcacgatggtcagcgttttaaactcaatactccgcttgctatcaacgccactgattttacgcaaaagccgaagctggaggcgtaccgtaaatcctgtgcgctggtggtggatggccaatatctggcagaggtgcgctttcccacggtcagtcgtcaggatttgaacgttgcaggccagtccgctcgtgtacccgtagtctttaagctgaaagattgcaaagggccggcgggatacaacgtaaaagtcacgctcacgggggtagaagacagcgaacaacccggttttctggcactggatacgtcatcaaccgctcagggagtgggaattggcatggaaaaaaccgacggaatgcagaatttaaccctgctacgtgatatcgaattgcgggtgtatgacactgatgatgaagagaatcatcaggagtttacctgccagccagatatgacttgtgatgataaaggctgccagctctgcccgcgcggcgtattacccgttggtgatcgcggcacgaccctgaagtggcggctggctgactctcatacgcagtacggtatttcgctggcgaccctgccgcaggggcgtcatcttagccatgatcaacaacaactggtggataccctggttgaacaactcaccgccnacgtggcgctggatcgccatcaggaacgtcagcaacagttgatcgtgatggaagagcgtgccaccattgcgcgcgaactgcatgattctattgcccaatctctctcttgcatgaagatgcaggtgagttgttcacagatgcagggcgatgcgctgccagaaagcagccgcgaactgttaagtcagatccgtaacgaactgaatgcatcctgggcgcagttgcgtgaattgctcaccacattccgcttgcagctcaccgagcctggattacgtccggcgctggaggcgagttgcgaagagtacagcgccaaatttggcttcccggtgaagctggattatcaattgccgcctcgcctggtgccttcgcatcaggcaatccacttgttgcaaattgcccgtgaggcattaagtaacgccctcaaacattcgcaagcgagtgaagtcgtggtgacggtggcgcaaaacgataatcaggtcaaactgaccgtccaggataacggctgcggcgtgcctgaaaatgccatccgcagcaatcactacggcatgataataatgcgcgatcgtgcgcaaagtttacgaggcgattgccgcgtccgccgtcgtgaatcaggtggcaccgaagtggtggtcacctttattcccgaaaaaactttcacagacgtccaaggagatacccatgagtaatcaggaaccggctactatcctgctgattgacgatcacccgatgctgcgaactggcgtaaaacagcttatcagtatggcaccagatatcaccgtggctgccgaagcgagtaatggcgaacagggaattaaactggcggagtctctt

SEQ ID NO: 143525 - DNA, 1218 bp, Homo sapiens
atgctgaggatgactgaaccaatgtacttcttacatatatcgattgatgtctcatgtctccctaaaatgtataaaaccaagctgtgccctgaccaccttgcgcacatgtcatcaggacttcctgaagctgtgtcacggtcctgtactctgacctatcaagaggctttggctgccagtggaaaatgcagggcaccatgtggggaagaatgcagactccggagtcctgccagcaggacgtcaagtcagtatactgagacactggatttgcagcagagaaagatgtttgatcatgaggtcgcagaacaaagagatgggaaaagacctcaaatccatctccctgatgagtttggggctagggtctttaagggctttggagtgggccaaagtatggagattgttgattggttaaagagtacagggaactacaggcaaccatcaggtgatgttcaggcagttgttaatttctcaaataataagtggttgcagccagcactgggaaaggcagtctcccaactgatagaaacacctgaaactgctgatcagcagcttcccaataagatctcaggaattggaatgaagccacggaccctcgcggtgttacagttcttaaagatggtgtgtctggagtttgttccttcagatgctcagatgtgtccagagtttcttccttctggtgggttcgtggtctcactgacttcaggagtgaagctgcagactttcacagtgaatgttacagctcataaaggtagtgtggacccaaagcgagtgaagctgaagaccttggcagtgagtgttacagctcttaaggctgcgtgtctggagttgttccttcttcctggtgggttcgtggtctttgctggcttcaggagtgaagctgcagacctttgtgccgagggagccagctccggcctcggccagcccagagaaggtctcccacggtgcagcggcgggctgaagggctcctcaagtgcggccagaatgggcgccgaggccaagggggcaccgagagcgagccagggctgcgagggccgccatcacgctgtcacctctcacaggagcgatatgggagaggaggagggggaaagccaaaggtatttgagctgcccccagccatcctgtcccatcaacctcttgcaggaagatgccagcaaggtcattgtgtttgctgagagtggtatcaatccagatagtgtcctagatttgataatgctgcattga

SEQ ID NO: 143526 - DNA, 453 bp, Homo sapiens
atggtacagcctactacaaacctaggctatatgagcccactgaacctaggctacaaacctgcacagcatgttattgtacagaataacataggcaactgtaacacagtgcctattcaatatgaagatggtgaggatgatgacctttatgatgatccacttccatttaatgaatatgggttcatggtctcgctgacttcaggagtgacgccgcagaccttctcagtgagtgttacagctcttaaaggtggtgcgtccggagttgtttgttcctcctggtgggttcatggtctcgctgacttcaggaatgaagccgcagaccctcacggtgcaataaaaatatatttggaatgtaaatcttcaacactcagtctcaatgctcctaaattcttctatgattcatcacgtcataattatcgggtatggactcgctatttcctgcagcacactgtgtag

SEQ ID NO: 143527 - DNA, 1044 bp, Homo sapiens
atggctgcctgccctgggtccatcctgtctctcagtgggaacccctatggccaaggggttgagaaccaaaagacttacagccaattacgtgttctaggcaaacaggaacggacgtggacagacattcattaccctttaaaaattttaaatgggttcttggtctcgctgacttcaggagtgaagctgcagaccttcacggtgagtgttactgctcttaaaggtggtgcgaccagagttgtttgttcctcccagtgggttcgtggtctcgctgacttcaggaatgaggctgcagaccctcacaatctgttaggagcacaccagtcttctaggttccacagtgagagctgttccacctggctgcatctagttggccatcttgccctcactcagcttgggaattcttgtgtgaggttacgagtaatgccaggtgaaaagcctatacccacattcagctcccgagacgcgttcaacagttgtttgtgtaagcgatataccggaacacagcacaaccctggtaagtgtcgtcccaatagaggaccttcaggaaatgtccattttactgtttatcctcaaacatcacggtgttcaattttgcctgctcataaagccccgcagcagccgcctgctggtggatgtctctttgttcagaagtctgggtccaaactgctcccacttataaatgagaacatgctgtgcttgcaaactgttctgacctctggccatttttcacatggcagtttttatcctgttttcaggaataaagagggaaataagaatgcccttcttgcatctgttgttactcaagccacaggtgccagcagctacacagatatttctctgtttagccactggtttgcacagagaaagaggaaagggaagggagaaaagcattacctgtggtggggtggagaaggtgaggcactcagggaatccggagaaagacacacttgcagcaacattgaatcaaaagttcaggtggccacttgtcggtcacgaaggaatcttttccaacagatccatcagctctcaagtttccccttttaa

SEQ ID NO: 143528 - DNA, 952 bp, Homo sapiens
ggaccgagggccaaaagaatcttattgtggaagtgacttccaatgatgctgtgagattttatccctggaccattgataataaatactattcagcagacatcaatctatgtgtggtgccaaacaaatttcttgttactgcagagattgcagaatctgtccaagcatttgtggtttactttgacagcacacaaaaatcgggccttgatagtgtctcctcatggcttccactggcaaaagcatggttacctgaggtgatgatcttggtctgcgatagagtgtctgaagatggtataaaccgacaaaaagctcaagaatggtgcatcaaacatggctttgaattggtagaacttagtccagaggagttgcctgaggaggatgatgacttcccagaatctacaggagtaaagcgaattgtccaagccctgaatgccaatgtgtggtccaatgtagtgatgaagaatgataggaaccaaggctttagccttctcaactcattgactggaacaaaccatagcattgggtcagcagatccctgtcacccagagcaaccccatttgccagcagcagatagtactgaatccctctctgatcatcggggtggtgcatctaacacaacagatgcccaggttgatagcattgtggatcccatgttagatctggatattcaagaattagccagtcttaccactggaggaggagatgtggagaattttgaaaggctctttttcaaagttaaaggaaatgagagacaaggctgcgacgcttcctcatgagcaaagaaaagtgcatgcagaaaaggtggccaaagcattctggatggcaatcgggggagacagagatgaaattgaaggcctttcatctgatgaagagcactgaattattcatactagggtttgaccaacaaagatgctagctgtctctgagatacctctctactcagcccagtcatatt

SEQ ID NO: 143529 - DNA, 1776 bp, Homo sapiens
atggagttaagtgatgctgtgattgtggagggcttctactttgttgatccttctagccctaacagggagataagaggggagcgaaagatagggttgaatgtaaaaatcttgcaggatcctgaaaacatccaccacagagctgctgtaaatgcgaactatggaatcagtttgccatatattaatcagagaaaagcatgtgtaggggtgcagttgaggcagacaaagctgcttctgtacgtatcagcattccttgacaaaactcagtgcctgattgtgatgctatgggctgctggtttacagctgtctccggacaagaatggaggcccacccttgaattccaataagatgggcctgcatattccgcctgctataaaggtttcgaagttaatcaaagggtctaacatatccagcctcacggttctgccatcttctcattgcacagatccctatttcactcctataccagtcttacaagcagatgcccacaaagggattttaagtatgatagaacgagggctgattccaccaacagcaaggattacctttcagaatccacccattacacccagagcagctcctctgcatagttttgatgaagcacgtaagattccaactgtagctcagttcctaatgggccacagtacccagtctgtggcttgtgggttagggacccctgctatagaagactatgatagaacgatctatctagattgctacatcaataaaatagaatctagcacccttgcaattcaatttaacagacacaataagattcctcctagaaagaaaaaaggaggaaggaggatggagagaggggaagaaaaggagaggaaggagtaccttattatgccagaaggagcttctctaatgacgacaagggttagatcagacctcaggaaagctaaagggtgccaatctcacttaacactcaagggtctaccaaaaattgaagtgaaatattctatttttataaaaccggtcttctacttgacctttatcacggaagatgggtgtaccaaaaaaggtggtattcttaactacaacacaggaatgatcgtgtacaaaggaaatggggatcctgcagatgttgaggattataggaaccaaggctttagccttctcaactcattgactggaacaaaccatagcattgggtcagcagatccctgtcacccagagcaaccccatttgccagcagcagatagtactgaatccctctctgatcatcggggtggtgcatctaacacaacagatgcccaggttgatagcattgtggggctgttgcaaagatgcagtggaaccataatggaagattgggccagcaagatgtaccacaagggcctagagttgtcatcacagagtgattcagtagatggtcagatgagggcagtgatttcaactgatgactggggtcaaggtgtgtctggaattggttccttccagtgggttcttggtctcattgacttcaagaatgaagccgtgaaccctcgttgtgagtgtccggagtttcttccttctggtgggttcgtggtctcgctgacttcaggagtgaagctgcagaccttcgccgtgagtgttacagctcttaaaggtggtgtgtccggagttgtttgttcctcccagtgggttcttggtcttgctgacttcaggaatgaagctgcagaccctcacggaaaaggacaggtgcttgaggaagtgacctttactggcagaggaaaaggcacttgtgaaagcctgatctgcaaatgtgcttggcctgataaagatgagagatga

SEQ ID NO: 143530 - DNA, 1026 bp, Homo sapiens
atgagcgctgcaggaggccttctgcaggctggcgccctgcccctgggctcacctttcatgggactcgacggactggataatacctttacctggaaggaggatgttcgcatgtttaacccaaatcccgtacttttatttcagatcatcagaaaagcccttactgaggaaaaacgtgtctcaacaaaaacatcagctgcagatcttgtgacagaaacagatcaccttgtggaagatttaattatttctgagttgcgagagaggtttccttcacacagggaatggcagatggagagagcgttccagacagctctgtggttgctgcagccggaagtcgtcttcatcctgggggatatctttgatgaagggaagtggagcacccctgaggcctgggcggatgatgtggagcggtttcagaaaatgttcagacacccaagtcatgtacagctgaaggtagttgctggaaaccatgacattggcttccattatgactttgtgatggtcaacagcgtggcgctgaacggggatggctgtggcatctgctctgaaacagaagcagagctcattgaagtttctcacagactgaactgctcccgagagcattatcctctgtatcggagaagtgatgctaactgttctggggaagacgctgctcctgcagaggaaagggacatcccatttaaggagaactatgacgtgctttcacgggaggcatcacaaaagccgcgcctggttctcagtggccacacgcacagcgcctgcgaggtgcaccacgggggccgagtccccgagctcagcgtcccatctttcagttggaggaacagaaacaaccccagtttcatcatgggtagcatcacgcccacagactacaccctctccaagtgctacctcccacgtgaggatgtggttttgatcatctactgtggagtggtgggcttccttgtggtcctcacactcactcactttgggcttctagcctcaccttttctttctggtttgaacttgctcggaaagcgtaagacaagatga

SEQ ID NO: 143531 - DNA, 645 bp, Homo sapiens
  misc_feature (1)...(645): n = a,t,c or g
gggactcgacggactggataatacctttacctggaaggaggatgttcgcatgtttaacccaaatcccgtacttttatttcagatcatcagaaaagcccttactgaggaaaaacgtgtctcaacaaaaacatcagctgcagatcttgtgacagaaacagatcaccttgtggaagatttaattatttctgagttgcgagagaggtttccttcacacagggaatggcagatggagagagcgttccagacagctctgtggttgctgcagccggaagtcgtcttcatcctgggggatatctttgatgaagggaagtggagcacccctgaggcctgggcggatgatgtggagcggtttcagaaaatgttcagacacccaagtcatgtacagctgaaggtagttgctggaaaccatgacattggcttccattatgagatgaacacatacaaagtagaacgctttgagaaagtgttcagctctgaaagactgttttcttggaaaggcattaactttgtgatggtcaacagcgtggcgctgaacggcgatggctgtggcatctgctctgaaacagaagcagagctcattgaagtttctcacagactgaactgctcccgagagcangcacgtggctccagcccggtgtgacctgg

SEQ ID NO: 143532 - DNA, 975 bp, Homo sapiens
atggacggcctggaggctgcgctggctccctgcctgccatgccagttggctggttctgtcctttgctctgagggtgaatgtgtggacacggtgaaagcagctgttctcttctctgctcagtgtgcctcaaaaattgacatcaaatgcagttgtttttcaacatatttatgtgaaggaagtatttttggtgcctccaaagaccgagcacggttcacgcctctgctggccttcacaccgctgcagccacacagtgcagaagcctgctccctgctgcccacaagcatgaggcaggctgggttcttccactgcaggttcattgcagaagaggccgcggcttctggggccaagtgtgtgctcacccacagcccgacgtggatcatcgaccccatcgacggcacctgcaattttgtgcacagaagcactgaggtggacactgcgggttgtgaggttcaggagggggaatggcagatggagagagcgttccagacagctctgtggttgctgcagccggaagtcgtcttcatcctgggggatatctttgatgaagggaagtggagcacccctgagggaagtatttttggtgcctccaaagaccgagcacggttcacgcctctgctggccttcacaccgctgcagccacacagtgcagaagcctgctccctgctgcccacaagcatgaggcaggtaatagaaattgggggcacctgggcagagaaagcaatcagatatgctcttgtctcacgcaagcctcagagggatgacatcgagatctgtctgtactttgtccgtaaggaattttcttgtgggcaaattgtgagggagggattcggttttgccatgttgcccaggcagaacactgtcctgatatttgggcagcaggagggtgccctgcttcgagaaggaaaattaccagggacccgtgtgctctgtgaaatatgtaaggctctacacaaggaaggaaagcagttccactga

SEQ ID NO: 143533 - DNA, 429 bp, Homo sapiens
gtgttcaaggccaaaaaccgggagactcatgagatcgtggctctgaaacgggtgaggctggatgacgatgatgagggtgtgccgagttccgccctccgggagatctgcctactcaaggagctgaagcacaagaacatcgtcaggcttcatgacgtcctgcacagcgacaagaagctgactttggtttttgaattctgtgaccaggacctgaagaagtattttgacagttgcaatggtgacctcgatcctgttcttccttcccttcagaacttgaagtttctcccactgcctcctctccagtggtctcccaggtgccagacccaaaagcttttcctacagtgataccctttatttttacttccccttgactcatatgttttaacatgattttaacaaactgcacttattaagaaatgtgtttgccctgta

SEQ ID NO: 143534 - DNA, 441 bp, Homo sapiens
cgccgctgacgtgtacctctagagcggccgccgcgatgcacaaatacgagaaactggaaaagattggggaaggcacctacggaactgtgttcaaggccaaaaaccgggagactcatgagatcgtggctctgaaacgggtgaggctggatgacgatgatgagggtgtgccgagttccgccctccgggagatctgcctactcaaggagctgaagcacaagaacatcgtcaggtgtgcgggaggcgggtgctccttgccggtgtggccgcttgggggaggcgggggctgacactggacgtctgtcaggcggacctgcctggctgagcccttcttttgccctaggcttcatgacgtcctgcacagcgacaagaagctgactttggtttttgaattctgtgaccaggtgaaaggcggggtttggaggacagtagccttgggaaggt

SEQ ID NO: 143535 - DNA, 846 bp, Homo sapiens
atggtgaacagattaatggttgccagtagttttgaagggaacagggatgaagaagtaggagtggctataaaagggcaacaagagaaactggagaagattggggaaggcacctatgggacagtgttcaaggccaaaaactgggagactcatgagattgtggctctgaaatgggtgaggctggatgacaatgatgacggtgtgccgagttctgccctccgggagatctgcctactcaaggagctgaagcacaagaacatcgtcaggcttcatgacctcctgcacagcgacaagaagctgactttggttttcaaattctgtcaccagcacctgaaaaagtattttgacagttgcaatgatgtcttctttggggccaagctgtactccacgtccattgacttgtggtcagctggctgcatctttgcagagctggccaatgctggatggcctctttttccaggcaatgacgtcgatgaccagttgaagaggatcttctggctgctagggatgctcaccaaggagcagtggccctccatgaccaagctgccagactataagctgtacccattgtacccggccacaacatccctggtgaacatcgtgcccaaactcagtgccacagggagggatctgctgcagaatcttctgaagtgtaacccctgccaatgtatctcagcagaagaggccctgcagtacccctacttttccgacttctgtccgccctgggcccagggacccccagccacaagctggggcctggcctatttaagccttaggaggggggggacagtgggggtgcccattatagacaaccttggacccaggggtacggaaagttttactttttaa

SEQ ID NO: 143536 - DNA, 1077 bp, Homo sapiens
atgcagaaatacgagaaactggaaaagattggggaaggcacctacggaactgtgttcaaggccaaaaaccgggagactcatgagatcgtggctctgaaacgggtgaggctggatgacgatgatgagggtgtgccgagttccgccctccgggagatctgcctactcaaggagctgaagcacaagaacatcgtcaggcttcatgacgtcctgcacagcgacaagaagctgactttggtttttgaattctgtgaccaggacctgaagaagtattttgacagttgcaatggtgacctcgatcctgagattgtaaagctactaaaagggctgggattctgtcatagccgcaatgtgctacacagggacctgaagccccagaacctgctaataaacagggtacttcttgggaagaagaatggggagctgaaattggctgattttggcctggctcgagcctttgggattcccgtccgctgttactcagctgagtcctctaagtgggaggtccctttcggggggggtctcctccaggtggtcacactgtggtaccgcccaccggatgtcctctttggggccaagctgtactccacgtccatcgacatgtggtcagccggctgcatctttgcagtgatccttgactccgtggacacactgctggggacgcccaccgaggagcagtggccctctatgaccaagctgccagactataagccctatccgatgtacccggccacaacatccctggtgaacgtcgtgcccaaactcaatgccacagggagggatctgctgcagaaccttctgaagtgtaaccctgtccagcgtatctcagcagaagaggccctgcagcacccctacttctccgacttctgtccgccctaggccccgggacccccggcctccaggctggggcctggcctatttaagccccctcttgagaggggtgagacagtgggggtgcctggtgcgctgtgctccagcagtgctgggcccagccggggtggggtgcctgagcccgaatttctcactccctttgtggactttatttaatttcataaattggctcctttcccacaatgtatt

SEQ ID NO: 143537 - DNA, 948 bp, Homo sapiens
ggcacgagttaaaaccgagggcccgcaggggtccccgcggccgccgcgatgcagaaatacgagaaactggaaaagattggggaaggcacctacggaactgtgttcaaggccaaaaaccgggagactcatgagatcgtggctctgaaacgggtgaggctggatgacgatgatgagggtgtgccgaagttccgccctccgggagatctgcctactcaaggagctgaagcacaagaacatcgtcaggcttcatgacgtcctgcacagcgacaagaagctgactttggtttttgaattctgtgaccaggacctgaagaagtattttgacagttgcaatggtgacctcgatcctgagattcgtaaagtcattcctcttccagctactaaaagggctggggattctgtcatagccgcaatgtgctacacagggacctggaagccccagcaacctggctaataaacagggaatgggggagctggaaattgggtggattttgggcctggggttcgagccttttggggatttcccgttccgctgttactcagctgaggttggtcacacttgtggtaaccgctcaccggatgtacatctttggggccaagctgtactccacgtccatcgacatgtggtcagccggctgcatctttgcagagctggccaatgctgggcggcctctttttcccggcaatgatgtcgatgaccagttgaagaggatcttccgactgctggggacgcccaccgaggagcagaggccctctatgaccaagctgccagactataagccctatccgatgtacccggccacaacatccctggtgaacgtcgtgcccaaactcaatgccacagggagggatctgctgcagaaccttctgaagtgtaaccctgtccagcgtatctcagcagaagaggccctgcagcacccctacttctccgacttctgtccgccctag

SEQ ID NO: 143538 - DNA, 478 bp, Homo sapiens; identical to SEQ ID NO: 127116
  misc_feature (1)...(478): n = a,t,c or g

SEQ ID NO: 143539 - DNA, 1226 bp, Homo sapiens; identical to SEQ ID NO: 141484

SEQ ID NO: 143540 - DNA, 867 bp, Homo sapiens; identical to SEQ ID NO: 141728

SEQ ID NO: 143541 - DNA, 1416 bp, Homo sapiens
atggtcaaccccgtgttctttgacatcaccgtggatggtgagcccctgggccgcatctccttcgagctgtttgcagacaaggttccaaagacaacagaaaactttcgtgctctgagcactggacaaaaaggatttggttgtaagagttcctgctttcacagaattattccagggtttatgtatcaggtggtgacttcacacgccataatggcactggtggcaagtccatccaatggggagaaatttgatgatgagaacttcatcctaaagcatacaggtcctggcaccttgtccatggcaattgctggacccaacacaaaaggttcccagcttttcatctacactgccaagagtgagtggttggatggcaagcatgtggtctttggcaagttgagtcgtggggacagcttgaaggagccaacctcaattgcagagagcagccgtcaccccagctaccgctcagagcccagcttggaaccagagagcttccgttctcctacctttggcaaaagttttcacttcgatccactatccagtggctcacgctcctccagcctcaagtcagcccagggcacaggctttgagctgggccagttgcaatccattcgttcagagggcaccacctccacctcctataagagcctggccaaccagacacgcaatggaagcctatcttatgacagcttgctcacaccttcagacagccctgattttgagtcagtgcaggcagggcctgagccagacccacctttaggctatacctctcccttcctgtcagccaggctggcccagcaacgggaagctgagaggcacccacgtttggtgccaactggcccaacacaccgagagccctcaccagtccgttacgacaatctgtcgcgccacattgtggcctctctccaggaacgagagaagttgctgcgccagtcacccccactcccgggccgtgaggaagaaccaggcttgggggactcaggcattcagtcaacaccaggctcgggccatgcccctcgtactagttcctcctcagatgattcaaagagatcacctttgggcaagactccactgggacgcccagctgtcccccgttttggcaagccagatgggctaaggggccggggagtagggtcccctgaaccaggcccaacagccccatacctgggccgatcgatgtcttacagcagccaaaaagcccaacctggtgtctctgagacagaagaagtggccttgcagccattactgacacccaaagatgaagtacagctgaagaccacctacagcaaatccaacgggcagcccaagagcttaggctcagcctcccctggcccaggccagccacctctcagtagccccacgaggggaggagtcaagaaggtgtcaggggttggtggtaccacctatgagatttcggtgtga

SEQ ID NO: 143542 - DNA, 3129 bp, Homo sapiens; identical to SEQ ID NO: 141354

SEQ ID NO: 143543 - DNA, 980 bp, Homo sapiens
ggcacgagggacgccaccgccgaggaaaaccgtgtactattagccatggtcaaccccaccgtgttcttcgacattgccgtcgacggcgagcccttgggccgcgtctcctttgaggtaaggggcctggataccaagaagtgactgctcatctaatccataaagctatgttaacagattggaggtagtagcattttcattacaagtgactaaaagaacagctgtttacccctgatcgtgcagcagtgcttgctgttccttagaattttgccttctgtttgcagacaaggtccccaaagacagcagaaaattttccgtgcctctgagccactggagagaaaggattttggttatagagggttccctgctttcacagattatttcccagggttttatgtgtcaaggggtggtgacttcacaccgccataaatggcactgggtggcaagtccatctaatggggaagaaatttgaaagatgacgaacttcatccctaaagcataccgggtccttggcatcttggtccatgggccaaatgcttgggacccaaacacaaaatgggttcccaagttttttcaatcttgcactgcccaagactgcagtggttggatggcaagcaatgtggtgtttggcaaaagttgaaagaaggcatgaataatttgtgggaggccaatggaagcgcctttggggtccaggaattggcaagaccaggcaagaagaatcaccaattgtgcctggtggacaactccgaataaagtttgaccttgtgttttatcttaaccaccaagatcattcccttctgtagcttcaaggagagcacccctccaccccatttgctcgcaagtatcctagaatctttgtgctctcgcttgcagttcccttttgggttccatgttttccttgttccctgccatgcctaggtggattaaaaagttcccctttatgattattgaaataaaaactaaataacaaaaaaaaaaaaaaa

SEQ ID NO: 143544 - DNA, 704 bp, Homo sapiens
gccgccctcctcgccctcggcccgcggaacccgtggaccctgtggacgccgttgaccccgaactatcccgaccgccagccctggaccgacaaacacccagatctgttgacctgcggccgctgcctgcagaccttcccgttggaggccatcactgccttcatggaccacaagaagctgggctgtcagctcttcagaggccccagccgcggccagggctcagaacgagaggagctgaaggccttgagctgcctgcgctgtggcaaacagttcacagtggcctggaagctgctgcgtcacgcccagtgggaccacggactgtccatctaccagacagaatcagaggccccggaggccccgctcctgggcctggccgaggtggctgcagccgtgtcggcagtggtggggccagcagctgaggccaagagcccccgtgcaagtggcagcggcctcacccggcggagccccacctgtcctgtgtgcaagaagaccctcagctccttcagcaacctcaaagtgcacatgcgctcacacacaggcgagcggccctatgcttgcgaccagtgtccctacgcctgcgcccagagcagcaagctcaaccgccacaagaagacccaccggcaggtgccgccccagagccccctcatggccgacaccagccaggagcaggcctctgcagcccctccggagccggctgtccatgctgc

SEQ ID NO: 143545 - DNA, 1741 bp, Homo sapiens
tcgcggcgggtcgccgcagtcactcacctgagcgcgcacggtccgcgcgtcctccgctcgtgcgtcctccgcccgcccgcctgcctgcctgcccgcccgctcgctcgcccggcccgcgactcatgtcccgccgcaaggccggcagcgcgccccgccgagtagagcccgcgcccgccgccaacccagacgacgagatggaaatgcaggacctcgtcatcgaactcaagcccgagccagacgcgcagccccaacaggccccaaggctggggcccttctccccgaaggaggtgtcctcggcggggcggttcggcggcgaaccccaccactcccctggccccatgcccgccggggccgccctcctcgccctcggcccgcggaacccgtggaccctgtggacgccgttgaccccgaactatcccgaccgccagccctggaccgacaaacacccagatctgttgacctgcggccgctgcctgcagaccttcccgttggaggccatcactgccttcatggaccacaagaagctgggctgtcagctcttcagaggccccagccgcggccagggctcaggagtgcctatcccacagaaggtgtccagctggcagctgtccgcactaacactctgcctctttttcttaccagaacgagaggagctgaaggccttgagctgcctgcgctgtggcaaacagttcacagtggcctggaagctgctgcgtcacgcccagtgggaccacggactgtccatctaccagacagaatcagaggccccggaggccccgctcctgggcctggccgaggtggctgcagccgtgtcggcagtggtggggccagcagctgaggccaagagcccccgtgcaagtggcagcggcctcacccggcggagccccacctgtcctgtgtgcaagaagaccctcagctccttcagcaacctcaaagtgcacatgcgctcacacacaggcgagcggccctatgcttgcgaccagtgtccctacgcctgcgcccagagcagcaagctcaaccgccacaagaagacccaccggcaggtgccgccccagagccccctcatggccgacaccagccaggagcaggcctctgcagcccctccggagccggctgtccatgctgctgcccccaccagcacccttccatgcagcggtggtgagggggctggagccgccgccacagcaggtgtccaggaacccggggctcctggcagtggggctcaagccggccctggtggagacacttggggagccatcaccacggaacaaagaactgaccctgcaaacagccagaaggcatcacccaaaaagatgcccaagtcagggggcaagagccgcgggcccgggggcagctgtgagttctgcgggaagcattttaccaacagcagcaacctgacggtgcaccggcgctcacacaccggggagcgcccctacacctgtgagttctgcaactacgcctgcgcccagagcagtaagctcaaccgccaccagccgcatgcacggcatgacgcctggcagcacccgcttcgagtgcccctactgccatgtgcccttcggcctgcgagccaccctggacaaacaactgcggcagaagcaccctgagagcggccggcgaggcctgagcccaggaaagcccccctcactgtccctggtaccgctgccaacacccattgacctcctcgtttttgcccgccttctccaagtaaattttcccttttatttaaaaaaaaaaaaaaaaa

SEQ ID NO: 143546 - DNA, 456 bp, Homo sapiens
gtgaagacctggttccagaaccagagaatgaaatctaagaggtggcagaaaaacaactggctgaagaatagcaatggtgtgacgcagggatgcctggtgaacccgactgggaaccttccaatgtggagcaaccagacctggaacaattcaacctggagcaaccagacccagaacatccagtcctggagcaaccactcctggaacactcagacctggtgcacccaatcctggaacaatcaggcctggaacagtcccttctataactgtggagaggaatctctgcagtcctgcatgcagttccagccaaattctcctgccagtgacttggaggctgccttggaagctgctggggaaggccttaatgtaatacagcagaccactaggtattttaatactccacaaaccatggatttattcctaaactactccatgaacatgcaacctgaagacgtgtga

SEQ ID NO: 143547 - DNA, 352 bp, Homo sapiens
  misc_feature (1)...(352): n = a,t,c or g
ntccaggctgcctgtgtcggggcagggccgcgtcttcaaagctggctggctctggccctgtcatgaaagccctgtgatgacatggggcgtagctggacaattcaggatcacctctccagtcttgaaannnnnnnnnnnnnnnnnnnnnnnnnnnnnnnnnnnnnnnnnnnnnnnnnnnnnnnnnnnnnnnnnnnnnnnnnnnnnnnnnnnnnnnnnnnnnnnnnnnnnnnnnnnnnnnnnnnnnnnnnnnnnnnnnnnnnnnnnnnnnnnnnnnnnnnnnnnnnnnnnnnnnnnnnnnnnnnnnnnnnnnnnnnnnnnnnnnnnnnnnnnnnnnnnnnnnnnnngtgccgaa

SEQ ID NO: 143548 - DNA, 543 bp, Homo sapiens
atgaatccaacctatgcccaaagcctgccttgttctgaagcatccaactgtaaagaatcttcacctacgccggtgacttgtgggcctgaagaaaactatccatccctgcaaatgtcttctgctgagatgcctcactcagagactgtctctcctcttccttccgccatggatctgcttatccaggacagccctgattcttctaccagtcctaaaggcaaaaaacccacttctgcagagaagagcaccacaaaaaaggaagacaaggtcctggtcaagaaacagaagaccagaactgtgttccgttccacccagctgtgtgtactcaatgatagatttcacggacagaaatacctcagcctccagcagatgcaagaactttccaacatcctgaaccttagctacaaacagcctccactcttcctaccacaagggatgcctggtgaacatgactggaaaccttccaatgtggagcaaccagacctggagcaattcaacctggagcaaccacacccggaacatccattcctggagcaaccactcctg

SEQ ID NO: 143549 - DNA, 1357 bp, Homo sapiens
  misc_feature (1)...(1357): n = a,t,c or g
ttattatgcaggcaactcactttatcccaatttcttgatacttttccttctggaggtcctatttctctaacatcttccagaaaagtcttaaagctgccttaaccttttttccagtccacctcttaaattttttcctcctcttcctctatactaacatgagtgtggatccagcttgtccccaaagcttgccttgctttgaagcatccgactgtaaagaatcttcacctatgcctgtgatttgtgggcctgaagaaaactatccatccttgcaaatgtcttctgctgagatgcctcacacggagactgtctctcctcttccctcctccatggatctgcttattcaggacagccctgattcttccaccagtcccaaaggcaaacaacccacttctgcagagaatagtgtcgcaaaaaaggaagacaaggtcccggtcaagaaacagaagaccagaactgtgttctcttccacccagctgtgtgtactcaatgatagatttcagagacagaaatacctcagcctccagcagatgcaagaactctccaacatcctgaacctcagctacaaacaggtgaagacctggttccagaaccagagaatgaaatctaagaggtggcagaaaaacaactggccgaagaatagcaatggtgtgacgcagaaggcctcagcacctacctaccccagcctttactcttcctaccaccagggatgcctggtgaacccgactgggaaccttccaatgtggagcaaccagacctggaacaattcaacctggagcaaccagacccagaacatccagtcctggagcaaccactcctggaacactcagacctggtgcacccaatcctggaacaatcaggcctggaacagtcccttctataactgtggagaggaatctctgcagtcctgcatgcagttccagccaaattctcctgccagtgacttggaggctgccttggaagctgctggggaaggccttaatgtaatacagcagaccactaggtattttagtactccacaaaccatggatttattcctaaactactccgtctcaaaaaaaaaaaatttcaagactggaagaggtgatccttgaattgtccagctacgccncccatgtcatcacagggctttcatgacagggccagagccagccagctttgaagacgcggccctgccccgacacaggcagcctggagaagctgggcaggacaagtaggacatccctggagcctccagaagggactggcctctgcccacaccttgacttcagtatttctgacctcctaaactctaataaagtcatgcttacagccagaaaaaaaaaaaaaaaaaaaaaaaaaaaaaaagtcgtatcgatgt

SEQ ID NO: 143550 - DNA, 439 bp, Homo sapiens; identical to SEQ ID NO: 132756
  misc_feature (1)...(439): n = a,t,c or g

SEQ ID NO: 143551 - DNA, 302 bp, Homo sapiens
gtgtcagaccacgcagggacgcctgccttggtccttcacccttagcggcaagtcccgcttttctgagggaggggcaagtacccctcaaccccttctccttcacccttagcggagcttgctacaagtgcccgaaatctgaccaccaggccgaggaatgcctgcagcccaggattcctcccaagccgtgtcccatctgtgcgggaccccactggaaatcggactgttcaactcacctggcagccactcccagagcccctggaactctggcccaaggctctctgactgactccttctctgcttag

SEQ ID NO: 143552 - DNA, 663 bp, Homo sapiens; identical to SEQ ID NO: 115467

SEQ ID NO: 143553 - DNA, 1047 bp, Homo sapiens
atgactcggaccacaagggtagacttggaggtggtgaaagtggtcagattaaggatgcacttgaaaatggagttgtcaggacctgctgatggctatggcatggctgtgaaggaaagtgaagaatcaggatgcctcccagaaacctcaaggcagttgtatatgtcgtcagtaggtctatgggcctggacaaggcattctggtgtagtgaaagtcaacgtccctggagtcattcaaactgagttggactctcaagtcttcactttccagctcagggatattggccgcttatccaccttcccaagctcagtaaatgataattccactctaggagttttccagctcaaaaacctcactgtcagccttgactccttccttcacacccatgccatgccaactgtagatgcagccagctctgtggatatctgggaaggaggcttccaggtggagaatagcaagggacgcctctctgattatacactcacgtttcaagggtgtcagaccacacgcagggacgcctgccttggtccttcacccttagcggcaagtcccgcttttctggggaaggggcaaaccatcacggacgccaagctttgggttactctcacagtggaaggtaagcccgtccccttcttaatcaatatggaggctacccactccacattaccttcttttcaagggcctgtttcccttgcctccataactgttgtgggtattgacggccaggcttctaaacctcttaaaactccccaactctggttctatattcagctctgccatgaagaagctgcgttcctacagaaactgagaaactgcttctcctgcagccctgtgcatgggagtgtgtcaggggaaagggaccggatacggcagtgtaccgagccctacgatgacattttcagccaagaagaagaagaatgcttcatcaaatctcccatcagcccaagactagattgtaccaagattttgcaatatgaacataatgttctctactgtccaggatctaatccttttccatcggggaacacatttgcaaacaatgactcctaa

SEQ ID NO: 143554 - DNA, 833 bp, Homo sapiens
cccgcctgcacccaggtgaaataaacaaccatgttgctcatacagagcctgtttggtggtctcttcacatggacgcgtatgaaatttggtgccgtggctcggatcggaggacatcccttgggagatcaatcccccttcctcctgctctttgctccctgagaaggatccacctacgacctcaggtcctcagatcgaccagcccaagaaacatctcaccgatttcaaatccgggacacctctctgattatacacccacgtttcaagggtgtcagaccatgcagggacgcctgccttggtccttcacccttagcggcaagtctcgcttttctggggaaggggcaaccacatctccggcacacaagaacttccaaacacctgaaccgcagtggccaggcattcctccagaacctcctcccacaggagcttgctacacgtgccggaaatctggccactgggccaaggaatgcccgcaggccaggattcctcctaagccgcatcccatctgtgtgggaccccactgaaaatcggactgttcaactcacctggcagccactcccagagcccctggaactctggctcaaggttctctgactgactccttcttgacttaccggctgaagactgatgctgcctgatcgcctcagaagccccgtagaccatcacggatgccgagctttaggtaactctcacggtggagggtaagtccgtccccttcttaatcaatacggaggctacccactccacattaccttcttttcaagggcctgtttcccttgcctccataactgttgtaggtattgacggccaggcttctaaacctcttaaaaacgaaa

SEQ ID NO: 143555 - DNA, 1201 bp, Homo sapiens
ccaggtgagtgataacaggctttaatctttataaagcatgctgcaggacgggatattggcgttgagtggggtaagggtgattaggttttaatgagatggtaaggggtgcatgatcggtcaccaaggagggagtagaggtatcttatacttgtgggttaaggtcgggggatacaagaggaggacgcaaaggaggctttggattgggaagaagggcggcaatgagatatagctgtagtccaggaatagtcagggaagcagataatttagttaaagtgtcctcagcctaataagggaacctggcacgatggggataactaaaaaggagtgcttaaaacgacgtattgtctaatgttggcaccagacgttggggagttttaagaggtttagaaagcctggcccgtcaatacccacaacaggttatggaggcaagggaaacaggccctttgaaaaaaaggtaatgtggagtgggtagcctccgtattgattaagaagggaaagggcttaccttccactgtcgagagttacccatagctcggcgtccgtgaatggtctagggggcttccgaggcgatcgtgcagtgtcagtcttcaggctgctaagccaagaagatctgggaaggagtcagtcagagagccttgggccatagttccaggggctctgggagtggctgccaggtgagttgaacagtccgattttcagtggggtcccacacagatgggacgcggcttaagaggaatcccgggctgccggcattccttgtgccagtggccagatttccagcacatgtagcaagctccttccagaaaagcgggaaaggggttgggtcgtggaaataaggggttggggtgcagagataagaggtcggggcatggaaataagggattggggcacagagatataagaggttggggtgcagaaataagggattgggccacagagataagaggtcggggcgtggaaataagggactggggcacagagatacgaggttggggtacttgctcctctagaaaagcggacttgccactcagggtgaaggagaaggggttgggtgtttcttgccccccagaaaggcggagaaggggtagagacacagagagaaggggttggggtacttgccccttccccagaaaagcgggacttgccgctaagggtgaaggaccaaggcaggcgtccctgcgtggtctgacacctctgaaac

SEQ ID NO: 143556 - DNA, 7938 bp, Homo sapiens
atgtcaaataaaacgaaggcccttgccccaagtgaagtcatcagcaaatatctctttgctttccgggggactgtgttctctcacaacatcttttggaattatcacttcatactgaaacaagggtttgatcttttcatgagatgtatggtgatgaaattaaggccaggggctctggggacagaagagaaggctggcgccactcgtatgccctggagaaacagtgagatgaagagcacagcctctagagccagagtgtctggatctaaaattggctctgccaacaagcattatgtccggaattggtgggttcttggtctcgctgacttcaagagtgaagccgcggagcctcgcggagtgaagctgcagaccttcgcggtgagtgttacagctcttaaaagcggcgcgtctggagttgttctttccttccggtgggttcgtggtctcactggcctcaggagtgaagctgcagaccttcatggagtgaagctgcagaccttcacagtgagtgttacagctcataaaggcggcgcggacccaaaggcgagtaacagcaagatggctgccacgggacctagaaaggggagaagccatgttgcccaactccagagcccgtccagagtctctccatggcctggccctgagagacaaggctgtgaggctgcccacctggagcctaatgccagcttcaagaactcccagtgggcaccacccttaccaggccgcacacagcttccgccctcaggaagccagggacagcgccaggcgggacgctttgcgcagctgcaggcctcccccgccgcattcggccttcaagcccgcacatgctccctggggcccctgcgggattacgaggggaaaatggattctacatctttcttaccaacatttttagatgtggatctgacaatatcacatattaaatgtcttcccaaggatattctggtgaaatttcaaggcataaagagtaatgaatgtgagtttgactaccatgtattgcagagagaaatacaacatactccaaaagtgaaaaataatgtggaaattgatgaattttgtttggtggaagaaagagtatctggagaatggcagagaggaagagtcatggaaaagaaaaatgaactctatacagtgctcctcatagatcgcggagaagaactaagagttgctggtccacagattgcttcagcctgtggcaatttatttgagtaccgccacgggttgtatttggtatttttgcgaatatactaccagttggggaaaaatgtgccaaaaattatatctcaggctctcgagttacaattaggaagacttgttgatggagattcatttcgtcttattgtggaaatgttagaagaattccctcaacaaatgccagatttattacaacataaaaggcctgaattgtcattaggtaataaagatacttcacttgatattcagcatgttctggataagttgcagccatctttgtcagtaggaagtactgaaagtgtaaaggtatcatctgcattgagcccaagtaaattttattgtcagttaattaaatggactccagagctagaaaacttgacagcacatatgactttgcattatgataccgtctgtcaagaaactagtcccacgtgtgataattttggactgctttgtgttgccagaaggcgaaatggacagtggcatagaggaattcttcagcagctcttgcccccaaatcaagtaaaaatttggtttatggattatggcagtagcgaggctataccctcaatttatgtaaagaaacttaaacaggattttattttagtaccattattttcatttccatgttctctgacatgtttgcacagtccagatagagatgcaagaatatttcaactgagtatatttaaacaggccttattaggacaagtggtatatgcacacattgattggttcaataaggatgagtgtttgtattatgtgacattacaaactcaagagtctacagttaattctaagtgtctactgaagactgtaggcacacaagtactttgtccgatgtctgattcaaaaatctccaatatcttgagtgagacaagtgtgtctgatgtaaacagctttgcagttgagagttttatgggaaatattgaatggtcaatagactctctaaataaaaaaggcattttaaaagtaggttttcccattaaaacagtacaaatggagatagaggctgcctacatagcttttatagcatatgtattaaacccatcaaatttctgggtacgcactaatgaccatcggaatgaatttcaagaaataatgaaaaacataaacaaattttatgatttgtgtgaaaacgatgaaatgattctaagaaaacctgaacctggattattttgttgtgctagatatagcaaggacagacgtttttacagagctgtcatcactgaaattaatggttataagattaatgtttattttttggattatggtaatactgattccataccattttttgatgtaaaaattttgcttccagaattttgtgagttgcctgccttagcgatgtgctgttcacttgcacatatatttcctgttgaagatttatggactaaggctgcaattgattattttaaaaaattagttttgaacaaagcaattttgcttcaggttatagcaaaaaaagatgacaagtacactgtaaatattcaaagtgttgaagcctcagaaaatattgatgttatctctcttatgttacaagctggatatgcagaatattttcaagtagaactagaatattttccaaaatctgtaagtgaatattcaatgctaaattcagaatctaaaaacaaagttaatattaaaaaagtcatatctgcccttcttgaaggacctaaatctaaaaagtaccattcaaataacctggtggaaaataacttgtctttgccaaagtccctagctgttaatatctcagaatttaaaaatcctttcaccttgtctgtgggacctgagtcatcctggccttataaagaatatatttttagaccaggaacagttcttgaagttaaatgttcctgttattatggcccaggtgacttttcatgccagctccaatgtaagtcagaagacctaaaattactaatggagcaaattcagaattactatagtattcattctgatccttatgagattgggcagactgcttgtgttgctaagtattctgggaagtggtgtagagctgctgttttgactcaagtatcaaaagaagttgacatagtgtttgttgattatggttaccaaaaaagggttttaattgaagatctttgtgcaattaacccacgttttctcttgttagaaagccaagccttcagatgttgtcttaaccattttattgagcctgttagttgtaaattattcagttggacaagaaaagcattcagagacttgtggaattttatctcttcatctagagggttattgacttgtatcatctatgccttagttattatacatccaaaccatttatataacttagtggatttacagtcctcatttactagtgcaaaagaatttcttatgaatcgtggctctgctcagtatatcacattatcagagacattcccatctttatttagtctttacagttactgttattcttcctttaatatacaaattggaagtgaagaagaagtatatatatctcacatatatagtccccaaaagttttattgccagcttggcagaaataataaagatctagagatgatagaaacaaaaatcacagagagtgttaacctccaaaattttccaaaatatgattctaataaaatgagagtgtgcatatctaagtatgtagaggatggtctctcatacagagctttagcaataccaacagattcatcatctgagtttcaagtctattttgtagactttggaaataagcaattagtaggagaaaatatgttgagggccatttcagctcagtttccagagttgttgtttacacctatgcaagctattaagtgttttttgtcagatcttagggatgtagatattccagcagaaatcagtagttggtttaaagacaatttcttgggaagatcattaaaggcgataatattgtcccaggagtcagatggacagcttggtatagaattgtatgatggatctcaatatataaatgagaaaattaaagtgttgcttcatgcttatggaaaaagacattgtgaccaagcatgctgcatggaaaagagtaataaaataaatgagaataagagatttactacttctttgaaaggcaaaacaggaaacaactatcgccataatgtgataaataaacctagtccagtaacatattccgaaagaaaaatagaccaattgatgcatcccaaaaatatacatgccaggtttttgaagccatcagtttgttataaaatggaacctgtgtcaaaaaacaaaatgaagacttctttgaatgatgggcttaaaggtataaaaattgtccctggagctgcacatattcttgagaacaggcgtgtgggccaaaaatcagtaaaggttgtatcacagtcttttatcagagcattaaatcaaacaacctcacaaaacccatatgaccttattaggccacagatcaaagaccttcctcaaccgcaaatttatttgaatgccaaagttaaagggtatgtatctaatatcagtaatccagcgaatttccatattcagcttgctgagaatgaaagtgtaattatcagacttgctgatgctctaaatgcaacagcaaggagattgagagagagaaaatcagttaaacctctagtgggagatcttgtagttgcagaatattctggtgacaatgccatttacagggcagttattaagaaaattttgccaggaaattcttttgaagtagaatttattgactatggtaactctgcaatagtaaacacatctaaaatttacgaacttcagagggaatttttaactgttcctcagctaggaatccatgcttttcttagtggagtaaaatggaatgagcctgatgaaatatgggatgacaaaactgtggattattttacttcgaaagtacataacaaaacagtttattgtgaatttttgaaaaagcatgatcagaaatgggaagtaaatatgatttgtgatgaaaaatgtgtcattaatgaactactgaaatggaaagcatgttcaaaactgcagaagtcagcattgcagatgcctcaggttctctctcaaaaggtgaggccaggtgataatgaaatgaagaaaggaaaatcaaatgagtctgaaggttctatgaattcaaaccaacagctgtttaaaattcctttggaagaattcaaacttggacaacttgaaaaagctgaaatgcttaatgtttcaaaaagtggaagattttatgtgaagttatccaaaaataaaaaaattttatcagatttaatagtattaattacgaaagaagaaaaaaaatccccttttttatcaatggaaagtattgaaaaaggtttagaatgcttggcaaaatctaaaaataccttgaaatggcatcgatcaaaagtagaagaaaagtatgttgatgataaagtacttgtttttttagtagattgtggtatctatgaaatagtacctgtatgtaataccaagctgcttagtaatgaaataagaaacattcctagacaagctgtaccttgtaaatggatttggtttgaaaattctaagaacatatcatttgagtgcttatttgctgatttggaaataaatattcttttcctgaaatatttagatgctgtttgggaagtagaaattttggtagatgacctgttacttttggaatacttaaatttgaatacagttcctgttgaagaaaacaaacttagacttgcagaaattgtttacaacattgaatctaagactcctgtatcatcatgcacaataaaatcatttacttgggttcaattccaaaatgataggcagtattctggtattgcaactgctgtttctgatccatcagacttcagtattcagttagaagatttctttgacataatgaaatacctttttatgttgctttctgatctaccagagaccttacaaacattgcctcaggagttcataattcccggttctagttgtttgttcaaatataaatcggaagatcagtggaatagagtagaaatttctgaagtctcacctcagtctttatgtcttgtgttggttgactatggattttctttttatatacgttattcagaaattataaatcttaaagttgttcctgaggaacttttgaatttgccaaggctgagttatccatgtattttatatggtatcttacctgctaaaggaaaacattggagtgaagaagccaaaatcttttttcgagatttcctaagtaaaccagacttagtttttcagtttagggaatatcattctgaaacaaaactgaaagtagatgtcattcatgagaaaaacaatttggcagatatattagttgcatctggtctcgcaacttattctaaagattcacctcatcttgatgcaattactgctactgaatctgctaaaaatccaatataatgccacgcacgttgcacgtggaatcgccgtcgccggaggtatttattcgcgataagctcatggagcggcgtaaccgtcgcacaggaaggacagagaaagcgcggatctgggaagtgacggacagaacggtcaggacctggattggggaggcggttgccgccgctgctgctgacggtgtgacgttctctgttccggtcacaccacatacgttccgcttttcctatgcgatgcacatgctgtatgccggtataccgctgaaagttctgcaaagcctgatgggacataagtccatcagttcaacggaagtctacacgaaggtttttgcgctggatgtggctgcccggcaccgggtgcagtttgcgatgccggagtctgatgcggttgcgatgctgaaacaattatcctgatgacaagcggcgatatcccgatgtttgccgttggccggataaggcgtttacgccgcatccggcaaatgcccatactcattcaggctttggttcgttgttcggtgcaacaacaataaccggcatatcggcatcaattagcgccagcggaccgtgtttcagttcgccagcagctgcactgatcaccaatatcggcaaaggcgatcacaccacctttgtgaagccgaacattccggcaacgggtgaattcaaaggtgttggcttcctcgaagcgccgcgcggtatgctctctcactggatggttattaaagacggtatcatcagcaactaccaggcggttgttccatcaacctggaactctggtccgcgtaacttcaatgatgacgtcggtccttacgagcagtccctggtgggtacaccggttgccgatccgaataaaccgctggaagtgctgcgtaccattcactcctttgacccgtgcatggccttcttaggggtcggcaatattttgctgaccgatgaagccatcggtgtgcggattgtcgaagcgttagagcaacgatacattctgccggattatgttgagatcctcgatggcggcacggcgggaatggagctgcttggcgacatggcaaatcgcgatcatttgattattgcggatgccattgtctcgaaaaagaacgcgccgggaacgatgatgatcctgcgggatgaagaagttccggcgttgtttaccaacaaaatctctccgcatcagcttggcctggccgacgtcttgtcggccctgcgcttcaccggcgagtttccgaaaaagctgaccctggtcggcgtgatcccggaatcgctggagccacacatcggcttaacgccgacggttgaagcaatgattgaacctgcgcttgagcaggttctggctgcgctgcgtgaatctggcgtggaagccatcccacgggaggcgattcatgactga

SEQ ID NO: 143557 - DNA, 489 bp, Homo sapiens; identical to SEQ ID NO: 126844

SEQ ID NO: 143558 - DNA, 495 bp, Homo sapiens
atggtcaactccgtcgtcttttttgacatcaccgtcgacggcaagcccttgggccgcatctccatcaaactgtttgcagacaagattctaaagacagcggaaaactttcgtgctctgagcactggagagaaaggatttcgttataagggttcctgctttcacagaattattccagggtttatgtgtcagggtggtgacttcacacgccataatggcactggtgacaagtccatctatggggagaaatttgatgatgagaacctcatccgaaagcatacaggttctggcatcttgtccatggcaaatgctggacccaacacaaatggttcccagtttttcatctgtgctgccaagactgagtggttggatggcaagcatgtggcctttggcaaggtgaaagaacgtgtgaatattgtggaagccatggagcactttgggtacaggaatagcaagaccagcaagaagatcaccattgctgactgtggacaattctaa

SEQ ID NO: 143559 - DNA, 680 bp, Homo sapiens
ccggcgcgcccacgcgtgcgcgaggagaaggagaaagaaagaaatgcttggggtaaatgttttaactagtcattcttcccaggagcggatgaagctgacttttaaaaagaaggctgtgaactttgcagatgctgctgccgcccagggccccctgcttccagccatggtcaaccccaccatgtttttccacattgctgtcgatggcgagcccttgggctgtgtctccttcgaggtaaggggcctggaaagcaagaagtgactgctcatctaatccataaaactatgttaacagattggagctgtttgcagacaaggttccaaagacagcagaaaatttccatgctctgagcactggagaaaaaggatttggttataagggttcctgctttcacagaattattccagggtttatgtgtcagggtggtgacttcacacgccataatggcactggtggcaagaccagcaagaagatcaccattgctgactgtggacaactcgaataagtttgacttgtgttttatcttaaccaccagatcattccttctgtagctcaggagagcacccctccaccccatttgctcgcagtatcctagaatctttgtgctctcgctgcagttccctttgggttccatgttttccttgttccctcccatgcctagctggattgcagagctaagttt

SEQ ID NO: 143560 - DNA, 925 bp, Homo sapiens
aaaccgtgtactattagccatggtcaaccccaccgtgttcttcgacattgccgtcgacggcgagcccttgggccgcgtctcctttgaggtaaggggcctggataccaagaagtgactgctcatctaatccataaagctatgttaacagattggagctgtttgcagacaaggtttccaaagccagcagaaaactttcgtgcctctgaagcattgaagagaaaggatttgggttataaggggttccctgctttcacaggaattattccagggttttatgtgtcaaggggtggtgacttcacaccgccataaatggcacctggtggccaagtccatctaatggggaagaaatttgaaagatgacgaacttcatccctaaagcataccgggtcctgggcatcttgtcccatgggcaaatgcttggacccaaacacaaatgggttcccagtttttcatctgcactgcccaagactgcagtggttggatggcaaagcatgtggtggttttggcaaaagtgaaagaaaggcatgaaatattgtgggaggccatgggagcgcttttgggtcccaggaaatggcaagacccagcaagaagatcatcagcattgctgactgtggacaactcttaataagttttgacttgtgtttttatcttaaccaccaagatcattcccttctgtgctctcctctcagggagagcacccctctaccccatttgctcgcaggatcctaagaattttgtggctctcgcttgcagttcccttttgggttccatgttttccttgttccctcccatgcctaggtggattaaaaagttcccctttatgattattgaaataaaaactaaataacaacaacaataaaaagctagggaaagaaaataaagaatgaaaacaaaataaggcctctgcctctgcctctgcctctcc

SEQ ID NO: 143561 - DNA, 380 bp, Homo sapiens
ctctgctgcagcccgtgccgccgccgcctcctgggaagagaggaagcgggagaggagcccacgtcgcctgtcacccaatatctccagccgcgcagtcccgaagagtgtaagatgttcgcctgcgccaagctcgcctgcaccccctctctgatccgagctggatccagagttgcatacagaccaatttctgcatcagtgttatctcgaccagaggctagtaggactggagaggtgctgcaacagtaggagtggctggttctggtgctggtattggaacagtctttggcagccttatcattggttatgccagaaacccttcgctgaagcagcagctgttctcatacgctatcctgggatttgccttgtctgaagctatgggt

SEQ ID NO: 143562 - DNA, 385 bp, Homo sapiens
cccacgcgtgcgcactccttcgacctctgacgcagtccgtgccgtcgtcgcctcctgggaagagaggaagcgtgagaggagcccacgtcgcctgtcacccaatatctacagccgcgcagtcccgaagagtgtaagatgttggcctgcgccaagctcgcctgcaccccctctctgatccgagctggatccagagttgcatacacacccacttctgcatcagtgttatctcgaccagaggctagtaggactggagagggctctacggcttttaatggggcccagaatggtgcgcttcatctaatgacaaagggagcttcacaccagtgcgatcaggagagacattgatacttggtgcaaatttattggctgcagtgctgcaaccgaa

SEQ ID NO: 143563 - DNA, 472 bp, Homo sapiens; identical to SEQ ID NO: 127703

SEQ ID NO: 143564 - DNA, 427 bp, Homo sapiens
tcttttcgcgccgccacaatggtgcgcatgaatgtcctggcagatgctctcaagaggatcaacaatgccgaaaagagaggcaaacgccaggtgcttattaggccgtgctccaaagtcatcgtccggtttctcactgtgatgatgaagcatggttacattggcgaatttgaaatcattgatgaccacagagctgggaaaattgttgtgaacctcacaggcaggctaaacaagtgtggggtgatcagccccagatttgacgtgcaactcaaagacctggaaaaatggcagaataatctgcttccatcccgccagtttggtttcattgtactgacaacctcagctggcatcatggaccatgaagaagcaagacgaaaacacacaggagggaaaatcctgggattctttttctagggatgtaatacatata

SEQ ID NO: 143565 - DNA, 1500 bp, Homo sapiens
atgacatcctggggatctgtccattatgacagtgacctttgtatacgttataagtttttgttgttagctgcacttgatgtgctgagtgacagtagcctagtactagtccctacagaggttgctactcagaagtttctgcctctggacacagtggcaactttcaagctttttacatgctggactgaaaaccaggagtctgatctgacttttaaaatccagaagagtcctgttataaatttagactggggtgagaaaccagatgatgattttggagcacagcctaataagaacctggggtttgcctcttctttcggcattgttgatgctcttgagagcatcaggcaggacattcatgtgcaccattgtggcggcacgaaaagatggcggaaagagccaaacgacaaccctttcattgctcttgacaccccacagtcctatttcacagaggaagagaatgaccagcaagtcaacttctactacagagaagcagcaactgataaaaggccaaatcttacaagagaggaagcgggagaggagcccacgtcgcctgtcacccaatatctccagccgcgcagtcccgaagagtgtaagatgttcgcctgcgccaagctcgcctgcaccccctctctgatccgagctggatccagagttgcatacagaccaatttctgcatcagtgttatctcgaccagaggctagtaggactggagagggctctacggtatttaatggggcccagaatggtgtgtctcagctaatccaaagggagtttcagaccagtgcaatcagcagagacattgatactgctgccaaatttattggtgcaggtgctgcaacagtaggagtggctggttctggtgctggtattggaacagtctttggcagccttatcattggttatgccagaactaagttgggtagatgcatcatggaacaagacaggcaaagaagaggtctacaagaagtttcctgcgtttgtaaagagaagactgtaaagaattttaggactcttggggatattgaggaatgcaaaaaactgcttcccgcccttcgggctccttgtccaatcatgagcgcccgagtgctctttgatgcccgtcccctctacccgccctgccgaagacccgccttcttctccttaagcctgacggaatcacctgactcggaggcgctccctcagaaggaaggcaagaaggggcgtgtgggtgaaggggaggggcgccagaaggaagcccttggggcgattgtggctgtgctgccacctcggcggcccgcgcggtgtgggctttgggaacctgactggctgggccggaccgttagcaaatggctatatttggatatcactaacctgtgggtagaatctctgctgaaatgtgcaaacactgctaatggcaaatttcctgcacccggtcccatcgaccgcccaagggctgaggagtgcgggtgcgcggagcgggactggcgggcagctcgcctgccgccccagcgcgggatccactag

SEQ ID NO: 143566 - DNA, 916 bp, Homo sapiens
tggagggcacagggagcccggcctggccagggcggagcggcgcccagtagggacccattcattgtgccggcgcctcactgggcacggggcccaagctgacggcgtgcacgggagcctgcggagcctgggtgggaagaacaggcccctggagggcacttgaccttaagcctcttttcctccgcagagaggaagcggtgagaggagcccacgtcttcctgtcaccccaatatctccagccgcgcagtccctgaagagtgtaagatgttcgcctgcgccaagctcgccatgcgacccccatctctgatccgagctggatccagagttggcatacagaccaatttcatgcatcagtagttatctcgacccagaggctaagtaggactggaagagggctctaccggtatttaaatggggccccagaatggtgtgtctccagctaatcccaaaggggagttttcagaccagttgcaatcaggcaggaggacatttgattactggttgccaaatttatttgggtgcagggtgcttgcaacagtagggagtgggctggtttctggtggctggtattgggaacagtcttttgggcaagccttatccattgggttatggccagaaaaccctttcgcctgaaagccagcagctggttcctccataatgctatcctggggattttgcccttgccctgaagctgaaggctatgggtctccttttgttttgatggttgctttcttgattttgtttgccgatgtaacagaaattactgcttgacatgttgggcattcatattaattacgggatgtaattctgtgtatcttactgtgactccgaaaactgtagtattggtgtcatgggaatgtacgttattttccaaagttcatttcattaaaggtggaaaactttaaaaaaaaaaaagaaa

SEQ ID NO: 143567 - DNA, 879 bp, Homo sapiens
tcaaccgcgtttttgctgctcccttggcttggaatgctcttccctagagacattcgtggctcccttcctcacttcactctggtctttgcccgaataacctctcagtggtgtcttcttcgaccacctgttcagtatacctccctctacacgtacttcactttcggtcctttcatcagctctagtttcttttgtcaacttaaaatcacaatagctcaaaacatatttctttgtcatattttgaaaaggccctgtgaagctgttcttcatgggggaaaatttgcatctgtaaagaatctctgttaacatagctagatctttttcttccacactttcccaatcgggcacttttcctggggccccactggctgcgttcagctctgtgggtgtcagctggtggctcggtgtcgggccttcctgggacgctaatggggcaccttgataggagaggtcagggacattccctgggtgcacatgtgtgcatgcttgtttgcggggttgggagatgaagccatgtgtgaggggaggcccagaggcagcatgaagccagtggaagctgagggcagaagtggtgcgaatcagggtacaatgcgttgctgcaataagtctgctcagagagagccccaccttcagaagtcgacctatggcaaatgtggctacactgccaagcgcaagagaaagtataactggagtaccaaggctaaaagacgaaataccaccagaactggtcaaatgaggcacctgactcagaccttccagcaattcacggatccacttcaggacttctgttttctcaccatgctggccactgaccgccacagcacctttgcttggaggatcctttgagcagtcatgccgctctttctcaagccgcctctccat

SEQ ID NO: 143568 - DNA, 480 bp, Homo sapiens
atggatacaattctagcaaagcagaccctgattctcaatacatactatgattggagtaaataccaggttctcctgagtactcaaccctgctcagaaaaggtatccaatatcaagaggctagcaactgcctacctcaggcacaatgaaatactaggttcctgtatgtcagtaattgaaaaagtagcaagcatgcaggaaaagaaagaatccagaggggtcaggacccagcctgaggacccgatggaggaggaggaggagaaaggaagtcagcaagaaaagtcgacctgtggcaaatgtggctatgctgccaagcgcaagaggaagtataactggagtgccaaggctaaaagacaaactaccactggaactggtcaaatgaggcacttaaaaattgtatacagcaaattcgggcatggattctgtgaaagaacaccacctaaacccaagagggcagctgctgcagcatccagttcatcttaa

SEQ ID NO: 143569 - DNA, 643 bp, Homo sapiens
  misc_feature (1)...(643): n = a,t,c or g
ctgcggtgcacgcccggatcgacccacgcgtccgagcgagatgaccgaagggaaccgtcatcgatttggaaaagcgtcggcaataagacggcacactgttgtgccagccgctgtggctcttaaggcctacccaccttcaagaagtcgacctgtggcaaatgtggctaccctgccaagcgcaagagaaagtataactggagtgccaaggctaaaagacgataatactttcggaactggtcgaatgaggcacctaaaaattgtataccgcagattcaggcatggattccgtgaaggaacaacacctaaacccaagagggcagctgttgcagcatccagttcatcttaagaattgtcaaccgattaagtcatgccaataaatgctcctggttttaaaaaatacatatctggttttggagtttggattcataatacaagagaagcacagggcaaagacactgcattaacctccaagaactaaggaatgggaggactgggccaggcctgggtgggtgcacacctggtaattcccagctacttcaggaggctgaggcgagagaatcgcttgagcctggggggcagaggttgcagtgagctgagagaacggcgggcggcagacgagacttctctnaaaaaaaaaaaaaag

SEQ ID NO: 143570 - DNA, 779 bp, Homo sapiens
atggacaaagcagaaggggagcagaagcggcaaaaagagaaagggaaaagaacaagaaagagagaaggggagagaagaggagagaagaaaatgaagctggggtgcgtggccatcttcgttcctggatttctgccgccggtccgggattccgccaagtcccagagtggttacggtgctgcccgccgtatttgtgtttcaaaggggccttttgcaggcatcacccctatagaccgtcccacaagtacaaacacatccacccgaagtgttacaccactccaaggagtggacactatccacggcacccacacttcttctcttctctccttgctccctctctccttatctagctgcaagccccgggcggcggaagtcgtcactcttaagaagggacggggccccacgctgcgcacccgcgggtttgctatggcgatgagcagcggcggcagtggtggcggcgtcccggagcaggaggattccgtgctgttccggcgcggcacaggccagcctcgggacagcatcaagtcgatccgctcactggagttgtggtccgcgtttttctacgtcttttcccactccgttccctgcgaaccacatccgcaagctccttcctcgagcagtttgggctccttgatagcgttgagtggaggccctgccgcgacttggcagtagcttattttgttcactcctctctggctggtgtgggggagagcgatgattctgacatttgggatgatacagcactgataaaagcatatgataaagctgtggcttcatttaag

SEQ ID NO: 143571 - DNA, 1685 bp, Homo sapiens
taaaaaaaaattaaatatttttattatatacttttaaacatatagaagatagaaaaaaacagtacaatgaacagccatgtccaccagttagattctgtaacattttgccacatacgcctcacatacattttgttaaaccatttgaaacattttaagacactctaacacttcattcctaaatgcttaagtatgcaaattaagacagtcttttataaactacaacacccttctcacagctcataaaattaccaataattatccaatatcattcaaaatctaatccacattcaaattttctcaactgcctcaccaccgtgctggcctcccacccccaccccagtcttttacagatggtttttcaaaatagagtccagtaaaatatttcacattgcatttggttattacataacttttaatcaagaagagttacccattccacttccttttttctttcccaacacttgatattttgaagaaatgaggccagttatcttctataacgcttcacattccagatctgtctgatcgtttctttagtggtgtcatttagtgctgctctatgccagcatttctccttaatttaaggaatgtgagcaccttccttctttttgattttgtctgaaacccatataatagccagtatgatagccactcatgtaccatgaaattaacatacttcccaaagcatcagcatcatcaagagaatctggacatatgggaggtggtgggggaattattggtggtccagaaggaaatggaggcagccagcatgatagtaagtggggtggtggtggtggcggtggcggtggtgggccattgaattttagacctggctttcctggtcccagtcttggccctggcatggggggtggtggagggagaaaagagttccatggagcagatttgggcttgatgttatctgatttatttccaggagacctggagttctcactttcatctgttgaaacttggctttcattttcattctcttgagcattctgttctatattattagctacttcacagattggggaaagtagatcggacagattttgctacatatttatttccatttccaggggtagaccacaacacaggtttctctcttaaaatcaaattgaagcaaatgggtagctgggtaaatgcagccgtcttctgaccaaatggcagaacatttgtcccccaacttttccactgttgtaaggaagctgcagtattcttcttttggcttttattcttcttagcaggttttcttttagggtgtggtttttggtttacccgaagtttcacaaatgtcaccattctttagagcatgcttaaatgaagccacagctttatcatatgcttttatcagtgctgtatcatcccaaatgtcagaatcatcgctctctgctttctctgagaggcagtcaagctatcctctttcctctttcccttgctaatttcctgggttttcttcatgtttttctggcgggcaagttctcgttgatttccacctccaaacaaggaccctcctggggcggccgtgtccacatctccggggtgtgttctttaccgcacaaactcgcacctgaggggcaggcacccgtccggcctgaaaagccggaccggaaccacccgcgagctctctctctgccgactgaagcggggatccccgcactgcgcgacccagggggattacgaaa

SEQ ID NO: 143572 - DNA, 2997 bp, Homo sapiens
atgaataatacgatggctttcatggataaagtcaacagcatgcaagaacagatggacagtgtaagacaggtggaaattctacgaaagaaccaaaaagaaatactagagatggaaaacatgaggacagaaatgaagaatgtgtttggcggattacttagtgccagtttcccagagcatcctgcttttctctcaaagaaaattggtcaagtggaagagcaaatagataaagagaccaagaacccaaatggggtatcaagtagggaggctaaaactgcattggatgctgatgacagattcactttgctgacagcccagaaaccacctactgagtactctaaggtagaaggcatttatacatattctttgtctccatccaaagtttcaggagatgatgttattgaaaaggattcccctgaatcaccatttgaagtaattattgacaaagcagcatttgacaaagaatttaaagactcatataaggagagcacagatgattttggtagctggtctgtgcacactgataaagaatcatccgaagacatttcagagactaatgacaagctttttccactgagaaataaagaggcaggacgttacccaatgtctgcattgctcagtaggcagttttcacacacaaatgcagcactggaagaggtgtccagatgcgtgaatgatatgcataactttactaacgaaatactgacttgggatctggttccccaagtgaaacaacagaccgataaatcttctgactgcatcacaaaaactacaggacttgacatgagtgaatataattcagaaattccagttgtaaatcttaaaactagcactcatcagaaaactcctgtatgttctattgatgggagcactcccatcactaaatcaacaggtgattgggcagaagcatctctccagcaagaaaatgctattactggaaaacctgtacctgactctttgaattccacaaaagaattcagtatcaaaggtgtgcaaggcaatatgcagaaacaggatgacacacttgcagaattacctggatctccacctgagaaatgtgactctttgggttctggagtggccacagtgaaagtggctttacctgatgaccacctgaaagatgaaatggactggcagagctctgcattgggagaaatcacagaagctgatagttctggtgagtctgatgacacagtaatagaggacatcacagcagatacatcatttgaaaataacaaaattcaggctgaaaaacctgtttccattccaagtgctgttgtaaaaacaggtgaaagagaaatcaaagagattcccagttgtgagagagaagaaaaaacatctaaaaactttgaagaattggtcagtgactctgagctgcatcaagatcagcctgatattcttggaaggagtccagctagtgaggcagcatgttcaaaagtacccgatacgaatgtctccttagaagatgtgagtgaagttgctcctgaaaagcctattactactgagaaccccaaacttccttcaacagtgtctccaaatgtttttaatgagacagaattctcattaaatgtgacaacatctgcctatttggagtcattacatgggaaaaatgttaaacatatagatgattcctccccagaggacctgatagcagcctttacagaaaccagagataaaggaatagtagatagtgaaagaaatgcttttaaagcaatatcagagaagatgacagactttaaaacaactcctcctgtagaagtcttacatgaaaatgagtccggtggttctgaaattaaagacattggaagcaaatacagtgaacaaagcaaagaaacaaatggaagtgagcctctaggtgttttccctacccaaggtactccagtagcatctcttgacttagaacaagaacagctcacaattaaggctcttaaagaattaggtgaaagacaggttgagaagtcaacttctgcacagcgtgacgcagaattgccttctgaagaagtactgaagcaaactttcacatttgctccagaatcttggccacagagatcatatgacatcctagaacgtaatgtcaagaatggatctgatcttgggatttcccagaagcccatcactatcagagaaactactagggtagatgctgtttccagccttagcaagactgaattggtaaaaaagcatgtcctagcaagacttctgacagacttctcagggctgagctttccactggcccataaagcagaaggagggggcccaaagtcagttgggcgtttctgctggcgtggagagcgctaccaggtgcccccggattttgatcgggagtcgcttttgcctttccgtggacaagccttcctccgccagcagatgccccgggcaggaagagaagcggtggtgcacgatctgattttctggagagatgtgaagaagactgggtttgtctttggcaccacgctgatcatgctgctttccctggcagctttcagtgtcatcagtgtggtttcttacctcatcctggctcttctctctgtcaccatcagcttcaggatctacaagtccgtcatccaagctgtacagaagtcagaagaaggccatccattcaaagcctacctggacgtagacattactctgtcctcagaagctttccataattacatgaatgctgccatggtgcacatcaacagggccctgaaactcattattcgtctctttctggtagaagatctggttgactccttgaagctggctgtcttcatgtggctgatgacctatgttggtgctgtttttaacggaatcacccttctaattcttgctgaactgctcattttcagtgtcccgattgtctatgagaagtacaaggatgcacgtgtgctagcgctgagcaggcaagagtcccacactgaagtatcagagaagctccagggcaaaaagcaagaggcaccaggtgtgggccaggtgcaatcacactgcacccatgccaaggcagcagagcctgcatag

SEQ ID NO: 143573 - DNA, 3223 bp, Homo sapiens
cggggaattccgacgaggtcctcggagcaggcggagtaaagggacttgagcgagccagttgccggattattctatttcccctccctctctcccgccccgtatctcttttgacccttgtcccacccttcgctcgcgtagccatggcggagccgtcggcggccactcagtcccattccatctcctcgtcgtccttcggagccgagccgtccgcgcccggcggcggcgggagcccaggagcctgccccgccctggggacgaagagctgcagctcctcctgtgcggattcctttgtttcttcctcttcctctcagcctgtatctctattttcgacctcacaagagggattgagctctctttgctctgatgagccatcttcagaaattatgacttcttcctttctttcatcttctgaaatacataacactggccttacaatactacatggagaaaaaaagccatgtggtaagggagccagcctattttagccaaagaaggaaaagaccacttggatcttctagatatgaaaaagatggaaaagcctcaggggaccagcaacaacgtatcagactcttcagtttctcttgcagcaggagttcattgtgaccgtccttctattccagccagtttcccagagcatcctgcttttctctcaaagaaaattggtcaagtggaagagcaaatagataaagagaccaagaacccaaatggggtatcaagtagggaggctaaaactgcattggatgctgatgacagattcactttgctgacagcccagaaaccacctactgagtactctaaggtagaaggcatttatacatattctttgtctccatccaaagtttcaggagatgatgttattgaaaaggattcccctgaatcaccatttgaagtaattaattgaccaaagcagcatttgacaaagaatttaaagactcatataaggagagccacagatgattttgggtagcctggtcctgtgcacactgataaagaatcatccgaagacatttcagagactaatgacaagctttttcccactgagaaataaagaggcaggacgttacccaatgtctgcattgctcagtaggcagtttttcacacacaaatgcagcactggaagaggtgtccagatgcgtgaatgatatgcataactttactaacgaaatactgacttgggatctggttccccaagtgaaacaacagaccgataaatcttctgactgcatcacaaaaactacaggacttgacatgagtgaatataattcagaaattccagttgtaaatcttaaaactagcactcatcagaaaactcctgtatgttctattgatgggagcactcccatcactaaatcaacaggtgattgggcagaagcatctctccagcaagaaaatgctattactggaaaacctgtacctgactctttgaattccacaaaagaattcagtatcaaaggtgtgcaaggcaatatgcagaaacaggatgacacacttgcagaattacctggatctccacctgagaaatgtgactctttgggttctggagtggccacagtgaaagtggttttacctgatgaccacctgaaagatgaaatggactggcagagctctgcattgggagaaatcacagaagctgatagttctggtgagtctgatgacacagtaatagaggacatcacagcagatacatcatttgaaaataacaaaattcaggctgaaaaacctgtttccattccaagtgctgttgtaaaaacaggtgaaagagaaatcaaagagattcccagttgtgagagagaagaaaaaacatctaaaaactttgaagaattggtcagtgactctgagctgcatcaagatcagcctgatattcttggaaggagtccagctagtgaggcagcatgttcaaaagtacccgatacgaatgtctccttagaagatgtgagtgaagttgctcctgaaaagcctattactactgagaaccccaaacttccttcaacagtgtctccaaatgtttttaatgagacagaattctcattaaatgtgacaacatctgcctatttggagtcattacatgggaaaaatgttaaacatatagatgattcctccccagaggacctgatagcagcctttacagaaaccagagataaaggaatagtagatagtgaaagaaatgcttttaaagcaatatcagagaagatgacagactttaaaacaactcctcctgtagaagtcttacatgaaaatgagtccggtggttctgaaattaaagacattggaagcaaatacagtgaacaaagcaaagaaacaaatggaagtgagcctctaggtgttttccctacccaaggtactccagtagcatctcttgacttagaacaagaacagctcacaattaaggctcttaaagaattaggtgaaagacaggttgagaagtcaacttctgcacagcgtgacgcagaattgccttctgaagaagtactgaagcaaactttcacatttgctccagaatcttgggccacagagatcatatggacatcctaggaacgtaatgttcaaggaatgggtcttgatcttggggatttcccaggaagcccatcactattcaggaggaaactactaggggtaggatgctgtttccagccttaggcaagactgaattgggttaaaaaagcatgtcctagcaagacttctgacagacttctcaggagcagagcgtttaatagacaagaaagaaggaaggaagaagaaaacagctcccctaataatgcgatttttaaaaaaacatatgcacgtatcagaatgggtagataactggcttggttatccgatctgctattatttccctttgccatccaagagacagtttgctgcattatcagctgatgcacatctttctccacctaccaaatggggggccgtgccatctctgcctctcggcttataccagctgctgtgtggaaaatggactgaagagaggcaaaggagaaagcagggagaccagataggcggcatctacaataacccaagagagctagcctggaccagggtggtagcaatggagattgacagaattggtcagactttggatatctttttgaaggtagaatcaagagcatttgctgatggcttctatgagggacagaaaggaatcaaggataactccaaggtttttgatttgagcaaaagaaggaaagaacagaatggccatttattgagattgagaagactgtga

SEQ ID NO: 143574 - DNA, 899 bp, Homo sapiens
aaattcccgggtcgacgatttcgtctgtcctcggagcaggcggagtaaaagggacttgatcgagttcagttgccggattattctatttcccctcccatctctcccgccccgtatctcttttcacccttctcccaccctcgctcgcgtacgcattggcggagccgtccggcgtccacatcagtcccattccatctcctcgtcgtccttcggagccgagccgtccgcgcccggcggcggcggggagcccagggagcctgccccgcccctggggaccgaagagctgcagctcctccctgtgcggtgcacgatcctgatttttctggagagatgtgaagaaccactgggcttgtctttgggcaccacgctgatcatgctgctttccctgggcagcttttcagtgtcatcagtggtggtttcttaacctcatcctgggtttttcttcttctgttcaccatcagctttcagggatctaacaaagttccgtcattccaagctgtaacaggaagttcaggaagaagggccatccatttcaaaagcctaactggaacgtagacattactctgtcctcaaaaagcttttccataaataacatgaatgctgccatggtgcacatcaacagggccctgaaactcattattcgcctctttctggtagaagatctggttgactccttgaagctggctgtcttcatgtggctgatgacctatgttggtgctgtttttaacggaatcacccttctaattcttgctgaactgctcattttcagtgtcccgattgtctatgagaagtacaagacccagattgatcactatgttggcatcgcccgagatcagaccaagtcaattgttgaaaagatccaagcaaaactccctggaatcgccaaaaaaaaggcagaataa

SEQ ID NO: 143575 - DNA, 211 bp, Homo sapiens
  misc_feature (1)...(211): n = a,t,c or g
aaggcttgaatctgtattacccngaagccctgctgatgaactgtctcattgtgttgagcctgagccatctcaggtgccaggtggagttctagagaccgtcagcaaggttcagaagaagaacccagtcctgttttgaaaactttggaaaggagtgccgctagaaaatgccttccaaaagtctagaagacatttcatcagattcatcaaatca

SEQ ID NO: 143576 - DNA, 3159 bp, Homo sapiens
tcactgtgagttaaaaaattttaaatgctcactggaaggatttctccagctctctgcattagaactggtgtttccatctgaaaaatcagactcagagaaaccttctttttcttcctctttctcttgtttcatatatggcgatgctagagtcaattcaactttacttgtttttgtagagttttctttgttcatcaggagaggaatgggttgcctatttctggacacactaattgcttcagaagcctctccaaagccaggttcctgaagagtcccttgtccccctgcaaccccactttcactgtccctgtcctctgggggggttacagttttaatggtccctatttcatgagccacataaagttgtggggttctagggatctcaactccacttctggaaccacaaaaatcactttcagctttcttgaggagagctgtatttccaaaagtttcatctctcactggaaaaggagctagtatttctctcttatcagctgaagtattgtgactctgttctatcccttttccaaaaaatctcccctcttccagcttagagttggttccagtgataacgggcgccaacttggcttgcaagggagagggtgaagttccagttgcttccttcaggagtttgtctagactagcagtcaaagagttccgtttaacctttggatgaactactgttttgtcaacatgctcattaatgatcttctcaggtcctttgacttcttcctcagtatcaccaaaatctgttttttgaggccatgtcctattttcagaaacacttggttcaagcacttgttttccatgaacttttccaccagagggttgaattgctggtgttgaggtttctgaaagcagtttctgcaagctgtcattaaaagtgtctttgcagtctttagacaaaacattggtttttattatggattcttgaatctcttgttctgagtaatccttttcttccttaaacactggagtaacaatcccttccgtattcttttccacattttcctttgatgactcatttcctggcaactgataagtatactttctaagtggactcaaaggaaatgtgatttcatctggtagcacctggagtatgccctttgaatttaatttctccatttcctctcttgccataactttttttgggcttagaagcacctctgcttcatgggtatttttacctgataatttaatgtcgctgaattccttgtgtttctgcctattaaaaggtgcagaatttttttggcttgtggtggtaatattcttgtcattatccttactgtttgaattagcttctaagtcccaaaactttctcaaattctcaaactgagagggattatagacctgttctgcattgggttcatccattctttcttttagggacataactttaaagttggcatttgattcacgaactagaggtctgtctttctccaatggagcatgtcgttcactcccgacatttgagggaggttgcagtgctggtaaagtaatgtttcttctagaaggcaaactgtctgccacttgtgatctttttataggctcatttttcttattctgaaacagagacactttatctgattgctcagctgaaagatagtatctggatggacctgctatttgtggcttggtctctttagatttatttgaggaataagaattggagagctgggatgcttgatcatcctcatctaagaccactcgtttgggaatggcctgattatattcactctggtctgtagataaactgtccatggatgatacgccctgtgacttcttcacaggctgatatgctttagcagaaggttgttcctggctacatgaagatgtgggtttttcatgagttatcttagcaccagctttctctccttcccaaaaggatattctgtcactcactcttttgtatttctctctctgcacttggttcttgggaacctcaccagcttcttgctggaattggacctcaggcttcttccaaggagagccattgttggcaaccccaggtgttgacttaatattctctggctctaaggaggctttcaggatataggtatttcctactttgctctttctctctgcattcatgttatctttcaaacctggttctttgacaactgttgaagagtcaaaattcacttctgagtgtcctctattttcttcatgagcatgaaacttgggttcttcttcacccaagttgccaatattattagtgttgcatggaacttggttttctgcatcagattccttgagaacactgtaggaatagttactatttgaaggagatgccccattcccttttcctgggctttttgaatcttggctatagtccatatttttactcccttgacttggggtgccatagctttcaaatggttgcaatatacctgggccttcctttggggtgcctttttgggacaaattcatgaatttggatttgatattcacattattatcttggcaactttcagaaaccagcatatctccctctgcttggaatggtgagtcagatctcacaggcttcaattcaattttgctgggtgatagggtctttgagccattttctcttaaagtagtgtcatctgtcaccaagtcaacagcaacctgtgattttgagtctgttttttctttggactctattcctcggggatgttggaggaatgacttattgtcatctgaataagaacttcggttaaaccagtctagaactttaaatatggaatcatcagttgacttctttatctcagtggcatatggaccagaacgtgaagatgtcttagcttttagagccgggagaggagggggcttaccttgctgacggtctctagaactgccacctggcacctgagatggctcaggctcaacacaatgagacagttcatctgcaacatagaaatacttttcatccacagaagatttacctaagatcagctttatgatcatcttcctcgggcttgctggtgctgcatcctcttctggctcttctacaacgccagccagctctggaggaaggaaagcatctttgttgacattattcacccagctttcctttgccccattttctctgtctttactctgctcagctgaacatctctgataattagcagcaactgaatgataactaactaccaggcactgtgctgagttctttgcatgcat

SEQ ID NO: 143577 - DNA, 4371 bp, Homo sapiens
atgctcttttcttatttagaaaagtatttctatgttgcagatgaactgtctcattgtgttgagcctgagccatctcaggtgccaggtggcagttctagagaccgtcagcaaggtaagccccctcctctcccggctctaaaagctaagacatcttcacgttctggtccatatgccactgagataaagaagtcaactgatgattccatatttaaagttctagactggtttaaccgaagttcttattcagatgacaataagtcattcctccaacatccccgaggaatagagtccaaagaaaaaacagactcaaaatcacaggttgctgttgacttggtgacagatgacactactttaagagaaaatggctcaaagaccctatcacccagcaaaattgaattgaagcctgtgagatctgactcaccattccaagcagagggagatatgctggtttctgaaagttgccaagataataatgtgaatatcaaatccaaattcatgaatttgtcccaaaaaggcaccccaaaggaaggcccaggtatattgcaaccatttgaaagctatggcaccccaagtcaagggagtaaaaatatggactatagccaagattcaaaaagcccaggaaaagggaatggggcatctccttcaaatagtaactattcctacagtgttctcaaggaatctgatgcagaaaaccaagttccatgcaacactaataatattggcaacttgggtgaagaagaacccaagtttcatgctcatgaagaaaatagaggacactcagaagtgaattttgactcttcaacagttgtcaaagaaccaggtttgaaagataacatgaatgcagagagaaagagcaaagtaggaaatacctatatcctgaaagcctccttagagccagagaatattaagtcaacacctggggttgccaacaatggctctccttggaagaagcctgaggtccaattccagcaagaagctggtgaggttcccaagaaccaagtgcagagagagaaatacaaaagagtgagtgacagaatatccttttgggaaggagagaaagctggtgctaagataactcatgaaaaacccacatcttcatgtagccaggaacaaccttctgctaaagcatatcagcctgtgaagaagtcacagggcgtatcatccatggacagtttatctacagaccagagtgaatataatcaggccattcccaaacgagtggtcttagatgaggatgatcaagcatcccagctctccaattcttattcctcaaataaatctaaagagaccaagccacaaatagcaggtccatccagatactatctttcagctgagcaatcagataaagtgtctctgtttcagaataagaaaaatgagcctataaaaagatcacaagtggcagacagtttgccttctagaagaaacattactttaccagcactgcaacctccctcaaatgtcgggagtgaacgacatgctccattggagaaagacagacctctagttcgtgaatcaaatgccaactttaaagttatgtccctaaaagaaagaatggatgaacccaatgcagaacaggtctataatccctctcagtttgagaatttgagaaagttttgggacttagaagctaattcaaacagtaaggataatgacaagaatattaccaccacaagccaaaaaaattctgcaccttttaataggcagaaacacaaggaattcagcgacattaaattatcaggtaaaaatacccatgaagcagaggtgcttctaagcccaaaaaaagttatggcaagagaggaaatggagaaattaaattcaaagggcatactccaggtgctaccagatgaaatcacatttcctttgagtccacttagaaagtatacttatcagttgccaggaaatgagtcatcaaaggaaaatgtggaaaagaatacggaagggattgttactccagtgtttaaggaagaaaaggattactcagaacaagagattcaagaatccataataaaaaccaatgttttgtctaaagactgcaaagacacttttaatgacagcttgcagaaactgctttcagaaacctcaacaccagcaattcaaccctctggtggaaaagttcatggaaaacaagtgcttgaaccaagtgtttctgaaaataggacatggcctcaaaaaacagattttggtgatactgaggaagaagtcaaaggacctgagaagatcattaatgagcatgttgacaaaacagtagttcatccaaaggttaaacggaactctttgactgctagtctagacaaactcctgaaggaagcaactggaacttcaccctctcccttgcaagccaagttggcgcccgttatcactggaaccaactctaagctggaagaggggagattttttggaaaagggatagaacagagtcacaatacttcagctgataagagagaaatactagctccttttccagtgagagatgaaacttttggaaatacagctctcctcaagaaagctgaaagtggtgagtgccagctaagcacacagaatttgattcaggtggctgcagaagattctcatccattggatccaacttcccagctttccagaaagggttcttttggggatgtggccagccctccccaagatatgctttttccccagggtgctcatcttgttccccaggctagggtacacccttctcaaatggaaatttcggagactgtagagaaagtcattcttccacccagacctgtattgaatgatgtaagtgctgcattacagaagctgtgtggagaagtatggttaagttatccagctggaagggaagtaggtcctggagaagtgaacccagaatttcctgaagcagtacagccagtatgtagccccctaaatcctccaggagtgatatcaccatgggctacgatggacaccatagttccagacaggaaggatttttattcctccaatgtagttcctgataaaactcatgaagttggatcttatttagctgcccaaatgtctccatcagaccagacgcttagctcatttgcttccattgttgctcaatatggcaaaggcctccctcaggaagtggaagaaattgtgagggaaacaattgttcaacccaaatcagagttcctcgaattcagtgctggcttagaaaaactactgaaggaagaaactgaaaccttcccctcaaaatatgaaagtgatacagggaatctttctccatcaaagttaataggtagtacagaggagcccaggcgagccacttctgaatgccatcctgaggaattaaaagaaacagtagaaaaggccgaggctccattaataactgagagtgcttttgatgctggttttgagaaacttcttaaagaaataactgaagctcctccttatcagccccaggtgtcagtgagagaagaaactcacgagaaggagtcctcacagtcagagcagaccaggttcttggggacagtgccccatttttacagggcagcctcacagacctctgaaatgaaggataaaagtaatggtttggaatctcaagtcaaccaatgtgataaaatgttgggaggagacgcacttgtgactgatttattggtagatttttgtggttccagaagtggagttgagatccctagaaccccacaactttatgtggctcatgaaatagggaccattaaaactgtaacccccccagaggacagggacagtgaaagtggggttgcagggggacaagggactcttcaggaacctggctttggagaggcttctgaagcaattagtgtgtccagaaataggcaacccattcctctcctgatgaacaaagaaaactctacaaaaacaagtaaagttgaattgactctagcatcgccatatatgaaacaagagaaagaggaagaaaaagaaggtttctctgagtctgatttttcagatggaaacaccagttctaatgcagagagctggagaaatccttccaagtatgactttggccagatgactcacctgatgccacctaagggcattgcctggccaggttcagaagaagaacccagtcctgttttgaaaactttggaaaggagtgccgctaggaaaatgccttccaaaagtctagaagacatttcatcagattcatcaaattcccaggggtttgaagacagtattcccaatttggaatgtagtcctgactatcccaaggatcttggaatctcagggttagaagggatcttaaaaatcacccattttaacctcccctcaatgcaggaattctctctaaagcctcctcaacaggcggccaacccccatatccgcctgaatgcttccagagaaggcgagtcgaatcctttgttggacagccctgattgtttttcctga

SEQ ID NO: 143578 - DNA, 6450 bp, Homo sapiens
  misc_feature (1)...(6450): n = a,t,c or g
agccatgttaaccatttgttaatttcttctgaacagatcaagcaaaagtagataatcagccagaaaaattagtgcgtagtgctgaagatgtttccacagtgcctacacaacctgataatccattttctcaccctgacaaactcaaaaggatgagcaagtctgttccagcatttctccaagatgagagtgatgacagagaaacagatacagcatcagaaagcagttaccagctcagcagacacaagaagagcccgagctctttaaccaatcttagcagctcctctggcatgacgtccttgtcttctgtgagtggcagtgtgatgagtgtttatagtggagactttggcaatctggaagttaaaggaaatattcagtttgcaattgaatatgtggagtcactgaaggagttgcatgtttttggggccccagtggaaggacttaacagcagcggatggaaaaaaacaggcgtcataccatattgaaagggctaatttgctaccaaacaaaggccaaatgggcaagaagaaaacactcgtagtgaagaaaaccttgaatcctgtgtataacgaaatactgcggtataaaattgaaaaacaaatcttatagacacagaaattgaacctgtccatttggcatcgggatacatttaagcgcaatagtttcctaggggaggtggaacttgatttggaaacatgggactgggataacaaacagaataaacaattgagatggtaccctctgaagcggaaggctaaggcccttcagaggttccaactgaaagccatgggaaatagttctcaaaatcagcatgcatctgattcacctgaaggacttattaaatcacagattctggggctggcagctccctatccggcgaggaaaaacactgagacttcgagagaagccaaaccttcccccaaaggtgttttcagagacgccgtagtagtattagacatagacttgttgaatggttttgaccaaaatgctgatattgatgtggacaacgaagtccagattgaggtggtctcagatggagatgaagaacttgttgggaactggagcaaagctcatcatgctttggtgagtggcagtgtgatgagtgtttatagtggagactttggcaatctggaagttaaaggaaatattcagtttgcaattgaatatgtggagtcactgaaggagttgcatgtttttgtggcccagtgtaaggacttagcagcagcggatgtaaaaaaacagcgttcagaccctgccttgcacagtgcctggtacataactggtgaatggctaaataaacgaaggccaattgagccagtgccaggagaagcagcaacagataaaaagtatttctatgttgcagatgaactgtctcattgtgttgagcctgagccatctcaggtgccaggtggcagttctagagaccgtcagcaaggtaagccccctcctctcccggctctaaaagctaagacatcttcacgttctggtccatatgccactgagataaagaagtcaactgatgattccatatttaaagttctagactggtttaaccgaagttcttattcagatgacaataagtcattcctccaacatccccgaggaatagagtccaaagaaaaaacagactcaaaatcacaggttgctgttgacttggtgacagatgacactactttaagagaaaatggctcaaagaccctatcacccagcaaaattgaattgaagcctgtgagatctgactcaccattccaagcagagggagatatgctggtttctgaaagttgccaagataataatgtgaatatcaaatccaaattcatgaatttgtcccaaaaaggcaccccaaaggaaggcccaggtatattgcaaccatttgaaagctatggcaccccaagtcaagggagtaaaaatatggactatagccaagattcaaaaagcccaggaaaagggaatggggcatctccttcaaatagtaactattcctacagtgttctcaaggaatctgatgcagaaaaccaagttccatgcaacactaataatattggcaacttgggtgaagaagaacccaagtttcatgctcatgaagaaaatagaggacactcagaagtgaattttgactcttcaacagttgtcaaagaaccaggtttgaaagataacatgaatgcagagagaaagagcaaagtaggaaatacctatatcctgaaagcctccttagagccagagaatattaagtcaacacctggggttgccaacaatggctctccttggaagaagcctgaggtccaattccagcaagaagctggtgaggttcccaagaaccaagtgcagagagagaaatacaaaagagtgagtgacagaatatccttttgggaaggagagaaagctggtgctaagataactcatgaaaaacccacatcttcatgtagccaggaacaaccttctgctaaagcatatcagcctgtgaagaagtcacagggtgtatcatccatggacagtttatctacagaccagagtgaatataatcaggccattcccaaacgagtggtcttagatgaggatgatcaagcatcccagctctccaattcttattcctcaaataaatctaaagagaccaagccacaaatagcaggtccatccagatactatctttcagctgagcaatcagataaagtgtctctgtttcagaataagaaaaatgagcctataaaaagatcacaagtggcagacagtttgccttctagaagaaacattactttaccagcactgcaacctccctcaaatgtcgggagtgaacgacatgctccattggagaaagacagacctctagttcgtgaatcaaatgccaactttaaagttatgtccctaaaagaaagaatggatgaacccaatgcagaacaggtctataatccctctcagtttgagaatttgagaaagttttgggacttagaagctaattcaaacagtaaggataatgacaagaatattaccaccacaagccaaaaaaattctgcaccttttaataggcagaaacacaaggaattcagcgacattaaattatcaggtaaaaatacccatgaagcagaggtgcttctaagcccaaaaaaagttatggcaagagaggaaatggagaaattaaattcaaagggcatactccaggtgctaccagatgaaatcacatttcctttgagtccacttagaaagtatacttatcagttgccaggaaatgagtcatcaaaggaaaatgtggaaaagaatacggaagggattgttactccagtgtttaaggaagaaaaggattactcagaacaagagattcaagaatccataataaaaaccaatgttttntctaaagactgcaaagacacttttaatgacagcttgcagaaactgctttcagaaacctcaacaccagcaattcaaccctctggtggaaaagttcatggaaaacaagtgcttgaaccaagtgtttctgaaaataggacatggcctcaaaaaacagattttgctgatactgaggaagaagtcaaaggacctgagaagatcattaatgagcatgttgacaaaacagtagttcatccaaaggttaaacggaactctttgactgctagtctagacaaactcctgaaggaagcaactggaacttcaccctctcccttgcaagccaagttggcgcctgttatcactggaaccaactctaagctggaagaggggagattttttggaaaagggatagaacagagtcacaatacttcagctgataagagagaaatactagctccttttccagtgagagatgaaacttttggaaatacagctctcctcaagaaagctgaaagtggtgagtgccagctaagcacacagaatttgattcagatggctgcagaagattctcatccattggatccaacttcccagctttccagaaagggttcttttggggatgtggccagccctccccaagatatgctttttccccaggatgctcatcttgttccccaggctagggtacacccttctcaaacggaaatttcggagactgtagagaaagtcattcttccacccagacctgtattgaatgatgtaagtgctgcattacagaagctgtgtggagaagtatggttaagttatccagctggaagggaagtaggtcctggagaagtgaacccagaatttcctgaagcagtacagccagtatgtagccccctaaatcctccaggagtgatatcaccatgggctacgatggacaccatagttccagacaggaaggatttttattcctccaatgtagttcctgataaaactcatgaagttggatcttatttagctgcccaaatgtctccatcagaccagacgcttagctcatttgcttccattgttgctcaatatggcaaaggcctccctcaggaagtggaagaaattgtgagggaaacaattgttcaacccaaatcagagttcctcgaattcagtgctggcttagaaaaactactgaaggaagaaactgaaaccttcccctcaaaatatgaaagtgatacagggaatctttctccatcaaagttaataggtagtacagaggagcccaggcgagccacttctgaatgccatcctgaggaattaaaagaaacagtagaaaaggccgaggctccgttaataactgagagtgcttttgatgctggttttgagaaacttcttaaagaaataactgaagctcctccttatcagccccaggtgtcagtgagagaagaaactcacgagaaggagtcctcacagtcagagcagaccaggttcttggggacagtgccccatttttacagggcagcctcacagacctctgaaatgaaggataaaagtaatggttttggaatctcaagtcaaccaatgtgataaaatgttgggaggagacgcacttgtgactgatttattggtagatttttgtggttccagaagtggagttgagatccctagaaccccacaactttatgtggctcatgaaatagggaccattaaaactgtaacccccccagaggacagggacagtgaaagtggggttgcagggggacaagggactcttcaggaacctggctttggagaggcttctgaagcnnttaagtatgactttggccagatgactcacctgatgccacctaagggcattgcctggccagatcaagcaaaagtagataatcagccagaagaattagtgcgtagtgctgaagatgatacaagtaggaaaagtcgccagaagacaagagctgtagggaaaaccaccaaccctatcttcaaccacactatgggtgtatgatgggttcaggcctgaagatctgaatggaagcctgtgtagagcttactgtctgggaccattacaaattaaccaaccaatttttgggaggtcttcgtattggctttggaacagaaatacaaaccaccatcagagaatactataaacacttctatgcaaacaaactagaaaatctagaagaaatggataaattcctggacacacacaccctcccaagactaaaccaggaagacgttgaatccctgaatagaccaataacaagttcagaaatggaggcagcaattaatagcctagcaaccaaaaaaagtccaggaccagatggattcacagccgaattctaccggaggtacaaagaggagctggtaccattcgttctgaaactatcccaaacaacagaaaaagagggactcctccctaactcattttgtggggccaacatcaacctgataccaaaccctggcagagacaacacaagaaaagaaaatttcagaccaatatccctgatgaacattgataccaacattctcaataaaatactggcaaacagaatccagcagcacatcaaaaagcttatcgactatgatcaagtcagcttcatccctgggatgaaaggctggtgcaacatatgcaaatcaataaacgtaatccatcacgtaaacagaaccaatgacaaaaaccacatgattatctcaatagatgcagaaaaggccttcgaaaaaattcaacagcccttcttgctaaaaaccctcaataaactaggtattgatggaacgtatctcaaaataataaaagctatttataacaaacccacagccaatatcatactgaatgggcaaaagctggaagcattctctttgaaaactggcacaagacaaggatgccctctctcaccactcctattcaacatagtattggaagttctggctaggacaatcaggcaagagaaaaaaaaaaatggtattcaaataggaagagaggaggtcaaattgtctctttttgcagatgacatgattgtatatttagaaaacctcatcgtctcagcccaaaatctccttaagctgataagcaacttcagcaaagtctcaggatacaaaatcaatgtgcaaaaatcacaagcattcctatacaccaataataaagagccaaatcatgagtga

SEQ ID NO: 143579 - DNA, 1453 bp, Homo sapiens
gatattcgaacccatcgcaaggaagctaaaaaccttgaaaaaagattagacgaatggctaactagaataaacagtgtagagaagaccttaaatgacctgatgcagctgaaaaccatggcacgagaacttcatgatgcatgcacaagcttcaatagccaattcgatcaagtggaagaaaggatcaacaaaattgatagactgctagcaagactaataaagaagaaaagagagaataatcaaatagatgcaataaaaagtgataaaggggatatcaccactgatcccacagaaatacaaactaccgtcagagaatactataaacacctctatgcaaataaactagaaaatctagaagaaatggataaattgctggacacatacaccctcccaagactaaaccaggaagaagttgaatcccttcagtagactaataacaggctctgaaattgaggcagtaattaatagcctatcaaccaaaaaaaagtccaggaccagatggattcgacgagccgaattctaccagaggtacaaagaggagctggtaccattccttctgaaactattccaatcaatagaaaaagagagaatcctacctaactcattttatgaggccagcatcatcctgataccaaatcctggcagagacagaacaaaaaaagagaattttagaccaatatccctgatgaacatcaatgcaaaaatcctcagtaaaatactggcaaaccgaatccagcagctcatcaaaaagcttatccaccatgatcaagttggcttcatccctgggatgcaaggctggttcaacatatgcaaatcaataaacgtaatccatcacataaacagaaccaatgacaaacaccacatgattatctcaatagatgcagaaaaggccttcaacaaaattcaacagcccttcatgctaaaaactctcaataaactaggtattgatggaacgtatctcaaaataatgagagctatttatggcaaacccacagccaatatcatactgaatgggcaaaaactggaagcattccctttgaaaactggcacaagacagggatgccctctctcaccactcctattcaacatagtgttggaatttctggccagggcaatcaggcaggagaaagaaataaagggtattcaattaggaaaagaggaagtcaaattgtccctgtttgcagatgacatgattgtatatttagaaaaccccatcgtctcagcccaaaatctccttgagctgataagcaacttcagccaagtctcaggatacaaaatcaatgtgcaaaaatcacaagcattcctatacatcaataacagacaaacagagagccaaatcatgagtgaactcccattcacaaagagaataaaatacctaggaatccaacttacaagggatgtgaaggaccttttcaaggagaactacgaaccttacccccaactccgtgctctctga

SEQ ID NO: 143580 - DNA, 3361 bp, Homo sapiens
atgctcttttcttatttagaaaagtatttctatgttgcagatgaactgtctcattgtgttgagcctgagccatctcaggtgccaggtggcagttctagagaccgtcagcaaggtaagccccctcctctcccggctctaaaagctaagacatcttcacgttctggtccatatgccactgagataaagaagtcaactgatgattccatatttaaagttctagactggtttaaccgaagttcttattcagatgacaataagtcattcctccaacatccccgaggaatagagtccaaagaaaaaacagactcaaaatcacaggttgctgttgacttggtgacagatgacactactttaagagaaaatggctcaaagaccctatcacccagcaaaattgaattgaagcctgtgagatctgactcaccattccaagcagagggagatatgctggtttctgaaagttgccaagataataatgtgaatatcaaatccaaattcatgaatttgtcccaaaaaggcaccccaaaggaaggcccaggtatattgcaaccatttgaaagctatggcaccccaagtcaagggagtaaaaatatggactatagccaagattcaaaaagcccaggaaaagggaatggggcatctccttcaaatagtaactattcctacagtgttctcaaggaatctgatgcagaaaaccaagttccatgcaacactaataatattggcaacttgggtgaagaagaacccaagtttcatgctcatgaagaaaatagaggacactcagaagtgaattttgactcttcaacagttgtcaaagaaccaggtttgaaagataacatgaatgcagagagaaagagcaaagtaggaaatacctataagccacaaggtctggtgccaagttatttccatggttcgatacacagcctggtttccttaattccatgtggagccatttttcaggccagcagtgaaggagacatcaggaggtcacagaagagcactggagaattacatttgcctgaaaaaattaaggatgaccagcagctgaagaatatgagtggccaatggttttatgaagccaaggcaaaaaggcacagggacaaaatccatggcgcagatatcatcagagcatctatgagaaagaagaggccccagatagcagctgagcagagtaaagacagagaaaatggggcaaaggaaagctgggtgaataatgtcaacaaagatgctttccttcctccagagctggctggcgttgtagaagagccagaagaggatgcagcaccagcaagcccgagttccagtgtggtaaatccagcttccagtgtgattgatatgtcccaggaaaacacaaggaaaccaaatgtgtctccagagaagcccagccgcccaaaagcgtttgatcaggtttgtggctcaattgatgtaagtcagcctgctatggaattttatcatttttatatactgttaagaggaaatgctaaacatttcaatctcttcaaaatcaacttgaagaagattccacaagcattaaagagtgatgaattgtcagagtcaaaagaaaagtcaactgtcgcagatacttcaatccaaaagttagagaaatcaaagcagactttgccaggcctttcaaatgggtcccaaatcaaggctccaatccccaaagccaggaagatgatctacaaatcaactgatttaaacaaagatgataaccagtcttttcctagacaaaggacagactccctgaaagcgagaggggctccgagagggatcctcaagcgcaactccagttccagtagcacagactcagaaacccttcgttataatcacaactttgaacccaaaagcaaaattgtgtcacctggcctaaccatccatgagagaatttctgagaaggagcattctttagaagacaactcttccccaaactccctggagccattaaagcatgtgagattctctgcagtgaaggatgagcttccacagagtcctgggctaatccatggtcgggaagtaggagaatttagtgttttagaatctgacagattgaaaaatggaatggaagatgcaggggacacagaaggagtttcagagtgaccctaaagccttcttcaatacagaaaagccttcgctttttcatcaatcaacctcaagcccatatgtatcaaaaagtgaaacacatcagccaatgacttctggttcttttccaattaatgggctgcattctcattcagaagttttaactgcaagaccacagtctatggagaattcaccaaccatcaatgaacccaaagataaatcatcagaattaacaaggcttgaatctgtattacccagaagccctgctgatacaagtaggaaaagtcgccagaagacaagagctgtagggaaaaccaccaaccctatcttcaaccacactatggtgtatgatgggttcaggcctgaagatctgatggaagcctgtgtagagcttactgtctgggaccattacaaattaaccaaccaatttttgggaggtcttcgtattggctttggaacagcaaacagtctttttcgacgcatcttgaatgtgacaaaggctcgcatagctgctggcttaccaatggcagggataccttttcttacaacagacttaacttacagatgttttgtaagttttcctttgaatacaggtgatttggattgtgaaacctgtaccataacacggagtggactgactggtcttgttattggtggtctataccctgttttcttggctatacctgtaaatggtggtctagcagccagacatttgcctgaaaaaattaaggatgaccagcagctgaagaatatgagtggccaatggttttatgaagccaaggcaaaaaggcacagggacaaaatccatggcgcagatatcatcagagcatctatgagaaagaagaggccccagatagcagctgagcagagtaaagacagagaaaatggggcaaaggaaagctgggtgaataatgtcaacaaagatgctttccttcctccagagctggctggcgttgtagaagagccagaagaagatgcagcaccagcaagcccgagagtgcaaagtgaaaagacagcaggaagagctaactacacttctacttgctctcatttacgcgcagcgctgctggtagctagcgtgtcaccgcgtcgtgcttctcctgacaccgggacatttacttcaccccctcccccggaataccagtaccttatgctctcctcccagcagcctggttgcttgaccattaggctccatagtgccaagaagtctgtaattgcagtttctaaacttgcacaaatagaaagacttattttcacgaaggtgtacaagaaggaaaattcctag

SEQ ID NO: 143581 - DNA, 687 bp, Homo sapiens
atggaccggcccctgtcgtcgtcggcggaggcggaggaggaactggagtggcaagtggcgagtcgcaggaggaaggcctgggccaagtgccgcagctcctggcaagcgtcggagacggaggatctgtccacagaagcgacgacgcaggacgaggaggaggacgagggggaggaccttcccggcgcgcagctgccggcagcggggggaagagtgctcctgggtggtaacgtgctgtcccctctctctacccccaggaaacgtgcccaacgagaagatcgcgatatggctcaaggactgccggtgagtgctccctggtccgcccgcgtcccgggggagatccgtgcggacgggacgccggagcagagccactcgggccgcgtccctgtgggtcccgcgaccgttgacaggtccagaaatgctatccaggagccaaggcctggaatcaggagcccaaagagcccacctagtgctctaccccattgtgaccaggctgtttccatgccacaagacaaagtctcctttactcttctgtttccatttctcaagcagaatgagtctctcaccacagccatgacagctgggaatgtgctagtcacacctgaagccagcacatctctgagttacacccaaggcccacagcgagtactgcctatcactgctgattattcaggcccaagggctctttaa

SEQ ID NO: 143582 - DNA, 1714 bp, Homo sapiens
tttcgtgaggaggaactggagtggcaagtggcgagtcgcaggaggaaggcctgggccaagtgccgcagctcctggcaagcgtcggagacggaggatctgtccacagaagcgacgacccaggacgaggaggaggacgaggaggaggacctccccggcgcgcagctgccggcagcggggggaagaggaaacgtgcccaacgagaagatcgcgatatggctcaaggactgccgtacacctttgggagcctcactggatgaacaaagcagtagtacactcaagggtgtgcttgtgagaaatggaggaagttttgaagatgatttgtcattgggagctgaagccaaccacctccatgaaagtgatgctcaaattgaaaactgcaataatatcttggccaaagagagaagattacagtttcatcagaaagggagaagtatgaattccactggatctgggaaaagtagtgggacagtttcaagtgtttcagaattgttggaactttatgaggaagatcctgaagaaattctttataatcttggatttggacgtgatgaaccagatattgcttctaaaattccttccagattttttaattcatcatcctttgccaaagggatagatattaaagtatttttgagtgctcagatgcaacggatggaagtagaaaacccaaattatgctttaacaagccgttttcgtcaaattgaagtgcttactactgtggccaatgcgttttcttctttatattctcaagtctccgggacgcccctgcagagaattggaagtatgtcctcagtgacctctaacaaggagacagacccacctccacctttaactcgaagtaacactgcaaatcgtttaatgaaaacactctcaaaactgaatttatgtgttgataaaacagagaaaggagaaagtagtagtccttctccatcagctgaaaaaggaaagattctaaatgtttcagtgattgaagaaagtggcaataaaaacgatcaaaagtctcaaaaaattatgaagaagaaagagtcatcttctatgttggctacagttaaagaagaagtctctggtagttcagcagctgttacggagaatgctgatagtgatagaatttctgatgaagcaaatagtaattttaaccaaggaactgaaaatgaacaaagtaaagaaactcaaagtcatgagagtaaactgggtgaggaatctggtattgtagaatccaaattagatagtgatttcaacatatccagccacagtgagctggaaaatagcagtgagctgaaaagtgtccatatatccacacctgaaaaagagccttgtgcaccactgacaataccatccataagaaatataatgacacagcagaaggactccttcgataatggaagaggttcaaagtacggagggagaagctcctcatgttccagccacttaccagctaggtcttacgaagtcgaaaagagatcatctgttacgtactgcaagtcagcattccgatagcagtggttttgctgaagattctacagactgcctatcccttaatcatcttcaggttcaggaatccttgcaggctatggggagtagtgctgatagttgtgacagtgaaacaacaattacgtcacttggtgaagaccttgccccaccaaccacacaagacccgccctattttaatgaatcacaagaagaatcttttgtcccctttttcaaaagggactag

SEQ ID NO: 143583 - DNA, 2772 bp, Homo sapiens
atggaaggagcaaagccgacattgcagctcgtgtaccaggcagtgcaggcgctttaccacgacccagatcccagcggaaaggagcgcgcctctttttggcttggggagctgcagcgttcggttcatgcatgggagatctcagaccagttgttacagatccggcaggatgtggagtcatgctattttgctgcacagaccatgaaaatgaagattcagacctcattttatgagctccccacagactctcatgcctctttacgggactcattgctaacccatatccagaacttgaaagacttgtcacctgttattgtaacgcagctggctttagcaatagcagatcttgccctacagatgccttcctggaagggatgtgtgcaaacactggtggaaaaatacagcaatgatgtgacttctttgccttttttgctggagatccttacagtgttacctgaagaagtacatagtcgttccttacgaattggagctaatcggcgcacagaaattatagaagatttggccttctactctagtacagtagtatctctattgatgacctgtgtagaaaaagcaggaacagatgagaaaatgcttatgaaggtttttcgctgtttgggaagttggtttaacttgggagttttggacagtaacttcatggctaacaataaattactagcactcctttttgaggttttgcaacaggataagacctcgtctaacctacatgaagctgcttcggactgtgtatgctcagctctctatgccattgagaatgtggagactaacttgccattagccatgcaactttttcagggagtgctgacattggagactgcctatcatatggccgtggcacgtgaagatttagacaaagttctgaattactgccgtattttcactgaactatgtgaaacttttcttgaaaaaattgtttgtactccaggccaaggtcttggggaccttcgaactctggagctgctgcttatctgtgcaggccatcctcaatatgaggtagtagaaatttcatttaacttttggtaccgactgggggaacatttgtacaaaactaacgatgaagttattcatggcatcttcaaagcttacattcagaggctgcttcacgccttggctcgacactgccagctggaaccagaccatgagggggttcctgaggagactgatgactttggggagtttcgcatgagggtatcagacctggtaaaggacttgattttcttgatagggtctatggagtgttttgctcagttatattctactctgaaagaaggcaacccaccctgggaggtgacagaagcggttctctttatcatggctgctatagcaaagagtgttgatccggaaaacaatccaacacttgtggaagtcctagaaggagttgtccgcctcccggagaccgtacatacggctgtgcgatacaccagcattgaattggttggagagatgagtgaagtcgttgatcgaaatcctcagttccttgaccctgtgttgggctatttgatgaaaggcctgtgtgaaaagcccctggcttctgctgcagccaaagccattcataacatttgctctgtctgccgagatcacatggctcagcactttaatggactcctggagattgcccgctccctcgattccttcctgttgtctccagaagctgctgtgggcttgctaaaagggacagcacttgtcctagcccgattacctttggataagattaccgaatgtcttagtgaactatgttctgttcaggttatggcattgaaaaagctgttgtctcaagagcccagcaatggcatatcctcagatcccacagtgttcttagatcgccttgcagtgatatttaggcataccaatcccattgtggaaaatggacagactcatccgtgtcagaaagtcatacaggaaatatggccagttttatccgagactctaaataagcaccgagctgataatcggattgtagagcgttgttgcaggtgcctgcgctttgctgttcgctgtgtaggcaaaggatctgcagcactgctgcagccactagtcacacagatggtgaatgtgtaccacgtacatcagcattcctgcttcctgtaccttggcagtatccttgtggatgaatatggcatggaagaaggctgtcggcagggactgctagacatgctccaggcactgtgcatccccacctttcagctcctagaacagcagaatggtctccagaatcaccctgacactgtagatgacctgttccggctagccaccaggtttattcagcgtagccctgtcaccttgctgcggagccaagtggtcatccctatcttacagtgggccattgcctctactaccctggaccaccgggatgccaattgtagtgtcatgaggtttctacgagacctcattcatacaggggtagccaatgatcatgaagaagactttgaattacggaaagaactgattggacaggtgatgaaccagcttggacagcagcttgtcagccagctgctgcacacctgctgcttttgcctccccccctataccctaccagatgtggctgaagtgctctgggagatcatgcaggttgacagaccgactttttgtcgatggttagaaaattccttaaaaggtttgccaaaggaaacaaccgtgggagctgtcacagtgacacacaaacaacttacagacttccacaagcaagtcactagtgctgaggaatgtaaacaagtttgctgggccttgcgagacttcaccaggttgtttcgatag

SEQ ID NO: 143584 - DNA, 3062 bp, Homo sapiens
tgtaccgatctcgtgatggcgccagtcagggagcggccgtggcccagacagtgatgaagcgcgaaggcggagcaaccgaggaatcctccggagaagaatcagagccgtcgctaccgccactaccgccaccaccatggaaggagcaaagccgacattgcagctcgtgtaccaggcagtgcaggcgctttaccacgacccagatcccagcggaaaggagcgcgcctctttttggcttggggagctgcagcgttcggttcatgcatgggagatctcagaccagttgttacagatccggcaggatggggagtcatgcttttttgctgcacagaccatgaaaatgaagattcatacctcattttatgaactccctatagactctgatgcctttttacgggactcattggtttcccataatcagaacttggaggacttgttctctgatattgtaacgcaacttggctttagcaatagcagatcttgccctacagatgccttcctggaagggatgtgtgcaaacactggtggaaaaatacagcaatgatgtgacttctttgccttttttgctggagatccttacagtgttacctgaagaagtacatagtcgttccttacgaattggagctaatcggcgcacagaaattatagaagatttggccttctactctagtacagtagtatctctattgatgacctgtgtagaaaaagcaggaacagatgagaaaatgcttatgaaggtttttcgctgtttgggaagttggtttaacttgggagttttggacagtaacttcatggctaacaataaattactagcactcctttttgaggttttgcaacaggataagacctcgtctaacctacatgaagctgcttcggactgtgtatgctcagctctctatgccattgagaatgtggagactaacttgccattagccatgcaactttttcagggagtgctgacattggagactgcctatcatatggccgtggcacgtgaagatttagacaaagttctgaattactgccgtattttcactgaactatgtgaaacttttcttgaaaaaattgtttgtactccaggccaaggtcttggggaccttcgaactctggagctgctgcttatctgtgcaggccatcctcaatatgaggtagtagaaatttcatttaacttttggtaccgactgggggaacatttgtacaaaactaacgatgaagttattcatggcatcttcaaagcttacattcagaggctgcttcacgccttggctcgacactgccagctggaaccagaccatgagggggttcctgaggagactgatgactttggggagtttcgcatgagggtatcagacctggtaaaggacttgattttcttgatagggtctatggagtgttttgctcagttatattctactctgaaagaaggcaacccaccctgggaggtgacagaagcggttctctttatcatggctgctatagcaaagagtgttgatccaaagaagccctttagcaatgctgcgtgtcatcacagcctgttatttggccagaatataacctctgaaatcagtaactgtgagtacttaccgcctgtactcagggaaaacaatccaacacttgtggaagtcctagaaggagttgtccgcctcccggagaccgtacatacggctgtgcgatacaccagcattgaattggttggagagatgagtgaagtcgttgatcgaaatcctcagttccttgaccctgtgttgggctatttgatgaaaggcctgtgtgaaaagcccctggcttctgctgcagccaaagccattcataacatttgctctgtctgccgagatcacatggctcagcactttaatggactcctggagattgcccgctccctcgattccttcctgttgtctccagaagctgctgtgggcttgctaaaagggacagcacttgtcctagcccgattacctttggataagattaccgaatgtcttagtgaactatgttctgttcaggttatggcattgaaaaagctgttgtctcaagagcccagcaatggcatatcctcagatcccacagtgttcttagatcgccttgcagtgatatttaggcataccaatcccattgtggaaaatggacagactcatccgtgtcagaaagtcatacaggaaatatggccagttttatccgagactctaaataagcaccgagctgataatcggattgtagagcgttgttgcaggtgcctgcgctttgctgttcgctgtgtaggcaaaggatctgcagcactgctgcagccactagtcacacagatggtgaatgtgtaccacgtacatcagcattcctgcttcctgtaccttggcagtatccttgtggatgaatatggcatggaagaaggctgtcggcagggactgctagacatgctccaggcactgtgcatccccacctttcagctcctagaacagcagaatggtctccagaatcaccctgacactgtagatgacctgttccggctagccaccaggtttattcagcgtagccctgtcaccttgctgcggagccaagtggtcatccctatcttacagtgggccattgcctctactaccctggaccaccgggatgccaattgtagtgtcatgaggtttctacgagacctcattcatacaggggtagccaatgatcatgaagaagactttgaattacggaaagaactgattggacaggtgatgaaccagcttggacagcagcttgtcagccagctgctgcacacctgctgcttttgcctccccccctataccctaccagatgtggctgaagtgctctgggagatcatgcaggttgacagaccgactttttgtcgatggttagaaaattccttaaaaggtttgccaaaggaaacaaccgtgggagccgtcacagtgacacacaaacaacttacagacttccacaagcaagtcactagtgctgaggaatgtaaacaagtttgctgggccttgcgagacttcacccaggttgtttcgatagctcacactccctgcacttgtgccctgtcacccaggaatgtcttttttaattag

SEQ ID NO: 143585 - DNA, 1467 bp, Homo sapiens
aatacagtttggggttggatttggcggtatgaagacaaaacggaaaagcacggcccaagaagcaacggcaaagggagaacttaaacaagattagattgatgccacaatcgaagagtataagacctacaaatcagattctgccgggtggggaaagggccagttcgcgaccgatcaggtgcgactagtttcccaaaagcggcaaagatgtagcttcgcagccccaccccacgacagcagctcctccccaaggaggacctcacgaggtcaactgccgggctcaggttctcccccggagcctatgttcccgcccgccccggccgtgcggcacagaactgcctctctgggccccttaccgaacgctggagcttcccaagccaaaaagagacgcgctcctttccgctgggatctgggtcgtggtaaagcgcctgcactgcctggtacacgagctgcaatgtcggctttgctccttccatggtggtggcggtagtggcggtagcgacggctctgattcttctccggaggattcctcggttgctccgccttcgcgcttcatcactgtctgggccacggccgctccctgactggcgccatctcctcctctttggccgttaccagggcagaaggctctccgtggaagttgccccctcggaaacagctattagattctggcgctcccgtcttcagtcgctgacttgccctcagaagcctatcttgggaggccacacaccagtgtacctaaggttcgtttacccggaccggaagcgacagcaccgatacctttggcacacttccgcctggaagttcttcgtggggaggaactggaagatgaacgggcggaagaaatgtctgggggagctcatcggcactcagaacgcggccactgtgcctgccgacaccaaggtgatttgtgctctcgccactgcgtataacgagttggcccggcagaagctagctcccaagattgctgtggctccgcagaactgctacaaagtgactaatggggcctttactggggagatcagccctggcatggtcaaagacttaggagtcacaaaagtggcccatgctctggcagagagactcggagtaatcgcctgcattggggagaagctagatgaaagggaagctggcatcactgagaaggttgtttttgagcagacaaaggtcatcgcagataatgtgaaggactggagcaaggtcatcttggcctatgatcccgtgtgggccactggtactggcaagactgcaacaccccaacaggcccaggaggtacacaagaagctccgaggatggcttaagtccaacatctctgatgcagtggctcagagcactggtatcatttatggaggctctgtgaccaaggcaacctgcaaggagctggccagccagcctgacgtggctgccttcctcatgagtggtgtttccctcaagcccgaattcgtagacatcatcaatgccaaacaatga

SEQ ID NO: 143586 - DNA, 1245 bp, Homo sapiens
  misc_feature (1)...(1245): n = a,t,c or g
ggaattcccgggtcgaggaaattggagccccagctgttaaaagagcagagggcagggtgtttgtcttggcctctcaggggtatctggaaggctcttcgagttgagtgcagacccagcctgggctggaaaatggacaaaggtcatcttgctggggtgaaaagggggagagcagaaccaagaagaagagggtgagggctggggggctccagggcactggttaggaattgtggggaatgaaggctttctttagtctcatcccactgcggtaccatcttgtcctcagaggtggtttgtgctccccctactgcctatatcgacttcgcccggcagaagctagatcccaagattgctgtggctgcgcagaactgctacaaagtgactaatgtggcttttactggggagatcagccctggcatgatcaaagactgcggaccacgtgggtggtcctggggcactcagagagaaggcatgtctttggggagtcagatgagctgattgggcagaaagtggcccatgctctggcagagggacttcgggagtaattcgcctgcattgggggagaagctagatgaaaggggaagctggcattcactgaggaaggttgtttttcgagcagacaaaggtcatcgcagataacgtgaaggacctggagcaaggtcgtccttggcctatgagcctttgttggccattggtacttgcaagacttcaacaccccaacaggcccaggaagtacacgagaagcttccgaggatggctgaagtccaacgtctctgatgcggtggctcagagcacccgtatcatttatggagggctctgtgactggggcaacctgcaaggagctggccagccagccttgatgtggatggctttccttgtgggtggtgcttccctcaagcccgaattcgtgggacattcatcaatgccaaacaatgagccccatccatctttcccttaccctttcctggccaagccagggaattaagcagcccagaagccccagtaacttgccctttccctgcatatgcttctgatggtgtcatctgctccttcctgtggcctcatccaaactgtatcttcctttactgtttatatcttcaccctgtaatggttgggaccagggncaatcccttctccacttactataatggttggaactaaacgtcaccaaggtggcttctccttggctgagagatggaaggcgtggtgggatttgctcctgggttccctaggccctagtgagggcag

SEQ ID NO: 143587 - DNA, 1040 bp, Homo sapiens
atggccacccttgatgttaatgagcagggttgtcttccagggattgcatcaggaggccacctgacctctgacttcctgttggcttcagctaagaaggaaggaggaacactgagaggggacaggaggaggcaggagcatgctgtcagggagaagtgtcaccctgctgcagtaggagaaggagaatgtggaatggagaggagagggggcagagggcaaagggctgagcggcagggagccccttcccagtggtgtgaagggaatgggtcagagaagacaatggagaagatcagggagagatcagcgcttcccccgtcagccctgctcacccccaccacaacccttcctcagtcaccgaagcttcttggcatggaccctcaagtcagctgtgggccaaaggcagctgagaagtggagagccctgcttggttgtcagatatccaaagtggcaccaggaggcctggagggtcttcggcctgccccaggctgcagagtatcccctgtaaacccaggactgagatcaggcagagtaggcgcgtccctactggatggagggggaagtaacaccccaagaacgctgtcatttcctgggccaagttgggacccggacggcctcaccatgatgaaacggcgagctgctgctgcagtgggaggagccctggcagtgggggctgtgcccgtggtgctcagtgccatgggcttcactggggcaggaatcgccgcgtcctccatagcagccaagatgatgtccgcagcagccattgccaacgggggtggtgtttctgcggggagcctggtggctactctgcagtccgtgggggcagctggactctccacatcatccaacatcctcctggcctctgttgggtcagtgttgggggcctgcttggggaattcaccttcttcttctctcccagctgaaccccgaggctaagaaaaatgaggcaagagaaaatgtaccccaaggtgaacctccaaaacccccactcaagtcagagaaacatgaggaataaaggtcacatgcagatgcatcaaaaaaaaaaa

SEQ ID NO: 143588 - DNA, 627 bp, Homo sapiens
tgggaacccacccagaacctccaccctctgacgccatggtcagctcctgctgtggctctgtctgctctgaccagagctgtggtcaaggtctcggccaggagagctgctgccgccccagctgctgccagaccacctgctgcaggaccacctgctgccgccccagctgctgcatttccagttgctgcaggccttcctgctgtatctccagctgctgcaaacccagctgctgcaggaccacctgctgccgccccagctgctgcatttccagttgcttcaggccttcctgctgtatctccagctgctgcaaacccagctgctgcaggaccacctgctgccgccccagctgctgcatttctagttgctgcaggccttcctgctgtatctctagctgttgcaaacccagctgctgccagaccacctgctgccgccccagctgctgtatctccagctgctacaggccccagtgctgccagccctcctgctgccgcccggcttgctgcatttctagttgctgtcatcccagctgctgtgtgtccagctgccgctgccctttcagctgcccgaccacctgctgtagaacaacctgcttccaccccatctgctgcggcagttcttgctgctgagtga

SEQ ID NO: 143589 - DNA, 410 bp, Homo sapiens
atcatcttaacttcctgccagacaatgctggcctgggcatccgcctccccctggagctgggactgggttccttccaggtgaggactgagatctcacggaagtggcatggccatgaccctgagcttctgccagcctggaggacccgtgctaagtggaccacgccttcccgctcggcggcaaaggtgctgacatctatgtgctaggctgcctcatcacgccactggagtccacacttgaatttgggcagctaccacgggtctgccatgctctggaggagcaagggggccacatccccaccccagctgttaaccagcccggggcaggggcaggccttccttcctgtgtctgcatctgactctcttttggaggcccctggatggcaacctctgacttttgggggaccctttgga

SEQ ID NO: 143590 - DNA, 1607 bp, Homo sapiens
atggaccgccggatgtggggggcccacgtcttctgcgtgttgagcccgttaccgacccaggtattgggccacatgcacccagaatgtgacttcatcacccagctgagagaggatgagagtgcctgtctacaagcagcagaggagatgcccaacaccaccctgggctgccctgcgacctgggatgggctgctgtgctggccaacggcaggctctggcgagtgggtcaccctcccctgcccggatttcttctctcacttcagctcagagtcaggggctgtgaaacgggattgtactatcactggctggtctgagccctttccaccttaccctgtggcctgccctgtgcctctggagctgctggctgaggaggaatcttacttctccacagtgaagattatctacaccgtgggccatagcatctctattgtagccctcttcgtggccatcaccatcctggttgctctcaggaggctccactgcccccggaactacgtccacacccagctgttcaccacttttatcctcaaggcgggagctgtgttcctgaaggatgctgcccttttccacagcgacgacactgaccactgcagcttctccactgtaatggccatgggtgaaggggctgggcaggttctatgcaaggtctctgtggccgcctcccatttcgccaccatgaccaacttcagctggctgttggcagaagccgtctacctgaactgcctcctggcctccacctcccccagctcaaggagagccttctggtggctggttctcgctggctgggggctgcccgtgctcttcactggcacgtgggtgagctgcaaactggccttcgaggacatcgcgtgctgggacctggacgacacctccccctactggtggatcatcaaagggcccattgtcctctcggtcggggtgaactttgggctttttctcaatattatccgcatcctggtgaggaaactggagccagctcagggcagcctccatacccagtctcagtattggtactgtgtgtttgtgtctggggatactgggaaagggtaactggagggggattcaatgtgtctgtctcatccaataagcactcatgacctcagccccatactctttcttccctatgttcccagagacagaatagacctggccccttccttctaggggatcacaatattggaaggatgaggactccaaacagccagctcccatgccaaatagaacgatgagtgctgggatcaatttctatgggagcctggggagagggatcctttctagttgaagggtggtgtggtcaaggaagacttcctggaggaagtggttttgatccacactttgaaagatgcatagactttgggataaactgtggcaataacagttggtaggggaatcagcaggatccagcgcccagaaataaaaaagcccagagtgattgtggggaggtggcgtttcccaaggtggctgttccacagagtggatatagggaggtggtaggaagtgagaggagatgaagtgcacacgacagtttctaatcccagtcttgggagcctaggatttgtctttcctgcaggcgtctctccaagtcgacacttttcctgatcccactcttt

SEQ ID NO: 143591 - DNA, 1605 bp, Homo sapiens
agcagccaaggcttactgaggctggtggagggagccactgctgggctcaccatggaccgccggatgtggggggcccacgtcttctgcgtgttgagcccgttaccgaccgtattgggccacatgcacccagaatgtgacttcatcacccagctgagagaggatgagagtgcctgtctacaagcagcagaggagatgcccaacaccaccctgggctgccctgcgacctgggatgggctgctgtgctggccaacggcaggctctggcgagtgggtcaccctcccctgcccggatttcttctctcacttcagctcagagtcaggggctgtgaaacgggattgtactatcactggctggtctgagccctttccaccttaccctgtggcctgccctgtgcctctggagctgctggctgaggaggaatcttacttctccacagtgaagattatctacaccgtgggccatagcatctctattgtagccctcttcgtggccatcaccatcctggttgctctcaggaggctccactgcccccggaactacgtccacacccagctgttcaccacttttatcctcaaggcgggacgtgtgttcctgaaggatgctgcccttttccacagcgacgacactgaccactgcagcttctccactgttctatgcaaggtctctgtggccgcctcccatttcgccaccatgaccaacttcagctggctgttggcagaagccgtctacctgaactgcctcctggcctccacctcccccagctcaaggagagccttctggtggctggttctcgctggctgggggctgcccgtgctcttcactggcacgtgggtgagctgcaaactggccttcgaggacatcgcgtgctgggacctggacgacacctccccctactggtggatcatcaaagggcccattgtcctctcggtcggggtgaactttgggctttttctcaatattatccgcatcctggtgaggaaactggagccagctcagggcagcctccatacccagtctcagtattggcgtctctccaagtcgacacttttcctgatcccactctttggaattcactacatcatcttcaacttcctgccagacaatgctggcctgggcatccgcctccccctggagctgggactgggttccttccagggcttcattgttgccatcctctactgcttcctcaaccaagaggtgaggactgagatctcacggaagtggcatggccatgaccctgagcttctgccagcctggaggacccgtgctaagtggaccacgccttcccgctcggcggcaaaggtgctgacatctatgtgctaggctgcctcatcacgccactggagtccacacttgaatttgggcagctaccacgggtctgccatgctctggaggagcaagggggccacatccccaccccagctgttacccagcccggggcaggtgcagcccttcctccctgtctctgcatctgactctcttttgaggtccctgtatgtctacctctgacttctgtggtccctctgtgtctgctctcatccattcctcttactggggcctggggctctagcccaaggctcagaggagccaataaacctgtaaatg

SEQ ID NO: 143592 - DNA, 1355 bp, Homo sapiens
atgcctggcacatgtaagtgcacaggagctgaggccagcaggatatggaagggagaggacgtctgcgagtactgggggcagagggtggttgcattcttggcaatggtcatgggaacccacacctacagccactggcccagctgctgccccagcaaagggcaggacacctctgaggagctgctgaggtggagcactgtgcctgtgcctcccctagagcctgctaggcccaaccgccacccagagtcctgtagggccagtgaagatggacccctcaacagcagggccatctccccctggagatatgagcctgacaagtgccgcccccacaggttggacagagacttgaaccggctcccccaggacctgtaccacgcccgttgcctgtgcccgcactgcgtcagcctacagacaggctcccacatggacccccggggcaactcggagctgctctaccacaaccagactgtcttctaccggcggccatgccatggcgagaagggcacccacaagggctactgcctggagcgcaggctgtaccgtgtttccttagcttgtggggctgtgttggtgggccctacgaagatgctcagtgctcgagatcgccgggaccggcaccctgaggagggggtagttgcagagctccagggcttcgcggtggacaaggccttcctcacctcccacaagggcatcctgctggaaaccgagctggccctgaccctcatcatcttcatctgcttcacggcctccatctctgcctacatggccgcggcgctactggagttcttcatcacacttgccttcctcttcctctatgccacccagtactaccagcgcttcgaccgaattaactggccctgtctggacttcctgcgctgtgtcagtgccatcatcatcttcctggtggtctcctttgcagctgtgacctcccgggacggagctgccattgctgcttttgtttttggcatcatcctggtttccatctttgcctatgatgccttcaagatctaccggactgagatggcacccggggccagccagggggaccagcagtgactctggggctacctggctcctaggcccagccagccagagaggacagtggagcccagacacgtctcccttgggattcactagcccccagcccgccaaaccccaccccagccctacacagcagtctggcctgagacgtcactggggacttatctgtggagcctggtgctccaggatgtggcttctcatgaagctctggccagaggaggggaacttattgggggagggggggtggaggggaggaatctggacctctaagtcattcccaaattaaaatattcaaattctaaaaaaaaaaaaaaaaa

SEQ ID NO: 143593 - DNA, 1442 bp, Homo sapiens
ctaatggatcactgcacttcttcctgttaagcctggattgaacctcagaatccttctcaacccagtggcacagccagagccatctgagttggaatgtgtaagatgcaagctattgtagccatccccgatgggtcgatgcccagatttaaagatgacaaaactggggaccagcaacaggaaggaaattgtgccagtcacagagcccatcagcagcagagacatggcaagaagcccacgtccctcttctgaaatggaggctgtggtggttttcatcagggaagttttaggggactcttcacagttagtgttgcaggccctggggcagcccttgtacattccttcaatgccggccctggaggaccatatcccaggcttgagtgcatcaaaaggacccactcttccatccccgtggcggctccagggaccagcaggggcagcagggcagagctgaccttcatacacagttccctgcacacactcggctaatgcccgctttccagtcgggaaacctgtcgtgccagctgcattaatgaatcggccaacgcgcggggagaggcggtttgcgtattgggcgccagggtggtttttcttttcaccagtgagacgggcacagctgattgccttcaccgcctggcctgagagagttgcagcaagcggtccacgctggttgcccagcaggcgaaaatcctgtttgatggtgggttcgaaatcggcaaaatcccctggttgcactacctgccctcccatcccactccgactcatttctctccctaacaccagattctctgcagcccaggctccttgaggttgggagcgttcatttaaagtccacgggagaaaaaggaaaaagaaatcatggatgttcccagttccagccttgagtctctctctcaggatgccttttgttgccaagaatgatgaaacagatgtcttggcaatagcttcaaatgtttcctgtgcatcctccaggtggggagggctcatgctttcttgctctgcagtgacttcatgccgtgtgaggctgtgtgcagcagcatcatatacagtttcataccagtcaccaagacccagggtgcagccccccataccagaggcccacagcctcacacctgatcccaagcccagctgctgctgctgctgctgccccaggccaggggaggatccaggacacatgtgcgttgtctggccttggcagccctcagtcatatatgcaaagtactggacatatgagcatgcacagtggtgaggagctattaatgttatgtcagctgctggctgcagccgcctcctccccagcagtcctggctccaaccacccaatcgcctctgaggggattgctccaaactttgctaacgcttgtcctgtaactataacagctattcctttttccagttcttcaatacctttcttataccattccacagcttgctccttctgtcctg

SEQ ID NO: 143594 - DNA, 533 bp, Homo sapiens
  misc_feature (1)...(533): n = a,t,c or g
cccgtccagagcctgaagggcgaggatgctgaggaatccttggaggaggaggaggcgctggaccctctgggcattatgcgctccaagaagcccaagaaacatcccaaagtggccgtgaaagccaagcccntcccccggctcaccatctttgacgaggaggtggaccctgatgaggggctctttggcccgggcaggaagctgtctccacaggacccctcggaggacgtgtcatccatggaccccctgaagctatttgatgatcctgacctcggcgggccatccccctgggtgactccctcctgctgccggccgcctgtgagagtggagggcccacacccagcctcagccacagggacgcctccaaggaactgttcagacaaattcaaaaagagccgtaacactgggattagcttcttgagagcaggaaccacattcattctttgtgtatgccctgtgactatccagggagtagttggacttcctcataataaagaatgttctgatagccattcattcaaaaaaaaaaaaaaaaa

SEQ ID NO: 143595 - DNA, 3598 bp, Homo sapiens
gatatagcgggacagcagcagcccagagagccggagccctgctggagcctgcgcagtgagatggatgtagagtcagggctggaactggaatgtgctgcctcacaggccaaggcttccatggaaaaagaacagccatcattcatggctgagcgctccaagctagctaccacatacgcattgcttctgcccacagggagctgccacatttcccctgactcccccagcgggcccagctcaggggcagaggccgagcaacacaagctgatcaggccaccatcactgttggcttctgtgcccagggggtccctgcagccaccatcaggaaagctcccaccctggggacagtctctcctgcctcctgttcttcctggggtcaaagacgtgctcctgctcaagggtgagcaggtgggaactcttcgagataagcactatgtcttatggttctccatcctgtccccaacacagggcctggcctatcacggcgccgggggacttcccggagccacggagcccgcgccgcccgaccgctcggcccacggagcccatggacctgagcgccgcgccgcgctgtgcctttggctgctgagcgcctgccgccccgcgacgggctggaagcggcccgtgctgcgagcggcgggggctgggccggtccggagcccagggggcggcggcggcggcggcggcggcgggcggactcttgcccaggctgcgggtcgcggctgtcccggccgccgcgggaacggctcggtggtgccgcaccacttcatgatgtcgctttaccggagcctggccgggagggctccggccggggcagccgctgtctccgcctcgggccatggtcgcgcggacacgatcaccggcttcacagaccaggcgacccaaggtacttacgcctcttctgtgcccgcccatcccgtcaggtcctgggctgagaccagccccggagccgtgccgcagctccgttacatttggagccgcggccccatgcggcccaccctcaggccggctggtcccctcgaggaggcaggcggaggccaagattcgcttcttggggaatggtctggagtggcctcggagccctcagagaagaaaggagggcaagagctgtgttcccgggagtcacggcgagagggactgcacggtgacgaatcggcagccgaaacaggccagagcttcctgttcgacgtgtccagccttaacgacgcagacgaggtggtgggtgccgagctgcgcgtgctgcgccggggatctccagagtcgggcccaggcagctggacttctccgccgttgctgctgctgtccacgtgcccgggcgccgcccgagcgccacgcctgctgtactcgcgggcagctgagcccctagtcgaggaaagagagcttattccgggagatccgcgcccaggcccgcgcgctcggggccgctctggcctcagagccgctgcccgacccaggaaccggcaccgcgtcgccaagggcagtcattggcggccgcagacggaggaggacggcgttggccgggacgcggacagcgcagggcagcggcgggggcgcgggccggggccacgggcgcaggggccggagccgctgcagccgcaagccgttgcacgtggacttcaaggagctcggctgggacgactggatcatcgcgccgctggactacgaggcgtaccactgcgagggcctttgcgacttccctttgcgttcgcacctcgagcccaccaaccatgccatcattcagacgctgctcaactccatggcaccagacgcggcgccggcctcctgctgtgtgccagcgcgcctcagccccatcagcatcctctacatcgacgccgccaacaacgttgtctacaagcaatacgaggacatggtggtggaggcctgcggctgcaggtcagaaatgccactcggcccctcgtaactgcaaagggactgaaaggtgtggtctcccagaggtccaggaaggaaagaagccctgggaagtttcccacaaggcccagcttcttctcaaggagactgtggataaggaaagaaggcaggcaaggctgctgtgctggaaagaaggatccttattgtatgaccctatcaggaagtgcttccctccgtgtctccacattggagaccaagtcaatactccaatgccatgtggggccaaacccatcgtgatcaggaggccctggtcccgggtccttcagctacgaggactcacagcagaaattcagctcattagaaaggggagtgctgggccatgggctgaagagaaggctctcagctccaagaagcccaagaaacatcccaaagtggccgtgaaagccaagccctcgccccggctcaccatctttgacgaggaggtggaccctgatgaggggctctttggcccgggcaggaagctgtctccacaggacccctcggaggacgtgtcatccgtggaccccctgaagctatttgatgatcctgacctcggcggggccatccccctgggtgactccctcctgctgccagccgcctgtgagagtggagggcccacacccagcctcagccacagggacgcctccaaggaactgttcagagttgaagaggacttggaccagattctgaacgctgtgagctgagcccaaacccaagccacagcttattccctagccaccagtggcagctaagccggtgatacccacagaaccagctgttccccccaaaaccggccccgcttgaagctgtggctgggcagcagaagccgcaggagcagatccaagccatggacgagatggacatcttgcagtcattggccaaacagactggcgccatcggttggaaaaacagcgtgcctcggatgcctggtattggtcctcctgagaagaagggacagcagcagagagagatcttcccactgctcactccctccagcctcctggacctgctggggcccacatcctggcccatgggtttgtgcctcaaggcccggcattccttatccacgggcctggcccatgtgcctgggctcttccacacgggggcctggcagcaacgcctctgtctccttggttccaccccccccccccccttcaggctaccccagcaagggaggacaggagcagctgggaaattaatttacaatttagccgagtgtgtgcagggaactgtgtatgaaggtcaggcctgccctgctgcccctgctggtccctggagccgccacggggatggaagagtgggtccttttgatgcactcaagcctgggatatggtcctccagggccggcattgaaggaatgtacaagggctgccccagggcctgcaacactaactgtgaagagtcccctaaaacttccctgatgaaaaccaccacagcctccatttcagaagagggacgtgggcttcttgccatgtctctgctgctgatgggctctgtgactggcacaatttccttcctgttgctggtccccagttttgtcatctttaaatctgggcatcgacccatcggggatggctacaatagcttgcatcttacacattccaactcagatggctctggctgtgccactgggttgagaaggattctgaggttcaatccaggcttaacaggaagaagtgcagtgatccattag

SEQ ID NO: 143596 - DNA, 1287 bp, Homo sapiens
gcgtcgacccacgcgtccgcaggaggaaggtgggtctgaatctagcaccatgacggaactagagacagccatgggtttgatcatagacgtcttttcccgatattcgggcagcgagggcagcacgcagaccctgaccaagggggagctcaaggtgctgatggagaaggagctaccaggcttcctgcagctctctggcccagggctgggtcatcagcacaccctgctgctgctgttcagatctgcatcctggtcccgcttggtcccacagtgagaacgctttgctatcacatgggcaggctctgagagccctgccggcctggccttctcaaagaagacctgagagcttgggacccaagcagagaggaagaacagggctcagggtgcttgctccatgctcgctccacacctggggctcaaccctggctttccccggctccctgtgtgacttcagggcaggtcccttgggccctctgggccttatcatcttcatctgtaacagggcgatgcctctgccgtgtctggtggtgttgaggagttcctgtttgtgtaagcagctagttcagtgccagcacgagatgggaggcccatgaagttagcagtgcacaaaaaatagagcaaagactggatgcatttcctgagaacaaccatcactgtaaagcactttacaaatccaaagacaacccccggcaaaaactcaaaatgaaactccctctcgcagagcacaattccaattcgctctaaaaacattacaagttagttcatgtcatgccagatagctgaaggcagcttcacaagttcttaaggccaggaatgccatgtgtctgctatgcacagctgggccctggcccttgaggcctggaatggacaggcaaaggttgacggcagatgttgggtgccctgcttccttgccccagcagcagtgcttggtggaggctgaggccctgcacaggcaccctcactgctgaccttgagcctctctctcctctaaagtgggaaaaacaagggaatccgtggataaaaatggctcaaggacctgggacgccaatggagatgcccaggtgggacttcagtgagttcatcgtgtttcgtgggctgcaatcacgttttgcctgttcacaagtattttgagaaggcaggactcaaatgatgccctggagatgtcacagattcctgggcagagccatggtcccaggcttcccaaaagtgtttgttggcaattattcccctaggctgagcctgctcatgtacctctgattaataaatgcttatgaaatgaaaaaaaaaaaa

SEQ ID NO: 143597 - DNA, 522 bp, Homo sapiens
gccctgccagcccccaggaggaaggtgggtctgaatctagcaccagtgacggaacctagagaccagccatgggccatgatcatagacgtcttttccccgatattcgggcagccgagggcagcacgtcagacccctgacccaagggggagcctcaaggtgctgatggataaggagctacccaggctttccctgcagagtggaaaagacaaggatgccgtggataaattgcctcaaggaccctggacgcccaatgggagatgcccagggtgggactttcagtgaagttcatccgtgttccgtggctgcaatcaccgtctgccttgtcacaagtacttttgagaaggcaggactcaaattgatgccctgggagatgttcacagatttcctggggcagagcattgggtcccaggggtttcccaaaatgttttgtttgggcatttatttcccctaaggctggagcctgctcatgttacctctggattaataaatgctttatgaaataaaaaaagtcgacgcggccgc

SEQ ID NO: 143598 - DNA, 648 bp, Homo sapiens
tcataaacctgcagaaaaccctaaatcaggcagacgagtggaagtggcttggttgtcactgactatgtatgtcttaagaccaagtcggcttgctccttcatcagaagcacagccctggaaagtgcgtttcactaaaaatagggcagttggaggcatgactgcaccagcagatagttttcgcagcagcttttggggcaggctgactgataaagctttctgctctgggtgctccagattactcacagctgtttccagaccaaagcgccctggggaggctggcatcacgccacgcgtcaggtgcttgttatcaaacatgaaggatatcttggttgcttctaagttttggcaattatgaataaagctgctatgaacatctgtgcaggtttttgtgcggacataaatttgcaattcatctggatgaataacaagaagcgtgattgcaggcttggagcctgggtcactttctgtttggaagtgaggcagccacaaggcccctcttgttccctctgggacacctgccctgaatatagtgcattcagatggaccccgtgacctgtcctgaggtttcacgtccacactcagtctcctggctatggaattgtaatcgccgatgctgggggtggggtctggtggaagcgattgtatcat

SEQ ID NO: 143599 - DNA, 1213 bp, Homo sapiens
cccaagatttcccggcaggcctatccacccctcggagaagcccccgggcaaaaacctcaaaaggtggtcaaggacacggcccctaagacatctggaggaagatcttcccagccagttagaggctactgacgctgggaacatgcctatgtgtttgaggacacaagggagacaaatgcagctagagatgagtccacaggtgaaagtaataggaaatgagaccaaggaggaaatgagagcaggtcatggaagaccttagctgccattgaaggacgtaggcttttattctgagaagagcagggaagtgaaatgaaggggttttgaagcagaggagtgacatggccttgtcactcctctgtgacaagaggagagacatggcttgacttggcttgtcttttaataagatttttctgcctttgtgttacaacagactgcagggagcaagtgcagacaccgggagacctgtgggaagctgctggagtgaccccggaaaaccacgctcgcgggttctgaagaggcaggggcagtggagatagctccctatctctgcgatatgtttgataacaagcacctgacgcgtggcgtgatgccagcctccccagggcgctttggtctggaaacagctgtgagtaatctggagcacccagagcagaaagctttatcagtcagcctgccccaaaagctgctgcgaaaactatctgctggtgcagtcatgcctccaactgccctatttttagtgaaacgcactttccagggctgtgcttctgatgaaggagcaagccgacttggtcttaagacatacatagtcagtgacaaccaagccacttccactcgtctgcctgatttagggttttctgcaggcacctctgcttttgatcccgcgaagaatgatccgctgagtcgtgccgtgcttggtgaacacagcctcgaagatggcatagatggcttccttggattgacctggaatcaggagttagccgcgacaatcgaccgactggaatcactggatcgaaatgaactgcgtaaacagttttccattaagcgactcaatgaaatggagatttatccgggagtgaccttttcagaagagttagaggggcaactctttgcctcgatcatgcttgatatggaaaagctgattagcgcgtatcgacgtatgctgcgacaagggaatcatgcgctgacggttattgttgggtgatatagcttgatgcct

SEQ ID NO: 143600 - DNA, 950 bp, Homo sapiens
  misc_feature (1)...(950): n = a,t,c or g
ctagtgccggcttcgcggtcgcagcacccggcgtttccgttggctctttcgccagcggcgcgaagcggcgagttttgctgtcacagcacttgctgcacggagtttctcggtagccgaacttctctttttttctcagagtcgacggtttcttggtgacggcaccgctggttgcgccaaaacaaatgttgtccttgacaaccccgccggctgcattccctttcaggctcctggcaccgccatttcggcgagccgtggtctcttgttcacagctctgtgcctccatttctcggtggcggcagccctcaggccgcggatctgagagatttaaagtcgcagctgcccccgttgcgccgagtctggcgttgccggatgggtgctgcagggctgggcggggggagcccgacgctccttggagccggtgacaggggagctgcaggggcacagtctcttcccagcgccgccgcacgggttccggctcggcctccagaacgcagtcctgtggcggcgccggcgtctctgtcgcaggaccccacggtttcgcgcgtcgttggcttcttagtcctagcaagtttcgatttcgcggtgcctgggatttccaccctccgtttccccatgggaaggcgaagttaccctgtgactcgttggtcaccagctccgggtttcccgtggcctcggatttttaatcataaccaccctgggggcagcctagccccaagttttttagtcctagcaaggttcgggttcccactggtaaaacctgctttaagtgggcaggaaaagtttaactcctggggaaatttggggaccaaccaatgcnnnnnnnnnnnnnnaaaggtttagcgatgaccagtttagcagtgttgggagctcttataccaagtttggtttcgcaatatcgagtcctgtcttagctatgcttgtgtgtttttaaaactcccgtggaagtcagg

SEQ ID NO: 143601 - DNA, 390 bp, Homo sapiens
cctcgcttctttttctgttattgttcttcttttttcctgtcatattccattcttttagaacttgaattgcactgccatccacaaaggcttgcacggctttatccacattaaaatcaaactgttggagcaccaggactatttcattattgcttttgttgggaacaactgatctaactgcatagatcttttccttgacattcacatgagtattgagttcagccatcttgcttctagtggaataggcctttttaaggtttcctcgtgctccaaatcagggctctcagtccagtttccagcgactggctttctcaggaggcacataagctctgttcccccactggccacctttatcaacttgcttttactgtgaccagtaagcggacgcgtggg

SEQ ID NO: 143602 - DNA, 430 bp, Homo sapiens; identical to SEQ ID NO: 114080
  misc_feature (1)...(430): n = a,t,c or g

SEQ ID NO: 143603 - DNA, 1281 bp, Homo sapiens; identical to SEQ ID NO: 116400

SEQ ID NO: 143604 - DNA, 529 bp, Homo sapiens
tcagcccttggaaacccgaccaacccggggtgttccgccgcctcctctgcgctgcgggtctgcacactgggctccaaacgtgtgtgtaataaccaagttacacatgggcatcgtgggcttcagccgtgggtttctgcctgtgtctgcttgttgaacacccacagttgttatctgaacacccacaattgttatctgacatgggtttccgatccattctatgcagaagtggtattgtagtaatggatttgcttctgccagtgcagctgttttaaaagcatggaacacaaatgacctggtcacagtaaaagcaagttgataaaggtggccagtgggggaacagagcttatgtgcctcctgagaaagccagtcgctggaaactggactgagagcccttcccatttcatttcctttttttccaaagggaatttttcttaaaagcaagacagttttttccaaatgtgcactgtcagtgcataaggaaaccaaatgcaccaaaagagggtggatcagcacaaatttctcatcaaag

SEQ ID NO: 143605 - DNA, 1353 bp, Homo sapiens
atggttgcgtggctacgacatctcttttgtttcccctctttgcccttcacccgcctgctgtctgtccccctcaatgccagagccactgtggcactgctgtggagaccgcctgtggaaaaacttggcccttctggaaaaatcgtggtttctggaatggaaggagaagctgtgcaaaagacacagttagggggtctcaccccagacatagcctctgggctggacctggattattttgagcactccactttggagcccactggtctagaatttcagtactgtagaagttcagaagagaaggacttagaagtctggagtagtccagacagactcagctggactggaagggccctggttcacagccgtgcactccttgccacatgctgtagatgggaccatgtgatgggtccttgccagtggagtgtaagcagaagtgatacgcatcacttccaggcagaagtggttaaggagcaagtgagtcttctcgctctcttcttctcttgctattgcctccatgcagacgaacttactgaccttgggaactctgtgttggaaatggtgaagccagaagatggaactagcctggtgcttcagacgctgcttggagaacagcctctgcccttcaggaacacctattttggtgttcatatgagcaagaatgttggagcagtaacagtggacttcagctcatggcttcgtctccgggaacgtattgtgggggggaaaacccaaatagtcactggatccattcttgagagcataatctggggcctgtctgaaaatttaatagctagaaagggagctgcacttctctctcaaagccagacagctgtctcccaaatgtgcactgtcagtcgcataggaaaccagatgaccaaaagagggtggatcagcacaaatttctcatcaaagctgaaagaaagaaagagaaagaacctcaaagccaatgccctgctgactgtggcatggcttcgtctccgggaacgtattgtgggggggaaaacccaaatagtcactggatccattcttgagagcataatctggggcctgtctgaaaatttaatagctagaaagggaggtttcctcgtgctccaaatcagggctctcagtccagtttccagcgactggctttctcaggaggcacataagctctgttcccccactggccacctttatcaacttgcttttactgtgaccactgcctgcacagggcttctggattgcccattggaagaaagctggcacatctctgaggctttgctaagcttcatccaaactcttgtgtggatgcgaatccttttcaatgacttgacgcttgtacccctcattccacacacagatggtgttgggtcttga

SEQ ID NO: 143606 - DNA, 1350 bp, Homo sapiens
tcactgaaagagagagctactcaaatccaaatccaaaacgcttccaccagcattctcttttcccaataagccacaggcagaacagccatggcctacagaaagcagccaaatgcctgcagctgtgagcaggtgtaagatggctgtaagggccatccctccatctccagaggcttccggagccttggagccgtggatggcaagcagacactgataccggatgagctgtgtgatcatgggcacatcacgtctctgaaccttggtgttcttcctgtgagatgggccattaacaccaggcacctcataggatggatgtgaagacttccaggctgttgacaccaggctcagattactttgtctattaattcctggtaaacagtactttctagtactgccaaagatgcttacagttcccttcttgctcatatgaacaccaaaataggtgttcctgaagggcagaggctgttctccaagcagcgtctgaagcaccaggctagttccatcttctggcttcaccatttccaacacagagttcccaaggtcagtaagttcgtctgcatggaggcaatagcaagagaagaagagagcgagaagactcacttgctccttaaccacttctgcctggaagtgatgcgtatcacttctgcttacactccactggcaaggacccatcacatggtcccatctactcttctccatggagaaccagatggcccaggtatgagtggttgaggggctggtgccccgatgaggtgggggcaaagatgacctctctccagggtgatgtgaggaaatggagctccggaaggtaagaggcttgctccccatcacacagctggcgtgcgtggccaagagcagggcctgcgtgtgttttctgggctgtctccaccgcagtgctgactctcctcctcctacttgccactgataggcctggacttgcacaatttcaatctcaccaaaaatcacattcaattcagtgaccctgattatcttcagtgtgtgtgtgtgtttttctataggctcattacgatcactaggtcccacaataggctcaataggctctctgcaagtggtcacagtaaaagcaagttgataaaggtggccagtgggggaacagagcttatgtgcctcctgagaaagccagtcgctggaaactggactgagagccctgatttggagcacgaggaaacctggtgggcctgtgctgggtggcctggtgttgataaaatgggcttgggccagccgctcaccagcttctccctcagacccatccccaggccccaacctctgctgcagccctaccagccccgccacaaagcccagggtggacggacccttcgtcatcagaaacat

SEQ ID NO: 143607 - DNA, 918 bp, Homo sapiens
atgagtacagctgtggtcgtgaaggttgtgctttgtacagtagcacctggcaggggctctgctccttccttaagctcgtgtcttgactggaaggtcaatggagcagaggggagccataataaagatctctttgtccttacctatggagctctggttgcccagctgtgtaaggattatgagaaggatgaagatgtgaaccaatatttagataaaatgggttacggcattggaacgcggcttgtggaagactttttggctcgatcctgcgtgggaagatgccatagttattcagaaattatagacataattgcccaggacatggagagggggttctgtgctctccacatagacactgaaggcagatacgaatggtggacaacttccactcagctccaatctactttacctcgagcagcacagtgctctgtctaccaaaagcagcctgacaggaaatccctaactgtaggccaaaagattgaagtaggaaacccaggtattggaacggaacagagtccccagggtctagtgagatttgcaacccaggcattccttaccacgcacagagctgaagggttgcagcaaagccaagtgaaaggctcagttattcacctgaagagtcaggacaaatgtggagaacacaggttcacaacaaaccaggtagaaacaggagacccggtcagagagagcagttctcagcacagtgtaggcaggggaggacccaaggatattcaaatccagggtgccaatgtcccagttcggcagtgtaacctcctctggaggatcacccttgggccactggagactcctcacctggagttttctggggaatgctctctcttggctgcaatggaagccccagagcacacttgggatcaggagaaatctgacattccagagcccccccataggtcaagctga

SEQ ID NO: 143608 - DNA, 828 bp, Homo sapiens
gtaagatagggagagcaaattggtgtctgctcttgagtatcttgagggaatgggtatctagaggcagcaggatgaactggctttgatagcagagactttaaaatgtgtggaccattagttgtctttggatgtgctccctagaggctgcgcctgacacagggagctgtgtatacatgatttattaaaaggaaatcctcttaggagaaacatattagcaggataaacacaagaaagaatgcagttacaagtggagtctcaatcaatcccagaggaaattctgggacttcagcctcagcttggacctatgggggggctctggaatgtcagatttctcctgatcccaactgtgctctggggcttccattgcagccaagagagagcattccccagaaaacttcaagttaagagttttccagtggcccaagggtgatcctcccagaggaggtttacaatgccgaactggggacattgggcaccctgggatttgaatatctagagaggggcacccaatggttcatactaatgttttgccataacagtctcttctaggtctagacttgaagcatatggaagggtccttgggctagagccaacccaagcccaggctgactcccttttaatacttctaattttccctgaagatctggtcttctccctaccaccactaccctattacataagaggaaaggattggagaatgttcttgaaaagaatgtgatgctttcccatacaaggaatatactcaaggaaaaatttcatggcacaaaatgctgattctgtccaatttatcccgatgaataaattgtgtacacatatatatatgaaaaa

SEQ ID NO: 143609 - DNA, 381 bp, Homo sapiens
tcatcttgccacggctcttctaggcctcttcagggttaaggcatactcccttctgagaatttctggtctaaccggttgtctagcttcacatcctgtttctacggattgtttgtaaccagcttttgctgcaactgttactgttgattgatatcttgccccaccctcactaaacttaataataaatgctggtatatccagtgcattggcagcaccatgggaccagaaagtggtgacccccctggacccagttttcactatcttgtgtgtgtctattatttctcgacctgctgatctgcctggcggcaggcaagagagaatgagagccaagccaaaggagaaaccgcttatgaaaccatcacatcttgtgagaaccgctcccat

SEQ ID NO: 143610 - DNA, 1358 bp, Homo sapiens
atgaaggttgagaacaactgccaagttgcaagattacttcctgagggtcagttgtatgcaaagcaaatacaaggagagcctatgaatggacgtgcagtcagggaggtttcacatcaccaagattcctatcctagaaaggcagatgttcatagctctaggaatggaatgcgacccttgtggagagcctataaacggatgcatggggatcctgaagatgcatgcaacaacgagacagagaaatttgctgaaaaagcaccacagcaggaaacaactaacacatccaatcatcaaaaagaagaaaagaccacgctaactcctttacaacagacaatccagacagccatcctgaacaacttgtctccagcgatccagactgttaaaaactatacatattgggcctatattccttttcctcctcttattcgagccgtgacatggatggatgctcctatcgaggtctatgttaatgatagtatttggatgcctggttctctagatgatcgttgtcctgcacaaccttcagaagaaggaacccctttcaatatcactttaggttttagagagcctatgaatggacgtgcagtcagggaggtttcacatcaccaagattcctatcccagaaaagcagatgttcatagctctgggaatggaatgtgacccttgtggagagcctataaacggacgcatgaggggggtgcctatccatatggataagatagggctataaacgccctcatcttgccacggctcttgtaggcctctttagggttaagacatactcccttctgagaatttctggtctaaccggttgtctggcttcacgtcctgtttctatgggattgtttgtaaccagcttttgctgcaactgttactgatgattaatgtcttggtaatcataggtcatggaaagactgtgtttctgttttaaggctctgttagatactacttatgcacacactatatcataaattcttatccgtgtatactgtacttgtgcatccagatggtatgttaaagaattgcttcatccccatgtgtccatctcacctcataatcaaatgaccctaaatccctcactaaccttcgcctgccctctcgccaaacttaataataaatgctggtatatccagtgcattgttggcaccgcgggaccagaaggtggtgacccccgtggacccagctttcactatcttgtgtgtgtctattatttcccaacctgctgatctgcctgggaacaaagagagagccccattgcattgtgggctgctgaccagatcctgaagatgcatgcaacaacgagacagagaaatttgctgaaaaagcaccacagcaggaaacaactaacacatccaatcatc

SEQ ID NO: 143611 - DNA, 1334 bp, Homo sapiens; identical to SEQ ID NO: 127920

SEQ ID NO: 143612 - DNA, 1418 bp, Homo sapiens
gttcaaacaattctcctacctcagcctcccgagtagctgggattacaggtgtacgccattgtgtccggaattggtgggttcttggtctcactgacttcaagaatgaagccgtggaccctcgcgcctggacaacaaagagcaaaaccccacctcaaaacaaaacaaaacaagaaaacaagaatgaagatgtagggagagatcagagggtggagtggcttgtcacagaggaggtctctgagttgagccttaaaggagagaaattacactggaaggagaaggaagtacagagcacaggcaaagaaacagatgcacggagcagcatgaggaattatttgatgttgctgggacctgaagtgcaagaaaaagagccagtgaagagaagactagcaagggggaaggcttttgttgaattagcagaacctaccagagctcctggaaattctgggtttccggtctctgggggcgtcttcactccaagcctcggtgcccttacttggatttgcaagtttagagttaaatcgtgggccatactcaattcccaactgctgcttgacaccatgaagaaagggattgtatataagaatggagacagaatccagggcaacaggtcagcagacaatcgtaataatggtgtgcctctcactggggctcgggacatgcagcccgccatgcctgagcctcccacccactccatgggctcctgtgcagcccgagcctccccgaggagcaccaccccctgctccacggtgcccagtcccatcgaccacccaagggctgaggaatgtaagcgcacggcacaggactggcaggcagctccacctgcagccccgctcagggattgtaaatacaccaatcagcaccctgtgtttagctcaaggtttgtgagtgcaccaatcgacactctgtatctagctgctctgatgaggacgtctgtatctgctctctgtgcctgggacagtgagggcctggtgcatttgatgcaggatttttcttggccccttcaacagactcatagaaggggcaccccacctattcggtctgccatgctcaaccccttgcaggagggagcacgtgagcaagcaagtgcaagatccggctggctgctccggctgctgacacaggagcaacttctgtgcagggcctgcatccagaccaggagagacagggaaggaaaaacacggcaccgaaaaggcactccggaaattggaaaggggagagcattttggaagaagagcctgaaaatcatcctaatcctatttaactgcctgcgatactggaatgcctacatggaaatatgggtgccagcccttaccggtattcctcctaatgtcacagttaactatgccacatctagctctaaggattcacgcactgatggcagggttgacttactgatggcagttacagatggcatgtga

SEQ ID NO: 143613 - DNA, 711 bp, Homo sapiens
tcacctgccaatggcagcacagcctctctggcacagagggtctaaaaattcttgtaaaccatttggaatgtttctgacaacatcacaagaataaccatcttctggcaaaagaaacggcagctgcagatcaggatcctcctccaactgcacttcccttccatcactgcgggccagctcatcggcagtgttttcagccacagtcactacattttctataagatcctcgcccttgcaaagtgctgggattatggggatgagctgccacacttggctcccaattatattttgtttttcctcagcaagttcatccaatgtaaatttctcaagccaggagggccgctccatggggtcctgtgcagcccgagccttcccgatgagcgccgcctcctgcttcagggcacccagtcccatcgaccacccaaaggctgaggagtgcgggcgcacggcgcgggactggcgggcagctccacctgcagccccggtgcggggatccactgggtgaaaccagctgggctcctgagtcgcgaaggtctgcagcttcactcctgaagccagcgagaccacgagcccactgggaggaacaaacaactccagacgcgctgctttaagagctgtaacactcatcgcgaaggtctgcagcttcactcctggcagagacaacttcttaatgagttctgcttctggtccacttccactccattcattcttcat

SEQ ID NO: 143614 - DNA, 732 bp, Homo sapiens
ctagacataaagactctccacgtccccaccagactcaggagcccagctggcttcacctagtggatcctgcaccgggactgcaggtagagctgcctgccagtcctgcgccgtgcactcgcattcctcagcccttgggtggtcgatgggactgggcgccgtggagcagcgggtggtggtcgttggggaggctcgggccgcacaggagcccatggagtgggtgggaggctcaggcatggtgggctgcaggtcccgagccctgccctgcaggaaggcagctaaggctcggtgcgaaatcgagcgcagcgccggtgggctggcactgctgggggacccagtacaccctctgcagccactggcccgggtgctaagtccctcattgcccggggccagcagggctggccagctgctccgagtgtggggcccaccaagcccacgcccacccgtaactccagctggcccccaagtgctgcacacagccccggttcctgctcgtgcctctccctccacacctcccttgaaagttgtagatgtcctagcatcaacaccagcttgcacaaacatgcgtgaagttcttattgacagctgtgtgctgtaagggtggttgccattgtacaaaataaggaagattctttctttacctctatctgtggttttatatttcctcttcttctccactaattgtacttttgtcatgtcatcaatgacctctatattggcaaattttataatcat

SEQ ID NO: 143615 - DNA, 543 bp, Homo sapiens
ctagatataaagactctccacgtccccaccagactcaggagcccagctggcttcacctagtggatcccgcaccgagactgcaggtggagctgcctgccagtcccgcgctgtgcgctcgcattcctcagcccttgggtggtcgatgggactgggcgccgtggacagggggcggcgctcgtcggggaggctcgggctggcctgccctccctcccttcctttttcttttccttccttctttccttcctttctttcttccttccttcctttcctcttttcttttctcttttctttcctttctgtccagtgaactgtggtgaacagtgtcccataggtaagatgtagaagggagagcaggccccctgggaagcccctcccgtcgggcagcgccgccttataagcgggttcccttcccgggggcggcagcggctggtcggcggcagctctgctggtgcgggggcggcgagcccgggatcgagctaccgcggccgagcgcgccggccaccgcctgcaccgcccttccgcccgccctccggacggccgcat

SEQ ID NO: 143616 - DNA, 1083 bp, Homo sapiens
ctagatataaagactctccacgtccccaccagactcaggagcccagctggcttcacctagtggatcccgcactggggctgcaggtggagctgcctgccagtgctgtgccttgcgctcgcattcctcagcccttgggtggtcgatgggactgggcgccgtggagcagggggcggcattcgtaggggagcctcgggcaatgggaaggtgtggaagtattaacattttgttgctgcttttgagaaccttccctaggagatagcggggatgggtctttggcctcttcatgactttctctttcttgctgcatttctgctctgccagcttaggtgatgaggatacaggtcctactttattatctccgttttgctgaccaagggaccgggttccatttggtactgtgtttaaggcacacagctggtgtgcagtagagctgggattcataatcaggtctaactccagagcttgtgctctagatggttcccacgtcctgctgcttctcccaggggctctcctggcatcccaagtagatgggagcagatcagaggagctcagagtcctctcccggaccacagcctggagggccacgtgcagaggggcctcaccacatccaggaagcaccaagatccgcctgagcccaaggagcaggcgcagaggcagccaggttgggggccggccaggcctcaggctgtcagagcaccaggagaccagcaggcagcaggagggagccaggcgtttccctggacggcggccatcgggctgttgttgggatccagtttcaagctccttcgaggagagccgcatggggtcatcccctccacgacgccccaggaaggagactgatgagcagacagttgttaacgccgcgccgccgccgccaccgtggtgattaaggccgcagtaattggcctcgcagccaggcaggggccgggcctgacagccggcagccgccagggtctggtcatcccataggaagctcttactggtagggactgtctttcccatattcccagtcgtgcctggtacagggttgcatgtttcataacaccctgcaatgcacatcgatgcatgcacacattttggcat

SEQ ID NO: 143617 - DNA, 972 bp, Homo sapiens
atggataggcctgaaacctgggtacacaagggcagacctgacgcctatgtctgcaaatatttgcctacatctgtagaggctggccttatccttgggtccacagggggctacttggctctgggattggctttgagtctgagtctgcaggaaatagtcagttactgggatggatctgatgtccaggattataggggacagcccagtgctggagaagttccagaggctgggctgctaaggggtcctggacaaggtcgcttggatagcggcctaaccacagcattatacatgctcaggaagaggcaaagccggaaatttaccacttggcaaagcgtctttacaaaaccagagtttggctttgtggtagcttccttagaacttatctacaaggaagtaatgaattcagaagaaaagactaaaaatggtgtagtaaaaggacagccttctccttcagcttgcagggaggtgtggagggagaggcacgagcgggaacccgggctgcgtgcggcgcttgcgggccagctggagttgcaggtaggcgtgggcttggcgggcccccgcactcgggacagccagccagccctgctggccccgggcagtgagggacttagcacccgggccagtggctgcggaaggtgtactgggtcccccagcagtgccggcccaccggcgctgtgctcgatttctcgccgggctgtagctgccttcctgcggggcaaggctcaggacctgcagcccgccatgcctgagcctcccacccactccatgggctcctgtgcggcccgagcctccccgacgagcaccaccccctgctccatggcgcccagtcccagcgaccacccaagggctgaggaatgcgagcgcacagcgcaggactggcaggcagctccacctgcagccctggtgcgggatccactaggtgaagccagctgggctcctgagtctggtgaggacgtggagagtctttatgtctag

SEQ ID NO: 143618 - DNA, 2718 bp, Homo sapiens
gatatagctgacctggcatttgaggtatcagggaggaagcctcacccattccctagtgtcagcaaaataattgctgacatgctcttcaaccttttgctgcaggctcttttcctcattcagggaatgtttgtgagtctctttcccatccatcttgtcggtcagctggttagtctcctgcatatgtcccttctctactcactgtactgctttgaatatcgttggttcaataaagtggtgggttccgttcatgggagaataggaaactgcgtgagtggtagaggcaacaagttcgaagagctgcgggacgttcccactctctctggtgtagccttggctcaccgaggcgcgcagggagtggaagtgcctgaggataaagctctgctgcataaaatcttagttgagaatccatcagcaagaattaccattccagacatcaaaaaagatagatggtacaacaaacccctcaagaaagataacctcaaaatctcagactttggcttggcaacagtatttcggtataataatcgtgagcgtttgttgaacaagatgtgtggtactttaccatatgttgctccagaacttctgaagagaagagaatttcatgcagaaccagttgatgtttggtcctgtggaatagtacttactgcaatgctcgctggagaattgccatgggaccaacccagtgacagctgtcaggagtattctgactggaaagaaaaaaaaacatacctcaacccttggaaaaaaatcgattctgctcctctaggaacatcaagtcagcctaatgagctttctggctccatagatcatcaaacttcagttcagcaacttccaggtgagttcttttcacttgaaaacccttctgatgctgaggctttatatgagacttcttcaggcctgaacactttaagtgagcatggttccagtgagcatggttcaagcaagcacactgtggccgagcacacttctggagaacatgctgagagtgagcatgcttcaggtgagcccgctgcgactgaacatgctgaaggtgagcatactgtaggtgagcagccttcaggagaacagccttcaggtgaacacctctccggagaacagcctttgagtgagcttgagtcaggtgaacagccttcagatgaacagccttcaggtgaacatggctccggtgaacagccttctggtgagcaggcctcgggtgaacagccttcaggtgagcacgcttcaggggaacaggcttcaggtgcaccaatttcaagcacatctacaggcacaatattaaattgctacacatgtgcttatatgaatgatcaaggaaaatgtcttcgtggagagggaacctgcatcactcagaattcccagcagtgcatgttaaagaagatctttgaagaaatgtcattttcctatttctacatgcagacattcatccaccatcactcggaaaacattaatgacacataccatgaactacagaaagatgactcaaatataaactgtgtacaaagagattatgttataattcggctctcagcagctgctgctggtttctcggctccagcaccacgagtaccgcactctgaggtttacaaagcactctgcttcaccgactgtgatcctcacagtcctgtccggtggcctcacgcaggtggcggtgcagcctttcaggcccagagcggccaggagcgaagcccgcagccccgcctgatctctccccgactgcaaagcagccctgggcgggagcggcaacatctccacgtcacccttttggagccgccgacattcagaggggcaggacacgggaacgcgcgctgtcttgctttacggcgcgggtgcgcgagtttgcggcagcgtgacgccctcaagttttggcgggaaaagcgctgcatttggattcctgcagtggtgggcaaaggacagtccgccgaggtgctcggtggagtcatggcagtgccctttgtggaagactgggacttggtgcaaaccctgggagaaggtgcctatggagaagttcaacttgctgtgaatagagtaactgaagaagcagtcgcagtgaagattgtagatatgaagcgtgccgtagactgtccagaaaatattaagaaagagatctgtatcaataaaatgctaaatcatgaaaatgtagtaaaattctatggtcacaggagagaaggcaatatccaatatttatttctggagtactgtagtggaggagagctttttgacagaatagagccagacataggcatgcctgaaccagatgctcagagattcttccatcaactcatggcaggggtggtttatctgcatggtattggaataactcacagggatattaaaccagaaaatcttctgttggatgaaagggctgatcgtcgtgtgttgccacccattcatgtcaagatgactaagtttggatttttgcgattgtcctatgagaagcaggacacacttttgaagcttctcattctgtcaatggctgctgtattataccctctgaatgagcaaatattgatgttagataatcaaggaatgcaagagcatctgctttgtcgtcaagagctgttagggaccataagggacttgacacttccttttgcagaggaggaaactgattcccagagtggtgaatgcagtccagacctattcctactaacttatacttcctctctcactctgcctctcctactggtagctaaaggacacaattctgacacatactga

SEQ ID NO: 143619 - DNA, 644 bp, Homo sapiens
gtaagatgcctgcttcccctttgccttctgccatgaatggaagcttactgaggcctccccagaagcagaagctgctacacttcctgtacagcctgcagaaaggtatatctcctaatgctatccctccccactccccccaccccacaacagctccagtctacagctcccagtgtgagcgacgcagaagacaggtgatttctgcatttccaactgagactgaagtctacattccaactgagaatgacagggaggtgtggagggagaggcgcctgcgggcacctgggctgtgcgcggcgcttgagggccagctggagttccgggtgggcgtgggcttggcgggctccgcactcgaagcagctggccagccctgctggccccgggcaggcagggctcgggacctgcagcccgccatgcctgagcctcccccagcctccgtgggctcctgtgcagcccgagcctccctgaggagcgccgccccctgctccacggcgcccagtcccatcggccacccaagggctgaggagtgcgagcgcacggcgcaggactggcaggcagctccacctgcagcccccgtgcgggatccacttggtgaagccagctgggctcctgagtctggtggggacgtggagagtctttatgtctag

SEQ ID NO: 143620 - DNA, 1515 bp, Homo sapiens
atggggcagcctctgctcctggtgagggactcaggaggtttacaattatggcagaaagtgaagggggagccagtgcaacaacacgaaaggaggataataccccccgccagagaagagaaggtgaagaggtccccagcagggccaccccccagcggtgggttagattctagccggcataagatcccttcccatgagcaggcttgggagtgcagcctgcatgcagaacaaatcaccagcctcgtgggatctggtgcagcccgagcctcccggacgagaagtgccccttgctccacagcgcccagtcccatcgatcacccaagggctgaggagtgcgagcacatggcgtgggactggcaggcagctccacttgcagccccagtgcgggatccaatgggtgaagccagctgggctcttgagtctgaaacaagggaagatgaatctacccacgaacagggcgctgcggagagtaatgagagcgacacacatgagaggagacgctggagagaagtgcgaggagaggatgcgagaggcgtaagattcgaggagaaaagaacgcgctttgagaatcggagagactcaactaagacgcacaaggtggaagatgtcgacaccgacgtacggcgggagagaaatagggggttctgcaggcaaacagagacccccaggattcgatacccggttacccgcgagaaggtgggttcccgaattcaagaaggttcccttatatataccggggaagacctgtgcattccagtatggtcctcagtggcatatgtgcccattcatgttgaaataaatgaaaaaattcataacctcctcacaagagccatgctagaagttcccagtcgccaaaagtctactcttaagagagcatctccattctcccagaatcacctgggaagcagctgctgtgagtctggcccaggttctgttctctgcacccacctaactcagtgcatttgcatcaaggctggaatctcaggttctcagattggagggtgctccctgggtcggatgacacagggaatccttcctctgggattcctacgtgtgccccagcatcctggagtcgctattcgggcgcaaaaattgtcctctgtgtccggttctccgggtttcctttctccccaaaactctccccagatccgtggcaactcgtggaggggtcccccctcctctgcctggagcttgggcccctcctccataaatcgcattttgcaagggacccctctatactgggaccgtgttcccccttcagaatccttgtattttggagcacctcaggctatccccagtaagaagcatcccagactgtgcatttccaaccctgctgaaaagcaggacaaggagaaagggctgactctgcctcagctgcagatgaggctgtgcagtctgcagacaattgtgggttcattactgacagtagaaatggcactggaaattgtcgggatcagagcaaaggggcttctgagtgaactaggaacaccagcactgacagcaaaaccacccagctaa

SEQ ID NO: 143621 - DNA, 2211 bp, Homo sapiens; identical to SEQ ID NO: 117632

SEQ ID NO: 143622 - DNA, 1902 bp, Homo sapiens
atgagccctggggaaaaaaatcagaaggaagctgaattactaaagaaggcagatgtaaaaaatagatattggaggtcaagtagtagtgtgtccagaattggtgggtttttgggtctcactgacttcaagaatgaagccgcggaccctcacggagtgaagctgcagaccttcacggtgagtgttacagctcttaaggtagcgcgtctggagttgttcgttcctcccggtgggctcgtggtctcgctggcttcaggagtgaagctgcagatcttcacagtgagtgttacagctcataaaagcagtgtggacccaaagactgagcagaagcaagatttattgcaaagagcgaaggaacaaagcttccacagtgcggaaggggaccccactagatacaaaggttctccacgtccccaccagactcaggagcccagctggcttcacctagtggatcccgcaccagagctgcaggtggagctgcctgccagtcctggtgccgtgcgcctgcactcctcagcccttgggtggtcgatgggactgggcgccgtggagcagggggtggcggtcgtcgggaacctccggccgcacaggagcccatggagcgggtgggaggctcaggcttggcgggctgcaggtccccagccctgccccgcgggaaggcagctaaggcccgagacgttaaagcaaaatattatactgtccttaatccagtgtataggcgcctcgctggtgcccacaggaactgctgaattagagccaagcccttcattacagctcaggggcacaactgatgccgcacaagccattaaaaatgagtttgcgagagtacaaaaaagaaacctttgtagacgagggccaatttgtttcgaaggcgatgcactgagctggttttttgaaaagatcaacaaaattgatagacgtctagcaagacgaataaagaagaaaagagagaagaatcaaatagaagcaataaaaaatgataaaggggatatcaccaccgatcccacagaaatacaaactaccatcagagaatactataaacacctctatgcaaataaactagaaaatctggaagaaatggataaattcctcgacccatacactctcccaagaataagccaggaagaagttgaatctctgaatagaccaataacaggctctgaaattgaggcaataattaatagcttaccaaccaaaaaaagtccagcaccagacggattcacagccgaattctaccagaggtacaaggagaagctgatagtgttggaagttctggccagggcaatcaggcaggagaaagaaataaagggtattcaattaggaaaagaggaactcaaattgtccctgtttgcagatgacatgattgtatatctagaaaaccccatcgtctcagcccaaaatctcctcaagctgataagcaacttcagcaaagtctcaggatacaaaatcaatgtgcaaaaatcacaagcattcttatacagtaataacagacaaacagagagccaaatcatgagtgaactcccattcacaattgcttcaaagagaataaaatacctaggaatccaacttacaagggatgtgaaggacctcttcaaggagaactacaaaccactgctcaatgaagttaaagaggatacaaacaaatggaagaacattccatgctcatggataggaagaatcaatattgtgaaaatggccatactgcccaagattgagaaacaaacctggaacaactcacagactctccagtgccaaccattctgcgagagtgatgtctgcacttccacgctccagattcaggagagatttgaagtagctcctcttcacaaaaaggcactaagctctgaggagataacaatcgataagactgacccctcgccagccattgaggagctcacagtctaa

SEQ ID NO: 143623 - DNA, 1542 bp, Homo sapiens; identical to SEQ ID NO: 133499

SEQ ID NO: 143624 - DNA, 807 bp, Homo sapiens; identical to SEQ ID NO: 128619

SEQ ID NO: 143625 - DNA, 780 bp, Homo sapiens; identical to SEQ ID NO: 125568

SEQ ID NO: 143626 - DNA, 1323 bp, Homo sapiens; identical to SEQ ID NO: 127655

SEQ ID NO: 143627 - DNA, 2453 bp, Homo sapiens
atgaaagagctgcagccaggctgccacggcagaggctatgacctcacagcagctcaggcccttgaatggtctccatcaaatgtagacggggtcagctacctccttcaggagatctatggaattgaaaacaagtacaacacacaagattctaaggtggctgaagacgaagtgagtgataacagtgccgagtgtgtggtgtgtctctcggatgtccgggacaccttgattctgccctgtcgccacctctgcctctgtaacacctgtgcagacacgctgcgctaccaggccaacaactgccccatctgccgactgcgtaagccccagagcggcagggggactgccttccgggcactgcttcagatccgagccatgaggaaaaaattgggccccttgtccccaaccagctttaaccccatcatctcatcccagacatctgactctgaagagcatccatcctcagagaatattccaccaggctatgaagtagtatctcttctggaggccctcaacgggcccctcaccccgtccccagcagttcctccacttcacgtgcttggagatggccacctctcaggaatgctcccttcatatggcagtgatggccacctgccccccgtcaggacgatctcgcctcttgaccgcctgtctgacagcagcagtcagggactcaaactcaaaaagagtctctccaaatccacttcccaaaactcttccgtgctgcatgaagaggaagatgagcattcctgcagcgagtcggagacacagctctctcagagaccgtcggttcagcatctcggagaggaatgtggtgtgactccagaaagtgagaatctcaccctgtcgtcatctggagctattgaccagtcgtcttgcacagggacgcctctgtcatccactatttcctccccagaaggccctgccagcagcagcttggcccagtctgtcatgtccatggcatcctcccagatcagcactgacaccgtctcctccatgtctggctcctacatcgcccctggcactgaagaggagggagaggctctctcttccccccagcctgccagcagggccccctcagaagaaggagaggggctgccagcggagtctccagacagcaactttgctggcctcccagctggagagcaggatgcagaggctgcactcagctcacactaccagcctatatcccacgcctccaagggagactgcaagtcaggcatggagcagcaaggggtgtgtgagcgagagtggggtccggccactgtgcagtcagacacgccagctgccgctgtggggctggcagccccagggcggcaagctgtggaggggctgtctgtctgctccctgcgacccccctgcagcagccgttgtgatggcagcggctgctctggacagcccaccactgtcatcaatatttccttacgccgccccacctccccaagaacccgtgaagactctgagaagcctggtcaatatccgaaaggacacactgaggctcgtcaaatgccaggacaaaaggacaaggtggccaagagaagtagaaaggtgttgagaggagaaggagaatgggaaagggccaataagaagacaatgaaaacaagcagcgccaaggcagctgggccaggctggactcacacactccctgaaggctcgggtccaggaggcactggtggccagctggagttctgggtgggcgtgggcttggcgggctccgcaccaatggcagggctcattgccctgccggcccggggcaatgaggggcttagcacccgggccagcggctgcggagggtgtactgggtcccccagcagtgccagcccaccggctctgcgctcaatttctcgccgggccttagctgccttcccgcggggcagggctcgcgacctgcagcccgccatgcctgagcctcccaccccctccgtgggctcctgtgcagccccagcctccccgatgagcgccgccccctgctccacagcccccagtcccatcgaccacccaagggctgaggagtgcgggcacacggcgcgggactggcaggcagctccacctgcagccccagtgcgggatccactgggtgaagctagctgggctcctgagtctggtggggacgtggagaacctttatgtccagctcagggattgtaaatacaccaatcagcaccctgtgtttagctcaaggtttgtgagtgcaccaatcgacactctgtatctagctgctctgatgaggacgtctgtatctgctctctgtgcctgggacagtgagggcctggtgcatttgatgcaggatttttcttggccccttcaacagactcatagaaggggcaccccacctattcggtctgccatgctcaaccccttgcaggagggagcacgtgagcaagcaagtgcaagatccggctggctgctccggctgctgacacaggagcaacttctgtgcagggcctgcatccagaccag

SEQ ID NO: 143628 - DNA, 1370 bp, Homo sapiens
tcaggaactggagcagcaaagagaagaacaaaagcgcagagagaaggaagcggaggagaggcagcgagcggaggaaagcagctgtgagcgggtggctcttccccaccttgccagcaggctctgtgctccttgaagcaagcgctccagaggctccggaagccacggctggattggagacaagatgggatcctcagaggaccaggcctatcgcctccttaatgactacgccaacggcttcatggtgtcccaggttctcttcgccgcctgcgagctgggcgtgtttgaccttctcgccgaggccccagggcccctggacgtggcggcagtggctgcaggtgtgagggccagcgcccatgggacagagctcctgctggacatctgtgtgtccctgaagctgctgaaagtggagacgaggggaggaaaagctttctatcgaaacacagagctgtccagcgactacctgaccacggtcagcccgacgtcacaatgcagcatgctgaagtacatgggcaggaccagctaccggtgctggggccacctggcagacgccgtgagagaaggaaggaaccagtacctggagacgtttggcgttcccgctgaagagctttttacggccatctacaggtccgagggcgagcggctacagttcatgcaagctctgcaggaggtctggagcgtcaacgggagaagcgtgctgaccgcctttgacctgtcagtgttcccacttatgtgtgaccttggtgggacacggataaagctggaaaccatcattctcagcaaactatcgcaaggacagaaaaccaaacaccgcgtgttctcactcataggtggggctggagctctggctaaggaatgcatgtctctgtaccctggatgtaagatcaccgtttttgacatcccagaagtggtgtggacggcaaagcagcacttctcattccaggaggaagaacagattgacttccaggaaggggatttcttcaaagaccctcttccggaagctgatctgtacatcctggccagggtcctccatgactgggcagacggaaagtgctcacacctgctggagaggatctaccacacttgcaagccaggtggtggcattctggtaattgaaagcctcctggatgaagacaggcgaggtcctctgctcacgcagctctactctctgaacatgcttgtgcagacggaagggcaggagaggacccccacccactaccacatgctcctctcttctgctggcttcagagacttccagtttaagaaaacaggagccatttatgatgccattttagccaggaaataactgtttcttgtgacctggaactaacgtcaaagcacacaagacataataataaagacatgtacctcca

SEQ ID NO: 143629 - DNA, 703 bp, Homo sapiens
cctgcgatcacaatcacgagggggtagatctggatttccattggtggttttcttttcggctgcaatttccttttcggcgctgtgctctgtttctcgctgggccttagctgccttcccgtggagcaaggttcgggacctgcagcccgccatgcctgagcctcccacccactccatgggctcctgtgcggccggagcctccctgacgagcaccgccccctgctccacggcgcccagtcccatcgaccacctaagggctaaggaatgcgagcgcacggcgcaggactggcaggcagctccacctgcagccctggtgcgggatccactagaaacagggaaaattgaccaagagattcacaaatacaacaccccaggattcactggttgcctctccagagtccagttcaaccagatcgcccctctcaaggccgccttgaggcagacaaacgcctcggctcacgtccacatccagggcgagctggtggagtccaactgcggggcctcgccgctgaccctctcccccatgtcgtccgccaccgacccctggcacctggatcacctggattcagcggtgtttgcagaacagcggtttttcgtgaactgcgaatgctgccatctgatcgttcctctggaagttttgtctcagaggagtacccggccgtgtgaagtgtcagtctgcccctactggggggtgcctcccagttag

SEQ ID NO: 143630 - DNA, 991 bp, Homo sapiens
caaaatgtggctggaatcaggagaccggagagaccaatgaggggaacaggacgattgtatttaggtggccaccagctcagcagattaatacccagaggctgagcaatgagcaaagaaagggcttgacttttattcatgtgaccaaagggtgttggccgggccttagctgccttcccgcaggacagggctccgggacctgcagcccgccatgcctgagcctcccacccactccatgagctcctgtgcggccagagcctccctgacaagcgccaccccctgctccagggcgcccagtcccatcgaccacccaagggctgaggagtgcaggcgcagggcaccgggactggcaggcagctccacctgcagccctggtgcgggatccactgggtgaagccagctgggctcctgagttctttgggtccacgctgcttttacaagctgtaacactcaccacaaaggtctgcagcttcattcctgaagccagcgagaccatgagcccaccgggaggagcgaacaactccagacgcgctgtcttaagagctgtaacagtcacctcgaaggtctgcagcttcactccgcgagcgtctgcggcttcattcttgaagtcagtgagaccaagaacccaccaattctggacacaataggatttaaaaaccacaatctggatgcttattgtgttaattactgctgagttgtcattccttttagaccacccaaggtatgggaggcctccattccatttagagagctcctggtgcttcctggtggctggtgatgattcatttttattcccttgaatcttccccacggccagatcattgttgtccatatccttccctgcaatcaatccagctgttctgtgcgtcacttccggtttctgtaggtcatttccctttttttgtctataaatcttcttccaccacgtggttgtgctggagtctctgtgaatctgctgtgactctgggtgctgccccattcgcaaattgttcat

SEQ ID NO: 143631 - DNA, 2464 bp, Homo sapiens
atgactttgtgcgtccttgaagaacagcaaagaggtcagagtggatggtgtggagtgggcaagaagatgacatataggatctggggtagaagagacaaccagcccatggctcgggacctgaagcccgccatgcctgagtctcccactcactccatgggctcctgtgtggcccgagcctccccgacgagcaccaccccctgctccacggcacccagtcccatcgaccacccaagggctgaggaacgcgagcgcacggcgcaggactggcaggcagctccacctgcagccccggtgcgggatccactgggtgaagccagctgggctcctgagtctgagcctcccctgggccccatcccccgaaaaaccccccgaaaaaccccccgaaaaaccgtctgcctaccttggtccgatctccccgctacatattctaccccccacccccatccctttgccagagacgccgaagaaccggggcagaggggtcctgacagcagccagggaaacgggcccccagcaggctctccagtcccaggatgcgctgagccgccggggggctgaggccgcgccaactacatgcatgtcccccgggggcaagttcgactttgacgacgggggctgctacgtggggggctgggaggcggggcgggcacatggctacggcgtgtgcacgggccccggcgcccagggcgagtacagcggctgctgggcacacggcttcgagtcactgggcgtcttcacggggcccggcggacacagctaccagggccactggcagcagggcaagcgcgaagggctgggcgtggagcgcaagagccgctggacgtaccgcggcgagtggctgggcgggctgaaggggcgcagcggcgtgtgggaaagcgtgtccggcctgcgctacgccgggctctggaaggacggtttccaggacggctacggcactgagacctactccgacggaggcacctaccagggccagtggcaggccgggaagcgccacggctacggggtacgccagagtgtgccctaccatcaggcggcgctgctgcgctcgccccgccgcacctccctggattccggccacagcgaccccccgacgccacccccgcccctgcccttgccgggcgacgagggaggcagccccgcctcgggctcccggggcggcttcgtgctggccgggcccggggacgccgacggcgcgtcgtcccgaaagcgcactccggcggccggcggattctttcgccgttcgctgctgctcagcgggctccgagcgggcggacgtcgcagctccctgggcagcaagcgaggctccctgcgcagcgaggtgagcagcgaggtgggcagcaccggaccgcccggctcggaggccagcgggcccccggccgcagcgccgcccgccctcatcgagggctcggccacagaggtgtacgcgggcgagtggcgcgcagatcggcgcagcggcttcggcgtcagccagcgctccaacgggctgcgctacgagggcgagtggctgggcaaccggcggcacggctacgggcgcaccacccgccccgacggctcccgcgaggagggcaagtacaagcgcaaccggctggtgcacggcgggcgcgtccgcagtctcctgcctctggcccttcggcggggcaaggttaaggagaaggtggacagggctgtcgagggcgcccgtcgagccgtgagtgctgcccgtcagcgccaggagatcgccgctgccagggcagcagacgccctcctaaaggcagtggcagccagcagtgtcgctgagaaggccgtggaggcagctcgaatggccaaactgatagcccaggacctgcagcccatgctagaggccccaggccgcagacccaggcaggactcagaaggttccgacacggagcccctggatgaggacagccctggggtatatgagaacggactgaccccctcagagggatcccctgaactgcccagcagtcctgcctcctcccgccaaccctggcgaccccctgcctgccggagcccactgcctcctggaggggaccagggtcccttctccagccccaaagcttggcctgaggagtgggggggggcaggcgcacaggcagaggaactagctggctatgaggctgaggatgaggctgggatgcaagggccagggcccagagacggttccccactcctcggaggctgcagcgacagttcaggaagtcttcgagaggaggagggggaggatgaagagcccctgcccccgctgagggccccagcaggcacggagcctgagcccatcgccatgctggtcctgaggggctcgtcctcgaggggtcctgatgctgggtgcctgacagaagagctcggggagcccgctgcaaccgagaggcctgcccagccgggagctgccaaccccctggtggtgggagccgtggccctcctggacctcagcctggcattcctgttctcccagctcctcacctga

SEQ ID NO: 143632 - DNA, 1560 bp, Homo sapiens; identical to SEQ ID NO: 133409

SEQ ID NO: 143633 - DNA, 2598 bp, Homo sapiens
atgaagcccctgctcctggccatcagcctcagcctcattgctgccctgcaggcccaccacctcctggcctcagacgaggagattcaggatgtgtcagggacgtggtatctgaaggccatgacggtggacagggagctccctgagatgaatctggaatcggtgacacccatgaccctcacaatcctggaagggggcaacctggaagctaaggccaccatgctgataagtggccagtgccaggaggtgaaggtcgtcctggagaaaactgacgagccgggaaaatacacggccaacaggggcaagcacgtggcatacatcatcaggtcgcacgtgaaggaccactacatcttttactgtgagggtgagctgcacgggaagccgatccgaggggcgaagctcgtgggcagagaccccgagaacaacctggaagccttggaggactttgagaaagctgcaggagcccgtggactcagcacggagagcatcctcatccccaggcagagcgggacatggatgaagctggaaaccatcattctcagcaaactatcacaaggacaaaaaaccaaacaccgcatgttctcactcataggttctattattgtcaaggtcccatcttcacttcaagctcatttacagttatcagggaaagaggttgatgtgaactcagaagtccatgttcaggaaatggctgaagctcgtaaagatgatgttgtaacagtgactgatgcagaaaaagcattagacaaaatccagcatctctttatggttaaaactctcagcaaaatcggcatacaagggacatacctcaagcctgagatcttctttgatgttgtcagcctctcaacatggcaggaagtgttaagtgattctcaacgtgaacacctccagcagtttctgccccagtttcctgaagacagtgctgagcagcagaatgaactcatcttagccttgttcagtggggagaacttccgctttggaaaccctctgcacattgcccagaagcttttccgagacggacactttaaccccgaggtggtcaagtaccggcagttatgcttcaagtcacagtacaagcgctacctcaactcccagcagcagtatttccatcggctgctgaagcaaattcttgcttcccggagtgatctgctggagatggcccggcggagtggccccgcccttcccttccggcagaaacgcccttcaccatcccgcacacctgaggagcgggagtggcggacccagcagcgctacttgaaggtcttaagggaagtgaaagaggagtgtgccacgttggatttacaagaacaattttcttttgaagatctcagctcatggcttccgagctctccagcacgttctcctagtcctgcggtgcccctgcgggtggtgcccacactttcaaccacggatatgaaaaccgcaggtgagaaccaagctgccgctgtcaccattctgggacattgcggtggagacctgaaaactcctttagagggagataaagtagaactgggggacagtgacctgaagataatgttaaagaagcaccacgagaagcggaaacatcagccagagcagctggcgaggctagctagcatcaacgatgtgaggcacggtggctttgacttcgcagggcctgctgaatgtagtgtctgccttaattgttacagtgacactgtcgagtataggaatcgtctccacctcagcagtgctcaagaggatcacccggaccttttgacaggggacctgactctcaatgacatcatgactcgagtaaatgctggcaggaagggctctctggcagccttatatgacttggctgtccttaaaaaaaaggttaaggaaaaagaggaaaagaagaagaagaaaataaaaacgatcaaatcagaggcagaggacctggccgagccgctaagcagtactgaaggggtcgcacctctctcacaggccccctctccgctggcaattcctgctatcaaggaagagccccttgaagacctcaagccttgccttggaatcaatgaaatatcttccagcttcttctctcttctattagagatcttgctgctggagagtcaggctagccttcctatgctagaggagcgagttttggattggcagtcatcgccagccagctccctcaacagctggttctctgcggcccccaactgggctgagttggtactaccagccctgcagtatcttgctggagaaagtcgagctgttccttccagtttctctccatttgttgaattcaaagagaaaacccagcagtggaagttgcttgcccaagcctccccgacgagcgccgcccctggctctacggcacccagtcccatcgaccacccaagggctgaggaatgcgagcgcacggcacgggactggcaggcagctccacctgcagccccggtgcgggatccactgggtgaagccagctgggctcctgagtctggtggggacgtggagagtctttatgtctacctcagggattgtaaacacaccaatcagcaccctatgtctagctcagggtttgtgagtgcacccaatcgacactctgtatctagctgctctggtggggccttggagaacctttatgtctag

SEQ ID NO: 143634 - DNA, 2031 bp, Homo sapiens; identical to SEQ ID NO: 125483

SEQ ID NO: 143635 - DNA, 7153 bp, Homo sapiens
atgctggcagtcctcagagccctcgcttgctctccgcacctcccctgcctgggctcccactttggtggcatttcaggagcccttcagcccctccactgcactgtgggagcccctttctgggctggccaaggctggagcccactccctcagcttgcagggaggtgtggagggagaggcgcgagcgggaaccggggctgcgtgcggcgcttgcgggccagctggagttccggagcagccagccagccctgctggctctgggcaaaatgggagacttagcacccgggccaatggctgcagagggtgtactgagtcccccagcagtgctggcccaccggcgctgcactcgatttctcgccgggccttggctgccttcccacggggcagggctcgggacctgcagcccaccatgcctaagcctcccacccactccatgggctcctgtgcggcaagcggagcctcccagacgagcgccgccccctgctccctggcgcccagtcccatcgaccacccaagggctgaggagtgcgtgcgtcacggcgcgggactggcaggcagctccacctgcagccctggtgcgggatccactgggtggaagccacctgggctcctgagtctggtggggacgtggagagtctttatatctagctcagggattgtaaatacaccaatcagcaccctgtgtttagctcaaggtttgtgagtgcaccagtcaacactctgtatctagctgctctggtgagggcgtggagagtctttatgtctagctcaaggattgtaaatacaccaatcagcactctgtgtctagctcaagtaacggtcccaccgcccctgcatactcggtttttcgccctttccccgcgccagccccgttcctttaaaaatggactcttgttccaaactggaaccaccctcaaccccctctcgggctattcttctgattataaggggtttggccgatttcggaaccacccatcaaacaggattttcgcctgctggggcaaaccagcgtggaccgcttgctgcaactctctcagggccaggcggtgaagggcaatcagctgttgcccgtctcactggtgaaaagaaaaaccaccctggcgcccaatacgcaaaccgcctctccccgcgcgttggccgattcattaatgcagctggcacgacaggtttcccgactggaaagcgggcaacataaaggttctccacgtccccaccagactcaggagcccagctggcttcacccagtggatcccgcaccggggctgcaggtggagctgcctgccagtcccgcaccatgcgcctgcactcctcagcccttgggtggtcgatgggactgggcgccgtggagcagggggaggcgctcattggggaggctcgggctgcacaggagcccatggagtgggtgggaggctcaggcatggctggctgtaggtcctgagccctgccccgcgggaaggcagctaaggcttggtgagaaatccagcgcagcgcaggtgggctggcactgctgggggacccagtacaccctccgcagccgctggcccgtgtactaagcccctcattgcctgaggtaatcagttgcaggacctgattgatggtcaaagtgcgtgatgtttggtacagcatgagactgcagttaaactgcccagacatagccttatggcactgaccatttactctggtgttaccagggattggtgttaccatgcaactataatgagaactcgtcttccaaagaacaggcttgaaaaaaggatattgtgtccctcgggcataggcccacggacttaggtgaggacaggcactcttgcctttgtgcccaaacgttgcattttccaagacacccctggcccaccataccccgatcctgtgcgtataaaaacccgaagacccagcactcaggcaggccatccaccggcagaacaatgcggagtttggccagggcagttggagaagagtccagctgctgagaggcccgactccaggggaaaccttcccactccatctcccttctggctccttcatctgctgagagctacttccactcagtaaaacctggcactcattctccaagcccaggtgtgatccgattcttctggtacaccagggcaaaaatcccagatcctcagcaatggttgcagttgaaaaagaaatctctgaattgccagataaattaagaaggtttaatatttctcccattttgtaagttgcctgttcactctgatggtagtttcttttgctgtgcagaagctcttttgctgtgcagaagctctttagtttaattagatcccatttgtcaattttgtcttttgttgccattgcttttggtgttttagacatgaagtccttgcccatgcctatgtcctgaatggcaatgcctaggttttcttctagggtttttatggttttaggtctaacgtttaagtctttagtccatcttgaattgatttttgtataaggtgtaaggaagggatccagtttcagctttctacatatggctagccagttttcccagcaccatttattaaatagggaatcctttccccattgcttgtttttctcaggtttgtcaaagatcagatagttgtacatatgctgcgttatttctgagggctctgttctgttccattgatctatatctctgttttggtaccagtaccatgctgttttggttactgtagccttgtagtatagtttgaagtcaggtagtgtgatgcctccagctttgttcttttggcttaagattgacttggcgatgcgggctcttttttggttccatatgaactttaaagtagttttttccaattctgtgaagaaagtcattggtagcttgatggggatggcattgaatctgtaaattaccttaggcagtatggccattttcacgatattgattcttcctacccatgagcatggaatgttcttccatttgtttgtatcctcttttatttccttgagcagtggtttgtagttctccttgaagaggtccttcacatcccttgtaagttggattcctaggtattttattccctttgaagcaattgtgaatgggagttcactcatgacttggctctctgtttgtctgttgttggtgtataagaatgcttgtgatttttgtacactgattttgtatcctgagactttgctgaagttgcttatcagtgtaaggagattttgggctgaaacgatggggttttctagatatacaatcatgtcatctctgaaaatttgaagggtccttgctgcagccacactcacatcattggcttgttcatcaacagtcaatattctgagaacactgaagggaaagaagatggttctctgtagaccaccccagaatagctcaaattttttcctctggctcagctgaatgacaagagcaaggttagggctgacataggcaagctcacttgctagggtaggaaaccctctaggacagttccagaagttagcggggtttggtggaagggtattttggcaccagcagagagcatgctgggctgctgcaaggagcaggagctggcaatcaacagcgagtttggatgttggcaacctgccaccaacaggccccagtatgtaatgttcccctccctgtatccgtatgttctcattgttcaactcccacttatgagtgagaacatgtggtgtttggttttctgttcttgtgttattttgctgagaatgttggtttccagcttcatccatgtcctgtaggagaagttcatcacatatatttttggccagattatctacaaaagcagttgtttgtactgattcagtaatagatacaacagcaatgctaacagttgccataatgactatggctgagcctgtaaagaccataagtgtaaatgtgaatcctttgtggccgacctgggacagggcactttctaaggtggcaagggcagaagaatcttgccaattgcatgtcaaattggctggtagaagtgcctcagattgtctccttaataccacgacactggaagtttttaaactagacatatcatgaccagtgatacatgaggcaaaccaagcctgtccctgcacccgggtcacaaatgtggcatttccaggtgtaatggaaatgttagttccagactcaggagcccagctggcttcacctagtggatcccacaccggggctgcaggtggagctgcctgccagtcctgcgccgtgcgctcacattcctcagcccttgggtggtcgatgggactgggtgccgtggagcagggggtggtgctcatcggggaggctcgggccgcacaggagcccatggagtggggccagcagggctggctggctgctccgagtgcagggcccaccaagcctacgcccaccggaaccccagctggcccacaagcgccgcacgcagccctggttcccgctcacgcctctccctccacacctccctgcaagctgaaggagtgggctccagccttggccagcccagaaaagggctcccacagtgcagccgcagccgccatggcgatgaactttggggaccatgccagcgggttccgccatgatgatgtgatcaggttcatcaacaatgaagtcctcaggaacggcggcagcccagccttttacacggccttccgctcgcggccgtggaacgaggtagaggaccggcttcgggccattgtggccgacccgcgggtgccccgtgccattaagagggcctgtacctggagcgctttggcgctgagtgtgcaagtggctgcgaggcagcaggaggagctgctgtaccaggtttggtggctgcaagggcatgtggaggagtgccaggcgacctcctgggctctaacttcccagctgcagcagctgcgcctggagcatgaggaggtggcaacacagctgcacctcacgcaggccgccctgcagcaggtgctgaatgagcgtgatgggttatgcgggaggctgctagaagttgagagatccatgcaggtctatccgatgcctcaggattttgtacccggtccagaagccggccagtatgggcctgtggccgggactttaaatgcagaacagagtgaggcggtggccacagaggcacagggaatgccacattcggaagcccaggtagcagccccaacagctgtgtattacatgcctgaaccccagagtggcagggtccagggcatgcaacctcttctgctaatgcaggcacctcatccagtcccattccatatgccttcaccaatgggactgccatactcaacacctctaccacccccagtagtaatggaatcagcagcagcaattgcaccacagatgcctcctgcagggatctatccacctggtctttgggccacagtgggatcccaggaggagacggcccctccgtgggaccagaagtgccatggccaggatggatatcctgagaatttccagggagtatatcacccaggagataacagaagctgcaaccaaaaggaaggttctgagtgtccccaaggaatgacttcccaaggggacagcagcagccacagcctgaagaaagatccagtgatgcaagagggcacagctcccccagagtttagcaggagccacagcctggagaaaaaaccagtgatgcccaaggagatggtccccctaggggacagcaacagccacagcctgaagaaagatccagttgtgcccaaggagattgtccccataggggacagcaacagccacagcctgacgaaaaatccagttgtgcacaaggagatggtctccctgggggacagcaacagccacagcatgaagaaagatccagtgatgccccagaagatggtccccctgggggacagcaacagccacagtctgaagaaagatccaatgatgtgccaggagatggtccccctgggggacagcaacagccatagcctgaagaaagatccagtggtggcccagggcacagctcccctgatgtatagcaggaggcacagccagaagaaagtgccaatgatgcccaaggagatggtccccctgggggaaagccacagccacagcctgaagaaagatctagttgtgcccaaggagttggtccccctgggggacagcaagagtcacaggatgaagaaagatccagtgatgccccagaagatggtccccctgggggacagcagaagccacagcctgaagaaagatccagtgatgccccagaacatgatccccctggaggacagcaacagccacagcctgaagaaagatccagtgatgccccagaacatgatccccctggaggacagcaacagccacagtctgaagaaagatccaatgatgcaccaggagatggtccccctgggggacagcaacagccatagcctgaagaaagatccagtggtgccccagggcacagctcccctgatgtttagcaggagacacagcctgaagaaagtgccagtgatgcccaaggagatggtccccctgggggacagccacagcctgaagaaagatccagtgatgccccagaacatggtccccctggaggacagcaacagccatagcctgaagaaagatccagtggtgccccagggcacagctcccctgacgtttagcaggagacacagcctgaagaaagtgccagtggtgccccaggggacagcctccctggggttcggcagaatccacagcctgaagaaagagttagtgatgcccgaggagatggtccccctgggggacagcaacagccacagcatgaagaaagatctagtgatgcccaaggagatggtccccctaggggacagcaacagtcacagcctgaagaaagatccagtggtgcaccaggaggtggtctccttgggggacagcaacagccacagcctgaagaaacatccagtgattccccagggcacagcctcactgaggtttagcaagagccacagccagaaggaagatcaggagaggccccaggcaacccctctggaggatagcaagagccatggtgtgaaaaatagcccatggaaacaccagcctcaggggcagaaggtcaaggaacaaaaaaggaaaaaggcctcagaatcccagcaacagaagcctgcctcatgctccagcccagtgaattgggcctgcccatggtgtaatgccatgaattttccacggaacaaggtgtgctctaaatgcaagagagtccgtatgccagttgagaatggcagcgttgacccagcgtaa

SEQ ID NO: 143636 - DNA, 580 bp, Homo sapiens
  misc_feature (1)...(580): n = a,t,c or g
ctagcccagtgcggtggaattcgatccgcatcgcccagggaaccgctatctactttcaggaaactttcgcagattttctccgatgagaacaaccacctcagcagcagagagattcttttccaggaggaggccactgagggatcccaagaagaggacaacaccccaggcagcctgccctcaaaaccacccccaggccctgtcccctaccttggcaccttccttacggacctggttatgctggacacagccctgccggatatgttggagggggatctcattaactttgagaagaggaggaaggagtgggagatcctggcccgcatccagcagctgcagaggcgctgtcagagctacaccctgagcccccacccgcccatcctggctgccctgcatgcccagaaccagctcaccgaggagcagagctaccggctctcccgggttcattgagccaccagcttgcctcctgccccagnttccccangnattncgacgggcggattcagncttnaccaagcgttttcagtggcgaatttgncccgagagaaaagttcattcaacttagttgggaattncgggggac

SEQ ID NO: 143637 - DNA, 834 bp, Homo sapiens
tgagggccaagccgcagcgagttcacaggcggaacccctgcaggcggcgccccctacgcgaggtcacccctgggaaggagcgcagcccacccggcccctccgcatccgagcaggacgcccgtctcctctccctgaggatttcaggtctccctgtcccaggaggcttgtgccaagatggcatcagctggagacacccaggcaggcccacgggatgcagcagatcagaacttcgactatatgttcaaactgctactgataggcaacagcagtgtgggcaagacttccttcctgttccgatacgcggacgactccttcactcccgccttcgtcagtactgtgggcatcgatttcaaggtcaagaccgtctaccgccatgacaagaggatcaagctgcagatctgggacacagcgggccaggagcgctaccgcaccatcaccacggcctactaccggggagccatgggcttcctgctcatgtatgacatcgccaatcaggaatcctttgccgctgtgcaggactgggccacgcaaatcaagacctactcctgggacaacgcccaggtcatcctggtggggaacaagtgtgacctggaggacgaacgtgttgtgcctgctgaggatggccggaggctcgccgacgaccttggtttcgagttctttgaagccagtgccaaggagaacatcaatgtgaagcaggtcttcgagcgcctggtggatgtcatctgcgagaagatgaacgagtccctggaacccagctccagctcaggcagcaacgggaaaggcccggccgtgggggatgctccagccccccagcccagcagctgcagctgctag

SEQ ID NO: 143638 - DNA, 849 bp, Homo sapiens; identical to SEQ ID NO: 126758

SEQ ID NO: 143639 - DNA, 1032 bp, Homo sapiens
atgaagggtatatatgatgggtctgcaggcatcgttcctgaggaattgtccaaggagaccccagacctggctcagtttttctcttccctcaggaggaggccactgagggatcccaagaagaggacaacaccccaggcagcctgccctcaacacactttgcccccaggggatctcattaactttgagaagaggaggaaggagtgggagatcctggcccgcatccagcagctgcagaggcgctgtcagagctacaccctgagcccccacccgcccatcctggctgccctgcatgcccagaaccagctcaccgaggagcagagctaccggctctcccgggtcattgagccaccagctgcctcctgccccagctccccacgcatccgacggcggatcagcctcaccaagcgtctcagaagcttgcccgagagaaaagctcatcacctagtgggagtcccggggacccctcatcccccacctccagactcttcagaggcctgcgcggaggaagaggaagggctcatgcctcaaggtccccagctcctggacttcagcgtggacgaggtggccgagcagctgaccctcatagacttggagctcttctccaaggtgaggctctacgagtgcttgggctccgtgtggtcgcagagggaccggccgggggctgcaggcgcctcccccactgtgcgcgccaccgtggcccagttcaacaccgtgaccggctgtgtgctgggttccgtgctcggagcaccgggcttggccgccccgcagagggcgcagcggctggagaagtggatccgcatcgcccaggggtcttacgagtgtccccaccttaacattcatccaggtttcgagttctttgaagccagtgccaaggagaacatcaatgtgaagcaggtcttcgagcgcctggtggatgtcatctgcgagaagatgaacgagtccctggaacccagctccagctcaggcagcaacgggaaaggcccggccgtgggggatgctccagccccccagcccacgagctgcagctgctag

SEQ ID NO: 143640 - DNA, 2092 bp, Homo sapiens
atggagtctgagtatgtcctatgcaactggaaagaccagttgtggccagcaaaagttttgtccagatctgaaacttcatcaaacagtaagaggaaaaaggcattttctctagaagttcaaatactctcactagatgaaaaaattaaattggacagcacagaaacaaagatcctaaataaatctcaaattgaagccattgctgcctcattaggactacagtcagaggacagtgctccacctacagaggaaactgcctatggaagatcactaaaagtggcactgggtattctgaatgagagaacaaatttgagtcaagcaagcacttcagatgaagaggagatcactatgctgtctcaaaatgtaccacaaaaacagtccgattcaccccctcataaaaaataccggaaggatgaaggtgacttaccagggtgtcttgaggaaagggaaaactcagcatgcttgttagcatcttcagagagtgatgattccctgtatgatgataaatcacaagcacccacaatggtcgatactattccaagtgaagtggaaacaaagtcattacaaaactctagctggtgcgagactttcccttcactttcggaagataatgatgaaaaagagaacaagaataagattgatatctcagcagttatgtctgtgcattctgcagtcaaagaggaaagtgcatgtgttaaagatgaaaagtttgctccacctttgtcacctttgtcatcagatatgctcattatgcccaaagctttgaaagaagagagcgaggatacctgcctagagaccctggctgttccctctgaatgctctgctttctcagagaatattgaggatcctggagagggtccctcaaatccatgcttagataccagaccagaatcaaccttccatggaatcagagatgggggctgcagcatgccctgggagttgttcaagggaattcgaggtttcatttagtgcctctaaccctgtcttggattattcacatcttattggtagtgaaagaaattttcagagactggattttgaagaacttgaggaagaaggtcaagcctctgacaagtcattgcttccaagtcgcattaatctttctctattagatgatgatgaggaagacgaagaacttccacgcttcattttacattatgagacacatccgtttgaaacaggaatgatagtctggtttaaatatcagaaatatccattttggccagcagtgataaaaagtatcagacgaaaagagaggaaagcaagtgtgctttttgttgaggcaaacatgaattctgaaaagaagggcattagagtaaattctagaagattaaagaaatttgattgtaaagagaaacaaatgctagtggacaaagccagggaggattatagtgagagtattgactggtgcatctcactaatttgtgactacagagttagaataggttgtggttctttcacgggctctttgcttgagtattatgctgctgatattagttacccagttaggaaagaaacaaaacaggatactttcaggaacaaatttccaaagctgcataatgaagatgccagggaaccgatggctgtaacttcccagaccaagaaaatgtccttccaaaaaattctccctgaccggatgaaggctgctcgggaccgagccaacaagaacctggtggacttcattgtgaatgcaaagggaacagagaaccatcttctggccattgtaaatggcacaaaaggatccagatggctgaaatcatttttgaatgcaaataggttcacaccctgtattgaaacatactttgaggatgaagatcagttggatgaagtggtgaaatatttacaagaagtctgcaatcaaatagatcaaataatgccaacttggataaaagatgataaaattaaatttatcctagaagttcttctgccagaagcaattatttgttcaatttctgctgttgatgggttagattacgaggcagctgaagcaaagtatctaaaaggaccatgtctaggctacagggaaagagaattatttgatgcaaaaataatatatgaaaagagacgaaaagcaccaacaaatgaagctcactaa

SEQ ID NO: 143641 - DNA, 1147 bp, Homo sapiens
tgcgtcctgaggatcccgagtatcaggagagctggcagaggaagtcatgcagaggcaaagccaggagccccgacagggagatccccagtgtgtcagagatgcaggtggccgccattgcaaactcccggtgttcatcactggtctccagggcgatgttgtggaaggtgttcacgtaggctgcgcctcccaggagcccctcatacagaatgatcaggaagacgaggtagatgcttggcagaaagccgaaccacacgtctgccagcaggaacaccaggttgaggcactgcagcagggccagggcccaggtgaaacggatgcgacagcagcgaagagaagagcgggaggcaaagacgccagcctggtacagcatctggtaccagcggtattgctgagcgtgactcagggaagtgttccagaaaaagaggagttcaaaaagtccctggttaatgaaatactcggcaaagtaaactacgaccaagggaacaatgtaccacagcagacccttgaacactgtccacctttcccgaagggagaggctggagctggagcctggcttcgactccggggcctcggttcttatgaggggctgccgggctgcgctctctgcttcttcttcccctccagggtcctgggcctcaggagatgtgagcaacaagaagtagcacacaggctggtccccacagaatgagaaaaggcaaccaggacgaagcttccagcagcacaaatcccactgacgagaacccgggggagccgtagagacagagttgcagtcaaatcgtgatgagctgttgtgggggatcggcgttgggcctgggtccacatggctctggtttcccgatgtcctcttgtggctaaggatgtcgtgggcggcactcagcatcaccacataagagaagttgttgcaaaggcccagcaaccagaagcccaccgcgttcttccaatgcgcgccctgatggtccaacagagggagccggggctccgggacggtctcctccccctcggaatccgaaaagcgccgccgcgagcctgcacagcctcccatcgcatcaagttcaggtcccccgagggtccagggtcatagagtgtccaaagggggctcccacgggagggatgagggtctgcgacaggtgacaaggatcaactcgag

SEQ ID NO: 143642 - DNA, 1225 bp, Homo sapiens
tgaatgtgacctgcgtcctgaggatcccgagtatcaggagagctggcagaggaagtcatgcagaggcagagccaggagccccgacagggagatccccagtgtgtcagagatgcaggtggccgccattgcaaactcccggtgctcatcactggtctccagggcgatgttgtggaaggtgttcacgtaggctgcgcctcccaggagcccctcatacagaatgatcaggaagacgaggtagatgcttggcagaaagccgaaccacacgtctgccagcaggaacaccaggttgaggcactgcagcacggccagggcccaggtgaaacggatgcgacagcagcggagagaagagcgggaggcaaagacgccagcctggtacagcatctggtaccagcggtattgctgagcgtgactcagggaagtgttccagaaaaagaggagttcaaaaagtccctggttaatgaaatactcggcaaagtaaactacgaccaagggaacaatgtaccacagcagacccttgaacactgtccacctttcccgaagggagaggcacggagctggagcctggcttcgactccggggcctcggttcttatgaggggctgccgggctgcgctctctgcttcttcttcccctccagggtcctgggcctcaggagatgtgagcaacaagaaatagctggggtagaaggcagtgagggagaggaaggtgacctccccaaggcctgatgagatgctagcgaagaccacaccacacaggctggtccccacagaatgagaaaaggcaaccaggacgaagcttccagcagcacaaatcccactgacgagaacccgggggctgtagggcagcaggtgaaggccaagaggagccaacaatttgatgacgagtgtggggaggatgtccgccaggagcacagcagccgtagagacagagttgcagtcaaatcgtgatgagctgttgtgggggatcggcgttgggcctgggtccacatggctctggtttcccgatgtcctcttgtggctaaggatgtcgtgggcggcactcagcatcaccacataagagaagttgttgcaaaggcccagcagccctcggaatccgaaaagcgccgccgcgagcctgcacagcctcccatcgcatcaagttcaggtcccccgagggtccagggtcatagagtgtccaaagggggctcccacgggagggatgagggtctgcgacaggtgacaaggatc

SEQ ID NO: 143643 - DNA, 1716 bp, Homo sapiens
ccatggataaaatcggcatttattcagaaggcatgatgccaggaagaaactccccaagtgggagacaatggctggcccccctgcaagggaaacaaggcttcagcccttccctactcccagacctgccgggaaggctgggagcacagttcatggagggtctctggggtgggcctgggtgtctgacctgtccctctgcccacaggtgaatgtgacctgcgtcctgaggatcccgagtatcaggagagctggcagaggaagtcatgcagaggcaaagccaggagccccgacagggagatccccagtgtgtcagagatgcaggtggccgccattgcaaactcccggtgctcatcactggtctccagggcgatgttgtggaaggtgttcacgtaggctgcgcctcccaggagcccctcatacagaatgatcaggaagacgaggtagatgcttggcagaaagccgaaccacacgtctgccagcaggaacaccaggttgaggcactgcagcagggccagggcccaggtgaaacggatgcgacagcagcggagagaagagcgggaggcaaagacgccagcctggtacagcatctggtaccagcggtattgctgagcgtgactcagggaagtggtccagaaaaaagagggagttcaaaaagtccctggttaatgaaatactcggcaaagtaaactacgaccaagggaacaatgtaccacagcagacccccagccatcatccgaaccttgaacactgtccacctttcccgaagggagaggctggagctggagcctggcttcgactccggggcctcggttcttatgaggggctgccgggctgcgctctctgcttcttcttcccctccagggtcctgggcctcaggagatgtgagcaacaagaaatagctggccagcagcagggcagggatacccagcatggacagcagggtctgctgaggggagaggccggcctgggtgaggcccaggtaggacagggcccccagcagcccagctcccccagtccctgaggaccaccaggagatcacggccctggggtagaaggcagtgagggagaggaaggtgacctccccaaggcctgatgagatgctagcgaagaccacaccacacaggctggtccccacagaatgagaaaaggcaaccaggacgaagcttccagcagcacaaatcccactgacgagaacccgggggccagacctgtagggcagcaggtgaaggccaagaggagccaacaatttgatgacgagtgtggggaggatgtccgccaggagcacagcagccgtagagacagagttgcagtcaaatcgtgatgagctgttgtgggggatcggcgttgggcctgggtccacatggctctggtttcccgatgtcctcttgtggctaaggatgtcgtgggcggcactcagcatcaccacataagagaagttgttgcaaaggcccagcagccagaagcccaccgcgttcttccaatgcgcgccctgatggtccaacagagggagccggggctccgggacggtctcctccccctcggaatccgaaaagcgccgccgcgagcctgcacagcctcccatcgcatcaagttcaggtcccccgagggtccagggtcatagagtgtccaaagggggctcccacgggagggatgagggtctgcgacaggtgacaaggatcaacgcccgattgccggtcccagctccggcttgtctagggg

SEQ ID NO: 143644 - DNA, 394 bp, Homo sapiens
ggagcggagtctgccaggtggtgtccatcatggccgacttaacattacctatcccatgctgttcaaactgaccaataagaattcggaccgcatgacgcattgtggcgtgctggagtttgtggctgatgagggcatctgctacctcccacactggatgatgcagaacttactcttggaagaaggcggcctggtccaggtggagagcgtcaaccttcaagtggccacctactccaaattccaacctcagagccctgacttcctggacatcaccaaccccaaagccgtattagaaaacgcacttaggaactttgcctgtctgaccaccggggatgtgattgccatcaactataatgaaaagatctacgaactgcgtgtgatggagaccaaacccgac

SEQ ID NO: 143645 - DNA, 696 bp, Homo sapiens; identical to SEQ ID NO: 133125

SEQ ID NO: 143646 - DNA, 564 bp, Homo sapiens
atgacctacagttactcatttttcaggcctgagttgatcgttaatcatcttaattatgttcattctgaagccaacaggagaaccaagaccaaaactttattgtctctgctttcatttcttgatgaaacctctggactaagcacacatcttccttgtttatctctctcaaaggagtgtggagtgcttcatctggacatccacgggaagaaggaagacatgagaatcacccaacagtcttcccagctatacctgtgggacatgggtggttttacaatatttaagaacctgtggatgagcctcatacccagagggaacaaacgctccccaaaaagagttacagaaaccatcctgagagattttaagcagaagcaaagttcaaagatccaagaggagagacgaagagagtctgcaggaccaaacctctcttcattctggtttgtggacttaaagaaagaaaagaaaaccttgccaattgcaacaacatggatgaacctggaggacattatgctaaatgaaataaaccggacacagaaggacaaatactacatgatatcacttacttga

SEQ ID NO: 143647 - DNA, 1377 bp, Homo sapiens
tcaaatgagatgcacacaaatcttcatctccatcttaatataaggcatttcctcctgaatcctcgttttctttcctcctttctcaaaaacagtgtcattcctcatcatggaggcagcatatgggccactgatggtatgcaagatgcccttaggtgatacatggaatggattttcccagacgctcagctgtcctggagtggatgaagctgagtgttcagctagaaagtaatgtgtccgattcagtacatcaacaaacccgctttgttctggggcaaaagaagcaaatctaattgtgttgatcatttccagtgagacttgagcattggttctttcatcggaagagtgcctatccttaaagttgggaaatttcagctcctttggagcaccgatcatctgtaaaaagtaattggcatcttcttccaaagtctcaaatttccctacaaaatcatagttgatcaaacacggatagcagagtttgctgaccttttcccagtgaatgtccattcctactggacggtgggaatccagcaagtagtggataaactctttgaacttgactccagatccattaattaatgcttcttcacaggcatttggtcgatatttcttgataattgcctttccgaatactggatggtaataactattggggtgttcaaatttgtccctaaaggctgatactaatctttccatgggatcacgaacaaacacagctttggtgtaagtatttaagcgggtatatatcccttttaggtcaaagctatctagcttcttcaaatgcttcccgtagtggacagcattgtgggagatgttgtatgcagaggaagccaatccatttagtaccatcagaattcttttccaattggaacagccagccttaggtacctcacaatataagattttgtgtttatcttctacatagattctggatactgtatgaaaaagatgtgactgatgatgactcaccccaccgtatttcttgcaaaactcctgaaggaaagaccttcgtttctcttgggtctcctcagttttcttccatttattatctttgactaaacttttgtttaaagggtgaatgtccactggccaattcatgttgctgaacttgttaaaaacagtcttagctccttgacgtttttcaatcaacttctctgttggtgaccctgtggacttacttaaagcttgatcccctccttgtgaatgactggtctttgttaagagcctagtagatctctcagaattgagtagaagattttcctttttttctcgtacatcctcaggcatgtgaaacttggggttcttccagttcagtgttatttcctggtttgcaattctttgaccacttttcactgttacccaggtcttaacagccagcat

SEQ ID NO: 143648 - DNA, 704 bp, Homo sapiens
ttggcgcggcggcagcggcagcggcggctgggagagcggtcggcggggtttcttcgttgcattgcctgagaggagcggagtctgccaggtggtgtccatcatgttctctttcaacatgttcgaccaccctattcccagggtcttccaaaaccgcttctccacacagtaccgctgcttctctgtgtccatgctagcagggcctaatgacagtaattatgccaccctcggccctggaccaactcagccgacttaacattacctatcccatgctgttcaaactgaccaataagaattcggaccgcatgacgcattgtggcgtgctggagtttgtggctgatgagggcatctgctacctcccacactggatgatgcagaacttactcttggaagaaggcggcctggtccaggtggagagcgtcaaccttcaagtggccacctactccaaattccaacctcagagccctgacttcctggacatcaccaaccccaaagccgtgtatctttttcaaataagcggagttcttctagacaaaggagagtgtgctggcgaatgtgtctgcagattagaaaacgcacttaggaactttgcctgtctgaccaccggggatgtgattgccatcaactataatgaaaagatctacgaactgcgtgtgatggagaccaaacccgacaaggcagtgtccatcattgagtgtgacatgaac

SEQ ID NO: 143649 - DNA, 1683 bp, Homo sapiens
atggacgtagagtgtggaataatagatattggagatgcagaagggacatggctgtcttcagtgaatacattcacattcattttctccgtggctctgccctttctggaattcttctataattttatatacattgacatcagcattcctattaaattttcccatcttctgtgctctgcctctctgttgttttggcctcagagccctgacatcctggacatcactaaccccaaagctgtattagacaacgcacttaggaactttgcctgtctgaccaccgggaatgtgactgccatcaactgtaatgaaaagatctatgaactcgaactgcgtgtgatggaaaccaaacccaacaaggcagtgtccatcactgagtgtgacacaaacgtggactctgatgctcccctgggctacaaagaacccgaaagacaagtccagcacgaggagttgacagaagattccctcaactcgtgtatgtcacctgccaggttcctagaagcatctgagattgtgttcggtgaccaggaggcaattcttccaggtgtcctcctcattctgaaacagttcagggcgggcaactggaaataccttgaagaagacgctgaagagaaaagtgcctggataaaggagcaagagcctagtactttggtcattccaacaatgatgttcagtagagcttcttggtacccaacatatattattttaaactggagagctgaagcaaccaaaggtgggatgatgtcctcattcattctaactagagttgactccggcacatttggctacctcaagtctctcgtacccccgccccccgacgagaaacgcccacagcatttgaagaagctagatagctttgacctaaaagggatatatacccgcttaaatacttacaccaaagctgtgtttgttcgtgatcccatggaaagattagtatcagcctttagggacaaatttgaacaccccaatagttattaccatccagtattcggaaaggcaattatcaagaaatatcgaccaaatgcctgtgaagaagcattaattaatggatctggagtcaagttcaaagagtttatccactacttgctggattcccaccgtccagtaggaatggacattcactgggaaaagctgcttcagctccagctgtggctaaaaggagccaacatagagctcaggctgtcacttcagagggtgcaagcccaaagccttggcagcttccacatggtgttgagcctgtgggtgcacagaaatcaagaattgaggtttgggaacctccgcctagatttcagaggatgtatggaaatgcccagatatccaggcagaagtttgcggcagtggcagacccctcagggagaatgtctgccagggcagtgtgaaaggaaaatgtggggttggatcccttacacagaatccccactggggcactgcctggcggagctaccccagaatggtagatccactgacagcttgcaccatgcacctggaaaagccacagacactcaacatcagcccatgaaagcagctaagagaggagctgtaccctgcaaagccacaatggtggagctgcccaaggccattggagcctacctcttgcatcagcatgacatggatctctgtgcctctgtatgtggccttcttataaggacaccagttgttggatttagagccgatcgtcatctagtatga

SEQ ID NO: 143650 - DNA, 2223 bp, Homo sapiens
atgacttctgtcatcagagacacaataatgacaagatatggtccaattttacccacacatcagccacatccaattcaacagggagcatgctccagggataagagaatctggtcctgggaacagaaacaggaaactggcagccagctggggtgggaatgtaaattagtacaactactgtggaaaacggtgtggagattccttaaagaactaaaagtagaattaccatttgatccagcaaccccactactgagtatctacccaaaggaaaagaagtcactatatgaaaaagacacacgcacatgcatgtttatagcagcacagttcacaattgcaaaaatatggcatcagcctaagtgcccaccaaccaacaagtggataaagaaaatgtggtatacatacatcaagaaatactactcaaccataaaaaggaatgaaataatgtattttgcagcaacttggatggagctggaggctattattctaagcgagcatccacttgtgctgattcatccacagattttccggccagatgccccattggcaaagccctggagccttcccttcattagttctccgctccagccatccgagaagtcaaggttaaaaacaacacactggggtggcggcggcagcgaggacagcggtcggcagggtgcctttgtcgcattccctgagagaagcggtgtctgtgaggtggtgtccatcatgttctctttcaacatgttcaaccacctaattcccagggtcttccaaaaccgcttctccacacactaccgctgcttctctgtgtccacgctagcagggcctaatgacaagtcagatgtggagaaaggagggaagataattatgctgccctcagccctggaccaactcagccaacttaacattacctatcccatgctgttcaaactgaccagtaagaatttggaccgcatgacgcactgtggcgtgctggagtttgtggctgatgagggcatctgctacctcccacactggatgatgcagaacttgctcttggaagaaggcagcctgcctcagagccctgacatcctggacatcactaaccccaaagctgtattagacaacgcacttaggaactttgcctgtctgaccaccgggaatgtgactgccatcaactgtaatgaaaagatctatgaactcgaactgcgtgtgatggaaaccaaacccaacaaggcagtgtccatcactgagtgtgacacaaacgtggactctgatgctcccctgggctacaaagaacccgaaagacaagtccagcacgaggagttgacagaaggtgaagccgaccacagtggctatgctggagagctgggcttccgtgccttctccggctctggcaacagactggatggaaagaaagaaagcccctccccaatcaagcctggagacattaaaagaggaattcccaatcatgaatttaaacttgattccctcaactcgtgtatgtcacctgccaggttcctagaagcatctgagattgtgttcggtgaccaggaggcaattggctccacattcatggggactcatcccattccagaacttactcttacttttaactggtggagaagagtaagcatccactttcctgagagctccaacaagagagaagagtgtggagtgcttcatctggacatccacgggaagaaggaagacatgagaatcacccaacagtcttcccagctatacctgtgggacatgggtggttttacaatatttaagaacctgtggatgagcctcatacccagagggaacaaacgctccccaaaaagagttacagaaaccatcctgagagattttaagcagaagcaaagttcaaagatccaagaggagagacgaagagagtctgcaggaccaaacctctcttcattctggtttgtgggcagaatctggaaggcagctatagggcaggtgggtggttcttttagatctgagtactgggcattttcagaagagaggcatagagaaggtagaagaaaagggatgctttttagccaaatcctccatatgtttcagatctgcaaaagcccaggaaaattaccctatggaggtgaatctagctatagtacatttcttcggaaaaattactcacccagacgctcagctgtcctggagtggatgaagctgagtgttcagctagaaagtaatgtgtccgattcagtacatcaacaaacccgctttgttctggggcaaaagaagcaaatctaa

SEQ ID NO: 143651 - DNA, 1212 bp, Homo sapiens
gagcggtcggcgaggtttcttcgttgcattgcctgagaggagcggagtctgccaggtggtgtccatcatgttctctttcaacatgttcgaccaccctattcccagggtcttccaaaaccgcttctccacacagtaccgctgcttctctgtgtccatgctagcatggcctaatgacaggtcagatgtggagaaaggagggaagataattatgccaccctcggccctggaccaactcagccgacttaacattacctatcccatgctgttcaaactgaccaataagaattcggaccgcatgacgcattgtggcgtgctggagtttgtggctgatgagggcatctgctacctcccacactggatgatgcagaacttacttcttggaagaaggcggcctggtccaggtggagagcgtcaaccttcaagtggccacctacttccaagagttaagttcttgttacctcccacattgggttgatgcagaacttactcttgggaagaaggcggcctgggtccaggtggagagcgttcaacctttcaagtgggccacttatttcaaatttccaacctcagagccctgacttcctggacatcaccaaccccaaagccgtattagaaaacgcacttaggaactttgcctgtctgaccaccggggatgtgattgccatcaactataatgaaaagatctacgaactgcgttgtgatggagaccaaacccgccaagccagtgtccattcattgagtgtgacatgaacgtggactttgatgcttcccctgggctacaaagaacccgaaagacaagtccagccatgaggagtcgacagaaggtgaagccgaccacagtggctatgctggagagctgggcttccgcgctttctctggatctggcaatagactggatggaaagaagaaaggggtagagcccagcccctccccaatcaagcctggagatattaaaagaggaattcccaattatgaatttaaacttggtaagataactttcatcagaaattcacgtccccttgtcaaaaaggttgaagaggatgaagctggaggcagattcgtcgctttctctggagaaggacagtcattgcgtaaaaagggaagaaagccctaagtgaggactgttggctgattggaaaataataaaagaatcatttgcaacatcttggcttttagttactggcactgacagggacgagcctcatcagagaa

SEQ ID NO: 143652 - DNA, 569 bp, Homo sapiens
gccgtgcggtgtaattcgaggctgtgtccaccatggcctggactcctctcctcctcctgctcctctctcactgcacaggttccctctcgcagcctgtgctgactcagccagcctccctctcagcatctcctggagcatcagccagattcacctgcaccttgcgcagtgacatcaatgttggtgcttacttcgtaacctggtaccagcagaagccagggggtcttccccggtatctgttgaggtacaaatcagactcagacaagcaacagggctctggagtccccagccgcttctcaggatccaaagatgcttcaatgaatgcaggccttttgctcatctctgggctccagtctgaagatgaggctgactattactgtgccatctggtacagcagcacttctcacagacacaatcccaagacccttattgctgctgcttccagtgcaggagatggtgactggtttagccacagacagactgtgcaggttaccaaaatgagacaaaagaccctggtgtttctccagtcatcagagccgtatcctttctggtgccttcactgggaatccaag

SEQ ID NO: 143653 - DNA, 525 bp, Homo sapiens
tcactcagccatgttaattttatcattaatactgtcttcatcatttttttttccaggtctctctgctcgtatttgcttggtgctccgaaatgcacgggaacagacagctatgggaaagcgaccggagaaatggggaggcggactccaggtctttcgtggactgccaagagccctatagggcgtccagccttcgatcggctcgagtccctcggacagttgcccactcacagcgtgcaaaggggtcgcactccctgtgggttctccgccctcagaagcggcgctgcgcaggaaagtcacctccaccctcacgcctcgcgcgctccccacggtgccctgagccgctggtggctctggctcggcagcccctttgtgtgcgacgcgctggtcccgaggagcgcgcacgggcacagcggaggcctcccagggtcccaccgcttctgtcccagccaggccgtgctctcctccttctccttctccgctcctcctttctccggtccccggcctctggttccgaacagcagccat

SEQ ID NO: 143654 - DNA, 1420 bp, Homo sapiens
tgaattccaagaaagttttatttttaaaaatcaagttttgatataataaatgttggattgaggatagaaatttaagctgagaaatgtttaatttggacctaaaaaagtttattattactattattattgtggaaggaaatacatacaggcacattttagtatctacaacagtatttgggaagctgttatgaaacacaaaacttcatttaaattttattataaagacctttattaggagaaaggacatattttctatggcttacttttattttgtgccttgaaggacttgtgaatgtatagaataattattttttcttactgcttcctctttgcaacccaacctccaccaagtcaatcgtgaaggtaggaagaaagctgtatttctgttacttttaaaaatgataacgagaagaaattaaaacaatggcttaagagaaagaggatgtaaggagtacaaagcaaaacttaacaaagagttagtaaaggaacttgcattgacaattcactcagccatgttaattttatcattaatactgtcttcatcatttttttttccaggtctttctggctctattttgcttggtgctccgaaatgcacgggaacagacagctatgggaaagctgcacagagcagttggcaatcaacatgtcctagaagggtgtgtggagtagcaaaacaagtggaacggatgaagaacttccaagctccttcgcagagttttgggccctagtgtgcagggctgctccctcatgagatggaggaaaatgtcgcccacacctacttggacctctcaccaaggacactgccctcagagataaatctgttggacggcagccaacagaccccaaattgtctcaacctccaggacacggcaagttgcaagtttccgagttggggaggcaaaggcgggaaaacatgtttggcgatttcctcctgccactcaccgaccggagaaatggggaggcggactccaggtctttcgtggactgccaagagccctatagggcgtccagctataaaaagagaagaatcccatgaaggacaacaagcaaactcatatgttatccctttagccggattgtgtgctgatgattgtttccctatttacacttcgaataacccctgtggtcttttgtgagtccccaaggcagcctcagccttcgcaaaccgtccagtggggcacgaatctctggaggggtgcgggctgcaggcggcagagggaagccaaagaggggcggcttttccaggccgtccacccccaggcgagctggtcctcacccttcgatcggctcgagtccctcggacagttgcccactcacagcgtgcaaaggggtcgcactccctgtgggttctccgccctcagaagccgcgctgcgcaggaagtcacctccactacgggccgggagtagggaggggagc

SEQ ID NO: 143655 - DNA, 1076 bp, Homo sapiens; identical to SEQ ID NO: 139434

SEQ ID NO: 143656 - DNA, 1131 bp, Homo sapiens
ttaccagtcgtcggctggagtatgctgattggcggtctgattctgttgcctttttatgccagacaaggaacaaactttgtcgttaacggcagtttgattctggcgtttttttatttggtggtcattggtacgtccctgacatttagtctgtacgttttctgcattcttattatcttcccgtgccaccaaaatattcacatacggcgaattcttatcttcaataaatacgctgtcgtgcaccggagaaagcccggtctgctgaatgtaagtggtgctgataatcgctacatcaactttgggatcatccagtacgcgcgggagctgcgccccctcgagttccataatccctttgcgttgatacactttgttcagcgctgaggtgagattgtccagcagtggggcgaccggatgcagctcgcggctgagcaatgtcccgccgcgcatactggcacgatgcaggtagtagccaatttgctgtgaaatgcggctgatttgctccagcattaccggctcagcatcactgacgctcatcttttcactacgcagagaacgcagcgtactttgcagcaccgccagtggcgttttcagactatgggtcaggtcggtgagcgtcgtacggtatttgtcgtaacgttcgcgttcactttttaacaatcggttcaggtttcgtaccagactggtcagttctcgcgttgtggctggattgagcaattcgcggttatgttcttccagttcgcggacttcttttgccagggcttcgatggggcgtaaactccaccaggcggcgacccacagcagcgggatcactaacagcagattggctgagagcacatagataaaccagctccagaccatataggaactttttagctccaccggaatggtatccaccaccacaatggttaattttggcatccgcgatgttgccgggtagacgtttactgccaccgagtgggtcatctccgcgtcgtcatcatcttcccgcacttcctgcaactgttgctgtatcgaatgatctccactcagcaagaggctggtatcgttaacatccgcttcaatttcatgaaaaccattcgatttcagccagtcaggggggatccttccagttagagtacgtgaatctgcatacat

SEQ ID NO: 143657 - DNA, 1409 bp, Homo sapiens
atgaccgtagggttgccgttgccggttatcccgctgtttgttcatcatgaactgggctatggcaataccatggtcggcattgccgtcgggattcagtttctggctacggtgctgacgcgtggttacgccgggcgactggccgatcaatatggtgcaaaacgttcggcgcttcaaggaatgttagcttgtggtctggctggcggcgcgttgctgctggcggcgattttgcctgtctccgcaccgttcaaatttgctctgttggtcgtcgggcgtttgattcttggctttggtgaaagccagttactgacaggcgctctgacctggggactaggcatcgtagggccaaaacactctggcaaagtgatgtcatggaacggaatggcgatttacggtgccctcgctgttggtgctccgcttggcctgttgattcatagccattacggttttgccgcactggcgatcaccacaatggtattacccgtactggcgtgggcctgtaacggcacagtgcgcaaagtaccggccgtggcgggagaacgttcatcgctgtggagcgttgtcgggcttatctggaaaccagggttaggtctggcactacaaggcgttggttttgctgttatcgggactttcgtttcgctctactttgccagcaaaggatgggcgatggcgggctttactcttaccgcgtttggcggcgcatttgtcgtgatgcgcgtcatgtttggctggatgccggaccgttttggcggcgtgaaagtggcgattgtctctctgcttgtagaaacggtgggcttgttgctgctctggcaagccccaggtgcatgggtcgcattagcgggcgcggcgttaaccggagccggatgttcgcttatctttcctgcgctgggcgtggaggtggttaaacgcgtcccctcacaagttcgcggcaccgcactgggcggttacgccgcgtttcaggatatcgccctcggcgtctccgggccgctggcgggaatgctggcgaccacgtttggttactcttcggtatttcttgccggggcgatctctgcggtgctgggtattattgtcacgatactgtcatttcgtcggggtcaggaaacagcgcatcaaccagatcagcagcgcgcagcatacgacctgcagcgtagtaaccgtcgcgttcttccagcatcaccagcatcggcatgtcggtgtagcgacgcacatagtcggtgaaatactggcttgggttgtcgaggtggaattcacgcagcattacgtggcccatcgccagcgccattgccgcatcggtgccctgtttcggtgccagccacagatcgcacagtttggcgatttcagcgtagtctggtgtgacggcaacagttttggtccctttgtaacgcacttcagtaaagaagtgagcatccggg

SEQ ID NO: 143658 - DNA, 825 bp, Homo sapiens
atgttggtgacattttgtgtctatatctttggcatgatattgattgggtttatcgcctggcgatcaacgaaaaactttgacgactatattctgggcggtcgtagtcttgggccattcgtgacggcattatcggcgggtgcgtcggatatgagcggctggctgttaatggggttgccgggcgctgtttttctttccgggatttccgaaagctggatcgccattggcctgacattaggcgcgtggattaactggaagctggtggccgggcggttgcgtgtgcataccgaatacaacaataacgccttaacactgccggattatttcaccgggcgctttgaagataaaagccgcattttgcgcattatctctgcgctggttattttgctgttcttcaccatttattgcgcctcgggcattgtggcaggcgcgcgtctgtttgaaagtacctttggcatgagctacgaaacggctctgtgggcgggcgctgcggcgacgatcctttacacctttattggcggtttcctcgcggtgagctggactgacactgtacaggccagcctgatgatttttgccctgatcctgacgccggttatcgtcattatcagtgtcggtggctttggtgactcgctggaagtgatcaaacaaaagagcatcgaaaacgttgatatgctcaaaggtctgaactttgttgccattatctcactgatgggttgggggctgggttacttcgggcagccgcacattctggcgcgttttatggcggcggattctcaccacagcattgtccatgcgcgtcgtattagtatgacctggatgatccccggt

SEQ ID NO: 143659 - DNA, 1542 bp, Homo sapiens
atgcagcaggcaagtgaagacgaatttaatcgcgcgttaaatatcgcttttgataatcgcctgggcttatgcaaggttgagagcgcgcgtcaggtgttcccactgacggggcgttatgcgcgccagtttgcctcgcaccgtctggcgctggtgggcgacgccgcacataccattcacccgctggcggggcagggggtaaatctcggctttatggatgctgcagagctgattgccgaactgaaacggttgcatcgtcaggggaaagacatcgggcagtacatttatctgcgtcgctatgagcgtagccgcaagcacagtgcggcgttgatgctggctgcctggcaggaaggcggcagcatggcgcacttgctgggcaccgatgacgtaggccgtgatgtgctgtcgcgcctgatgtacggtgcgcgcctgtcgctgctggttggctgtctggtagttgtgttatcgctgattatgggcgttattctcggcctgatcgccggttactttggcggcctggtcgataacatcattatgcgcgtggtcgatatcatgctggcgctgccaagtctgctgctggcgctggtgctggtggcaattttcggcccgtcgattggtaacgccgcgctggcactgaccttcgctggcttgccgcactatgtgcgcttaacccgcgccgccgtgctgaactgccttgcgccgctgattgttcaggcgtcgctcggtttctctaacgccattctcgatatggctgctcttggtttcctcggcatgggggcacagccgccaacgcctgagtggggcaccatgctctccgacgtgttgcagttcgcgcaaagcgcctggtgggtcgtgaccttcccgggtctggcgatcctgctgacggtgctggcatttaacctgatgggtgacggtctgcgtgacgcgctcgatcccaaactgaagcagtaagaggttcgagatggcgttattaaatgtagataaattatcggtgcatttcggcgacgaaagcgcgccgttccgcgccgtagaccgcatcagctacagcgtaaaacagggcgaagtggtcgggattgtgggtgagtccggctccggtaagtcggtcagttcactggcgattatggggctgattgattatccgggccgcgtaatggcagaaaaactggagtttaacggccaggatttgcagcgtatctcagaaaaagagcgccgcaacctggtgggtgccgaagtggcgatgatcttccaggacccgatgaccagccttaacccgtgctacacccggggttttcagattatgggagcgattaaggtgcatcaagggcggaacaaaaatacccgccgtcagcgagcggatgacctgctgaatcaggtcggaattcccgacccgcattgcgtttggatgttacccgaattaactttccgaggttgaaccacgggggagatggcatgggatggccgggggcaaactggtgttgcgtagaccgaccccgggctgagggacactaagcggaatattgaatacgtggggctagggaaaaaaaa

SEQ ID NO: 143660 - DNA, 2436 bp, Homo sapiens
atgaaactgacaacacatcatctacggacaggggccgcattattgctggccggaattctgctggcaggttgcgaccagagtagcagcgatgcaaaacacattaaagttggcgttataaatggcgcagaacaagatgtcgcggaagtcgctaaaaaggtggcaaaagagaaatatggcctcgatgttgaactggtaggatttagcggttcgttgctaccgaacgatgcgacaaatcatggcgaacttgatgcgaatgttttccagcatcgaacctttcttgaacaagataatcaggcgcatggttataaactggtagcggtggggaatacgtttgtcttccctatggcggattatggaactcgagggggcgcagtcccgcgcgtactggatgatcccaaagttgatgtagcgattatcagcaccacttacattcagcagaccgggctttctccggtgcacgacagcgtatttattgaagataagaattcgccgtatgtgaatattttggtggcacgggaagataataagaatgcagaaaacgtacagactaaatgtcagggacgtaccaatgaccaccaaataaaaaaacgccagaatcaaactgccgttaacgacaaagtttgttccttgtctggcataaaaaggcaacagaatcagaccgccaatcagcatactccagccgacgactggacctgcaggcacattaagtgcctgcaggtcatcattatgcgcgtggtcgatatcatgctggcgctgcaagtctgctgctggcgctggtgctggtggcaattttcggcccgtcgattgataaattatcggtgcatttcggcgacgaaagcgcgccgtttccgcgtcgtagaccgcatcagctacagcgtaaaacagggcgaagtggtcgggattgtgggtgagtccggctccgtcaaccaaacgtcgtcgccagcattcccgccagcgcccgcgagacgccgagggactcatcctgaaacgcggcgtaaccgccagtgcgtgcccgaacttagcagcaacaagcccaccgtttctacaagcagagagacaatcgccactttcacgccgccaaaacggtccggcatccagccaaacatgacgcgcatcacgacaaatgcgccgccaaacgcgataagcccgacaacgctccacagcgatggacgttctcccgccaggccggttactttgcgcactgtgccgttacaggcccacgccagtacgggtaataccattgtggtgatcgccagtcacgtacagaatgatcgaggatcgccagtttcatacatcgcttggatgcctgcaggtccgctggttattttgctgttcttcaccatttattgcgcttcgggcattgtggcaggcgcgcgtctgtttgaaagtacctttggcatgagctacgaaacggctctgtgggcgggcgctgcggcgacgatcctttacacctttattggcggtttcctcgcggtgagctggactgacactgtacaggccagcctgatgatttttgccctgatcctgacgccggttatcgtcattatcagtgtcggtggctttggtgactcgctggaagtgatcaaacaaaagagcatcgaaaacgttgatatgctcaaaggtctgaactttgttgccattatctcactgatgggttgggggctgggttacttcgggcagccgcacattctggcgcgttttatggcggcggattctcaccacagcattgtccatgcgcgtcgtattagtatgacctggatgatcctctgcctggcaggggcggtggctgtcggcttctttgggattgcttactttaacgatcatccggcgttggctggtgcggtaaatcagaacgccgagcgtgtgtttatcgaactggcgcaaattctgtttaacccgtggattgccgggattctgctgtcggcaattctggcggcggtaatgtcaaccttaagttgccagctgctggtgtgctccagtgcgattaccgaagatttgtacaaagcgtttctgcgtaaacatgccagccagaaagagctggtgtgggtagggcgtgtgatggtgctggtggtggcgctggtggcgattgcgctggcggcaaacccggaaaaccgcgtgctgggcttagtgagctacgcgtgggcaggctttggcgcggcgtttggtccagtggtgctgttctcggtgatgtggtcacgcatgacgcgtaacggtgcgctggcggggatgatcatcggtgcgctgacggttatcgtctggaaacagttcggctggctgggactgtacgaaattattccgggctttatcttcggcagtattgggattgtagtgtttagtttgctgggtaaagcgccgtcagcggcgatgcaaaaacgctttgccgaggccgatgcgcactatcattcggctccgccgtcacggttgcaggaaagctaa

SEQ ID NO: 143661 - DNA, 1386 bp, Homo sapiens
atgattcaattgtctccacctggccccacccttgacatgtggggattattacaactcaagagatgcgaacagcatctgctcagatgtcagatctgctgcggaaaagatgagaaatgggctgcatatgtgggcatcatttttgcacagttccctggtactcaacgcccagagagctggcagcctctcatgcagacccctcctccctatgccaggcctccatctgcaccatccccacccccatggtggaggagaaggagtgacccctgtggcagggagaaggtgaaagtcacctgcccatccctctcccgatgttctcttctgagacctctttatttccctagacctttgcctgttggttctcaaaagcatcatttggaagtaagagaacctcaactcacagctgtccccagtggctttgtggcatttcacaacagttttgactttagaacctctctcaccttggcccccactccagagccaaaggaacccccacatctcaggaatctgtcatctctggaggcctcagaacctggtgtcacattacagggtgaatgccagggacaagctaaagagagcttaggaggaaagaaagaatgcataatggctttctctctttcccagggtcatttccctgtgatgagcccaagaagtccaggttaccaggatgcttatgagaaagccaagggtgaggacgctgtaggaagtcatctgcgaagcggagagtgcacctttaccagacgcggagtctgctggcgccttgatctcggactttgcagcttccagaacctccctgaccttcaggggagggatggtgaggcaggagaggagcatgagctctggtcaaaaggagagctgggagtgagcaagcgaaaggctttgaagtcacagttgacaacaacagtgaccagtattttgttccctaaatcctggtttttgaaaactgaaggaagggagcagtttttgaaagaggaaggtgcaagtggggactgcctttccatctccacagggagccagctctccctggaagcagcagaatattcttcacttgagcaccaggggagagcgggcaatagatcctggctgcgctggtcacctgtgggctccagcagcaaacagagaactgtaagagatcccagaggacatttgacaatttctggagacatttctgttgtcgtaactgggaggtccacagacatacattggatagaagccaggaatgctgctaaatgctatgcagtccacagaacagcccccatcccctcaaccaaaaattatgtggcccaaaatgtcagtagtgtcaaggtggagaaactctcgtctagacctaccctaacagaatttaacaacaagcctggaagggatcaagttgatttgcaagtaacttaa

SEQ ID NO: 143662 - DNA, 518 bp, Homo sapiens
gggatttttctggatatgggcatgcagaacgtttccttttttgatgctgaaagcggttcccatgtctatacattcaggagcgtatctgctgaggagccattgcgcccatttttggctccttcagttccacctaatggtgatcaaggtgtcttgagcatctgtcctttgatgaactcaggcactactgatgctccagtccgtcctggggaggccaaataagccctcactccaaaaaaacaaaaaacagggtaagaaaattacttgggtgggtagacttaggaacgctctacttcgtaaaagcattatacaaagtcacgggagaaaaatatgggacatttcttgattgtacttaatctaatttgattagattatagagtcacatcttgtttcctatagaaatgtcctgtattctgggatcaatttccaaatgctttacttttttatttctgcaagttcaaattaatgtattatagaagttatgagttaaataaagattggaatatcaaaaaaaaaaaaaa

SEQ ID NO: 143663 - DNA, 1941 bp, Homo sapiens
aaccatcattctcagcaaactatcacaaggacaaaaaaccaaacatcgttatgttctcactcataggtgggaattgaacaatgagaacacttgtacacaggaagggggacatcacataccagggcctgttgtggctgcacctccaccgctgtcacagaggcccacagcttcctacccaccccaggccaggcagggctgccccccaacgctccgacctgccttcccggcccccaaacttgctgctgctgctgccacaactagcaccgatgctaatacaactactactgctgtcaccctcaacgcacaggcccaccctacaaggctcctaacacctgaccactgcactgcctgtgccctggcggcagccagccgccatcctaccgctctggtgctcttcagttttcattgccgccctcctaccactccagcgctgagtctttagtctccatggccgcccgaggcgagcggtggtgccacaagctccagcctccagcaggcggctcctcctcctggcatgaaacaactgggcaggcaaagccaagaaagcctagaacaggatgcagagagtggtagcgttagagcctcaccttggcatgctggccactggatggcagaggccggtttcagcgaaggcactctccctgccgtacacagtgtagccacgaatagtgcccccaaccagacccctgctgggggcagtaatgccctgatatggcacccaaaccgccccccaactgcgggaagtgcaaccccggatagtgccccaacctgctccccactgggagcagcaacccagggagacgccccaactcactccctgcctccggcagtacagccacagatagcgcacccaacccaccccctgcgcgggcaaggtagcccccgatagcgcacccaacccgccccgccggaaccaatgtggccccaggtagcacacccaccatcctcagaggaggacgggaacagagtgaccaagggggtggccttgggctggcctgtgggtgggcgagcggcaggaggtcagcatcctgttgtgtacctgggagccccctgacctcagtgtatgaagatgtccctggagtgtggatgcaccgtctgcctcaagtgcatcaattcgctgcagaaggagccccatggggaggatctgctttgctgttgctgttccatggtctctcagaggaacaaaatcaggcccaatcggcagctagagaggctggtttcccacatcaaggaactggagcccaagctgaagaagattctacagatgaacccaaggatgcggaagttccaaggtaaggaatctgtataccctgcccccttcccaagaccagaccaggaaaaatcatctgtgcagttggcccgaagtgggctcatcacacagaatcggcaagaccttgccgagagatttgacgtgtccgtttgcatcctgggctcccctcgctttacctgtggccgccactactgggaggtggacgtgggaacaagcacagaatgggacctgggagtctgcagagaatctgttcactgcaaagggaagatccagctgaccacagagcttggattctggactgtgagtttgagggatggaagccgcctctctgccagcacggtgccgctgactttcctcttagtagaccgcaagttacagcgagtggggatttttctggatatgggcatgcagaacgtttccttttttgatgctgaaagtggttcccatgtctatacattcaggagcgtctctgctgaggagccactgcgcccatttttggctccttcaattccacctaatggtgatcaaggtgtcttgagcatctgtcctttgatgaactcaggcactactgatgctccagtccgtcctggggaggccaaataagccgccactgcaaaaaaaaacagggtcagaaaattacttgggtgggtagacttaggaattttctactt

SEQ ID NO: 143664 - DNA, 824 bp, Homo sapiens
tggatatgacgtcagatattgacacagccaacaatcgactcatcatttctgaagacctgtggagtgtccattgtggatttcttagaaccgcacagagtatgccgagattcaaacaagtcatctgtgtcctgggctcccctcgcttcacctctggacaccattactgggagaagaacaaaatcaggcccagttggcagctagagaggctggcttcccacatcaaggaactggagcccaagctgaagaagattctgcagatgaacccaaggatgcggaagttccaagtggatatgaccttggatgccgacacagccaacaacttcctcctcatttctgacgacctcaggagcgtccgaagtgggtgcatcacacagaatcggcaagaccttgccgagagatttgacgtgtccatttgcatcctgggctcccctcgctttacctgtggccgccactactgggaggtggacgtgggaacaagcacagaatgggacctgggagtctgcagagaatctgttcaccgcaaagggaggatccatctgaccacagagcgtggattctggactcatgagaattgtttgccaaatgaatccgtgaatggtcgtgcagaagaaggtgcgctccaagagggcacaggctatattgttttattcctgtgtctcagcaatatccaaaaagagccaggcacacctccaacgggcttctttgccaccagcctccccatcttcctggccaaagcaatgagccttccagtagagccccaaccagatgcccctcctgcttacgacccgctgaaatccctggataaagtgcaaagccctctctga

SEQ ID NO: 143665 - DNA, 1506 bp, Homo sapiens
gccatgtcactggctcaggctcagctgctgggtcaccaggagaatggacgcttcctccacctcagctcagagcacagtgatgattcgtgactttctttcccaatagaacttcaaatctctgaaggcggggggtggggggatgtgcatgagtgtatgtactcatggtcttgttctagaagtgacaaagctggcacacaatccctttatgcatgaaaaggttgtcacttgtcacaactaacaggctttcacctcacggaaattttcttcccttgagcacttttcccctggcagtggacatggctgcactcttccaagaagcaagcagctgtcccgtctgctcagactatctagagaaaccaatgtccctggagtgtggatgcgctgtctgcttcaagtgcatcaattcactgcagaaggagccccatggggaggatctgctttgctgttactcttccatggtctctcggaagaacaaaatcaggcgcaatcggcagctagagaggctggcttcccacatcaaggaactggagcccaagctgaagaagattctgcagatgaacccaaggatgcggaagttccaagtggatatgaccttggatgccaacacagccaacaacttcctcctcatttctgacgacctcaggagcgtccgaagtgggcgcatcagacagaatcggcaagaccttgccgagagatttgacgtgtccatttgcatcctgggctcccctcgctttacctgtggccgccactactgggaggtggacgtgggaacaagcacagaatgggacctgggagtctgcagagaatctgttcaccgcaaagggaggatccatctgaccacagagcgtggattctggactgtgagtttgagggatggaagccgcctctctgccagcacggtgccgctgactttcctcttcgtagaccgcaagttacagcgagtggggatttttctggatatgggcatgcagaacgtttccttttttgatgctgaaggtggttcccatgtctatacattcaggagtgtctctgctgaggagccactgcacttgttttttgctcctccaagtccacctaatggtgataagagtgtcttgagtatctgtcctgtgataaacccgggcactactgatgctccagtccatcctggggaggccaaataagccctcactccaaaaaaaacaaaaaacagggtaagaaaattacttgggtgggtagacttaggaacactctacttcgtaaaagcattatacaaagtcacgggagaaaaatatgggacatttcttgattatacttaatctaatttgattagtttataaattgagtcctaagtattaattattgccaccatccaactcattgagtcttatggttcacatcttgtttcctatagaaatattctgtattctgggatcaatttccaaatgctttacttttttatttctgcaagttcaaatcaatgtttaaattatagaagttatgaggtaaataaacatttggatatca

SEQ ID NO: 143666 - DNA, 5317 bp, Homo sapiens
cacgggtaacaatttttatttgagaacacaagtttcacaagaaaatcatcttttttttttaaattgtgacttttatcttaacactgtgtgaagtactcaaggtccaagaagcttaatggtcatttgtcaaaatagtaattatccaattttttcctatgaattatgaaattttttcaaaaccagaaataaaccaatgaaaataaataaaaattccctagaatttcctcaatggaatgcatgcccctattacctttgagtctgatgtatatgaatttaaaccattttgtaaaattgcaaatccaatcatacttaatacttcaggtttccaagcaaagcttgaagcctacaacatattacaggaattatctttactgacaactgatggaaacatctctaaaataagcttttgaagttagtacattaagcctaatttaatataaaggcaatttaatcttatcttcatatgaaagaaaaatacactgtcaggatgaaggatttactaaagttacaattaactggagatatatcaccagtaaaaacctaattccctgttataattaaatcaaagcctcattaggttagagggtgtggaagggcatgacccagtgggaggtgggaatctcaccaataaaacgccctcatgtgccccttccgcacaagacctgagcgcccagtggaagcagctggaggacagaggagcttccagcagaagaggtgagcccatgcctgtgtgtgtgtttttcctccttagatgcctagaaatgggggttatgccttgggggatgaatgagagaaattcgtaattaatgaattcaacaaaggctgtctgagtgctgcctcagagttgaaaaccagtcaccctggatccccagatctccagtctaggagtggtggcagtcaatttggtattcatttccaaggctggagaaggatgtgatttttttttttttttttttggtgagacagggtcttaactctgttgtccaggttggagtgacctggtgtgatctctgctcactgctaatttttctattatttgtagagagggggtcttcctgtgttgcccaggctgatctcaaatccttggctcaagggatcttccagccttggcctcgcaaagtgctgggattacagatgtgagctactgcatccagtccctctctttttttttttttttttttttgagatggtgtctcactctgttgtccaggccggagtgcaatggctggatcttggctcactgcaacctttgcctcccaggttcaaagcaattctcctgcctcagcctcccaagtatctgggattacaggcgtgtgccaccacgcctggctaattcttttgtattttcagtagagatggggtttcacccatcaggctggtctcgaacttttgacgacctcagatgatccactcacgtcagcctcccaaagtgctgggattataggcctgagccaccacgcccggcctcccagcccctaattcttatgttcatcaatcaatctcttgctggggttccccttagggaggagggaaaatgccccaggctcgctggttcctcccatgggtgctcccgtgccctgggttcaaggcccagtggctgggtcaccagtagaatggacccttcctccacctcagttcagagcacagtgatgattcgggactttcttttcccaatagaacttcaaatctttgaagacgggggggtggggggatgtgcttgagtgtttgtactcatggtcttgttctagaagtgacaaagctgggacgcaatacctttatgcatgaaaaggttgtcacttgtcacaactaacaggctttcacctcacggaaattttcttcccttgtgcacttttcccctggcagtggacatggctgcactcttccaagaagcaagcagctgtcccgtctgctcagactatctagagaaaccaatgtccctggagtgtggatgcgctgtctgcttcaagtgcatcaattcactgcagaaggagccccatggggaggatctactttgctgttgctgttccatggtctctcagaagaacaaaatcaggcccagttggcagctagagaggctggcttcccacatcaaggaactggagcccaagctgaagaagattctgcagatgaacccaaggatgcggaagttccaaggtgagggatctgtatacactgcccccttcctacgaccagaccaggaaaaatcatctgtgcaactggcccctcattccatatggggattagctgctgtctggcacctaaaattgagatgcttcttcatcatcagattctcagccctgacaacatacagaatcacctggtgatctccaaaaaaaaggctggctgggcatggtggctcatgcctgtaatgtcagcactttgggaggccgaggcgggtggatcacgaggtcaggagatcgggaccatcctggataacacggtgaaaccctgtctctactaaaaatacaaaaaattagccaggcttggtggtgggtgcctgtagtcccagctacttgggggttgaggcaggagaatggcgttaacctggggggggcggagcttgcagtgagccaagattgcaccactgcactccagcctgggtgacagagtgagactccgtctcaaaaaaaaaaacctgatgtctatgtcatgggttagacaagggattctctaaacttagtgtgctcagattacctggggatcttgttaaaatgcagatgctgaactgggaagtctcaggattgatcccgctggcttggggactttgctgagtagcaaaaacacagagcaacttaatttgaatttctctctagcaaaggttcccaggactctgacatttaaatgggcctggtaattctaatgcacagtgagtattggcacccactgtaccaaacaacctcaccccagggttgggaagagtttggaatggagcacctatggtgtttgtttctgtgagtggggcgagttgcagacgctggtctcctcatcggtgtgccatggacttcaacaggggtcctggctacaggaaatactatcactctccataactctggggaatagggacatttaaatgaagaggttatggtcagcctgggcaaagaattacacctataaatggtggtggcttctgccctgacacccatgatctctactcatccacctacccatacctgactgtgtctctgctgaaatatggaggacagattcaccctgcctaagtcatgtttggaaccctcttcctccttccttgtccatgtccactcatctcatttcattccctaattcaccatcaaacagcaatcagtctcctcaagtcttactgtaatctataaaatctatattggtgatcatcagttttttgacttgaaggatcatatgttctgtagatttttttttcagaatgctctggacaattaattttctttaggccagatcacactgcctcctccatgagaattggcagcttcacctatcaaccacatacccaatgcattaaattattgacctttgtatttactgcccttattctctacgatcagtcagttatgacgaacaactttctttttttttttattttttgagatggagtctcgctctgccgcctaggctggaggtgcagtggcatgatctctgctcattgcaagctccgcctcctgggttcatgccattctcctgcctcagtctaccaagtagctaggactacaggcacccgccaccatgtccggctaatttttttgtatgttttttagtagagacagggtttcactgtgttagccaggatggtctcgatctcctgacctcgtgatccacccgtctcggcctcccaaagtgctgggattacaggtgtgagccaccgcgctcagccaacaaacaactttcaaatacctttctcttcactccaaaatttaccattgttttgcttaaggtttcacctcccatgtaggatggaaaacattctttcatctaaggcccccctcttcctcctggccttggagcctcctaatgtccaggaccggcacctctgtcatcacattgtcagctgcagagataccctacctgctgtcagaaccatgcacaattaatttgcttacaaacatggaaaacaaaggcctggaatcatgctctatatactgagttgagcaatacaagatggaagcagaaacatatttaacatcgaccatttgcattgtcttaattatcatttatttgttcacacatcaaggtggtagaaaggggggcatggtgtctgccttcagagaccctccactctaaatgaagaaaagttcagtgaagcaaacacgtgacgtaaagtaaaataagaattgctactgtgaataagagttggggtaattgccacaaagccataccctatgaagaaatttgaaactagtccagggaagttgccctcatgaaaaagttttgattttggaggaagaaacagaattaaagaaactaaagtcaggagatatttgggcctttgaagtagaagagaggcatggggttggcttctgtccacttgctgagcaacttgttttccttttcacagtggatatgaccttggatgccgacacagccaacaacttcctcctcatttctgacgacctcaggagcgtccgaagtgggctcatcacacagaatcggcaagaccttgccgagagatttgacgtgtccgtttgcatcctgggctcccctcgctttacctgtggccgccactactgggaggtggacgtgggaacaagcacagaatgggacctgggagtctgcagagaatctgttcactgcaaagggaagatccagctgaccacagagcttggattctggactgtgagtttgagggatggaagccgcctctctgcaagcacggtgccgatgactctcctcttagtagaccgcaagttacagcgagtggggatttttctggatatgggcatgcagaacgtttccttttatgatgctgaaagtggttcccatgtctatacattcaggagcgtctctgctgaggagccactgcgcccatttgtggctccttcaattccacctaatggtgatcagggtgtcttgagcatctgtcctgtgatgaactcaggcactactgatgctccagtccgtcctggggaggccaaataagccgccacatttactgtgttccttggggtcaccttggtaacagagaaggggtcctcacttgcccactctttggaatccaccttccattgatcttctgggggaactttaatgcaggaactcaggttccccataagaaagaccagaatctgtgaaaatgacagcaagcatgttcaacctgctatgaactttg

SEQ ID NO: 143667 - DNA, 2404 bp, Homo sapiens
tgtattggaccgagttccagatgggccagtatttattgctatgtgttttctagtgagagtaatggatgcagttagctttgctgcagcaatgactgcatcttcttctatcctggcaaaggcttttccaaataacgtggctacggtattgggaagtcttgagactttttctggactggggctaatactaggtcctcctgtaggtggctttttgtatcaatcctttggctatgaagtgccttttattgttctgggatgcgtcgttttgctgatggtaccactcaatatgtatattttacccaattacgagtctgatccaggtgaacactcattctggaaactgatcgctttacccaaagttggccttatagccttcgtcatcaactcactcagctcgtgttttggcttcctcgatcctactctgtctctctttgttttggagaagcctgtaaaactgccccaagcctatctcactttgctgactcctttttcggactcagtctgcctgcacccaggtggaagtgctgcagcccatcctattacccaactccaacctaagaaatctttagaaatttattttcctctttttctgaatcagaaaccctatggttggaatccaagaatctcttttagcaagttctccagtcagctctggctgctggtgctgatattagttgtaagtggcctctctgctggaatgagtataattccaactttcccggaaattctcagttgtgcacatgaaaatgggtttgaagagggattaagtacattgggacttgtatcaggtctttttagtgcaatgtggtcaattggtgcttttatgggaccaacgctgggtggatttctgtatgagaaaattggttttgaatgggcagcagctatacaaggtctatgggctctgataagtttatctgataaaaatgcgaatggcttggtggttcgtgtcttggttgttatttttgccctaataaccctgcaggttggtactcaggacagttttatagctgcagtgtatgaacatgctgtcattttgccaaataaaacagaaacaccagtttctcaggaggatgccttgaatctcatgaacgagaatatagacattctggagacagcgatcaagcaggcagctgagcagggtgctcgaatcattgtgactccagaagatgcactttatggatggaaatttaccagggaaactgttttcccttatctggaggatatcccagaccctcaggtgaactggattccgtgtcaagacccccacagatttggtcacacaccagtacaagcaagactcagctgcctggccaaggacaactctatctatgtcttggcaaatttgggggacaaaaagccatgtaattcccgtgactccacatgtcctcctaatggctactttcaatacaataccaatgtggtgtataatacagaaggaaaactcgtggcacgttaccataagtaccacctgtactctgagcctcagtttaatgtccctgaaaagccggagttggtgactttcaacaccgcatttggaaggtttggcattttcacgtgctttgatatattcttctatgatcctggtgttaccctggtgaaagatttccatgtggacaccatactgtttcccacagcttggatgaacgttttgccccttttgacagctattgaattccattcagcttgggcaatgggaatgggagttaatcttcttgtggccaacacacatcatgtcagcctaaatatgacaggaagtggtatttatgcaccaaatggtcccaaagtgtatcattatgacatgaagacagagttgggaaaacttctcctttcagaggtggattcacatcccctatcctcgcttgcctacccaacagctgttaattggaatgcctacgccaccaccatcaaaccatttccagtacagaaaaacactttcaggggatttatttccagggatgggttcaacttcacagaactttttgaaaatgcaggaaaccttacagtctgtcaaaaggagctttgctgtcatttaagctacagaatgttacaaaaagaagagaatgaagtatacgttctaggagcttttacaggattacatggccgaaggagaagagagtactggcaggtctgcacactgctgaagtgcaaaactactaatttgacaacttgtggacggccagtagaaactgcttctacaagatttgaaatgttctccctcagtggcacatttggaacagagtatgtttttcctgaagtgctacttaccgaaattcatctgtcacctggaaaatttgagagaccttgcagggcatggcccttctgtgaatatgttgtttctagaaacagcagtcataatattgaagatgacaaatgttttacatcagtcatgctcattatggcttcttga

SEQ ID NO: 143668 - DNA, 850 bp, Homo sapiens
tgtattggaccgagttccagatgggccagtatttattgctatgtgttttctagtgagagtaatggatgcagttagctttgctgcagcaatgactgcatcttcttctatcctggcaaaggcttttccaaataacgtggctacggtattgaattccctgaatgggcagtttgacagaatgagttccctgggcctcggtgggccacgcctccgcaaagaaggacaacgcgaagctgcccgcgtagtgcctgttgcactcgccaaggaccggcctggcagagatagaaaactcgcagtacgtttgcctcagaaccgcctcaatccggaaacagaaactccccaggcccggcactgcgggagccacctctttcgaggaggttgtgaagactgccctcatccacgatggcctagcacgtgtaattcgcgaagctgccaaagccttagacaagtacgtgtatcagtctcaatactgtgggttcttgcaaccggaacaaaactgccacccaagggaagaaggcatggagttcatggtgttagcgcaaaagttctgaatggcatccgtcctaccggaaacctaggaaaagccattctcagggaccttaacgacttcaatgtccttaaggctcgtaacatggctttactattgccagtttttaaagtatgtctgcacaaacacaatcaggaaaagaaggctgtgaacctgaagaaaaaatatgaaaaggatattgctccacaacaagctaaaggaaaacctgaggcagttaaagagggagttgccaaggctgagaaaggtaagaaaaaggaagaggaggaaaatgaggaagatgaagaggatgaggaggaggaagattaa

SEQ ID NO: 143669 - DNA, 949 bp, Homo sapiens
ttttttttttttttttgggagccaaagatttatttcttcatttcttgcatttgaaatactcttcaatgacatccttggcctgagactccttgccatagtccttaaaaaaaacaaaacacgcatgcaatttcttgttaatatttaggaatttcaccaagctattagtatcaattataggggagcttcaacaattagctatgtcttataaaaatgtttcccatcactaagatttgttatagccattctcagggaccttaacgacttcaatgtcccttaaggctcgtaacatgggctttactattgccagtttttaaagtatgtctgcacaaacacaatcaggtaagcagattcattggctggcttgtaaattacagcttttatttttttcctgaaatgcagaaaatgctttaaacctgttgaatcagttttttccttttataagatcctcaacttatttcaatacaaggttttatatgattacccagcataaccttcatccctagaataaacggtgacttaccttaactactacacaactgcaaccaaccacttaacacgggtttcccgtcatcagtcaattgctacaaaggcctacccattctcctagtttcttgttgtcatcaaccttaattagggttgatttggtgttcagcacaaagggcctccaccaacttgacatacataggctcatcacagttggatgcaagcacacaaagatgggcttggcgcttgtctaaggctttggcagcttcgcgaattccacgtgctaggccatcgtggatgagggcagtcttcagaacctcttgtaaagcagtattaacgtccattacacctccagcagcaatgccttcctcggccatggcggtgggttacgggtgaagctgaatcttgaacgcacccaagcctccgcctccgcgcgactcggctcgtgccgaattcctgcagcgcg

SEQ ID NO: 143670 - DNA, 646 bp, Homo sapiens
gccgtcgacgccgccgagtcgcgcggaggcggaggcttgggtgcgttcaagattctacttcacccgtatcccaccgccatggccgaggaaggcattgctgctggaggagtaatggacgttaatactgctttacaagaggttctgaagactgccctcatccacgatggcctagcacgtggaattcgcgaagctgccaaagccttagacaagtgcgtgtatcagactcaatactgtgggttcttgcaaccggaacaaaactgccacccaagggaggaaggcatggagctcatggtgttaagcgcaaaagttcttgaatggcatccgtcctacccggaaccttaggaaaaggcgccaagcccattctttgtgtgcttgcatccaactgtgatgagcctatgtatgtcaagttggtggaggccctttgtgctgaacaccaaatcaacctaattaaggttgatgacaacaagaaactaggagaatgggtaggccttttgtaaaattgacagagaggggaaaccccgtaaagtggttggttgcagttgtgtagtagttaaggactatggcaaggagtctcaggccaaggatgtcattgaagagtatttcaaatgcaagaaatgaagaaataaatctttggctcacaaaaaaa

SEQ ID NO: 143671 - DNA, 406 bp, Homo sapiens
  misc_feature (1)...(406): n = a,t,c or g
cgtcttcgttgcagcagatgaaatttcttgtaacacctctgcagttacggacgagtttatgctgccgacccctaccaccacgcacttgctccagcccccacctacggcgttggtgccatgaatgcttttgcacctttgactgatgccaagactaggagccatgctgatgatgtgggtctcgttctttcttcattgcaggctagtatataccgagggggatacaaccgttttgctccatactaaatgacaaaaccataaaaaccttccaatgtggggagaaaggaagctttccgaggcctgagtattgcaatacatgcagtagtacatcattttagcaactctnnnnnnnnnnnnnnntcccattnnnnnnnnnnnnnggggggggccgttttaaagaacccaactt

SEQ ID NO: 143672 - DNA, 481 bp, Homo sapiens
gcggccgcctaccgaggggcgcacctgcgaggccgcggtcgcaccgtgtacaacaccttcagggccgcggcgcccccgcccccgatcccggcctacggcggtgttgtttaccaggatggattttatggtgcagacatttatggtggttatgctgcataccgctacgcccagcctacccctgccactgccgctgcctacagtgacagttacggacgagtttatgacattttcccccctgtcaccactcacgtgctccagcccccacctacggcgttggtgccatgaatgcttttgcacctttgactgatgccaagactaggagccatgctgatgatgtgggtctcgttctttcttcattgcaggctagtatataccgagggggatacaaccgttttgctccatactaaatgacaaaaccataaaaaccttccaatgtggggagaaaggaagctttccgaggcctgagtattgcaatacatgc

SEQ ID NO: 143673 - DNA, 2118 bp, Homo sapiens
atggatattgatcattctcatgctgaaggatatgtttttatcaactcaggaccaagtatcaccattgataaacaggggccaggaatgatcccctgcatgccgtatggagactactgctcagcagaaagggttccgatgccccatctgagaccttggcactggcttactcccttcctcactggaggattcaaaatcctgctggagagtggctgtgggacatcttgccaggttgtggggatgccgatgatcccggcactcagaattgaggaggtatctcaggattccaccattatttgccgctgtaaaattccaccttgcaaggatgaacccagtgcccttcgctttaaatcaggaggaggcaagtcattgctgcaatgcagccgcagtttgcaggatgagctaggcagcctttctggctggaaggcagagagctttagggaagaaagcgggaatacagaagccgaagattctctcatccagtgtccagtgtgggtccaggatgttggagacacagtagggaccaacatagagtcctcaggacatccctatagagagatgtataaggaagttgaaatcaactcagtgccaggcttcccgtatccagcagccaccgccgcggccgcctaccgaggggcgcacctgcgaggccgcggtcgcaccgtgtacaacaccttcagggccgcggcgcccccgcccccgatcccggcctacggcggtctctggaatctggtagaccttcctgaatattttgctttgtctgatgatgactttaacatattgctgctggtgtgcatccgtgtgtatactggacagcaggaaactagcctgtgccactgcccagctcagcagcagaacaagagagatttgcaactaaaaatgtttgtcgatgcccagtgcccctttcagcttggtgggccagtcccaaggcttggtgaaggtggttatgctgcataccgctacgcccagcctacccctgccactgccgctgcctacagtgacagactgtcactgatgtatggagatggctctgaaatagtgaggaagggaagaaatcagttcgtcttcgttgcagcagatgaaatttcttgtaacacctctgcaggttgctacccaagttaccaattagaagcaagttcaggggtacaaggaggtgtcaccagcgcctttcatttttctatccccacttctcaacctacacatgctgccagctacattaaaactttagacagtggggatgcaatggcagacaaaatagacactgccccagcctccatggagttctcgttccaggagggtgaaagttacggacgagtttatgctgccgacccctaccaccacgcacttgctccagcccccacctacggcgttggtgccatggatagacagtacagttccttgtgtgtatccgtttgcactggtggagaccccacaatgggaattcgctgtccccaaactgtgcctaaactggcatggccattgatggatgaaaaagctgtacagggagcatggctgtggaggaaacttactatcatagcagaaggcaaacaggaagtaggcatgtcctccatgagcagggctggaatttccagggcaagaacaagagaaggaacaatagagcagcacacgtcctttaggtaccatttgactcctggaacagttctcatcaggtcaatggtgtctttggagtatgggattgtgggtgatggggagaaacttgtagttgtaatggttaggagatggttccagttttttatgcctctggctcaagatcctcagcaaacccatcctgataactgtcctgacagtgctttagacagctttcaagcttcttacggtcatgtctacaaggcctctccaagatatttgcgtagtatttctggggaaggaaggtgtccatcaacagtggactggatcaagaaaacacagtccatgcatggcatggaatactatgcagccgtaagaacagaacaaaatcatgtcctttgcaacaacatggatgcaactagcggccattatcttaagggaattaatgcaacaacagaaaaccaaataccgcatgttctcattgataagtgggacctgaacattgaatacttatggaaatatagacggcaataa

SEQ ID NO: 143674 - DNA, 432 bp, Homo sapiens
tttttctctcgagtggttccgcctgtactcctaccaagcccaagcctggtggacatcgtgacagcactgggatggaattatgttttgacactggcttctgaggggaactatggtgagagcggtgtggaggccttcacccagatctcgagggagattggttatccatccctgtttgggattcagggctgccttcatgaatgttttgctatactatgtcaagttgtttaccaatttctgcttctaatgcagctgtcagatgctcaaactgtctattagtcgaagaggctctctactgaccacctttctcaagtttcttcttcttacatacaatgtttttgacaagactaagcatatcaaaccatcttttaacaattgtaaagcctaatattggccagcatacaattcaattcattaaacattgtagcactgaaa

SEQ ID NO: 143675 - DNA, 408 bp, Homo sapiens
atgcagatgtacatccagacaacaacacttactgtctccatgagtttaagtgcttcagtatctctgggcatgctctatatgcccaaggtttatattataatttttcatccagaacagaatgttcaaaaacgcaagaggagcttcaaggctgtggtgacagctgccaccatgcaaagcaaactgatccaaaaaggaaatgacagaccaaatggcgaggtgaaaagtgaactctgtgagagtcttgaaaccaacatcttggggattgtgctacatgtttccaggggcatgatggtactcacataccgtgacaccatcacatttaaaaccattcgaagcaaatggtctcaagatgagcggctgttctacagagtacaaacttgctcacaaaatctcttttacaaagcatga

SEQ ID NO: 143676 - DNA, 585 bp, Homo sapiens
atgtgcttttataaagtaggtggtgtttgcattgctcagtcacagaaaatcccacgtgaaccaagacctggagaatttgaaaaaattatcaaacgcctgctagaaacacctaatgctcgagcagtgattatgtttgccaatgaggatgacatcaggaggatattggaagcagcaaaaaaactaaaccaaagtgggcattttctctggattggctcagatagttggggatccaaaatagcacctgtctatcagcaagaggagattgcagaaggggctgtgacaattttgcccaaacgagcatcaattgatggatttgatcgatactttagaagccgaactcttgccaataatcgaagaaatgtgtggtttgcagaattctgggaggagaattttggctgcaagttaggatcacatgggaaaaggaacagtcatataaagaaatgcacagaaatagcggtaatggaaaaagcaacgcacaaatatgtttcttcccacaaacaagcaatcctgtcagtgaaccaaatagcagcctcaataattagctccctggaagacctgtcagtttattttctggtgctagattaa

SEQ ID NO: 143677 - DNA, 3940 bp, Homo sapiens
atggccgcgggcggaggatcgggaggcgccgggcgcagaccaatcgcggccgccggtgggagtatttgttattcacatggaagagacttggcgcctgctaggccagctcagccccctcagcccagagatcagccacaagtgcggccgctgtgctcgcctcacgcggcggcggcggcggcggcggcggcgctgacatggagctgcgggcccccggcgggcttcctcaccgcgccctctgcggggagcagggtaagactcgccgcccggcagcagaaagcggctccgaggaaagcaagtgccgaaccacgggacaaaaagcccctggcccccaaacttccccaaaacgccctgcttgttggaaaaggagaatccccccgttttattcccctttccgttttcttctctaaaacctttcagcggacagccaggattttaaagcgctctgcctcggatcgtctgccctgggtgacctcccggacctgccctggtggaatccggacttgccccgccgagatgacgaggtaccttcgtttcgcgaacctaacaggagggatttctgaagttagcggcttccgggatgagtcgggaataaactttgggtcttggattgcaataccacctgtggagaaaatggtatgcgagggaaagcgatcagcctcttgcccttgtttcttcctcttgaccgccaagttctactggatcctcacaatgatgcaaagaactcacagccaggagtatgcccattccatacgggtggatggggacattattttggggggtctcttccctgtccacgcaaagggagagagaggggtgccttgtggggagctgaagaaggaaaaggggattcacagactggaggccatgctttatgcaattgaccagattaacaaggaccctgatctcctttccaacatcactctgggtgtccgcatcctcgacacgtgctctagggacacctatgctttggagcagtctctaacattcgtgcaggcattaatagagaaagatgcttcggatgtgaagtgtgctaatggagatccacccattttcaccaagcccgacaagatttctggcgtcataggtgctgcagcaagctccgtgtccatcatggttgctaacattttaagactttttaagatacctcaaatcagctatgcatccacagccccagagctaagtgataacaccaggtatgactttttctctcgagtggttccgcctgactcctaccaagcccaagccatggtggacatcgtgacagcactgggatggaattatgtttcgacactggcttctgaggggaactatggtgagagcggtgtggaggccttcacccagatctcgagggagattggtggtgtttgcattgcccagtcacagaaaatcccacgtgaaccaagacctggagaatttgaaaaaattatcaaacgcctgctagaaacacctaatgctcgagcagtgattatgtttgccaatgaggatgacatcaggaggatattggaagcagcaaaaaaactaaaccaaagtgggcattttctctggattggctcagatagttggggatccaaaatagcacctgtctatcagcaagaggagattgcagaaggggctgtgacaattttgcccaaacgagcatcaattgatggatttgatcgatactttagaagccgaactcttgccaataatcgaagaaatgtgtggtttgcagaattctgggaggagaattttggctgcaagttaggatcacatgggaaaaggaacagtcatataaagaaatgcacagggctggagcgaattgctcgggattcatcttatgaacaggaaggaaaggtccaatttgtaattgatgctgtatattccatggcttacgccctgcacaatatgcacaaagatctctgccctggatacattggcctttgtccacgaatgagtaccattgatgggaaagagctacttggttatattcgggctgtaaattttaatggttgccgaagagggatccagatgtctctaccctggccaactctttttactccttcattttccagtagttgggcagtgctggcactcctgtcacttttaatgaaaacggagatgctcctggacgttatgatatcttccagtatcaaataaccaacaaaagcacagagtacaaagtcatcggccactggaccaatcagcttcatctaaaagtggaagacatgcagtgggctcatagagaacatactcacccggcgtctgtctgcagcctgccgtgtaagccaggggagaggaagaaaacggtgaaaggggtcccttgctgctggcactgtgaacgctgtgaaggttacaactaccaggtggatgagctgtcctgtgaactttgccctctggatcagagacccaacatgaaccgcacaggctgccagcttatccccatcatcaaattggagtggcattctccctgggctgtggtgcctgtgtttgttgcaatattgggaatcatcgccaccacctttgtgatcgtgacctttgtccgctataatgacacacctatcgtgagggcttcaggacgcgaacttagttacgtgctcctaacggggatttttctctgttattcaatcacgtttttaatgattgcagcaccagatacaatcatatgctccttccgacgggtcttcctaggacttggcatgtgtttcagctatgcagcccttctgaccaaaacaaaccgtatccaccgaatatttgagcaggggaagaaatctgtcacagcgcccaagttcattagtccagcatctcagctggtgatcaccttcagcctcatctccgtccagctccttggagtgtttgtctggtttgttgtggatcccccccacatcatcattgactatggagagcagcggacactagatccagagaaggccaggggagtgctcaagtgtgacatttctgatctctcactcatttgttcacttggatacagtatcctcttgatggtcacttgtactgtttatgccaataaaacgagaggtgtcccagagactttcaatgaagccaaacctattggatttaccatgtataccacctgcatcatttggttagctttcatccccatcttttttggtacagcccagtcagcagaaaagatgtacatccagacaacaacacttactgtctccatgagtttaagtgcttcagtatctctgggcatgctctatatgcccaaggtttatattataatttttcatccagaacagaatgttcaaaaacgcaagaggagcttcaaggctgtggtgacagctgccaccatgcaaagcaaactgatccaaaaaggaaatgacagaccaaatggcgaggtgaaaagtgaactctgtgagagtcttgaaaccaacacttcctctaccaagacaacatatatcagttacagcaatcattcaatctgaaacagggaaatggcacaatctgaagagacgtggtatatgatcttaaatgatgaacatgagaccgcaaaaattcactcctggagatctccgtagactacaatcaatcaaatcaatagtcagtcttgtaaggaacaaaaattagccatgagccaaaagtatcaataaacggggagtgaagaaacccgttttatacaataaaaccaatgagtgtcaagctaaagtattgcttattcatgagcagttaaaacaaatcacaaaaggaaaactaatgttagctcgtgaaaaaaatgctgttgaaataaataatgtctgatgttattcttgtatttttctgtgattgtgagaactcccgttcctgtcccacattgtttaacttgtataagacaatgagtctgtttcttgtaatggctgaccagattgaagccctgggttgtgctaaaaataaatgcaatgattgatgcatgcaattttttatacaaataatttatttctaataataaaggaatgttttg

SEQ ID NO: 143678 - DNA, 3280 bp, Homo sapiens
ccacctgtggagaaaatggtatgcgagggaaagcgatcagcctcttgcccttgtttcttcctcttgaccgccaagttctactggatcctcacaatgatgcaaagaactcacagccaggagtatgcccattccatacgggtggatggggacattattttggggggtctcttccctgtccacgcaaagggagagagaggggtgccttgtggggagctgaagaaggaaaaggggattcacagactggaggccatgctttatgcaattgaccagattaacaaggaccctgatctcctttccaacatcactctgggtgtccgcatcctcgacacgtgctctagggacacctatgctttggagcagtctctaacattcgtgcaggcattaatagagaaagatgcttcggatgtgaagtgtgctaatggagatccacccattttcaccaagcccgacaagatttctggcgtcataggtgctgcagcaagctccgtgtccatcatggttgctaacattttaagactttttaagatacctcaaatcagctatgcatccacagccccagagctaagtgataacaccaggtatgactttttctctcgagtggttccgcctgactcctaccaagcccaagccatggtggacatcgtgacagcactgggatggaattatgtttcgacactggcttctgaggggaactatggtgagagcggtgtggaggccttcacccagatctcgagggagattggtggtgtttgcattgcccagtcacagaaaatcccacgtgaaccaagacctggagaatttgaaaaaattatcaaacgcctgctagaaacacctaatgctcgagcagtgattatgtttgccaatgaggatgacatcaggaggatattggaagcagcaaaaaaactaaaccaaagtgggcattttctctggattggctcagatagttggggatccaaaatagcacctgtctatcagcaagaggagattgcagaaggggctgtgacaattttgcccaaacgagcatcaattgatggatttgatcgatactttagaagccgaactcttgccaataatcgaagaaatgtgtggtttgcagaattctgggaggagaattttggctgcaagttaggatcacatgggaaaaggaacagtcatataaagaaatgcacagggctggagcgaattgctcgggattcatcttatgaacaggaaggaaaggtccaatttgtaattgatgctgtatattccatggcttacgccctgcacaatatgcacaaagatctctgccctggatacattggcctttgtccacgaatgagtaccattgatgggaaagagctacttggttatattcgggctgtaaattttaatggcagtgctggcactcctgtcacttttaatgaaaacggagatgctcctggacgttatgatatcttccagtatcaaataaccaacaaaagcacagagtacaaagtcatcggccactggaccaatcagcttcatctaaaagtggaagacatgcagtgggctcatagagaacatactcacccggcgtctgtctgcagcctgccgtgtaagccaggggagaggaagaaaacggtgaagggggtcccttgctgctggcactgtgaacgctgtgaaggttacaactaccaggtggatgagctgtcctgtgaactttgccctctggatcagagacccaacatgaaccgcacaggctgccagcttatccccatcatcaaattggagtggcattctccctgggctgtggtgcctgtgtttgttgcaatattgggaatcatcgccaccacctttgtgatcgtgacctttgtccgctataatgacacacctatcgtgagggcttcaggacgcgaacttagttacgtgctcctaacggggatttttctctgttattcaatcacgtttttaatgattgcagcaccagatacaatcatatgctccttccgacgggtcttcctaggacttggcatgtgtttcagctatgcagcccttctgaccaaaacaaaccgtatccaccgaatatttgagcaggggaagaaatctgtcacagcgcccaagttcattagtccagcatctcagctggtgatcaccttcagcctcatctccgtccagctccttggagtgtttgtctggtttgttgtggatcccccccacatcatcattgactatggagagcagcggacactagatccagagaaggccaggggagtgctcaagtgtgacatttctgatctctcactcatttgttcacttggatacagtatcctcttgatggtcacttgtactgtttatgccattaaaacgagaggtgtcccagagactttcaatgaagccaaacctattggatttaccatgtataccacctgcatcatttggttagctttcatccccatcttttttggtacagcccagtcagcagaaaagatgtacatccagacaacaacacttactgtctccatgagtttaagtgcttcagtatctctgggcatgctctatatgcccaaggtttatattataatttttcatccagaacagaatgttcaaaaacgcaagaggagcttcaaggctgtggtgacagctgccaccatgcaaagcaaactgatccaaaaaggaaatgacagaccaaatggcgaggtgaaaagtgaactctgtgagagtcttgaaaccaacagtaagtcatctgtagagtttccgatggtcaagagcgggagcacttcctaatagatcttcctctaccaagacaacatatatcagttacagcaatcattcaatctgaaacagggaaatggcacaatctgaagagatgtggtatatgatcttaaatgatgaacatgagaccgcaaaaattcactcctggagatctccgtagactacaatcaatcaaatcaatagtcagtcttgtaaggaacaaaaattagccatgagccaaaagtatcaataaacggggagtgaagaaacccgttttatacaataaaaccaatgagtgtcaagctaaagtattgcttattcatgagcagttaaaacaaatcacaaaaggaaaactaatgttagctcgtgaaaaaaaatgctgttgaaataaataatgtctgatgttattcttgtatttttctgtgattgtgagaactcccgttcctgtcccacattgtttaacttgtataagacaatgagtctgtttcttgtaatggctgaccagattgaagccctgggttgtgctaaaaataaatgcaatgattgatgcatgcaaaaaaaaaaaaaaaaa

SEQ ID NO: 143679 - DNA, 1617 bp, Homo sapiens
atgccccgcgtgcgccttgcccggcccccgcagcctcctgctcgcaccgctgcagccgggcgccggagtaatatgctcactcgagtgacatctgccgtggccaatttcatgggcggcatcatggctggcagctcaggctccgagcacggcggcggcagctgcggaggctcggacctgcccctgcgtttcccctacgggcggccagagttcctggggctgtctcaggacgaggtggagtgcagcgccgaccacatcgcccgccccatcctcatcctcaaggagactcggcggctgccctgggccactggctacgcagaggttatcaatgccgggaagagcacacacaatgaagaccaagccagctgtgaggtgctcactgtgaagaagaaggcaggggccgtgacctcaaccccaaacaggaactcatccaagagacggtcctcccttcccaatggggaagggctgcagctgaaggagaactcggaatccgagggtgtttcctgccactattggtcgctgtttgacgggcacgcggggtccggggccgcggtggtggcgtcacgcctgctgcagcaccacatcacggagcagctgcaggacatcgtggacatcctgaagaactccgccgtcctgccccctacctgcctgggggaggagcctgagaacacgcccgccaacagccggactctgacccgggcagcctccctgcgcggaggggtgggggccccgggctcccccagcacgccccccacacgcttctttaccgagaagaagattccccatgagtgcctggtcatcggagcgcttgaaagtgcattcaaggaaatggacctacagatagaacgagagaggagttcatataatatatctggtggctgcacggccctcattgtgatttgccttttggggaagctgtatgttgcaaatgctggggatagcagggccataatcatcagaaatggagaaattatccccatgtcttcagaatttacccccgagacggagcgccagcgacttcagtacctggcattcatgcagcctcacttgctgggaaatgagttcacacatttggagtttccaaggagagtacagagaaaggagcttggaaagaagatgctctacagggactttaatatgacaggctgggcatacaaaaccattgaggatgaggacttgaagttcccccttatatatggagaaggcaagaaggcccgggtaatggcaactattggagtgaccaggggacttggggaccatgacctgaaggtgcatgactccaacatctacattaaaccattcctgtcttcagctccagaggtaagaatctacgatctttcaaaatatgatcatggatcagatgatgtgctgatcttggccactgatggactctgggacgttttatcaaatgaagaagtagcagaagcaatcactcagtttcttcctaactgtgatccagatgatcctcacaggtacacactggcagctcaggacctggtgatgcgtgcccggggtgtgctgaaggacagaggatggcggatatctaatgaccgactgggctcaggagacgacatttctgtatatgtcattcctttaatacatggaaacaagctgtcatga

SEQ ID NO: 143680 - DNA, 3018 bp, Homo sapiens
aataaaatggctcacaaacctcacggaaacacatttactatttgattataaggatattccaaaggatatagatgaagagatgcctagcacgagaccacggggccacacaagttgcacctgcacagccacagacctgcaactcacgcacacacagtactgcacacacacgcaaagtcacacatccaccctgggacacgcagccccaaccacacagtcaccggttgtccacatccgcacacacaacgcggctcgtccaggacacacacatccactccgagcgcgcacagtcacaagcgcccacttgatcacccagagtcagcaccacgcagccacagtcacagaccacgaagacccacggcaaccatggcaatcacacacgcaaactcctctcctcagccctccacacacaaaaggaccggagccggattcctcaccctcagctttctccagttccgctcggggccagcctggccaagttactccggactccaaggcgcggcagcagctaattgggcacagcgaaagaatctgccacctggctaagaggaagccgaaatctcgcgagacgtggtattggcctgcagaatcctccgggaaatgtagtccagagcccgactgctcccctactaaaaatacaaaaattagccgggcctggagtgattgtgaaatagtggcaatgtattacatcactattgaagttaccgtctctcatagatgggcttctcactatgttgcagagattggacttgaattcctgggctcaactgatcctccaaccttggcctcccaaaatgttgcagttagagaccttcacaaactcaaactggaaccaccggaaaaacgactgacaaccggccacaagacccagggagagacgcggggagaggcctcgactctgacgcactatcacacatggctcctactttgccaagtctcagggacctatttctgggcaacagtggcggacactgttaccaaagtggtggctcagtcgtcgagcatgctcactggagaggccgactccgcccttgctccggagagtcaggctgcggaccctttaaaaaatggctgcaacacagctgactgcggcgactggggtggcggtacagtccgaggcggcaagtgggaagggaccttcttgatccatcttctgcttcagttcctggtggaggaggagcttcagggtgccgctgggctctccggactcctcctcgaatctgattatggatccgaaccgggactggattctaagacaaccatggaaatcaatgtgatgggagaatcagctagagcctcgcggatacgcatttgctgggccgactcgcgttgcgctcctggaaggcaggctgtggcctctttaaacaatggcgactgcacagtggcagggggaatcctgctgcagccgcggcgatggcgggatgcaggttccaagcagtcgcctgtcccacttgtaaaagctctggggcccttgcaagctgacacctcttttcaggacacatgcaaacagggacaagggcgattccgaagtggagtcaattccaacatgcgtggcactggcgtatcccagagcagatggccctttgtgactcttggcatccagagacgttcctgtcgaccccgtggagagtgtggtcatcttgatcctaaaaatgaggccgctcaggatgaggatgagatttcaattgctccgggaccaacgcatctcctcacgcggtcgaagccttcacacagccaaagtggtaccagggacacgtgcaaacaaagacagaggcgattccgaggtgaggccaatgcgatcaagcggtggcactggcgtatcccaagagcagatggtgtgaatgtgtgtcaccggaggcatatggggcgatggcaaaaccaacaatggtgtccaggcatgtgtctggtggaagggcagatcaagtgacctttccatcgatgccaaggaaaatcaaagaacaactgggaaccaggagggggcctgtgcctgagtccaagccacattttgaaatgcctgccagaggattaaagaggtttctgcaaaattcaccccacccccaaccctccacggcccagaagaatggctcctttgtatggggaggtgatttgtacacctgtgagtctcaaccatccccccaactcaccgtggactcaggaaccacggaaaaacaaagaacatgcagccccataggccaagcagagccacacagacaggagaaggaggagtttgaagactgtgaggtgagctctggagactggtcttctgactccattcccaaaagaggctgtgtgcatgaattgggtctcctggggatgggaataaagtctggcctcacaggggctcctgcttctcagcacagctctctgggaaaggcagaaaccacgacaaaggcaagtccaagaaatgtggcgtttttgcaaagggaggtgattttgaccccagcggttgtcagccattcttccaattcactgtggattcaggaaccatggaaaaatgaagaacatggagaccctcagcccaagcagagccacagagacaggccaccagaaggtggggtgacaaaaaacagtgctgcagtcctgctggaggaggaggcacttggagactgtgatgtggatgctggaaactgttcctcttattccattcccgaaagaggctgtgtgcaagaattgggtcccatggggaagggaatacagtctgctgagatgttaaggggtgtccaggtcctgactcagagtgaagaacatgaggcccttgctgcctcaggtgaggaacataaagggatgtcaaataaactcagtaatcaagatgtagactggagcagtctaaaagtaaaatctgaaggtaaaatagaaaccacaggaacttctaccagtaactgcacatttgtaattgatatcaactctcccatggaacacaacaacaaaattttctttgagacactaagtgttaacaaagccatgggaaattgcaaagcccagatccaagagatgagcttgacattgagcatcactttttag

SEQ ID NO: 143681 - DNA, 577 bp, Homo sapiens
ccaaaacgttcacccttttcgaccggtggatgtctttttcccgattgtccacggttcgatgggcaaagatggttcctgccagggaatgctgcgggtcgccaatttaccgtttgtaggttctgatgttctggcttcagcagcctgtatggacaaagatgtcaccaaacgtctgctacgcgatgccgggctgaacattgcgccatttattaccctgacgcgcgccaatcgtcacaacattagttttgccgaagtggagtctaaactggggttaccactgtttgtaaaaccggctaatcagggctcttctgttggtgtcagcaaagtaaccagtgaagaacagtacgcaattgccgtcgatctggcgttcgagttcgatcataaagtgatcgttgagcaagggatcaaaggtcgtgagatcgaatgcgcagttttgggcaacgacaatccgcaagccagcacctgtggagagatcgtactcaccagcgatttctatgcctaccacaccaagtccattgacgaagatggcgcgaaagtggtagttccggcagccattgcgccagaaatcaacgataagatc

SEQ ID NO: 143682 - DNA, 2172 bp, Homo sapiens
atggaacacgatgtctgtgaagtgatcgccgatgttccctggggctatcgccgtcgcgcgcgtttaagtgtgaagtacttaccgagagcacagcaacttcagatggggtttcgcaaagcgggctccagtgacattgtcgacgtcaaacgatgccccatgttagcgccccaacttgaagcattggtgcccaaagtcagggcatgtgtgggcagcttacaaggtatgcgccatcttggtcatgttgaactggtacaggcaaccagcggcacgctgatgattttgcgccataccgcaccgctaagttcggcagatcgcgaaaaactggaacgcttttcgcattctgaaggcctggatctgtatctcgcccccgatagtgagatactcgaaaccgtctctggtgagatgccctggtatgactcaaacgggttgcgcttaacttttagcccgcgcgattttattcaggtcaatgcgggtgtgaaccaaaaaatggtagcgcgtgcgttggaatggctggatgtgcaacctgaagatcgcgtactggatctgttctgcggtatgggcaactttacactgccattggcgacacaagctgccagtgtggtcggtgtagaaggtgttccggcgctggtggaaaaaggccagcagaatgcgcgtcttaatggcttacagaatgtgacgttttatcacgaaaatcttgaagaagatgtcacaaagcagccgtgggcgaaaaacggcttcgataaagtgttgctggacccggcgcgggagcacgggatcaacgttctgaattctatggccatttcgggcaacgacaatccgcaagccagcacctgtggagagatcgtactcaccagcgatgtctatgcctacgacaccaagtacattgacgaagatggcgcgaaagtggtagttccggcagccattgcgccagaaatcaacgataagatccgggcgattgccgttcaggcttatcaaacgttgggatgcgcaggcatggcgcgtgtagacgtgtttttaaccccagagaacgaagtggtgatcaacgagatcaacaccctgcctggcttcactaatatcagtatgtatccgaagctgtggcaagccagcggtctgggttacaccgatctgatcacacgtttgattgaactggcgctggagcgtcacgctgcggataacgcattgaaaaccacaatcggaaaatatcgcaatgcctcttcaacgcctggcaacattgcctatgcgttgtttgtgctgttttgcttttgggctggggcgcaattgctgaacctgttagtgcatgcgcccggcgtctatgagcgtttaatgcaggtccaggaaacaggtcgcccacgggtggaaattggtttaggtgtcggcaccattttcgggctgatcccgtttttatggtggcgctatggctgcactggcgacatcgccgccactgatttcgaattattgtgggaattagctacccatgccgggcaaatcatggaccgcgatgcattgctgaaaaatttacgcggcgtcagttatgacggactggatcgtagcgtggacgtggctatttcgcggttaagaaaaaaactgctcgataacgccgcagaaccttatcgcattaaaactttttacctgttattgtttgtctgcttccttgtgatgtctctgctggttgggctggtgtacaaatttaccgccgaacgcgcgggcaaacagtcgctggatgatttgatgaacagttcgctgtatctgatgcgcagcgaattgcgtgagatccccccacacgactggggtaaaactctgaaagagatggatttaaatctctctttcgatctgcgtgtcgagccactgagtaaataccatcttgatgatatttccatgcaccgactgcgtggcggcgaaattgtcgccctggacgatcagtacacgttaatgcagcgtatcccgcgcagccactacgtgctggcagttggtcctgttccttatctttattatctccatcagatgcgattgctggatatcgccctgatcgcttatattgctatttccctcgccttaccggtgtatatctggatgcgtccgcactggcaggatatgttaaaactggaagcagcggcgcaacgatttggagaagggcctctcaatgaagtatcccttgatgaggttccactttga

SEQ ID NO: 143683 - DNA, 1619 bp, Homo sapiens
aaagggccgaaaggctgggcgaatctgaacaccaaagataccaacgtctgggaaggtgattaccagatggtgggtcgccagggtcgcggtaaagcggacctgatgaaacaacgtggcgaaaaccgctataccattctggataacggtagctttacctcctgtctgccgggttctgacacctggagcgtggtaggtagcgaaattattcatgaccgcgaagaacaagttgcggagatctggaacgcccgctttaaggtgggtccggtaccgatcttttatagcccctatttgcagttgccggtgggtgacaaacgtcgctctggtttcttgatcccgaacgccaagtacaccaccaccaactactttgagttctacctgccatattactggaacatcgcgccaaatatggatgccaccatcacgccgcattatatgcatcgtcgtggcaacatcatgtgggagaacgaattccgctacctctcccaggcgggcgctggcttgatggaactggactatctgccttcagataaagtctatgaagatgaacacccgaacgatgacagttcacgtcgttggttattctactggaaccactccggggtcatggatcaggtgtggcgtttcaacgtcgactacaccaaggtcagcgatcctagctacttcaatgatttcgataacaagtacggttccagtactgacggctacgcaacgcaaaaattcagcgttggctatgcggtgcaaaacttcaatgccaccgtttcaaccaagcagttccaggttttcagcgaacagaacaccagtagctacttcgcagagccgcagttagacgttaattactaccagaatgatgttgtgcactttgtaaccaccagagacgacatgcctgaagcaacccgtgttcacctggaaccgaccatcaatttgccgctctctaataactggggcagcatcaataccgaagcgaagttgctggcaacccattatcagcaaaccaatcttgactggtataactccagaaacacgaccaagctggacgaatccgttaaccgcgtaatgccgcaattcaaagttgacggcagaatggtctttgaacgcgatatggaaatgctggctccgggttatacccaaacgctggaaccgcgcgcgcagtatttgtacgtgccgtatcgcgatcagagcgacatctataactacgactcgtctctgctgcaatctgactactctggcctgttccgggaccggacttacggcggtcttgaccgtattgcctccgctaaccaggtgacgaccggtgtcacatctcgcatatatgatgatgctgccgttgaacgttttaatatttccgttggtcaaatctactatttcacggagtctcgcactggcgatgacaacataacatgggagaatgacgacaaaacgggttcactggtgtgggcaggcgatacttactggcgtatctccgagcgttggggattgcgtggcgggattcagtacgatacacgtctggataacgtagcgaccagtaactccagcattgaataccgtcgggatgaagaccgactggtacagctgaattaccgttacgccagcccggaatatattcaggctacgctgcctaa

SEQ ID NO: 143684 - DNA, 2015 bp, Homo sapiens
tcatgtagattctggatattagccctttgtcagatgagtagattgcaaaaattttctcccattctgtaggttgcctgttcactctgatggtagtttcttttgctgtgcagaagctatttagtttaattagatcccatttgtcaattttggcttttgttgccattgcttttggtgttttagacataaagtccttgcccatgcctatgtcctgaatggtaatgcctaggttttcttctagggtttttatggttttaggtctaaagtttaagtctttaatccatcttgaattaatttttgtataaggtgtagggaagggatccattttcagctttccatatatggctagccagttttcccagcaccatttattaaatagggaatcctttccccattgcttgtttttctcaggtttgtcgaagatcagatagttgtagatatgtggcgttatttctaaggggtctcttccattccattgatctatatctccattttggtaccagtaccgtgctgttttggttactgtagccttgtagaatagtttgaagtcaggtagcgtgatgcctccagctttgttcttttggcttaggattgacttggcaatgcgggctcttttttggttccatatgaactttaaagtagttttttccagtactgtgaagaaagtcattggtagcttgatggggatggcattgaatctataaattcccttgggcagtatggccattttcacgatattgattcttcctacccataagcatggaatgaaaatgttcttccatttgtttgtatcctcttttattttgttgagcagtggtttgtagctctccttgaagatgtccttcacgtcccttgtaagttggattcctaggtattttattctctttgaagcaattgtgaatgggagttcactcatgatttggctctctgtttgtctgttattggtgtataagactgcttgtgatttttgtacattgattttgtatcctgagagtttaccaaagttgcttatcagcttaaggagattttgggctgagacaatggggttttctagatatacaatcatgtcatctgcaaacagggacaatttgacttcctcttttcctaattggataccctttatttccttctcctgcctcattgccctggccagaacttccaacactatgttgaataggagcggtgagagagggcatccctgtcttgtgccagttttcaaagggaacgcttccagtttttgcccattcagtatgatattggctgtgggtttgtcatagatagctctcattattttgagatacgtcccatcaatgccgaatttattgagagtttttagcatgaagcgttgttgaattttgtcaaaggccttttctgcatctattgagatcatcatgtggtttttgtctttggctctgttaatatgctggattacatttattgatttgcgtatattgaaccagccttgcatcccagggatgaagcccacttgatcatggtggataagcttttcgatgtgctgctggattcgttttgccagtattttattgaggatttttgcatcaatgttcatcaaggatattggtctaaaattctcttttttggttgtgtctctgcctggctttggtatcagaatgatgctggcctcataaaatgagttagggaggattccctctttttctattgattggaatagtttcagacggaatggtaccagttcctccttgtacctctggtagaattcggctgtgaatccatctggtcctggactctttttggttggtaagctattgattattgccacaatttcagctcctgttattggtctattcagagattcaacttcttcctggtttagtcttgggagagtgtatgtgtccaggaatttatccatttcttctagattttctagtttatttgcgtagaggtgtttgtagtattctctgatggtagtttgtatttctgtgggatcagtggtgatatcccctttatcattttttattgcgtctatttgattcttc

SEQ ID NO: 143685 - DNA, 1987 bp, Homo sapiens
  misc_feature (1)...(1987): n = a,t,c or g
ttaaaacatagcaatcactacatcatcatcatcctcatcctcagcatcatcatcatcaccataatcagtggatcctctagagtcaccagcagcatcaagctgcactccgtctaagtctcccgccgagaaaggtccaacccgggggataattgttgcagcccggtggaaccggttcccggaagggtcttggagctcagtccaggatttgagtgccaaggagggctgctctgggcattgaaattgaacctctcttagagacttagggacgagctcattctgagttgactccaagatcttctcccagggaccgagcagtatctgatctaaagcctggtggccgtttgacagaaagacatgagctttttgtgaagtcaacatttcgttgctgaaatctatgggatctgcgacaagccatttcgacttgctcggcctcagtttttcgtcaaccaaaaagagtgcaggaccaatggattcacagccgaattctaccagagtacaggaggaactgtaccattgattggataagagcgggttccgagtgacaaaagtggcggcaggagaaacacaggtcttgtccgcgtggaaccaccttttctgtcctgcactggaagtagggctctctaggaggactagaaggacttggtgtagtcgacgttgaaacgccacactgatccatgaccccggagtggttccagtagaataaccaacgacgtgaatgtcatcgttcgggtgttcatcttcatagactttatctgaaggcagatatccagttccatcaagccagcgcccgcctgggagaggtagcggaattcgtctcccacatgatgttgccacgacgatgcatataatgcggcgtgatggtggcatccatatttggcgcgatgttccagtaatatggcaggtagaactcaaagtagttggtggtggtgtacttggcgttcgggatcaagaaaccagagcgacgtttgtcacccaccggcaactgcaaataggggctataaaagatcggtaccggacccaccttaaagcgggcgttccagatctccgcaacttgttcttcgcggtcatgaataatttcgctacctaccacgctccaggtgtcagaacccggcagacaggaggtccgctttaccgcgaccctggcgacccaccatctggtaatcaccttcccagacgttggtatctttggtgttcagattcgcccagcctttcggcccctttgagatcaccctggtatcgtcgtaatggacattaccgagcgcatcaacgtgaatccggtgaagtggtggatatggccgcttatgaggcatggcaacaggaaaatcatccggacatccagcagcagatgcagcgtcgtgaagagggggataaccatttcaggacgatttccttcagcaatttcatagccgaagtggagtctaaactggggttaccactgtttgtaaaaccggctaatcagggctcttctgttggtgtcagcaaagtaaccagtgaagaacagtacgcaattgccgtcgatctggcgttcgagttcgatcataaagtgatcgttgagcaagggatcaaaggtcgtgagatcgaatgcgcagttctgggcaacgacaatccgcaagccagcacctgtggagagatcgtactcaccagcgatttctatgcctacgacaccaagtacattgacgaagatggcgcgaaagtggtagttccggcagccattgcgccagaaatcaacgataagatccgggcgattgccgttcaggcttatcaaacgttgggatgcgcaggcatggcgcgtgtagacgtgtttttaaccccagagaacgaagtgntgatcaacgagatcaacaccctgcctggcttcactaatatcagtatgtatccgaagctgtggcaagccagcggtctgggttacaccgatctgatcacacgtttgattgaactggcgctggagcgtcacgctgcggataacgcattgaaaaccacaatgtaa

SEQ ID NO: 143686 - DNA, 2214 bp, Homo sapiens; identical to SEQ ID NO: 121978

SEQ ID NO: 143687 - DNA, 621 bp, Homo sapiens
gcacgaggcgccattttttggggtgagtgttttttggttcctgcgttgggattccgtgtacaatccatagacatctgacctcggcacttagcatcatcacagcaaacctaactgtagcctttctctctttccctgtagaaaacctctgccgcccatgaaaagcccaagtggaggaaagaaagcgaatgcgcgaggctgaaagcgcaaaagaagaaagatgttgcagaggtcccaagtaaaccgctagcttgtttgcaccgcgtgaggccccacaggagcacgaaacatggaatgcccagacgctgggggatgcttggtacaagttgtgggactgcatgctactgtcttagagcttgtctcaatgggatctagaacttcatccgccctctggattcgccgattcaccttttgaggacccacctttgctcataaccaaaactgcccatgttgggtcctcttgccctgaacctgtggacattctgggactatttccgtgtttaatttgtgggccgagttgttaacaaccatattaattaaatcacctctttccgctgtttttagcttgaagaattaaatcaaaacctaaaacaaaaaaaaaaaaaaaaaaaaaaagtcagcagc

SEQ ID NO: 143688 - DNA, 1677 bp, Homo sapiens
ttatttatgacggtatttcagcgcgccgctcgggcacgtatcaatcactttaaccacagtggcgacgtcgacttcatccggcatgatccacggctttcgtttgagattaaataacttgccgttgccacgtacgcaattgccagaatgctgacatatcgcagtgttgaaatagacatcgatcttttcgccggtataacagcgataacccccgtccagtagcgcctgatccatgaccttccctctctcatcagtatgattatcgccttcgccctgcgtcgcactctcaatcgtcaaacgcacgtctgatgtaatcaactccgccagcaactgataaaccttcatcgtttctgccggttcggcatcgccgctatcgctgatatacccttcatcacgcagtgtcagcaccagagaactgaacaccgccttgtcgaagaactccggcgcgttgatgccgtgcagcacggagagacgttgcgcgacggtgcggctctctttctccagcgtaccgcggttgatcgacgggttggcactcaacaaccagaaggtgatggcataacgttgcagcgtttcgcgcgcgcctgcggccagcagctgtagcgtgcgagaatgcgccgggttgatatgcaactcatcatcttgcagggtaatcagcccctgacgttgcatctcatttgccagcgcatcaataacgtccggcaactcgtcgcgatcccagcgcaggaacagctccgctttcagcattgggtaaagcacattgacgtgctccatcaatacgtcgcgggagatgtggcgatgctgggtgacgattgccgccatcagcgaaggcagcaccaacatatgcgcaatgttgttgcgatagtaggtcatcagcaccgcttgctcgcgcggcagaatgatgatgtcgccgattgtgtctttctcgacttcaaacttgttcatttgcagcgcgtgatcgataagctcgctggcgctggctgaaggaacggtagagtccgtggagtagggcacgttgcgcatcagatccaggtagcagttgagttgctcggttaactgctcgcgggtgagtgagcgctgacgtgatgccagtagcgcagtacagcacaggttcatggcgtttgccgcgcctgcgttgttaatgcgtaccatcagatcggcagcaatattattgaccgtcggcgttaaccatgccggacgcaccgcttcgatgggatcgatagattcacgccagtcaggtacatgctggttaaggtaggtcatcaacggcattggttcaccgaagttgacgtaaccctgaccgagattacgcagcttgcttaaaccgcgcagcatctgcggcaggctctctttctctttcgtcgcgccgggcaattctgttgttcgtacgtacccactttcatgtacgtgcgcatatgccgttacgaatgcggcacccacgcgatgtccttacgtcgtagccccttctccctctatcctcctgcgcggtctacctaatggagttcgccgtttttctgtcctgtttctatatttgcgctcgtctcgcgcgctatcacctcttgctgactgtgcgcgcgggtatcttgagtcgcacggatgttctgcagaccttagccgtttacgttcactatgactcgctgtgtcctccttcgatctgtttcttctgccgcgagtgcgaacgtc

SEQ ID NO: 143689 - DNA, 1027 bp, Homo sapiens
atggagctgagtggggcaaagggggcccgaaggcagcttcgacagcagtggggtgtacgtcgctgtagtgccactatcacgtttgcctggcaaaatggaaataaaaataataagaaaaagtgtctgaccctcactgactcccttgcagaattggctgtgcggtatacaaagatgttcttaacagaaaccttgtacagacagctgagtaggtttagtctaaagaaggttttttggaaaaatcctaaaggcctgccggacacgttcaccggtcaaccggaatacgacccccacgtccaccctttgaagggtaatctgttttacgcaatgccagcatgtcgtattcggtaccaacgttacggcagcgccgggaagctgaaggttaacaatgccagcatgaacggcgtaagattaacacgggctttaccgctggtacggcagacaccactaactggccgattacgacgccattatttttggtacacctacccgctttggcaacatgtccggtcaaatgcgtaccttcctcgaccagacgggcggcctgtgggcttccggcgcactatacggaaaactggcgagcgtctttagttccaccggtactggcggcggtcaggaacaaaccatcacatccacctggacgacccttgcgcatcacggcatggtaattgtccctattggctacgcagcgcaggaattatttgacgtttcacaggttcgcggcggtacgccgtacggcgcaaccaccatcgcaggcggtgacggttcacgccagcccagccaggaagaactgtctattgctcgttatcaaggggaatatgtcgcaggaggatacgcatgccaactcaagaagcgaaagctcatcacgtcggtgaatgggcatctctgcgcaatacgtcgccgggaaatagccgaggccattttcgaagtcgccgggtacgacgaaaaaatggcggaaaagattcgggacgaaggtcgtgatgaagtgttagtcaaagcctttgctaagaccgataaagattcgctttga

SEQ ID NO: 143690 - DNA, 1355 bp, Homo sapiens
tcaaacttgttcatttgcagcgcgtgatcgatagctcgctggcgctggctgaaggaacggtagagtccgtggagtagggcacttgcgcatcagatccaggtagcagttgagttgctcggttaactgctcgcggtgagtgagcgctgacgtgatgccagtagcgcagtacagcacaggttctggcgtttgccgcgcttgtgtgaaggctaggatggggaccgaaagagctatgtgctcaagacctggcacacagatgcactcaatggccatgtctgttcctgctgtgtgggtgcccgtagtgataatcaagccgtagtgagtcaagtagcagtggtgtgtcacgtagggataacgagccgtagtgcagacgtagtcgtggtggtcacgtagggaatacaagtcgtagtggccagtagcgagtgtcacgtatgataacagcatagtactcagtagcgtgttgtcacgtagaaacagtcgtagtacttcttcccaaatcttttccgccatttttcgtcgtacccggcgacttcgaaaatggcctcggctatttccggcacgtattgcgcagagatgcccattcaccgacgtgatgagctttcgcttctgagttggcatgcgtatcctccatgccgtgatgcgcaagggtcgtccaggggatgtgatggtttgttcctgaccgccgccagtaccggtggaactaaagcgctcgccagttttccgtatagtgcgccggaagcccacaggccgcccgttggtcgaggaaggtacgcatttgaccggacatgttgccaaagcgggtagtgtaccaaaaataatggcgtcgtaatcggccagttgtagggaaatgagcgcataacggataactgtcagaagtgtatcgacggggataaggacaacacaggtgtgagagagtagacgcagacacacggcatcattcaggatcaacaccgggccgcggatttctgtgtcgtccaacgtgcgcagcgaatattcatccgccgcttcccacgccgctgtttctcgtgtgcagggcggcaagctgaaagcaaaggtggagatccgcgtcgctaccgtgtttcgcaacgcgccggaaccgtttttgcgcatgatcgtggtgcacgagctggcgcacctactctgcggtagaacacctgtcggtgagcgcgtcggcgatacctgttatgaagccgcgctggtggtagatcacgctgcccgcagagctccaggacgagtttcccaggattcactcgatctggtataacgcgtctctggaagccaggcaattgcgccctctcgtctacgcctcccaggcgcgcccgccggtaaacgaggtcgccagctcgtgccacctgcat

SEQ ID NO: 143691 - DNA, 1689 bp, Homo sapiens
atggcacaccaagtacctcatcgcgatgtagtgggcaagaaacaaacgtctatgtcaaatgagtattcgagtgtccaatcaatgcaagtcgcgcaatacggcatcagaataagatacaagaacggagggcaaatatgttttagacgcaaggcgctagtttatatagtcaacaaacagcatgaagtgcatgcctctatgaactggcaggatgttagcggtaaatctgccgtacctgtgaagtggcttgcgcagtgtcgcatcatgagaatcaggattgcgctgcgttgtcaccagacgagtttatttcccctgtatgctggcttgcccgtttggtgcgatggaggtgtttcttcgcgcaaaaagccagatgaagtccaggccactgcgattaagagcgatgccagcaaaggcgaggcactggtgcttttcaccacagatcacgaactgacgcgcgataagttgcaacagtatgcccgcgagcacggcgtgccggagcttgctgtaccgcgcgatattcgctatctgatacagatgccattacttggcagcggccaacctgactttgtcacgttgaaaagctgggggatgaaagcggttatcgtggcgcagtttctctctgcgtttggcgataatgccctactgtttgccactctggcgttactgaaagcgcagttctatccggagtggagccagcccatcctgcaaatggtgtttgtaggtgcttacattctttttgcgccgtttgtcgggcaggtggcggatagcttcgccaaaggccgggtgatgatgtttgccaacggcctgaagctgctgggcgcagccagtatctgctttggtatcaatccgtttctcggctatacgctggtgggtgttggtgctgcagcctattcaccggcgaaatacggtattctcggcgaattaaccacgggtagtaagttagtgaaagctaacggtttaatggaagcttctaccatagcggcgattttgctcggttccgtagccggtggtgtgctggcttactggcatgtcctcgtcgcctggccgcatgcgcactggcctacggtgagtcgacaacagcagcagctgatggcatccaccttaccatttacaagcccgctggcgcagatattcccgtggcgagcgataacccagcgcactatgcggatgccattcgttatagatgctcgagacgccctcctgcaaggtgtctttgctgccgttaacccgtctgcgcatctcaacgacagcaggcaccgccgcataaacaaaaatgtcatcgaacccggcatctcctgtcagcgcccgcagcatctggacaggatcgctcatccctttggtattcacatacaccagctcaatgcctttactggccgccagttccaccggcagcagcttctgtacctgcgccagacgtttgtcgtcgatatcgaccaccaccacccgcgacggttgtatgccgccgttaatggcgtaatcgatagcgccaatgcccatcggacctgcacacgccagcagtgcaatattgccgccaggtttgacgcccatgcgatgctcataaacatattgcgtggtgtgataattggcatgataagcaccaataatgcagcacataggctctgccagcgacgccgcagcaaaataaggagccgtgatacgggtaatacgcagcccaaattaatgcagatttag

SEQ ID NO: 143692 - DNA, 1632 bp, Homo sapiens
tcagcagccgcagaaaactaatacatcatttattttgaaaaactgttccaaacagtaaaagtggtctcggtccgaggcggggatagacgaactctgctcggtaatcgtgtcatcattgaccactgctggaccacggcggtagcctgtcatcagtgtgaagatgcaccgtgcgcgaatgtctgccctgttgacgcgataagccgcgaacatgggcatattttcgttgaacaaacacgttgcattggctgtaaaagctgtatgctggcttgcccgtttggtgcgatggaggtcgtttcttcgcgcaaaaaggcgagggcgattaagtgcgatctgtgctggcatcgggagacgggaccggcctgtgttgaagcctgcccgacaaaggcgttgcagtgcatggatgtcgagaaagtgcagcggcatcggccccgcctcaattttctccggctctggtacgtagttcatgcgcatacattgatgcgtatgcggccacggtttatccagccctgggaagaagttgtgccccggcaccatcagcacgccgcgtgctttcaggcgctgatagagctgcttggtcgtaatgggcaaatccttaaaccatagccagaggaaaatggctccttccggtttatgaatcaggcagcgattttccggtaaatagcggcgaatgatggcgatagtttcctgaacacgctggtagtaaaacggtttgatgactgtttcagacaggcgcagcagatcgttacgcttaatcatttcacacatcatcgccggaccaataccgccaggtgccaggctgataatgccgttcatattggtgatggcggtgatgattttttcattggcgatgataatgccgcagcgggagccaggtagacccagcttctcatagcaacgtccgttggcataaacctgatagtggggtaaaaggtctggggccccgatcttccctgtcttctcttgggtgtgcgaagtgaccacctgacccattatcaccactctgtttctgctggctgtggtaggatgtgtcagaagaacccacacatatttccttaggatcattaatttctttgagaagaatgcaaggctggagtccacctgggggcggagctgctggtagaagacatctcccgccgccgagagctggaagagcaccaggcctgggtgtgggtggccgctgagggcaagggcgggacgacggcagccagacctggtgacgggaatgacaatgacctccaggcctgccaggtgcagcagctgcagctgcccaccctggcctccgaggagcaggggctgcacgcagctgggccggggcggaggcagcagtcgggccagcaggagcggggaggggaggccatggttccacttcagcatcggcaccaggggaaggcgctcgtccacttctgagccgccctccgaggctggctctgcctgcttgctgtttctcacaagaggaaacgcaggctcagagaggcccggcgcactgcccacccccttgcaagctccgggtggcgccgggactcgaacgcgcgccccagagctgctgacaccgccctctccccgcaggccgaggaggcgggcgcgcccggcggcccccggcagccccgagcagaccgctgcccgccagcacat

SEQ ID NO: 143693 - DNA, 812 bp, Homo sapiens
atcatggcggtcgcgctggcgttaggtatcggtacgatgattggctggcgccgtgtggcaacgactatcggtgagaaaatcggtaagaaaggcatgacctacgctcaggggatgtctgcccagatgacggcggcagtgtctatcggcctggcgagttataccgggatgccggtttccactactcacgtactctcctcttctgtcgcggggacgatggtggtagatggtggcggcttacagcgtaaaaccgtgaccagcattctgatggcctgggtgtttacccttccggctgcggtactgctttccggcgggctgtactggctctccttgcagttcctgtaatcgtacgcaccaaaacgagcgggtcagctggcccgcttcagattgtgacatagtgcgctttgttcatgccggatgcggcgtgaacgccttatccggcctacaaaaacatgcaaattcaatagattgcagagattatgtaggcctgataagcggagcgcatcaggcaattttgcggttgtaatcaggctcgagcgggtcagtttactggccccgtttttttatggcgtattattgctgaaatgcttaatgcccaagcgtcaatgcaatgaggctgaccaccaccagacccacacatgcgctgggcaaaaaaaaatggcgacgcacccgcttccaggggagaataaattcattatcggggaggatcgggaataccgttgggctttgatgttcccaaacgagaacgcccctgtttgttgggttggccatgtgaggtaaaaaagccccctccatcaacatattgatagagcaat

SEQ ID NO: 143694 - DNA, 1231 bp, Homo sapiens
ctatatttcgcgcgctgttgaagagattgtttcaccgctggtgcgtttttcggtggtttccctatttccctgaggcctccttgggaccacgttgtccgcgttcgttttatcttccccaatcttcgtcggacaccatccattcgttcgaagccacgcctccggtaatagcccgatgatgatgctctgccgcgcaaatggccaaaaaacgttaaacgcccgtactggcctacggttcgaatttgcacgaaatcgtagggcagataaggcgttcacgccgcatctggcaacgaacgccttgcctgacataaaagtgccggagaatatctccggcatttttattccacagccaaactcataatatattccggcaatatttatcatttcattaacaactgaaaccaacattcgcacacattttaagtattgctgatagaaaccattctcattatcattgtgttgttgattatttaatctctcctttgttggcaaatcatctggtctcatgtcgctggctcctcttttaatgtggtgcgcgtcgctccactcggcgaccccattcatatcgaaacctgtctctcgctgttttagtgccaaggagtgatcatgaaccggtttattattgcggatgcgacgaaatgtatcggttgccgtacctgtcaagtggcttgcgcagtgtcgcatcatgagaatcaggattgcgctgcgttgtcaccagacgagtttatttcccgtattcgtgtcattaaagaccactgctggaccacggcagtagcctgtcatcagtgtgaagatgcaccgtgcgcgaatgtctgccctgttgacgcgataagccgcgaacatgggcatattttcgttgaacaaacacgttgcattggctgtaaaagctgtatgctggcttgcccgtttggtgcgatggaggtcgtttcttcgcgcaaaaaggcgagggcgattaagtgcgatctgtgctggcatcgggagacgggaccggcctgtgttgaagcctgcccgacaaaggcgttgcagtgcatggatgtcgagaaagtgcagcggcatcggctacggcagcagcctgtttgaaacgttttccggcgtttctcaacgccggaacagtgcgctttgtttatgccagatgcggcgtaaacgccttatccggcctacaaattcttccaaattcaatatattgcagaaatcatgtaggcctgataagcgtagcgcatcaggcaatttttag

SEQ ID NO: 143695 - DNA, 438 bp, Homo sapiens
gccagatttattaggttggttaaccaagccttcgggatctcccgggaaattggaactttttccgctattacgccgatctttgtcaagtgtggctttccttcaccggcaacaaattccgttgaccagcgcatcgatctgaatcaactgttgatccagcatcccagcgcgacttatttcgtcaaagcaagtggtgattttatgattgatggtggaattagtgccggtgatttactgattgtcgatagcgctattcccgccagccatggtaatattgtcatcgctgctgttgacggcgagtttacggtgaaaaaattgcaactacgcccgacggtacagcttattcccatgaacagcgcgtactcgcccattaccatcagtagtgaagatacgctggatgtctttggtgtggtgatccacgtcgttaaggcgatgcgctga

SEQ ID NO: 143696 - DNA, 662 bp, Homo sapiens
accactaacgtaaatcacccgagttgccgataaccatccacggttacctgaacgataacaatgaaaagaacgggccgggagcgagtatggaatactttgatatgcgtaaaatgtcggtgaatctgtggcgaaatgctgccggtgaaacgcgcgaaatttgcacgttcccaccggcaaaacgtgatttttactggcgtgccagcattgcatccatcgcggcgaatggggagttttctttgtttcccggcatggaaaggatagtgacgttgctggaaggcggcgagatgctccttgaaagcgcagaccgctttaaccataccttaaaaccgttccagccttttgcctttgcagcggaccaggtggtaaaagcgaaactgacggcagggcagatgtcgatggatttcaacatcatgacacgcctggatgtctgtaaggcgaaagtcagaattgccgaacgtacgtttactacctttggctcacgcggcggggtggtgtttgtgattaacggggcgtggcaactgggcgataaattgttcactaccgaccagggcgcgtgctggttcgatggcaggcacaccctgcggcttttacaaccgcaaggtaaactgttgttcagtgaaatcaactggctcgctggtcattcgccggatcaagttcagtaa

SEQ ID NO: 143697 - DNA, 942 bp, Homo sapiens
atgggcaataagacttatggaggacaaaatcagatgttgatttttgctttcactttgcattccctctttcttaattctggagatggcagattgtcctttgagagctcgtcccagaagccagggggctttcgcaacattgcaatccaaacttcccccagtctcaggaagcatttcccagttttcaaaaggaagagactcacagccagtaagtccgtggaggaaatgccaacagcctcccaaagtgccatccatgtcaacggtaacctctctgaacaggacattgtgtcttctgaccttgcctacttaaggttggctcagcatcttgaggatgggcctcgaagggtcaaggtgtcccatgcattcctcccaagggtccccaaggtgcaaagcaatggtcctgttagcatatgcttggaagcaggaacttggaggtccttagagaaagccacagctgccattcaggttccagatgatatttatcacagtccttcctgggaagctagagagtctgctctcagcccagacaggtcagctgaacataacagcctcagcaggccatctgaccctgggctgtctctccagcctcagcttctgcccactctttgtctcccgttccatgtactctacaccaggagtccccagtccctgggccacgggcccatagcagtccatggcctgttgggaaccatgctgcgcagcaggaggacatggagctttctgtatcccgggttcttgccttggtgttctggaagaatcggatcacgtgtgggcttggagaatgagtgcaaggtttcattgagtggaagtagctctcagccaatgggagagccagaagggagatggtcttcccctgaagttggaccactcgccagccccggctctcccctgatagcctgggccaaactccgctttgtcccgcctgtcgatgacctgccagtgtga

SEQ ID NO: 143698 - DNA, 867 bp, Homo sapiens
tcacactggcaggtcatcgacaggcgggacaaagcggagtttggcccaggctatcaggggagagccggggctggcgagtggtccaacttcaggggaagaccatctcccttctggctctcccattggctgagagctacttccactcaatgaaaccttgcactcattctccaagcccacacgtgatccgattcttccagaacaccaaggcaagaacccgggatacagaaagctccatgtctttcccattggtgtgggaaacagagagtcacctgtctggaggataacaatgtgtgcttgacataataaaggcttaatgtatgtcatccagtcttttccaaatataactgaatgagaaaccccaacttctttttggtaacactcattagcatcttccagaactagtgctccatggaatgtacttggagaatgatgcctgcccttgaactctcgctccactttaacattcaaagccaagaggacagccactcggctctgagtcacactgagagcttcctggggtgggctccggccagcccttgcacgatcaagtggctctgtgtagtggcctgaggggtggatttctcccagacagggccagttctgacaggtggccctgcctacaagggcagccagcacacgggtaggatttgatgacgaactgatactccaaggaggttcaccaagctttggcaaacgctcagggtcaccagggtgccgaggaatgaccttctgtaacctctggaaaccataatcgatggtgggttcgttgagcgctccttccgttttgggagagctgagcctttccttaagaattttctgtggctgacagggtggtggctgtgtgctccccacaggaacacccgccat

SEQ ID NO: 143699 - DNA, 1557 bp, Homo sapiens
atgaggaaaaaccagcacaaaatcctgaacattccaaaaaccagaacgcctcttctcgtccaaaggatcacaactcctcaccagcaaaggaaccaaacgggacaaaggatgagtgatgaattgacagaagtgacagaagcagtcttcagaagtgatggggagaatggaaccaaattggaaaacatacttcaagatattatccaggagaacttccccaacctcacaagacaggccaacattcaaattcaggaaatacagagaacaccacaaagatactccttgagaagagcaaccccaagacacataatcgaaagattcaccgaagttgaaataaagggaaaaatgttaagggcagccagagacaaagatcgggttacctacaaagggaagcccatcagactaacagcagatctctcgcagaaaccctacaaggcagaactgggaaatgtattgccaacgtcacgatacgccagcaggtgggatgctgatgggggtgagccgttacgctgcttccgagttttcgttcctgctggcggtgccgatgatgatgggcgcaacggcgctcgatctctacaaaagctggggcttcctgacaagcggcgatatcccgatgtttgccgttggccggataaggcgtttacgccgcatccggcaaatgcccatactcattcaggctttggttcgttgttcggtgcaacaacaataaccggcatatcggcatcaattagcgccagcggaccgtgtttcagttcgccagcagctgcactgatcaccaatatcggcaaaggcgatcacaccacctttgtgaagccgaacattccggcaacgggtgaattcaaaggtgttggcttcctcgaagcgccgcgcggtatgctctctcactggatggttattaaagacggtatcatcagcaactaccaggcggttgttccatcaacctggaactctggtccgcgtaacttcaatgatgacgtcggtccttacgagcagtccctggtgggtacaccggttgccgatccgaataaaccgctggaagtgctgcgtaccattcactcctttgacccgtgcatggccttcttaggggtcggcaatattttgctgaccgatgaagccatcggtgtgcggattgtcgaagcgttagagcaacgatacattctgccggattatgttgagatcctcgatggcggcacggcgggaatggagctgcttggcgacatggcaaatcgcgatcatttgattattgcggatgccattgtctcgaaaaagaacgcgccgggaacgatgatgatcctgcgggatgaagaagttccggcgttgtttaccaacaaaatctctccgcatcagcttggcctggccgacgtcttgtcggccctgcgcttcaccggcgagtttccgaaaaagctgaccctggtcggcgtgatcccggaatcgctggagccacacatcggcttaacgccgacggttgaagcaatgattgaacctgcgcttgagcaggttctggctgcgctgcgtgaatctggcgtggaagccatcccacgggaggcgattcatgactga

SEQ ID NO: 143700 - DNA, 1008 bp, Homo sapiens
gtggtttagtaacactttatttcctcagtttgaaaatagttgtctttcttggggaggctggtttcagcagatgaaaacgagagtcatgatgaaaattacccagcagtggttagtgtgaccataggaacattgtcatcaggtcagcagaaaacatatcagcaaatttttctcatactggcagtgtgtaggggtggatgtttacagttccctgaagccccagtggtcgtgtggtcttttagttttgccatttataggcaacttgtggtaactagctcaattagacacattccttatcacaaggacagagggctttctgtatcctagggttcttgccttggcattccagaagaatcaggtcacacgtgggcttggagaatgagtgcaaggttttattgagtggaagaagctctcagcagatgggggagccataagggagatgattttccccataagttgggccgcttgggggccgagcgctcctccaactgccccagccaaactctgtgttgttttgcccgtcagtggcctgctggtgcctgctggtgagttccactcaacgtctagccgcttgtgtgttcctctgccaatgtgctcctctccacgtccagctgcttctgtctctgccttgctagggtctcgggtttttataggcacaggatgggggcctgggtggttttttgtgtaagtttgaaggaaggggtccagtttcaattttctgcacatggctagccagttcgtgggattcatattctggccaccacttcttctgagcaggtgcagactacttcttcgcttcttctgtttcatctcttcctcttgttcttcttcattcacttcactcctttttctaacactgaataccaacttcaggcgcatgaggcttgtctggtctggtctggccgactgagcaaggaaaccctgtccttgaatgaggacttcctcagcttcagtgactaaatgtttgttctcaaaagtaaaatgtcccaatggaaggcggacagcggccat

SEQ ID NO: 143701 - DNA, 1425 bp, Homo sapiens; identical to SEQ ID NO: 132418

SEQ ID NO: 143702 - DNA, 921 bp, Homo sapiens
atgaggcgcacggccctgggcctcttcatccaggccgtcggcatcaaccccgtcgccgctcggctggccggcgtgcgcacgggatcaatagtgttcttcgtctacgtctactgcagcctagtcgcgggcctggccgggctgatgatcgcgtccaacatcaagagcgccgacgccaacaacgccggcctgctgctggagctggacgccatcctcgccgtcacgctcggcggcggccagctcggcggcggcagcggtgaacatttgcagccgacgtggcaaggttacggtcagacacgccgtgtgccgttattacaaatcgatgattttgagttgagtgaatcttctgccattgcggagtatctggaagatcgatttgcgccaccgacctgggaacgtatttatccgcttgatttagaaaatcgtgcgcgtgcacgacagattcaggcctggctgcgcagcgatctgatgcccatccgcgaagagcgtccgacggatgttgtctttgcgggggcgaaaaaagcgccactaacggccgagggaaaagccagtgcagagaaactgttcgcgatggcagaacatttgttagtactgggtcagccgaatttatttggtgaatggtgcattgctgatactgatctggcgctaatgattaaccgcctggtactacatggcgatgaggtgccagaacgcctggtggattatgcaacattccagtggcagcgagcgtctgtccagcgttttattgcactttcggcgaagcaatctggctgatagcaacgacagaatccagtatcatagcttacgttttttcgacgaggagtgagtgatgaaactgatgtttgcatcggacattcatgggtcgttaccggcgacggaacgtgttctggagttgtttgcccaaagcggtgcccagtggctggt

SEQ ID NO: 143703 - DNA, 888 bp, Homo sapiens
atgcttgaaacagatcttcagagggatggcgccgagagtgaatggagggaagacacagaagctgggcagaaggaggagaaagacaggaacactgaaaacactaacatgcactgggactcatttttgagccacaacagctccagggaagcagagagcttcagcagggcggctcctacagacatacatcaggctgcatatgcattactggcgcggatcatggcctgtcgacctttagtgtcgctcaatcgtcaagaggctgagattgccgccgaacgttttgctttatccgcagagataacaacacttggcaagcaatggcaggagaaatttgccgcgccgttgatcgttcgtctcgataaagaaggcgcatggtatttcagcaacgacgcttctggctgcattccggcatttccaacgcaagttgtcgacaccattggggcgggcgacagtcatgccggtggcgtacttgccgggctggcctctggtctgccactggcggatgccgtattactgggcaatgcagtggcgtcgtgggttgtcgggcatcggggcgcatatttccagtacagggaaagaagtccattcagtaagagaaaatcagaccaaaacaaagagaagcataccgccaagaaacagaactgccatgagaaccagatccagcaaagcctgaagcctctcctactcactctgaacctcaccgggttggcgcttctacgagaatctagtgctgtggtggatctgacagaaggcacagctcaggcagtaatgcctgctcacccacctgctgccactcacatcctgcgagaccacagaacggtaccggtccatggcctgggggctggggatccctggcttaggccctttactgttgttactcgctctgcctga

SEQ ID NO: 143704 - DNA, 1419 bp, Homo sapiens
atggtgagtgttacagctcttaaggcggcgtttctggagttgttcattcctcccagtgggctcgtggtctcactggcttcaggagtgaagctgcagaccttcgcggtgagtgttacagctcataaaggcagtgtggacccaaagagtgaccagcatgggctcgtggtctcactggcttcaggagtgaagctgcagaccttcgcgcgccgggccgagtttccagcaagtcagcaacagcgggaagttccacggcacgatggcggcaatcacgccgaccggttcacgcacgatcatcgccagctcatggctactggtggtcgccacttcgccatacactttgtcgatcgcttcggcgtaccagcgaatggcgcgcgccgcgccgggaatatcatcacgcagactgtgacgaatcggtttgccggtgtcgagagtttccagcagtgccagctcttcggcatatatgcagtttgtgaacgtcagggcgcagagatccccgggccgtatgcccgtttatttctggcgacattctttatatacacttcatccttcaagccgcctctgccttggctgcgttcgctcccccgaaacaccacgccagccgttgtgcgaactgccaaaggtcaggtgacggcgaagtatgtgattgtcgccgggaatgcgtatctgggcgataaagtagagccggaactggcgaaacgcagcatgccgtgcggcacgcaggtgatcaccaccgaacggctgtcggaagatttagcccgttcgctgatcccgaaaaactactgtgtggaagactgtaactatctgcttgattactaccgtcttaccgccgacaaccgcctgctgtacggcggcggcgtggtctacggcgcgcgcgacccggatgacgttgagcgccttgtggtgccgaaactgctgaaaaccttcccgcagctgaagggcgtgaaaattgattaccgctggacgggcaacttacagctgaccctgtcgcgtatgccgcagtttggtcgccaagataccaacatctattacatgcagggctacagcggccacggcgtgactgggggatcctctagagtcggcctcatggcaggcagtcaaatcagccgggtgagcgtggcattaacccttgataccaccggttcaacctccactggcgatacgttgctgacgcaatctctgctgatggagctttccgcactgtgtcgggtggaggtggaagaaggtctggcgctggtcgcgttgattggcaatgacctgtcaaaagcctgcggcgttggcaaagaggtattcggcgtactggaaccgttcaacattcgcatgatttgttatggcgcatccagccataacctgtgcttcctggtgcccggcgaagatgccgagcaggtggtgcaaaaactgcatagtaatttgtttgagtaa

SEQ ID NO: 143705 - DNA, 1590 bp, Homo sapiens
ttattttttctcggacagatatttcactgtatcagcatactgctgaacaaaaacatccatattgctggtatccataccctgcggattcagctgatatttaccgttaacaaacatcgccggaacgccacgcaattgcacgtcagctgcagctttttcctgctgagcgaccagagatttcaccacgaagctgttccacgccgcgtcgtactcttcacctttaatacctgcgttgataaatacatcgcggatatcagaagcagaacgaatggtctggggtttctgtacgccttcaaacagcggaacagtcactttgtcttcaacgcccagcgccatcgccacagcgcatgcctgaggtagatctttgcccaggtcacacccatggagttgacgtgcctgacatgaccagataaagcggtatgcagcccgcttaacagctatgaaaaccgtgtctatcaatttcaggacgaagatcgtcgacgttttgtcgtcaaattttatcgccctgaacgttggacagccgatcaaatcctcgaagaacatcaatttgcgttgcagctggtaaatgatgaagttccggtcgcagcacctgtggccctgattacccatctgaattaagtcgtcctgattaatgacgacctgcggctcatcaggtttttccggctcggaaaagaattccgagagtgacagaccatacaccttcagcagcttttgcagcgtactgatggcagggctgactttatcttgttctatcgtactgatagcactgtgagtcagcccggagagttcggcggcacgacgtttgtgaaagcccctgctgctggcggatttccgacaagcgttttcctggcgccagtccctcatcacaagagttggtacattcgggtaaaacgcagagaggtatccccccttttcaaactggatttcatgcgggggggcatatttgtgtacagtatcgcctgcaggtgcgatataatacctgctgacaactaaaccaacgataaaccagactttagccattggttgatgcacgggtaacgttaggctcaaataattaaacaacacgttacaggacaacaggatgcaaaatcggctgaccatcaaagatatcgcgcgcttaagcggcgtggggaaatctacagtttcccgggtgccgcgagcgtgttgaagcagtgatgaatcagcatggattttccccttcccgctctggcgcgcttcggtatccgtaatgatttgatacagctcttcatcgctctgggctgcgcgtaaacggcggcagatggttttgtccgccagacgtttcgccaccagcgacagagtatgcaggtgcgttttagtttggtctgccggcaccagcagggcaaaaagtaagtccaccggttggttgtcgatggcatcgaaagctataggcgtttcgagctgaacgaaaacgccaacggcgcgcagagtatcttcttccagtttgccatgcggaatggcaataccattgccgataccggtactgcccattttttcccgcgtcaggatagcttcaaaaaccacctgaggcagctcgctaagttgtttcgccgcccgctcgctgatgacttccat

SEQ ID NO: 143706 - DNA, 5402 bp, Homo sapiens
gccggttcccaggccgggtggagaccaactctggggtctcttggtgggagagtggggagcccgtcttctgctgagtgctgccgccccttcccaggacagcggaggtggaacttcgtcgcgctgcaacccccggctcgggatcctggggcgtcctttggcagttgattgcaccctgcactagagagaagtccaggaatgatatattcttgggctgtatttctctaccctggagttcatccagttcatcccagaaacactgacctgattactgtgacaaagtctgatggatagaccctttctgttgaccttgtggcgtttttctttcatgtggaagttggaagacaaggtgaaaggggccaaaagttacctgctttggtgaataggagtgctctacttggttctcagaacatgggccctcgtttaaagctgcagctgtgatcctcggctgtctgttggcattgacgggacctgatgttttacgttattggtggaatcacagtgtctgtggttgcattcttcttcacaattaagttcctctttgagcttgccgcacgtgtagtcagcttcctccagaatgaggaccgcgagcgccgaggggaccggactatttatgactacgtgcggggaaattacctggatccccggtcttgcaaagtctcctgggattggaaggacccctatgaggtgggccacagcatggccttccgagtgcatttattctataagaacgggcagcctttccctgcacatcggcctgtgggactaagagttcacatctctcatgtcgagctagcagtggaaattccagtgacccaggaagtccttcaggagcccaattccaacgtagtaaaagtggccttcactgtgcgcaaggctgggcgttatgaaatcacagtgaagcttggtggattaaatgtggcatatagtccctactacaaaatttttcaacctggaatggtggttccttctaagaccaaaattgtgtgccacttttctactcttgtattgacctgtgggcagccgcacacccttcaaatagtaccccgagatgagtatgataatcccaccaacaattccatgtccttgagagatgagcacaattacaccttgtccattcatgagctcggccctcaagaagaagagagtactggtgtctcatttgagaaatcagtaacatccaacaggcagactttccaggtgttcttgcgactcaccctgcattctcgaggctgcttccatgcttgcatttcataccaaaatcagccaatcaataatggtgaatttgacattattgtcctaagtgaggatgagaagaatatcgtcgaacgcaatgtgtccacttcaggcgtgagcatttactttgaggcttatctttataatgctaccaactgtagcagcactccatggcacctgccacccatgcacatgacctcttcccagcgccggccatccactgctgttgacgaggaagatgaagactcgccctctgagtgccacacccctgagaaggtgaagaaaccgaagaaggtgtactgctatgtgtcaccaaagcaattctcagtgaaggagttctacctgaagatcatcccctggcgcctttacaccttccgagtgtgtccaggaacaaaattttcataccttggtcctgaccctgtccataagctgctcacactggtggtggatgatggcattcaacctcctgtggagctcagctgtaaggagaggaacattctagcagccacttttatccgctccctgcataagaacataggaggctctgagacctttcaggacaaggtgaactttttccagcgagagcttcggcaggtacatatgaaaagaccacattccaaagtcaccctgaaggtcagcagacatgccttgttggaatcgtctctgaaagccactcggaatttctccatctcagattggagcaagaactttgaggttgttttccaggatgaagaagctctggactggggagggcctcgccgggaatggtttgagctaatctgcaaagcactatttgataccaccaatcagctcttcacccggttcagtgacaacaaccaagcattagtgcatcccaaccctaatcgccccgctcatctgcgcctgaaaatgtatgagtttgcgggacggctcgtgggcaagtgtctctatgagtcctctctaggaggagcctacaagcagttggtccgagctcgcttcacccgctctttcctggcccaaatcataggactgcgtatgcattacaagtactttgaaacagatgacccagaattctacaaatctaaagtttgttttatcctcaacaatgacatgagtgagatggagctggtctttgcagaagagaaatataataaatcaggtcaattggataaggttgtagaactcatgacaggtggagctcaaactccagtcaccaatgcgaataaaatcttctatttaaatttgctggcccaatatcggctggccagtcaagtgaaagaggaggtggaacatttcctaaaaggcctgaatgaattggtccctgagaaccttttggctatttttgatgagaatgagcttgagctgctgatgtgtgggactggagacatcagtgtgtctgacttcaaagcccatgcagtagttgttggtggctcatggcatttcagagaaaaggtcatgaggtggttttggactgtggtttccagtctgacccaggaggagttggctcggctacttcagttcacaacaggctcctctcagctaccacctggaggctttgccgccctctgtccctcatttcagattattgccgctccgacccatagcacgctgcctactgcacacacatgttttaaccagctgtgcctccctacatatgactcctatgaagaggtgcacaggatgctgcagctggccatcagcgagggttgcgagggctttggcatgctctgaccactctcctgtcatccagttggctcccatgctctctggagcttctgggcgcaagttacagacatcataaccactgatcctaacacacataaccatcagccagaagatgccgcatgctcccctgtgtctggaggattttgtcacctacaagccttgtctttacctcacctgctccctgcccatatctaccacaggccactttggcatggtatgtaagctgagctcttcattctgtcatgagaagaggaccatgctgctatcatttatttggtcctttgaagatctcagtagctgagggagatggcacacggggctcagccctgttgggaaactggtgtggagacccttaaatccacactgtgctccaaaactccctctgctgatactccttggagacaccctctttggccctcactacttgaccagactggtacttgagtccttctcatgggtggggtgattgcctcttctcatcaggagccaggagagagggggacagataggaggtggcccataggagcagtcccgctgcacaatggtaggcataggccatggcactggactgcctctaaggactgctaaaaagaatatttttttgtggtgtcagaactggaaaaagcactttcccttcgggcatttctggaaatgattattaatcacaaagaagaactctgtaagctttttcttgaattgtagccagtgagaaaagcagatagactgaagaatatgaaggatagctgagctgtagcctccagagtggggcatgcctaggcatatggctggcttggagactactgatgcttttccctgagtttgttattggcactgaagtatggccggcttgggccactgacttccccattatgtagtctgctaaaagctggggatcctttagcattctactgaagaaaattttgtagcaaaagattagaacagtaagaatagtatgccagcaatccctgattctctctctgcttggtgttctctggcagcactaagacaaaggaacagggactaggagtttacgtgcttatcacaggtccttggcgtcaggacactagggatgaacatggaggtgatatgttacacagtaaacacctgccaacccctgtactcccctttgctccatcagttatcaggaaggagaactaaggagggaggaagcttattaggttcactgttgaatgatgattgaagagtacctgctgctgtatcttggaagatgacaacatcctttttcattactgtttgattgaaaataatttcaagattcaaaatctcattgacttcccaaatttgtgtttttaagaaggctttgctgcaagctaccattcccaatggggcagtcaactctgagaatattacaagccatctttattgccaaaaccagcaagtacacagagtcctgaaacaaggcaggactttggcaatgccttggcctcctggaagcatgtctgagccctcctgttcgcagggatcatgaggaacaagccctcctgagctgctacagttcctgcctgacctcagtctttcgcagtcatcatttgtcctttcttggcacatgggtgctgacctcactcatccttggggtccgggatccagcatcagggtctctataccccaggatcctccatgccacatggtcactgctctcctcagggaccaggacaaggtgctgctgcttgcccaaatgttttcccatgggatatgtaccggaaggtttatcaccaccctgggaaacataatgctgccccttgggcccagaaaggggtttccagctgggggcacgtggactggttctgctgtttttggcagtcgcttttctgaattctcccctccggcagccttccagagactgatcctggagattgagttgattgtcttggctagacctgtcattttaagctctagtcatagcactttttcagagcatcttaggcaccattgcaacccaaccagggaagctgcatccctgtggtggtccttaggcaccagtctttgttaaacaaaaccctttggcactattgtggttttctattctctgtctgaactctattcaaaagtatctttgctctcttgggccttttcttttactgttttgttttttttttctaatcctgctttcatactagccagtgtggggaaaaggtacaatatgtcaaagagatgagagagtgttatttcttgggcaattttctattagtgtttcttattttggccagttcttttatttatgtccttgtgacccaggtacttggggggccagctacccttctggccttttagcgtctttgaaggagaccagacatgagtgaatacctaggagagtgtcagcatgtttctggaaaattggcagagaccaagccctgctgcagattcgtcaggccaggtgaaagggccaggcagttgcagctgatgatgtaaatattttgtacagtagataaataaatgtttaaaag

SEQ ID NO: 143707 - DNA, 1164 bp, Homo sapiens
atgaaaaacaaattaccgccatttatcgagatttaccgcgctctgattgccacaccttcaataagcgccacggaagaggcactcgatcaaagcaatgcagatttaatcactctgctggcggactggtttaaagatttgggcttcaatgtggaagtgcagcctgttccaggaactcgcaacaaattcaatatgctggcaacacgccgacatgaaggtcgctatattacatgcatgcagccgctgccaataatagcagaacaagagcaagagccagaaatgacggtcagatattatatcagttctgctgatttaaccgcagaaaagttcgccacagcaatccgaaaccactggcacgtggagaataagctgcactggcgtctggacgtggtaatgaatgaagacgactgcaaaataagaagaggaaacgccgcagaattattttcagggatacggcacatcgctattaatattttaacgaatgataaggtattcaaggcagggttaagacaaggttgggaagatatagaggattttggggaaacacatctcgattttttgaagcaatatggtgattttgaaaatggtattcctgttcacgataccattgccagagttgtatcctgtatcagtcctgcaaaatttcacgagtgctttattaactggatgcgtgactgccattcttcagatgataaagacgtcattgcaattgatggaaaaacgctccggcactcttatgataagagtacagccgcaggggagcgattcatgatcaataatgcgttctcaacaatgcacagtctggtcatcggacagatcaagacggatgagaaatctaatgagattacagctatcccagaacttcttaacatgctggatattaaaggaaaaatcatcacaactgatgcgatgggttgccagaaagatattgcagagaagatacaaaaacagggaggtgattatttattcgcggtaaaaggaacccaggggcggctaaataaagcctttgaggaaaaatttccgctgaaagaattaaataatccagagcatgacagttacgcaatcagtgaaaagagtcacggcagagaagaaatccgtcttcatattgtttgcgatgtccctgatgaacttattgatttcacgtttgaatggaaagggctgatgtaa

SEQ ID NO: 143708 - DNA, 1799 bp, Homo sapiens
aaatacttcttacataattaaggagaacaaaatggaacttaaaaaattgatggaacatatttctattatccccgattacagacaagcctggaaagtggaacataaattatcggatattctactgttgactatttgtgccgttatttctggtgcagaaggctgggaagatatagaggattttggggaaacacatcccgattttttgaagcaatatggtgattttgaaaatggtattcctgttcacgataccattgccagagttgtatcctgtatctgtcctgcgaaatttcatgagagctttattaactggatgcttgactaccattcttcagatgataaagacgtcatcgcaattgatggaaaaatacaccggcattcttatgacaagagtcgccgtaagggagcgattcatgtcattagtgcgttctcaacaatgcacagtctggtcatcggacagatcaagacggataagaaatcccatgagatcacagctttccctgaacttcttaacctgctggatattaaaggaaaaatcatcaaaaccgatgcgatgggttgccagaaagatattgcagagaagatacaaaaacagggagaggatgagaagaatatcgtcgaacgcaatgtgtccacttcaggcgtgagcatttactttgaggcttatctttataatgctaccaactgtagcagcactccatggcacctgccacccatgcacatgacctcttcccagcgccggccatccactgctgttgacgaggaagatgaagactcgccctctgagtgccacacccctgagaaggtgaagaaaccgaagaaggtgtactgctatgtgtcaccaaagacatcggcgtaccggtgtttttctgcaccaacagcagcgcggcaacggcctgttcaacaacatagagtaagtttcgcagtagcgaaatatccggtccgcttttaccttgagccgccgcctgccactctttttccgccagcattccggcatccgagtgcagcctcgtttaagggaaatcccaattttgagttattaaggcactggcgcacagtaaaacgcctgtcggaaatccgccaacagcaggggctttcacaacgtggtcccgccgaactctccgggctgactcacagtgctatcagtccgatagaacaagataaagtcagccctgccatcagtacgctgcaaaagctgctaaaggtgtatggtctgtcactctcggaattcttttccgagccggaaaaacctgatgagccgcaggtcgtcattaatcaggacgacttaattgagatgggtagtcagggtgtgtcaatgaagctggttcataacggtaacccgaatcgcacgctggcgatgatctttgaaacgtaccagccgggcacaaccactggggaaagaattaagcatcagggtgaggaaataggcactgtactggaaggtgaaattgttctgacgattaatggtcaggattaccacctcgtcgcggggcaaagttatgccattaataccggcatcccgcacagtttcagtaatacgtcggcaggtatttgccgaattatcagcgcccatacgcccaccacgttttaatctttttgttctgtaagccgggtaagcgcaatgcgcccggcaatctatacacaaaatcattcaagttgcatcaaggcggcaagtgagcgaatcccgatgagcttactcaggtaagtgattcgggggagcgaacgcagccaaggcagaggcggcttgaaggatgaagtgtatataaagaatgtcgccagaaataaaagggcatacggcccgg

SEQ ID NO: 143709 - DNA, 815 bp, Homo sapiens
ccttgctaaaaaaacatcatcaatacgtcgcactgtggcggctatcgcactttaacgtttcgtccggccccctcagtctatgcaataggccataaactgcaaaaaaaagtccgctgataaggcttgaaaagttcatttccagacccatttttacatcgtagccgatgaggacgcgcctgatgggtgttcgggctacctgacctgtccattgtggaaggtcttacattctcgctgatttcaggagctattgattatgcgtaactttgatttatccccgctttaccgttctgctattggatttgaccgtttgtttaaccacttagaaaacaaccagagccagagtaatggcggctaccctccgtataacgttgaactggtagacgaaaaccattaccgcattgctatcgctgtggctggttttgctgagagcgaactggaaattaccgcccaggataatctgctggtggtgaaaggtgctcacgccgacgaacaaaaagagcgcacctatctgtaccagggcatcgctgaacgcaactttgaacgcaaattccagttagctgagaacattcatgttcgtggtgctaacctggtaaatggtttgctgtatatcgatctcgaacgcgtgattccggaagcgaaaaaaccgcgccgtatcgaaatcaactaattccctaaggccgcctggcgcggcctgacatctccatgctcgccgtcagggagcatatgcgaatcttcggatttgcaggtacttactcgcttcttagaaggagaaatgactatgcgtaacttcgatttatccccactgatgcgtcaat

SEQ ID NO: 143710 - DNA, 1956 bp, Homo sapiens
atgaacgacgcgcactttgtcaacaatctgacgttagcatcagaagtgggtgtttacgctcatataccacgtctgccagcaaacagtaccgatattgcaccgccagatattccggctggcttcgtggctgttttcaacagtgatgagtcatcgtggcatctcgttgaagatcatcggggtaaaacggtttatgacgtggcttccggcaacgcgttatttatttctgaactcggtccgttaccggaaaatgttacctggttatcgccggaaggggagtttcagaagtggaacggcacagcctgggtgaaggatacggaagcagaaaaactgttccggatccgggaggcggaagaaacaaaaaacaacctgatgcaggtagccagtgagcatattgcgccgcttcaggatgctgcagatctggaaattgcaacggaggaagaaatctcgttgctggaagcatggaaaaagtatcgggtattgctgaaccggatattgaatggcgggtaccgaagctacgaaattcgtaatcatgtcaatagctttcctccgtatgaacagggcgaaattgttatcaacggcgagaaaatcacgcgccccgattacggcgacatgctgaaacgcggcattggctatacgccagaaaaccgcaaagaagcggggatcattccctggttgggcgttgacgaaaatacagtgctgaccaatcggcaaaaaatcagcgccaacggtgtgctgcaatggtccaccatccgccgcctgaccgaagaggtgatgcagcggatgacggtcaaggccgccagtagcgaaacacccatcggcacgctttctggtggcaatcagcaaaaagtggtgatcggtcgttgggtctatgctgccagccagattttgttgctcgacgagccaacgcgcggcgtcgatatcgaagccaaacagcagatttaccgtattgtccgtgagctggctgccgaaggaaaaagcgtggtgtttatctccagtgaagtggaggagttgccgctgaaaattcaaaaccctaatccagacgaactgatgatcgaagtcgatctctgctatgagctggacccgtatgaattaaaactggatgagatgatcgaggcagaaccggaacccgagatgattgaagggctgcctgcctctgatgcgctgacgcctggcgatcgctatctcgaactgttcgagcatgttcagtcggcgaaaattttccccgacagtaaaacctttcccgactgcgcacctaaaatggacccgctggatatcttaatccgctaccgtaaagtgcgccgtcatcgtgattttgacttgcgcaagtttgttgaaaaccacttctggctgccggaggtctactccagcgagtatgtatcggacccgcaaaattccctgaaagagcatatcgaccagctgtggccggtgctaacccgcgaaccacaggatcacattccgtggtcttctctgctggcgctgccgcagtcatatattgtcccgggcggccgttttagcgaaacctactattgggattcctatttcaccatgctggggctggcggaaagtggtcgggaagatttgctgaaatgcatggccgataacttcgcctggatgatcgaaaactacggtcacatccccaacggcaaccgcacctattatttgagccgctcgcaaccaccggtttttgcgctgatggtggagttgtttgaagaagatggtgtacgcggtgcgcgccgctatctcgaccaccttaaaatggaatatgccttctggatggacggtgcagaatcgttaatccctaatcaggcctatcgccatgttgtgcggatgccggacggatcgctgctcaaccgttactgggacgatcgcgacacgccgcgtgacgaatcctggcttgaggacgttgaaaccgcgaaacatgaaggtcacaatcgaaaacacagaacgttatgctga

SEQ ID NO: 143711 - DNA, 2862 bp, Homo sapiens
atgggggggcccttcccttgcaatggaaagactttatcggatcgctggacgagatcgaaagagcgtaaccgtcgacgaaccactgcaactgatgaagatgttatctacttatatcaatacatggtcccaccaacgtgcaacccggcactggcggctctgttggataaatcactgcaaaaagagtgggctaacgatctcgatcagctgatcaatctggaaaaattcgctgatgatgcgaaattccgtcagcaatatcgcgagatcaagcaggcgaataaagtccgtctggcggagtttgtgaaagttcgtaccggtattgagatcaatccacaggcgattttcgatattcagatcaaacgtttgcatgagtacaaacgccagcacctgaatctgctgcatattctggcgttgtacaaagaaattcgtgaaaacccgcaggctgatcgcgtaccgcgcgtcttcctcttcggcgcgaaagcggcaccgggctactacctggcgaagaatattatctttgcgatcaacaaagtggctgacgtgatcaacaacgatccgctggttggcgataagttgaaggtggtgttcctgccggattattgcgggccactgctcggtacgctggaatatggtctgccacataaaaacctgattgaaggtattgccgctgcaatgcacttccgcagtgaagatgatccgcaggctcaggaactggcagcactgatcgctgacaaaggtccgcaggcggcgctggcacagatttccggtcttgatgccaacagcgaggttgtatccgaggcggcaacaatggaacaaacccaggcctttgaaaaccgtgtgcttgagcgtctgaatgctggcaaaaccgtgcgaagctttctgatcaccgccgtcgagctcctgaccgaggcggtaaatcttctggtgcttcaggtattccgcaaagacgattacgcggtgaagtatgctgtagaaccgttactcgacggcgatggtccgctgggcgatctttctgtgcgtttaaaactcatttacgggttgggcgtcattaaccgccaggaatacgaagatgcggaactgctgatggcattgcgtgaagagctaaatcacgacggcaacgagtacgcctttaccgacgacgcaatccttggaccctttggtgaactgcactgcgtggcggcgttaccaccgccgccacagtttgaaccagcagactccactgccctccaaaccgggacttgtgtggggacacagacactgttcccagcactgggcctgatacaacgtggcacccaagaaaactccagtatgactgatgcagcacattacctgcgctcagatcgtttcagccgacgctgccctatcggtactatcgctgagtcaaccgcgagaccgactatctcctgggaaaccaatgtacgcgataccaccagctatgcgggcccagtcttaatgggccaaacggtacttaaacgctcggtcgggctgctgacctacttccacactgggccgaagagctgcatccgcaggttacgccctgaagtcagctcagatcctgggccaggcactgcatgggagacaggcatgagcaggacctctttctgccttcgaggaaaacacgggggcatctggggctcacttggcactcatccaccttgtgctgtacctggggacctccgggtgggtggctgtcatagaattcggctccaaaccaggatgcttttgggaattgagggagagccctggcttccacgtggaccacacgggcgagctgcggggaatccggtggaccagcaatttgcggcgggagacctcggactattaacggacgctgatgcccacctggagggctggggcccggagaaaacggtgcccggggtaaccgaagagggaggcggtacgctgacagtcaacgataatggcaaagcgacagatatcgtccagaacagcggtgccgctctccagacgagcacggctaacggtattgaaatcagcggtactcatcagtacggtactttttccatttccggcaatttagcgaccaatatgttgctggaaaatggcggtaatttattggtattagcaggtaccgaagctcgcgactccacggttggcaagggtggggcaatgcaaaacctgggtcaggactccgccacaaaggttaactctggcgggcaatatacccttgggcggtcaaaagatgagtttcaggctctggcccgggcagaagatctccaggtcgctggcggtacggcaatcgtctacgcaggtacgctggcggatgcatcggtcagtggcgcgacaggaagcctgtcgttaatgacgccacgggataatgttacgccagttaaactcgaaggggcggtccggattaccgatagcgcgacattgactctgggaaatggcgtcgataccacgcttgccgacctgacggctgccagccggggcagtgtctggcttaacagcaataattcctgtgcaggtaccagcaactgcgaatatagagtaaacagtttgctactcaacgacggtgatgtttatttgtcagcacaaacagcagcgcctgccacaactaacggtatctacaatacgctgacaaccaatgaactttccggtagcggtaatttctacctgcataccaacgttgcaggctcccggggcgatcaactggtcgtcaacaacaacgccactggtaattttaaaatctttgttcaggataccggcgtcagcccacagtctgacgacgcgatgacgctggtgaaaacagggggaggggatgcttcgtttacgctgggcaataccggcggtttcgttgatcttgggaggaggccgcggcaggacattcgcttgagtccaggagtttga

SEQ ID NO: 143712 - DNA, 2400 bp, Homo sapiens
atgcatgaggtcactctagaagatccctcatcggcacagatactgattactgtaatcaccggtcatggtgagatcattacgctcaaaagaagtagtcgcaggcagaacgatatccgcatgtattgccgccgccgtccagaagcattcagagatcaccaccagctccggtttttgccaggcacggatcaggcgattggtatcctgatgatgagtaaagttggcaccgcccgcccaccagataaaacgaatatccgggaaatgtcggttcataccgttgtgttgatatgcgccaccagggttttccagtgcttcaacaatgcgggcaacagggattttatccaccgcatcgcagccacccggcaagctgccctgcatggaagagagcaccgcagaacgccgcgtggggttaccaccattggcaaaatggtaagaaagaccaaaaccgccgccggttgggaacatgaaagtggtttctatctggacggtgtcgtgaagctgaaccgttttaaaagtaacgtagcaggtaaaatgagcagcggtggagccgccaatggcagttaccacagcaacgggctgggcggtcacattgaaaccgggatgcgatttaccgatggtaactggaacctgacgccgtatgcatcgttaacggggttcaccgctgataaccccgaatatcatttatccaatggcatgaaatcgaaatcagtcgatacccgcagtatatatcgtgaactgggcgcaacgctgagttacaacatgcgtctggggaacggtatggaagttgagccgtggctgaaggcggctgtgcgcaaagaatttgtcgatgataaccgggtgaaagtgaatagtgacggtaatttcgtcaattatttgtcgggcagacgtggaatataccaggcaggtaaagatttagatcgcttcaaaaatctggtcctggtgcacgccgcacgttatgccgccgacttaagctatttgccactgatgcaggaactggaaaaacgctacgaaggaaaactgcgcattcagacggtggtcagtcgggaaacggcagcggggtcgctcaccggacggataccggcattaattgaaagtggggaactggaaagcacgattggcctgccgatgaataaagaaaccagccatgtgatgctgtgcggcaatccacagatgacaaggaggctgatccccgccagcgttgaggtttatcacgacagcctgtgcccgaaaaatctggcacggctgggagcaacatattaccgcccgctatctggtcggtgcgatggcgcaaactcgatggtgcggcgacatctctacccggatcatcaaatccgtaaatatgtcgctatccagcagtggttcgcggagaaacatccggtgccgttctactcctgcatctttgataattcgataactaactgttattcatggagtatcagcaaagacggttattttatcttctgcggtgcctatccaatgaaagacggtcagacgcgtttcacgacgctgaaagagaaaatgagcgcctttcagttccagtttggtaagacggtgaaaagcgaaaaatgcacggtgctgtttccctcgcgctggcaggattttgtctgcggtaaggacaacgcctttctgattggtgaagcggcgggatttatcagcgccagctcgctggaggggattagctatgcgctggatagcacagacattctgcgttcggcattgcgaaaaccgattcgaacggagcagggcgctaacggggcgatacgggagctggaaaaattccgccagcagggtttttcacctgagcaggtgattcgacacagcatcgccaatgaataccagggcttgttcgcgccgaaaggtgttcgacctgagacgttactccgacaggtgcagaacgaagggcagcgatacgcgttgagtcaggcgaaatccatcgctgatgaactgatgaccgggtgtacaaattttgcgttcagcggaaaacctggtaccgggaagaaccacttagcggcagctatcgggaatcgcctgctgaaagacggtcagacagtgattgtggttaccgtggctgatgttatgagtgccctgcacgccagctatgacgatgggcagtcaggcgaaaaatttttgcgggaactgtgcgaagtggatctgctggttcttgatgaaattggcattcagcgcgagacgaaaaacgagcaggtggtactgcaccagattgttgatcgccggacagcgtcgatgcgcagcgtggggatgctgacaaacctgaactatgaggccatgaaaacattgctcggcgagcggattatggatcgcatgaccatgaacggcgggcgatgggtgaattttaactgggagagctggcgtccgaatgtcgtccagccaggaattgcgaaataa

SEQ ID NO: 143713 - DNA, 1992 bp, Homo sapiens; identical to SEQ ID NO: 122930

SEQ ID NO: 143714 - DNA, 525 bp, Homo sapiens
  misc_feature (1)...(525): n = a,t,c or g
tttataaagaactgaacctggctgacagttcgcttagcgaagaggcgctgattcaggcaatggtggatatcccaaagctgatgaagcgcccgaaggtggtcgcgaatggcaaagcgcggattggtcgtccaccggagcaggtactgggaaatcgtgggttaagatgtgctccttcgctagttgaaggcacattgccggatgcgacgcttgccacgtcttatccggcctacgaatactatggattaacttcgcgtagtnnnnnnnnnnnnnnnnnnnnnnnnnnnnnnataaacaccttatctacaacttcagaatttctttcacaaacggaatggtcagcttacgttgcgcggtaatcgacgcacgatccaactgatccaacgtcataaatagcgtgcgcatttctctgtcgagccgcttcagcaagaaacgccccacatcttccggcagttcaaaaccacgcaaacgcgcgcgtaactgtagcgcctgcaacttatcttcatcagaaagtggctgcaatttgta

SEQ ID NO: 143715 - DNA, 1558 bp, Homo sapiens
cgctcatgaagtcacggggctgattcgtgaaggcgcgacggtgtgcggtgttcgtgtacgtaaccatctcaccggcgaaactcaggcccttcatgcacctgtcgtggttaatgccgctgggatctgggggaatgtcagtggtctgccctccgatcgcacctctatgatccaccggaaaaatttgcagggcgatgatggccggttttgccgccagcactttacgcatttcagcaatcgagttcacccgatcgcggttgacgccaatgatcacatcgtctttttgcaagccagcctgagcagctgggcttcctttgacaacttcatcgattttaatacctttgccgccatcttttagctgaccatcgctcaacgttgcaccttccagcgctggcgtgatcatttcagcgctggccgacgaagaggtgctggtatcgagcgtcacttctacttccagtggtttgccgttacgcagcaggccaagcttcactttcgtgcccggctcggtggtcgcgatacgagagcgcaactcagcaaagctattcagcggtttgccgttgaggctggtaataatatcgcccgctttgacgcccgcttttgccgagccagaacctggcaacacttcgctgacaaacgcgccacgctgcacgtcaaggttgaaggctttggcgatatcggcactcatctcggtgcctttgatgccggtttcggcacagattttacccacgatgtcaccgttgtggtgaccgatgaacgggttcaggtaagtaacgataccgatagagttgtaaacgtaaccttcgcacacttctttgttagcagtgatgccgttaatgcatttttccagcaggttgtagcaagcgttggtcagaatgtgaacggattcgaacatggcctggccaatgaccggctccataacgttcaactgcagctgacctgcttctgctgccatggtaacagtggtgtcgttaccgatgactttgaagcatacctggttaaccacttccggaacaaccgggtttactttagctggcatgatggaagagcccgcctgcagttccggcaggttgatctcgttcaggccggcacgtgggcctgaagagagcaagcgcaggtcgttacagattttggacatcttcacagccaggcgtttcagcgcgccgtgaaccataacataagcgccgcagtcagaggtcgcttcgatcaggtcttcagccggtacgcatgggaagccagtaacttcagccagttttttcactgccagcggagagtactctttcggcgtgttcagaccagtaccgattgctgttgcaccaaggttaacttccagcagcagttcagcgtacgttaagttttggcaggtaccgagctgattgttgtaattcttatccatacctccaacaagctgcagttgacccaaggagaggaggccagtccatctcccatgggtcccatacacaccccgctgctcatcaccagacagcgaacccctggcttgggcccacagcacagaccttccatcctgatctgactgcactaagcaattgctgacctgcatcat

SEQ ID NO: 143716 - DNA, 999 bp, Homo sapiens
atgagtgccgatatcgccaaagccttcaaccttgacgtgcagcgtggcgcgtttgtcagcgaagtgttgccaggttctggctcggcaaaagcgggcgtcaaagcgggcgatattattaccagcctcaacggcaaaccgctgaatagctttgctgagttgcgctctcgtatcggcgacaacgagccgggcacgaaagcggaagccgcgctaaataaccgcgatcaggagctggctgcgcgagcagaaggttatgcgctcgccggacgactcgatcaggccatttcgctgttgagtagcgccagttcgcagagccgggaaacgctgaacctgctgaaagaaaacggcgtggagccagaagtggtgctctaccttgagacacccgccgatgcggcaacgctgcgcgatttgctgaaaatactggggatgaatagcgcccgtgaattgatgcgccagaaagaggatctttataaagaactgaacctggctgacagttcgcttagcgaagaggcgctgattcaggcaatggtggataatccgaagctgatggagcgcccgattgtggtcgcgaatggcaaagcgcggattggtcgtccaccggagcagtacactgtggtcaaacccactcaccggggttttggtagtcgcatacctcgattctttgaaataccgacggaaggggaccgtatcctccaaccaacgcacggacacgataagctccgtttacgtgccttcgggatttcccgtcgttggctttacgaaataagtcaatataacgtcgacaagtacggaatccgtttactggcatatcgtactcgtcgcatctgcctccgtatgagagaacttaacgggctcaggatatccttcgcagctcgcgacgacgtcgcgacgtccgccaatagaacgacgtgccgcccgtactataacaagatacgatgcccccagtctcgaccagcgtcacgacatgttagccgtcacctttgggccagtgaacgtcgctag

SEQ ID NO: 143717 - DNA, 558 bp, Homo sapiens
tgttcaatggaagagaagaccaactagactcttgttatcacgggaataggcagctgcgcggcagcctgcgcctgttgtttttggcgtttatccgccagcgtctgcgcgacctgataataaccgctcaccgcgtcattcgggttaatcgccagcacgccgcactgggcgtcaagcactgcaggttgcccggcataacgggcaatcgcatccagcggcaagccactcagtaccgggatcgccgaggcacgggccagaatcagtgtatgcgaggtgatatgcagcaactgttcgctgatatcgcgaatgtcgctaacacgttcgcgcagataatcgctggcagaggcagaaagtttggcgcaaacctgctccatattgctgatgatcgccgcccccagcccctgatgctgttctgtcatcaggcgacggatattgcctgcaaattcatcatcctgaatcagcgacaaatgggcgctgaggatagttttgctttcgccgtcacgctcacgcaattgctggttcagttgctcggcaagcgttgccaggctgtgctccagccgg

SEQ ID NO: 143718 - DNA, 1608 bp, Homo sapiens
  misc_feature (1)...(1608): n = a,t,c or g
atggcggcgattcaacgtgcgattgacagtgtttctcattatctggtgctgaaaacagccatcagcatcatcaccggcctggtcgcctgggcgatgctcgccgcactcgatgttcgcttcgcttttgtctggggattgctggcctttgcgcttaattacatcccgaatattggttcagtcctcgcggcatcccccctatcgctcaggcataccagcaatcggactcttcggatcatcctgcgccgccgggttaaccgtatcgttagcaccaatcaccagtacggtatcggtatcagcaaagtcaacgagtgtcgaagtttccccgggggttttccccgcgcgcccccccccccttcccggtggggaatggaacagaccttcgggagcaatttttcgtcagaacacggcgctcaagagccaccgaaatcacgggtattagcgataatctgttttacgccaccggaagaaccgatacgctggcttgcttctgcaaacacagagaaagcactcatcgataaggtcgcggcgacaacagttgcgacggtggtacgcataactttcataatgtctcctgggaggattcataaagcattgtttgttggctacgagaagcaaaataggacaaacagttcgattgaacaagcgatgctcgacgccgggctgagtgccgaagaagccagtgcaggcgcacacgcagcaatgatcaactttgccaaatggcgcagccgaatcgacgtcccgcagcaaactcacgacaccttaaaacagctggcgaagaaatggccgctggtggcgatcaccaacggtaacgcccagccggagctgtttggtttgggggattattttgagtttgtgctgcgcgctggcccgcacgggcgctcaaaaccgttcagcgatatgtactttttggctgcggaaaaactcaacgtgccgatcggcgagatcttacatgttggggacgatctcaccactgaccggaatgcaggcttgttggatcagaccggaaaatggcgatctgatgcaaacctgggacagccgtttactgccgcatctggaaatttcccggttggcatctctgacctcgctgatataatcagcaaatctgtatatatacccagctttttggcggagggcgttgcgcttctccgcccaacctatttttacgcggcggtgccaatggacgtttcttacctgctcgacagccttaatgacaaacagcgcgaagcggtggccgcgccacgcagcaaccttcnntgtggtaagacgcgcgtactggtgcatcgtatcgcctggttgatgagcgtggaaaactgctcgccatactcgattatggcggtgacgtttaccaacaaagcggcggcggagatgcgtcatcgtatcgggcaactgatgggcacgagccagggcggtatgtgggtcggcaccttccacgggctggcgcaccgtttgctgcgtgcgcaccatatggacgccaatctgccgcaggatttccagatcctcgacagtgaagaccagctacgcctgcttaagcgtctgatcaaagccatgaacctcgacgagaagcagtggccgccgcggcaggcaatgtgtacatcacagatcctctag

SEQ ID NO: 143719 - DNA, 2571 bp, Homo sapiens; identical to SEQ ID NO: 124859

SEQ ID NO: 143720 - DNA, 2976 bp, Homo sapiens; identical to SEQ ID NO: 138186

SEQ ID NO: 143721 - DNA, 1271 bp, Homo sapiens
cccccagcccctgatgctgttctgtcatcaggcgacggatattgcctgcaaattcatcatcctgaatcagcgacaaatgggcgctgaggatagttttgctttcgccgtcacgctcacgcaattgctggttcagttgctcggcaagcgttgccaggctgtgctccagccgggtggaatcttgcgcactggcggggattgcccgataactgtcgaggctgtcgctttgtaacagggtcagcgtacccacgccgacgccgcttgccagcacattgccgtacagtaaatccgggttaaggcggcttaatgaacgcggcagcggatgcgccgtcagttctgcctgcataaaagttgctgcatctgcaaaatgtcgcggcaatcggcaatcgaaaagacatggtgaaccgtgccgtcggtccaacaccgttaccagtcaaaagtctgacctgaacacgacaattgagtttgttagtccgaatgacgttgtaagcattcgtgagaaagcgaagaagcagtctcgcgtgaaagccgctctggagctggctgagcagcgtgaaaagccaacctggctggaagttgatgctggcaagatggaagagtttctaaaaccgcgcctggttgatatcgagcaagtgagttcgacgcacgccaaggtgacccttgagcctttagagcgtggctttggccatactctgggtaacgcactgcgccgtattctgctctcatcgatgccgggttgcgcggtgaccgaggttgagattgatggtgtactacatgagtacagcaccaaagaaggcgttcaggaagatatcctggaaatcctgctcaacctgaaagggctggcggatttcaagatcctcgacagtgaagacccagtacgcctgattaagcgtctgataaaagccatgaacctcgacgagaagcagtggccgccgcggcaggcaatgtggtacatcaacagccagaaagatgaaggcctgcgtccgcatcatattcaaagctacggtaatccggtggagcagacctggcagaaggtgtatcaggcgtatcatgaagcgtgtgaccgcgcgggcctggtggacttcgccgagctgctgctgcgcgctcacgagttgtggcttaacaagccgcatatcctgcaacactaccgcgaacgttttaccaatatcctggtggacgaattccaggataccaacaacattcagtacgcgtggaatcgcctgctggcgggcgacaccggcaaagtgatgatgatcggtgatgacgaccagtaa

SEQ ID NO: 143722 - DNA, 600 bp, Homo sapiens
ttcgatattaaagatgcgatcaaccaggttgctgaccgcctgaacatctccaaacacactgtctatctctacatccgccagttcaagagcggtgatttccaggggcaagataagtaatgcgttttgccatcgtggtgaccgggccagcatacggtacgcaacaggcgagtagtgcttttcagtttgcgcaggcgctgatagcagatggccatgagttaagcagcgtctttttctatcgggaaggggtctataacgctaaccaattgacctctccggcaagtgacgaatttgacctcgtacgggcctggcaacaactgaatgcgcaacatggtgtggcgctgaatatctgcgtagcggcagcattacgccgtggcgttgttgatgaaacggaggccggaagactggggctggcttcgtcaaaccttcagcagggatttaccttaagcggacttggggcgctggcggaagcctcgctgacctgtgacagggtggtacaggtctgatgaaacgaattgcgtttgttttttttactgcccctcatggtacacccggaggcccggaaaggttaaatgctttaatgggcacttcccgattatctgc

SEQ ID NO: 143723 - DNA, 1248 bp, Homo sapiens
atggcgggcaacaggtcgcttttaaccaacgaaaccagtgagttggatttactggatcaacgtcctttcgaccagaccgattttgatattctgaaatcctacgaagcggtggtggacggattaagcacctttgtgccgccagaaaccccggatgtcggttcaagcgtcaactttgcctcttctgttgaagatctggttacccaaacgctggagttcactggaaggaccgatcgcaatgtttctaataacgccaaaaatcgtcagatcgtgctgaatctctacgagaaagggatcttcgatattaaagatgcgatcaaccaggttgctgaccgcctgaacatctccaaacacactgtctatctcacatccgccagttcaagagcgaagcgaggcgaaacgctgcgaaatgcgctggctaataacgggaaatttaccctggtttccgcccagcaactgtcgatggcgaagcaacagttaggtttgtcgccgcaggacagtttaggcacccgtagtaaagccataggcattgcccgcaatgtcggcgctcattacgtgctgtactccagcgcctctggcaacgttaacgctccgaccctacaaatgcagctgatgctggtgcagacgggcgaaattatctggtcagctgctgaatttgatttcaatcatcagcaacttaatttgagcattccccaaattgcactgtaccgtgatgcaagaggttacgtctccccttctcgttgggacgatggtataccaacgctgtttaccaactactcgtttacaggttctgataaccgttaccgccagggcaatcgtagccaacgacagtacctgaatatgcaaaatggtgctaattttggcccctggcgattacgcaactattccacatggacacgcaacgatcagacatcaagctggaataccatcagtagttatttacaacgtgatatcaaggcgttgaagtctcagttgcttctgggagaaagcgccaccagcggcagtattttttccagctacacctttactggcgtgcaactcgcttccgacgataatatgttgccaaacagccagcgcggatttgccccaacggtacgcggtatcgcaaacagtagtgcaatcgtgactatcaggcaaaatggttatgtgatctatcaaagcaacgtgtcagcgggtgcctttgaaatatttctttacattcgaatgttacatgttgtagatttgatgataaaaaagacaccttcgatataa

SEQ ID NO: 143724 - DNA, 1170 bp, Homo sapiens; identical to SEQ ID NO: 135755

SEQ ID NO: 143725 - DNA, 1572 bp, Homo sapiens
ctacccctttaaacgctcgggtccaccgccttccgtcagtaaccgcgggaaactgtccttattctcggtgtcacgccatacagaatgacgtggtgtcatggcgaatgccgtgtttgccagcatcgcttttagtggttcatcagaaactttgttccacagcggttcactttccacttcgttggtatcgatgtagtcagcgccgggaatatggctgataaggtaaagcttaggagcgccccaggccgcttcaatgactttccagtcaccggcaggtttcgccgtaacctctttaccttgttgcaggtcgtgcagccattgcggataaaccagctgctcaaaatgcggcagtttttgcagacgggaaggttcgcttagcgcgtcactcaggatggagatatgcgttaaacctgctttttgcagtcgcgttttgacggcgtcgacatctttgtcattaccgtacagcgccaccggagcatcggttttcaggttatgttgcttgatccacgcgttgagctgttcggtgctcattttgtcaagccagctggcagagaggtttaaggccgcaagttcatgaccagaagggccatttaaggtttgtggccagccgttataaaacgcgctggggcgagtatctatcgctttgccattttgttgttgaagttccggcacgctttgttcaggaaacgcttccggcaccacgcgtacccgacgccgcgagcgggcgtatatgacccaaccgccaatgccaatagccactactggcagcacccacagcagcacggtcagcggcgttaacggcggatcgtaagtgacgaagttgccgtaacgcgccaccatataatcgacaatctcttttttacttttaccttcctgcatcagttcatacactttctgacgcaggtcggtggcaatcatcgagttggaatcggcaatgctgttgttctggcatttcgggcagcgcagttcttcagtgagctgacggaactgttgttcctgtgcttcatctttaaaagcggcttgatctcttgtgcgcctttgttgatgcccgttcctgccgctggaagacgctgactgagccgacgacgcggcctgtccggctgacgtgctggctgcgcgtgctgagtccgcagcatcagccgcatgggttgccgcctcacgggctgatgtgctggcatcactggctgacttcttcgcggctgccgtgttctgtgccaccgcggacgcgttacgcgccacctcttccaccatcagttcaaaacggcgcagtgcctccggacgggcatcatcctccgtcatggcaccgagaaaatcattcagcgtaccgggttgagaatcttcatacacggtaatggtcccggcatgtgacggcgggaatccttccaccaacagaataacgctgtactgaccgtactcaacgtccatgctgtaacgcccggcttcatccggattttctgaggccagcgtgttcaccaccaccgtggtgctgttacgttttgctttcagctggattgtgcagttctgtaccggttttcctgtgccgtctttcagtacacctgaaatctttactgccat

SEQ ID NO: 143726 - DNA, 563 bp, Homo sapiens
ttgtgccatctcggttcctccgttgtcatctctgatgaagattttcgtcactccaccagcaataatttataaagcggttgattctcttcaaccaaatcggcaagcgtgtagttatccagttccgtaagaaaactttgcacggccttagaaagtgcctgtttcaacctacaggcaggtgtaatgtggcaaaactcactgctgcaattcaccagcgataagggctccacgtcgcgcaccacatcaccaatacgtatcgcactcgccggtttacccaggcgaatgccgccattttttccacgaacagcagtcacgtagccggcacgactaagttgattgattattttgaccatatgattacgggagacgccgtagacgtcagtcacttcagaaatactggtcatccgcccttccaggcgaatgccgccattttttccacgaacagcagtcacgtagccggcacgactaagttgattgattattttgaccatatgattacgggagacgccgtagacgtcagtcacttcagaaatactggtcatccgcccttctggcaatgacgccat

SEQ ID NO: 143727 - DNA, 1194 bp, Homo sapiens
atggcgtcattgccagaagggcggatgaccagtatttctgaagtgactgacgtctacggcgtctcccgtaatcatatggtcaaaataatcaatcaacttagtcgtgccggctacgtgactgctgttcgtggaaaaaatggcggcattcgcctgggtaaaccggcgagtgcgatacgtattggtgatgtggtgcgcgagctggagcccttatcgctggtgaattgcagcatacttcttcgaagatcgctgttgaaatggaatatgggaataaatgggagcctgttcttccggcttcgcatggcgacgaaaaatatgcgcgacatgccagctatccttgcggttaagtacatacggcagatggtaacgggtggtgcttttgccgaagccaataaaggcgcagttgatgaccatgatttcgtcctttttaaggagcgactcgccgatcgtcccggcatcaagcaactcgtcgcctgtattgatggagacgtcgtgggccatctcaccattgacgtgcaacagcgcccacgccgcagtcatgttgccgattttggtatctgtgtcgactctcgttggaagaaccgcggcgtcgccagcgccctgatgcgagagatgattgaaatgtgcgaccactggttgcggattaaacgaacatatctcggcacgcttaccttccggcacgctttgttcaggaaacgcttccggcaccacgcgtacccgacgccgcgagcgggcgtatatgacccaaccgccaatgccaatagccactactggcagcacccacatttggtgttgtatgggtgtggaggtttggcatgcgtgtttgttacgtttcgttgtcagtttgtgtttgttggtgtaattcctctattaccgggcgaacatgcgtgtattcgcaaaatctgtgatcgcccttcggtagagtaccccgtcccgtcagtgttcggggaccggtcctggaatcaagatccccacatccagcgcaaccgtgtgaccccacatcgcccgatgaatcacaacgttttcaactcggcgcgtaccgcggagtctcccagtgagatccgccctgtttcgtggtgcaaagagatgcaaatagtactggtcgcttttccgcatgccagcgccacgcagctaccgccaaattgtgaacgccagttgttcggtggcgtttctggttctccatcgcgccagatataa

SEQ ID NO: 143728 - DNA, 837 bp, Homo sapiens; identical to SEQ ID NO: 131815
  misc_feature (1)...(837): n = a,t,c or g

SEQ ID NO: 143729 - DNA, 4526 bp, Homo sapiens
tgattgctccgttagcaagcctgcccgccgaatatagaggatctgacaatgcctgatttttttaccccatttttggacaggcacgctatcgccgttttgcgctttatggcggcgcggaagcctgcgcgacccgcactgaacaacacacattattacagactgcccgcttgtggctcgcgcgtcataatgggagttttgatactgcggattgccggtttgatgtggcaaccttcaccgataatgagggtgagtggattaacgatgcctttaatgaccactcataattaaggtttaaggattaccgcgcaagaaagaattaaagcttgcttcactgaaagcattcaaactcaaattgcggcggcagaggcgcttccggacgccatctcccgtgcagccatgacgctggttcagtctctgctcaatggcaacaaaatcctctgttgtggtaatggaacttccgctgccaatgcacagcatttttgctgccagcatgatcaaccgtttcgaaacggagcggcccagcttacctgccattgcactaaatactgataatgttgtcttaacggcgattgccaacgatcgcttacatgatgaagtgtatgcaaaacaggtgcgggcgctgggtcatgcgggagatgtattgttagccatttccacccgtggcaacagccgcgatattgttaaagcagttggaagcccgccattaccccgtgatatgaccattgggggaattgacccggcttatgaaggtgggcgaaactttgcggtttttgttagggccacaggatgtggagatccgcattccttcgcatcgtagtgctcgcattcaggaaatgcatatgctgacgagtagggtgaagaatcatggaggcagttttggaatagcgtttgcaatctttgaagcaccttgtgtctgtcactttccagcactgggaactcaggggcttaattggacttacagttccatgtggctggggaagcctcacaaacatgatggaaggcaaggaccttcgcggttgattttcgctttaatgttacgcggagcaggagacgcccataccgaccgggcaggatgcgccgtgacgtggcaggcgaatcacgcggatgtcgtgagcgaagtatttaccaccaaactgcgcacccagaccaagattttgcgcttcgatcagcaattctttttccagttccacatcgcggaacgcctgaccgtgctcattcccttccgttggcagttcatcatagtatttcgcggaaggacgaagcgagcggaagtattatggtattacgtgcccctgtatcacgttattatagctgatcgaatctgcagccaaaaagaagaagaaggaggcaggaagagaaggaagagaggaggaggaggaggaggaggaggaggaggaggaggaggaagaagaggaggagagaagaagcaagcaagaggagaaaaacagggctgctttccctgtgatgcggccggctgggtcacctacctgcatcagattctgtacggagaaaatatcgtcaagttccgcttcagtcaacagaccgcgttccagaacgacttcacgtacactcttaccggtttcggcacagattttacccacgatgtcaccgttgtggtgaccgatgaacgggttcagattatggattactacgattccagtctggaaaccgccatcgatcatgataattaccttgagtttcaacaggttttatctgacatcggcgaggcgctggaagcgcgctttgtgctggaagataagctgattctgctgaccaatgcggtactgccgctgcgtctggaaaatgacgagttaattgtcggcagtgaagatggtattgacccggtttcgctggcggccctgacgcgtaaagtcggacgcaaagtgcgttacgtcattgttctgcggggacaaattgtcacagggttacgtcactggtatgcacgccgacgcggtcacgatccgcgggcaatgttgtacaatgcggttcagcatcagtggctcacggaacagcaggccggtgaaatctggcggcaatatgtgccgcatcagttcctgttcgccgaaatactgaccacgctcggtcatattaatcgttcagcaattaacgtgtgttattgcgccatgaacgcagttctctgccgctcggcaagttttggtcaccgaaggcgttatcagccaggaaacgttggatcgcgtcctgacaattcaacgcgaattacaagtttcgatgcaatcactattactcaaagcaggttgcgcaactggagtccgaaaatgaaggagaataaccttaatcgcgtcatcggatggtctggtttactgctgacgtctttattggagtaccagcgcactcgcagacaatattcggaccagcgcagaagagctggggctgagcgattatcccattttgttatttatccccgtctcgataaagcgctgaaggcacagaaaaataacgacgaagcaaccgccatccgcgaatttgaatatatacaccagcaggtgccggataatattccgctgactttataccttgcggaagcctatcgccattttggtcatgatgaccgggcgcggctgttgcttgaggatcaactgaaacgtcacccaggagatgcccgacttgagcgcagtctggcggctattccggttgaagtgaaaagcgttacgacagttgaagaactgcttgcccagcaaaagcgtgcgatgctgcgccgaccctgcgttgtcgcaagcgcaactgaacgatgcgacgtttgctgcatcgccggaaggaaaaacgctgcgaaccgatctgctgcaacgggcatctacctgaaacaatggtatggcacttcggtttttgaaggcatccgttgctacgactcgcacaaaggaccggttgtattccgccatcgtgagcatatgcagcgtctgcatgactccgccaaaatctatcgcttcccggtttcgcagagcattgatgagctgatggaagcttgtcgtgacgtgatccgcaaaaacaatctcaccagcgcctatatccgtccgctgatcttcgtcggtgatgttggccgggcagctccctggtatcttccgtgttcttcatgctgctgccggaacaggtttacgtttacgctggcagaaatcgcgattcagtccgctgattccgctgcggccttcggtatcgaaccgcgcgttgctatgctctcctactccaccggtacttctggtgcaggtagcgacgtagaaaaagttcgcgaagcaactcgtctggcgcaggaaaaacgtcctgacctgatgatcgacggtccgctgcagtacgacgctgcgcagaaaaaagcatcagacagtggttttattcagcagcaaaccaaagataatcagacacgcgacggtgagccagattggcgcaggcagaccgaaccagttggcgtaaccaagggcaaagaagctttcatcttcgataccgaccgtttaccgtctgaaatgatgtacgccagacctcgaacaatctctgaaagcggccggattcccggaaaaacaaatttatcagttaaacattggctgatcgtcggtatgaacgacagcaccgtgctgggcggcgtacgcgcgacggaaggtcagggctttaaagcggccgatatcatcggcattggcattaacggtgtggatgcggtgagcgaactgtctaaagcacaggcaaccggcttctacggttccctgctgccaagcccggacgtacatggctataaatccagcgaaatgctttacaactgggtagcaaaagacgttgaaccgccaaaatttaccgaagttaccgacgtggtactgatcacgcgtgacaactttaaagaagaactgggagaaaaaaggtttaggcgggggcgagtgatatacgttgaccacgcgactgatcgtcgcgtcgatttttcaccttcgtgtctgggattaacgctcacggaagatggaattcttactcaaggaaatgagcaagtttatattccacagaaagagttaggtgtattaatagtattacttgaatccgctggtcatgttgtactgaaagatatgatcatcgaatcagtatggaaaaatattattgttagtgacgagtccctgacaagatgtatctattctttgcgctgcatttttgaaaaaattggctatgatcgttgcatagaaacaatctaccggaaaggttatcgtttcagcgggcaggttttcaaaactaaaattaatgaagataatacttcagactattccatagctatattccctttcactacttcattgaatacactggatccattaatacttaatcaggaattagtgcaaatcatttcaaataaaaaaatcgatggtctctatacctatccgatggctgcgacaaattttggtaatgatcacatatctcaaaattcattcttgagcagattcaagccagattatttcgttacaggaagaataaaccagaataatgcagtgaacactttatacattgagttgatcgacgctaaaaaaactttttcctcatcgcagtaa

SEQ ID NO: 143730 - DNA, 1202 bp, Homo sapiens
atgacgctggttcagtctctgctcaatggcaacaaaatcctctttgtggtaatggaacttccgctgccaatgcacagcattttgctgccagctgatcaaccgtttcgaaacggagcggcccagcttacctgccattgcactaatactgataatgttgtcttaacggcgattgccaacgatcgcttacatgtgaagtgtatgcaaaacaggatgttaaggagaatacatgaaggcattatcgccaatcgcagtccttatttccgcgctgctgttgcaaggttgtgttgccgctgccgtagtgggtaccgctgctgtgggtaccaaagccgcaactgacccacgcagtgtcggcacccaggtggacgatggtaccctggaagtgcgcgtgaacagcgcattgtcgaaagacgaacagattaagaaagaagcgcgcattaatgtaacggcctatcagggcaaagtgctgctggttgggcagtcaccaaatgctgaactttcggctcgcgccaaacagattgctatgggcgtagacggtgccaacgaagtgtataacgagattcgtcagggccagccgattggtctgggcgaagcatctaacgatacgtggatcaccaccaaagtgcgttcgcagctcttaaccagcgacctggtgaaatcgtccaacgtgaaagtgaccaccgaaaacggtgaagtgttcctgatggggctggtgactgaacgtgaagcgaaagcggcggcagatattgccagccggaccacaggcggtccgagctctctcttctctctttcactctcttctcatgtctgctctgtctctcttgtgctccctctcctcatcttcctctccatctcatgctcatcgatgcctctgctttcttttatacacaggaacaaactctctggatgcgggaaatggagaggacacgagttcccccccgagcggtttacacccttttgtaccaccgctcgtggcccccgggttctcgcttagtcgccgtagcggaacccgtgccgagaggggaacccccgaaaccccgttctccccggcccccaatttcgcccgcccctcgcaattggtcgacaaccctttgcgcatccccattgcgggccacattcccctgggccaatccccaaaacccgtttccctaaggttttcacctgcgcagcatcaaactgtaagcctgaaaagcttccgctcctga

SEQ ID NO: 143731 - DNA, 723 bp, Homo sapiens
gtagttctgaaaaacatgtccgacttaagcctggaaacgacgctgtttaatgagaaattgtcgatgccggtgggctggctccggtgggtttgtgtggcatgtatgcgcgtcgtggcgaagttcaggcagccaaagcggcggacgcgcatggtattccgtttactctctcgacggtttccgtttgcccgattgaagaagtcgcgccagcatgcaagcgcccaatgtggttccagctttatgtactgcgcgatcgcggctttatgcgtaacgcgctgaagggttttcatgccttgcaggcctatcgcatcggtcactggttgtggaatcaggggcgtcgcgcactggcaatctttctgcaaaaccaggtttctgtgacgttccaggtcgatattcacccggcagcaaaaattggtcgcggtatcatgcttgaccacgcgacaggcatcgtcgttggtgaaacggcggtgattgaaaccgacgtatcgattctgcaatctgtgacgcttggcggtacgggtaaatctggtggtgaccgtcacccgaaaattcgtgaaggtgtgatgattggcgcgggcgcgaaaatcctcggcaatattcaagttgggcgcggcgcgaagattggcgcaggttccgtggtgctgcaaccggtgccgccgcataccaccgccgctggcgttccggctcgtattgtcggtaaaccagacagcgataacccatcaatgt

SEQ ID NO: 143732 - DNA, 2232 bp, Homo sapiens; identical to SEQ ID NO: 123426

SEQ ID NO: 143733 - DNA, 1344 bp, Homo sapiens
cagccaggcagttgaaatgcgatgcgatcgcctgattcaatacccttcgctaacatccagtttgccagacagctcgcggcgtgatcgagcgcgctataggtgtacgatgcaccatgattatcgaccacggcaattttgtctggcatcgcacgagcggtctgctgccagtaatcggccagcgaagcatcgccccataacccttgctgacgatacgccgcacgacgttgttcgttaaacgttaatgtcactttcatgttggactgcgcaggattgagatcaaaccgtccggtgtagaccagatccgccatctgcagcagtttgtctgactgccagttcgccagcgaattgcggtattcccattggctaatgaatgctggcagagattctggcttaacgcggaagaagttaacatcgacattattaacgttgagcgccattaccggcagcccttcaacgactttgccaggcagcagcgaaccacggctggcaaaaccgacgctgggttggatgtcgcgggtagttatagttttttcgtaatctttactgaaggttgcgttgttgagtgctttgacctccttgccaatagtaacgatcaaatcacgtttcggttcgaggtggcgtaaacgtaactctttaagattatctgacagctcccaggcaccatccactttgccgctttttttatcgacgacatgaataacgcgtgagaaatcctgatccgggtcgagagggatggagaacgtcagcaccagcgtggctgccaggcatgcaaacttcgcggacgctttcggtagaccaaaatacgccgccatgcagtggaatacctgcaccgatcggccggtaaatttcaactctttgctgctgacgaagacgttaatcagcaccgaggagacggaatacagtacgccgataaaaatcccggcgaggatgatcactttaacgaacgatttcgaaccgcctttgacgtcgttaacgtacacagcgacggactccgcgccacctgcggccataaagatccaggtggtaacgccgaggaacgcccagttgaagttcgggatcatcgcgtcaacggtgatggcgtcagcaggctgtacgccgccaaccagcgccgtacctgccagtaaaatgtaggagagcgttaacagcagcatcagcgttgaagtgacggaggtaattggccccaacattttcgccccgttggtggaaacccaggtggagaaggcgaacagcaccatactgataatggtggtggcaaccggcgtcataatatattcgtatccgaggaaggcatacgaagcataagcaataacgcgcggcaacagtaaggaaagggaagcgctttca

SEQ ID NO: 143734 - DNA, 1275 bp, Homo sapiens
agcgaaattacgcaagattcgctggtgcaggggctgtttaaagagttgcctgcggcactggctcccatggcgaaagggaatgcggcatagtcgtttgcgccccctcaccctaaccctctccctcagggagaggggaccgttcggcgctgtatgtactccctcactctgaaacgacaccgcactctttttttctccctcgcccctccggggagagggccggggtgaggggaaaaggccgcactgctcaccaattttctgctatcctgcccccgcactaagggggcagtatgctaaacatcgtactttacgaaccagaaattccgccaaatactggcaacatcatccgtctttgcgctaataccggctttcgtctgcatatcatcgaaccgatgggatttgcctgggacgataagcggctgcgccgcgcggggctggactatcacgagtttaccgccgttacgcgtcatcatgactatcgcgcgttcctcgaaccacaaaatccccagcgcctgttcgccctcaccacgaaaggtacacctgctcacagcgccgtaagctatcaggatggcgattatctgatgttcggcccggaaacacgcggcctgccagcgagcattcttgatgccctgcccgctgaaccaaaaattcgcattccgatggtgccggacagccgcagcatgaatctgtccaatgcggtctcggtagtggtgtatgaagcctggcggcagttggggtatccgggagcgcaccacggaacctgcgccaatcttcgcgccgcgcccaacttcaatattgccgaggattttcgcgcccgcgccaatcatcacaccttcacgaattttcgggtgacggtcaccaccagatttacccgtaccgccaagcgtcacagattgcagaatcgatacgtcgttttcaatcaccgccgtttcaccaacgacgatgggaggatcaccacgctggctactgcgccagggcgttttgcagaagctcatgccagccgtggttcgctgctgcctggcaaagtcgttgaagggctgccggtaatggcgctcaacgttaataatgtcgatgttaacttcttccgcgttaagccagaatctctgccagcattcattagccaatgggaataccgcaattcgctggcgaactggcagtcagacaaactgctgcagatggcggatctggtctacaccggacggtttgtcgcaccacctcacgcgtctgtgtccagctctcccagtcgcttgggcgaacggcacgcgacattttcgacca

SEQ ID NO: 143735 - DNA, 1054 bp, Homo sapiens
agtcccagctgtgctgctgctccacttgggaaggcaaacctggacaagctccgccattcaggaaagcttcaggcctacattgttctcgtggagctcgtgtgtaataggaaacgctgtggcgtccagatccactcttctcagcagctcagtgcatcttcgctgctgtcatctgcttcttcagagggagaggggagtgtgtggaaaaccatgctgcccaacagtccccggtctcttttcaacgctcttgaaccgttggcctctgatgacacagcgagtcctgaacatggagctcactttaccccaagaagaaggaagaacctcatcatttccccaaatggagcctcccacttcctcacctacaaatggatttggcagaactcctgtgtttgtttggcgttggaattaacgcactggctgctggggtgcgttttattcataaagcaaggctgtatgagcgagaaattaaagatagtctatcgcccattacaagaattgtcaccgtatgcgcacaacgccaggacgcacagtactgagcaggtggcacaactggtagaaagtattaagcaattcggctggactaatccagcgctgattgacgaaaagggcgaaattattgcgggtcacggtcgtgttatggcggctgaaatgctcaaaatggattctgttccggtcattgttctgtctggcctgacggatgagcagaagcagcgattacgatcagtatcgctcccgtaatgcattaatccgtcgccacattgagaaaatggatgccagtttgcacgtcggaacgaaggagtttgatatttcaaaggtttccgaggtggattctgttgatgatttactcattgataatgccgctcgttatctgctgaaagactggaaaggggttggtgaactggttaatggtgttgaggttgcactggaatatacggcagaacgagggatcgcgctgcttaagcagaatccagagttgtactggcagatccttgcagaagcagccagcatcgcccagggtaaagagcagcagaagcaggatacgataaaaaagccatag

SEQ ID NO: 143736 - DNA, 563 bp, Homo sapiens
atggcgtcattgccagaagggcggatgaccagtatttctgaagtgactgacgtctacggcgtctcccgtaatcatatggtcaaaataatcaatcaacttagtcgtgccggctacgtgactgctgttcgtggaaaaaatggcggcattcgcctggaagggcggatgaccagtatttctgaagtgactgacgtctacggcgtctcccgtaatcatatggtcaaaataatcaatcaacttagtcgtgccggctacgtgactgctgttcgtggaaaaaatggcggcattcgcctgggtaaaccggcgagtgcgatacgtattggtgatgtggtgcgcgacgtggagcccttatcgctggtgaattgcagcagtgagttttgccacattacacctgcctgtaggttgaaacaggcactttctaaggccgtgcaaagttttcttacggaactggataactacacgcttgccgatttggttgaagagaatcaaccgctttataaattattgctggtggagtgacgaaaatcttcatcagagatgacaacggaggaaccgagatggcacaa

SEQ ID NO: 143737 - DNA, 306 bp, Homo sapiens
ctgacgataaaaggcgttgaactttgcgttttggcgcaaattcagtgttaaaaccggaaattaagcgcggattcgaatattctgactgttgggtagacgacgcccgtctggtactcgccaacgcccagatggtggtgcgtaaaggcggcgaagtgcttactcggactcgcgccacctctgctcgccgcgaaaacggccggcaaaaaatatagctggcaagcgcgcggcttggaatcgctgagtcaaccggtagaacgactatcgccgtgatcgcacgagtcggcatcaacaggttcacgggcacac

SEQ ID NO: 143738 - DNA, 1944 bp, Homo sapiens
atggattatgcggttgataaaaaagcgatcgatacagctacgcgtcagacactgctcggcaatagcctggtcgttgtagcaccgaaagccagcgtgcagaaagatttcaccatcgacagcaaaaccaactggacttcactgctgaatggcggtcgcctggcggttggcgatccggaacatgttcccgctggcatttatgcaaaagaagcactgcaaaaactgggcgcatgggatacgctctctccgaaactggccccagcggaagatgttcgtggggcgctggcgctggtcgaacgtaacgaagcgcctctgggcattgtctacggttctgacgcagttgccagcaaaggggtaaaagtggttgccaccttcccggaagattcacataaaaaagtggaatatccggttgctgttgtggaagggcataacaatgcgacagtgaaagcattttatgattatctgaagggaccgcaggcagcggaaatctttaaacgttacggatttacaatcaacctgccgtttgggatcttttttgcctggttactggtgcgttgcacgtttccgggcaaagctctgctcgacagcgtactgcatctaccgctggtgttaccgcccgtggtcgtcggttacttattattagtttcgatgggacggcgcggatttatcggtgaacgtctgtatgactggtttggtattaccttcgcctttagtggcgcggcgcggttctcgtgccgccgtcatgtcgtttccgctgatggtttgatcaatgagagacttcagcaggagataatgtggcatggaaagaaggaaatctcgacttatcctgcggacgatttggaccgggatggcgatccatttacccgttggggcggccagctcctgcaactgttcggcgtccatgctgaagagtggggttactttaaaattatccatctggaaggatcgccattaacccgcatcgacgggatgatgatcctcggtatgtttggcggctgctttgccgcagcgctgtgggccaacaatgtcaaactgcgaatgccgcgcagccgtatccgcattatgcaggccatcattggcggcattatcgccggttttggcgcgcgtctggcaatgggctgtaacctggcggcgttctttaccggtattcctcagttctcgctgcatgcctggttctttgccatcgccactgccattggttcatggtttggcgcgcgctttaccctgctgcccatcttccgtattcccgtgaaaatgcagaaagtttctgccgcctcaccgctgacgcaaaaaccggatcaggcgcggcgtcgttttcgtctcgggatgctggtctttttcggcatgctgggctgggcgctgctcacagcgatgaaccaacccaaactggggctggcaatgctgtttggcgtcggctttggtttactgattgaacgtgcgcaaatctgctttacttcagcgttccgcgatatgtggatcaccggacgtacccatatggcgaaagcaatcattatcggtatggcggtgagtgccatcgggatcttcagttacgtacagttaggcgttgaacccaaaatcatgtgggcgggaccaaacgcggtaattggtggtttactgtttggttttggcatcgtgctggctggcggctgcgaaaccggctggatgtaccgcgcggtagaaggccaggtgcactactggtgggtcggtctgggcaatgtgatcggctcaacgattctggcgtattactgggatgatttcgctccggcgctggccaccgactgggacaaaatcaacctgctgaaaacctttggtccgatgggtggcctgctggtgacatatttgctgttgtttgctgcgctgatgttgattatcggctgggaaaaacgcttcttccgccgtgcgcaccgcagactgctaaggagatcgcatgaaaaatatcgttcctga

SEQ ID NO: 143739 - DNA, 4107 bp, Homo sapiens; identical to SEQ ID NO: 140363

SEQ ID NO: 143740 - DNA, 1374 bp, Homo sapiens; identical to SEQ ID NO: 118745

SEQ ID NO: 143741 - DNA, 2283 bp, Homo sapiens; identical to SEQ ID NO: 139127

SEQ ID NO: 143742 - DNA, 2130 bp, Homo sapiens
atggcgcggcgtgcagcgctggcgcgtgcgattgcgctggagccggatctcatcatgtttgatgaaccttttgttgggcaagatcccatcaccatgggcgtactggtgaagctgatttctgagctgaacagcgcgctgggcgtgacttgtgtggtggtttctcacgatgtgccggaagtgttaagtattgcggatcacgcctggatcctggcggacaaaaaaattgtcgctcatggcagtgcccaggcgttgcaggcgaatcctgatccgcgcgtacgtcagtttctggacgggatagctgacgggcctgttccgttccgctatcctgccggcgattatcacgctgatcttttaccagggaccgctgacttagatactgccagcaagctaacccgaactgaccgcccgcgcagcgttgagcatgaatgtccgaacgttgtgctggtgaaagataaaaaaacattctgttcatctgcgaccgcgacatctaaccaggaacaactggcccccagctcacgtgcacaacctaaaattgcgggcattcctctgaccgttcggctttatgcagatgactggacatggaacgatgtgtggtacgcatttttactgggcggcatgagtggaactgtcgttggcctgctctgctattacctgatgagcgtacgtatgcgccccggcagagaaatcatgaccgccatcaagcgcgaaccaattttacgtggcgtatcaaccggtggtggatacacaagcagtcgctgcgtgattccacgccggatcgaccgcgcaaagcggatgaataaacggatgcatatccgaggtgttcatatcgtctttttcgtaccaggtggcgagtggggcggtgaaagccagttcgtacacgtatctgcgaaagcgggtaccggtatcgatgaactgctggacgctatcctgctgcaggcggaagttctggagctgaaagcggtacgtaaaggcttgttcgatggcctgcacaaaatgcgggttatctggcagatcatcaccgaaaacttcacgcagggaaagcagggcggttacgcgttgttcactgctgctgcccgcaacaagttcgcgaattttatcgctaagcggatcgcgaacatcaatggcatttccggcatcatcaacgccgctgacaggatcccggcgacgaacccagatcctgaagtcttcagctgggcggcaacgcaagttgttacagcgatggaagcaacccataaattgggcggtgaaaactatgtcctgtggggcggtcgtgaaggttacgaaacgctgttaaataccgacttgcgtcaggagcgtgaacaactgggccgctttatgcagatggtggttgagcataaacataaaatcggtttccagggcacgttgcttatcgaaccgaaaccgcaagaaccgaccaaacatcaatatgattacgatgccgcgacggtctatggcttcctgaaacagtttggtctggaaaaagagattaaactgaacattgaagctaaccacgcgacgctggcaggtcactctttccatcatgaaatagccaccgccattgcgcttggcctgttcggttctgtcgacgccaaccgtggcgatgcgcaactgggctgggacaccgaccagttcccgaacagtgtggaagagaatgcgctggtgatgtatgaaattctcaaagcaggcggtttcaccaccggtggtctgaacttcgatgccaaagtacgtcgtcaaagtactgataaatatgatctgtcctacggtcatatcggcgcgatggataccacggcactggcgccgaaactcgcagcgcgcatgaccgaagatggcgagctgcgactaacgcatcgcgcaccgcccaaaggaagatcgtcctgggtcatgacaaccgcggacgcctggcacaagcctaaatgctcacgcccagaaacgcaacttaagcgcaccatgcagcgcgatgatgtaactcgcgagcatgtcgaacaaatccttgctgctcaggcaacgcgcgaagcccgccttgccgtggcagatgacgtcattgataataacggcgcaccggatgctatcgcatcggatgttgtatatacccataatggcaacgtgcaaattcagacatattttctctga

SEQ ID NO: 143743 - DNA, 2530 bp, Homo sapiens
ggggcgcagtacggcctctttttcctgcaacttttggtgcgcgcgggcaacgttaatgctttcgaactgatccatgcgtctctctttctttacaaacaagtgggcaaatttaccgcacagtttacgtcgaagcggcagataaacgccataatgttatacatatcactctaaaatgttttttcaatgttacctaaagcgcgattctttgctaatatgttcgataacgaacatttatgagctttaacgaaagtgaatgagggcagcatggaaaccaaagatctgattgtgatagggggcggcatcaatggtgctggtatcgcggcagacgccgctggacgcggtttatccgtgctgatgctggaggcgcaggatctcgcttgcgcgacctcttccgccagttcaaaactcattcacggtggcctgcgctaccttgagcactatgaattccgcctggtcagcgaggcgctggctgaacgtgaagtgctgctgaaaatggccccgcatatcgccttcccgatgcgttttcgcctgccacatcgtccgcatctgcgcccggcgtggatgattcgcattggtctgtttatgtacgatcatctgggtaaacgcaccagcttgccgggatcaactggtttgcgttttggcgcaaattcagtgttaaaaccggaaattaagcgcggattcgaatattctgactgttgggtagacgacgcccgtctggtactcgccaacgcccagatggtggcgttggaaaagtgtaattcaatcgtcgcctttgtggtttgccacacgtcagatgagccgtgcaattgtttgccacaggtgtacggttctgatgagaacgcgtcgctaacagcgtactggtattctggtggtgttcagggcgtgtgcgcgctcctgccgggtcatcatcgcgtgcccgggcttctgtatgccggttcagccgcagcggtttcgggcctcctgcgccagtttggtatccgcctggacgttcaggttcgccttataccgatcctcgctcagttcgccggtatctctgtgctgctgggtgtgtgggcgtttagtcgtccgtggcaccagcctggtaaggcactggcgttggcgaagcgtaaagcagatgtcgcatttgagtttttccacaagttacatgtgccattttattgcttccacgatgtggatgtttcccatgagagcgcgtcgttaaaagagtacatcaataattttgcgcaaatggttaatgtcctggcaggcaagcaagaagagagcggcgtgaaagtgctgtgtggaacggtcaactgctttacaaaccctcgctacggcgcgggttacaaaacgctgttaaataccgacttgcgtcaggagcgtgaacatctgggccgctttatgcagatggtggttgagcataaacataaaatcggtttccagggcacgttgcttatcgaaccgaatccgcaagacccgaccaaacatcaatatgattgcgatgccgcaacggtctatggcttcctgaaacagtttggtctggaaaaagagattaaactgaacattcaagctatccacgcgacgctggcaggtctctctttccatcagggtaccaagctcgagcctttaaaaaaagggtggctcaactgtggaaaaggacgatcgttgcggtccttttggttattacgcaacgtggcaaaaggggtatgtgtgcaaaggcgattaagttggcaattcaaacacgcctggttgattaaattctgggcccccatccctgcggtcatcgcgtcgggtattctctctacctactattttggcataactggcaccttttggactgtcacgggtgaatttacccgttgggggcggccagctcctgcaactgttcggcgtccatgctgaagagtggggttactttaaaattatccatctggaaggatcgccattaagccgcatcgacgggatgatgatcctcggtatgtttggcggctgctttgccgcagcgctgtgggccaacaatgtcaaactgcgaatgccgcgcacccgtacccgcattatgcaggccatcattggcggcattatcgccggttttggcgcgcgtctggcaatgggctgtagcctggcggcgttctttaccggtattcctgggtaccgagctcgaaattcgaatcccggtaaagaattctgccaggttacagcccattgccagacgcgcgtcaaagctggcgataatgccgccaatgatggcttgcataattcggatacggctgctcggcattcacagtttgacattgttggcccacagctattcggcaaaccagccgccaatcatcgcgaggatcatcatcccgtcgatgcggtaaccccactcttcagcatggacgccgatcagttgcaggagctggccgccccaacgggtaaattcacccgtgacagccccaaaggtgccagtaatgccaaaatagtaagtatagagaatacccgccgctatgaccgcagggatgggggcccagaatttaatcaaccaggcgtgtttgaaatgctgccatga

SEQ ID NO: 143744 - DNA, 398 bp, Homo sapiens
ctgtgcgcccggatgtagtagcgcatatttccgaccatgtgttctatgccaacgccaataaagcagccacgccgctggtgagtgcggaagtccgtgagaacccaggtatttatccgctgcggatgttcgtgcgaagctgttcactctgaaagtgcaggatccgaaaatcgaccgtgcaaatcctacgatggtcaacatgcggtggatgatgtcagcctgaccatctacagactctagagatccccggtaccggctcggttcggacctagctcgaatctggagctcactcataggtgggaattgaccaatgagaacacctggacacaggaaggggacctcacacactcgggcctgttgtggggttgggggaggggacgggatagcattaggagatatac

SEQ ID NO: 143745 - DNA, 723 bp, Homo sapiens
ggttcgaggctgcatcctggcttgcagctttttatccgagcgcgcccatcggctcatcgagcagtaatagtttcggggcgttcgcaaggcttcgtgccagggccacacgttgtcgctgaccaccggaaagctgatgcggtttgcgtttggcgaactcctgcatatgcaccaggccgagcatctcattgacccggctggcaatttccgctttcggtagtttgtcctgtttcaggccaaaagcgatgttctgttccacggtcatatgcggaaacagcgcgtaagactgaaacatcatattgatggggcgcaggtaaggcggaacctgtgacaaatcgacgccatcaagcattatctgtccggcagaaggttgttcgaaacctgccagcatacgcagcagcgtggacttgccacagccggatgcgcccagcagcgcgaagatttctcctttgtagatggtcaggctgacatcatccaccgcatgttgtccatcgtaggatttggtcaggttgcggatttctaatagcggcgtcagcgcattacgggttttcgctgcgggcgagggatagcgtcattcacggctgctctccggcattgaatgtgtgcaagcgcaccataatggtgcgaattgccggcgggtgtggtgcgccctccggcatctacgactgcggattattttccgctcttcactttggtccacggcgggtgcgcacacggtcgattttc

SEQ ID NO: 143746 - DNA, 441 bp, Homo sapiens
atgatgggcgtacccagcgtgctggcccctaccgttgaggcgatcgtcgccgtaccaatgttgataatcaccgaagttcgcacgcccgccagaatcaccggagccgccagcgcgccagtttatattcatcgcgataacaaagtaccagcgcctggagcatccactattgtggcagagacttggaattctgccataaagcctcattgtctgaccggattctacaaacccaccggcggcaccattttactgcgcgatcagcacctggaaggtttaccggggcagcaaattgcccgcatgggcgtggtgcgcaccttccagcatgtgcgtctgttccgtgaaatgacggtaattgaaaacctgctggtggcgcagcatcagcaactgaaaaccgggctgttctctggcctgttgaaaaagcagtctgcagtcgactctcgatga

SEQ ID NO: 143747 - DNA, 1425 bp, Homo sapiens; identical to SEQ ID NO: 131751

SEQ ID NO: 143748 - DNA, 2859 bp, Homo sapiens
atgagtcaggaaacgcccgcttcgacgactgaagcgcagattaaaaataaacgccgtatctcacctttctggctgctgccgttcatcgcgctaatgattgccagttggctgatttgggacagttatcaggaccggggtaataccgtcaccatcgactttatgtcggcggatggtattgttccaggccgtacgcctgttcgttatcagggcgttgaagtcggaacagtgcaggatatcagcctcagcgacgatcttcgtaagattgaagtcaaggtcagcatcaagtccgatatgaaagatgcgctgcgcgaagagactcagttctggctggtgacgccaaaagcatcgttggcaggtgtctccgggctggacgcctcgtcgacggcgcagcacatcattgaccgaggtcgactgccagcggtcgatatcctgacgggtcacaacggtggttggtgcaagcacacgtctgcgcggctgttcaaaacggttagcagtaacgacgagagtatccgggctggtatcctgtgcccaagcggaaaatgccgtgacggaacacgccgtcagcagcgaagcttttttaatcattgtaaagcatccacaatagaagaaggatgccgcaggtttcatcaatattacgcgatgatgagaaccagatgcgacgttggccggcaggtcttcgggcttggaggggtatctaagatactaagagatgatgacttcccaccgaatggcagtgtccgcataacgcaatcatcgcacctttccttaccgctgcgcgtcacgtccagattcgcactggattccctattaactcacaggaccggcaagtggatgctacaggttgtaacaagatacatcatgacccccgaacaccttccaacagaacagtatgaagcgcagttagccgaaaaagtggtacgtttgcaaagtatgatggcaccgttttctgacctggttccggaagtgtttcgctcgccggtcagtcattaccggatgcgcgcggagttccgcatctggcacgatggcgatgacctgtatcacatcattttcgatcaacaaaccaaaagccgcatccgcgtggatagcttcccccgctgcagtgtacttatgcaccagttgatgacggcgatgattgcggaaaccggtattaaagtcgtctacgatgttttcgactctaacgaagtactggaaggcaaattaatggccgggagtaccggctttgatctggtggttccatctgccagctttctggagcgccagttgactgcgggagttttccagccgctggacaaaagcaaattgccggagtggaagaatctcgacccggaactgctgaagctggtcgccaaacacgatcccgacaataaatttgctatgccctatatgtgggcgacgaccgggattggctataacgttgataaagttaaagcggtgctgggcgaaaacgcgcccgtcgatagctgggacttgatcctcaaacctgaaaatctggaaaaactgaaaagctgcggtgtctctttcctggatgcgccagaagaagtttttgctaccatcccaacagcactaaagcggatggtgattggggaccggcactcgatccgcctttaccatcctaatccggagaaaattggttatcctatgcagttcaccaaacagggcgcgctggagaaaggggagagctacttcattaccgggaaagggtcaatggggatggcgatgcgcgccaaaacgccaatctttgatgacgatggaaaagtcatcggcgtggtgtcgattggctacctggtgagtaaaatcgatagctggcgggctgagtttttattaccgatggcaggtgtgtttgtcgtgctgttagggattctgatgttgctgtcgtggttcctggccgcgcatatccgtcggcagatgatgggcatggagccaaagcaaatcgcacgcgtggtccgtcagcaagaggcgctgtttagttcggtttatgaagggctgattgcggtggatccgcatggttacattaccgccatcaatcgtaacgcaagaaagatgctggggctgagttcccccggacggcaatggttgggtaaacccattgttgaagtggtcaggcccgccgatttctttaccgaacagattgatgaaaaacgtcaggatgtggtggcgaactttaacggtctgagcgttattgccaaccgggaagctattcgttcaggtgatgatttgctgggggccattatcagctttcgtagtaaagacgaaatttccaccctcaatgcgcaactgacgcaaataaaacaatacgttgagagccttcgtacattgcgacacgagcatctcaattggatgtcgacgctcaatggtctgttgcagatgaaagagtatgatcgcgtgctggcgatggtgcagggggagtctcaggcccagcaacagcttattgacagcctgcgcgaggcgtttgccgatcgccaggtggcggggctgctttttggtaaagtgcagcgcgcccgggaactggggctaaaaatgatcattgtccccggtagccagctttcgcaactgccgccaggactggatagcaccgagtttgcagccattgtgggcaatttacttgataacgccttcgaagccagcctgcgtacgcatgaaggggacaagatcgttgaattattcctcagcgatgaaggcgatgatgtggtgattgaagtcgccgatcagggctgcggcgttccagagtctctacgagacaaaatatttgagcagggggtcagtacgcgtgctgacgagcccggtgaacatggcattgggttgtacttgattgccagctacgtaacgcgctgcggatggtgttatcactctcgaagataa

SEQ ID NO: 143749 - DNA, 1407 bp, Homo sapiens
tcagaaggcaggggctgtgcaagtgttgttgtctttgtggtcatcattgtctgctgctgctgctggcacctcgttgctcaaggagccacagtggagccagcgcattgaagcactgggggacactgggaagattactgaacaaggcttatccaacacagctattttctccataaggcacaccatggccttcttgcactcaggatcactagacagaccttcagcactacattcggggactattttaagcggcaaaatcacctctgacatctgctgtccacatttctgatcccctggaaggccttgttcaaagcaacactgggctgaaatgttggtgcaccatgtgtgtttgccgtgtcggtgcacataagcagacagacgcgtcagggtgttgcggccccagccgagtagccgcgccgcttcctgtttatgcccctgcgtatgtcgcaacgcggtcgtcagtaacgtccgctccagctctggctgcgcttcggaaagcagattttgatgaccggaacgcagcgctctgtctgcccactgcgcaagaagcgtcgcccagctgtccggttgcatttgcgaagtactctccgcaaccgttgattcaaacagttcgccgggcaaatcctgaatcaacacttcctgcccggcggccatcaccgttagccagcggcaggtgttttccagctggcgcacgttgcgggcgagcagcttgagatcttccgcaaagtaatcagcgaagtgcaaatcccactgtttctcaataggggcgtaatccagacggaagttgcagatgagcgacttaatcacatcgcggcgaatacagtcatcacgcgttagcgcaataccacgccacagcgcattgccttgttcatccacttgctgatagtactgcttcaactctttctggttctgcgcgtagcagtcgccaatcatgctgatggcggaaacgcccatccccagcagatcggtatcgccctgagtggtgtagccctggaagttacgatgcagcacgccttcacgctgggccaccgccagctcgtcatccggacgggcaaagtgatccataccgataaactgatagcccgattgcgtcaggaaggcgatggtttcctgcaggatatcgagtttttgctgcggactcggcaggtcagcatctttgattttgcgctgagcagcaaaaatggtcggcagatgcgcgtagttaaagacactcagacgatcggggttcagctccgccacacgtttcagggtaaaggcgaaactctccggcgtctgtttcggcaggccgtaaatcaggtcgatgttggtggaggtaaaaccaatctcacgcgcatggttaagcagtgcaaagatgaaggggatccacagtagcccctgcccagccagacatccttttaccagaggcaccat

SEQ ID NO: 143750 - DNA, 1494 bp, Homo sapiens
ctaccgcgcacgaataaaactgccatccggctggcgggtgaacaggacctgttgattattccccgtatcaatggttaagcccgtcaccacgccgctggcgttctggcggattttcaccatctgcccgttttgcaaattactcagcggcttacccgcgccttctacctgcgccattgcatagacatcggtagcgggcagtccgtggtcgcggaacagctgcgccatcgttttaccgggttcgacacggtaagagcgccattgattatcaattccgctatctggctggaatggttgcgtttgggtagtttgcggctgctcttctggctggccttcctgtataggttctggagcgaccggagccacctgatcaggatcattttgtggggtaactaattgcgcccgcagctgttcttctgtcggcggttgtgattgcgactgaatatctaactgcgcttcacgcgtcaccaccggcgcgttgggcgtatcattctgccagccataacggggtgtcgaagaccagttcagcaaggttatcttcacttccccgcttaacgccgtaccggtgacgaccagcccggcaccttttacggtaaatgcgcggtcaatcgcgaggcggaaactatgttggctggcgtgctcgcgttccggcaactgaagcagatgctcgcgcagggcatccattccccgaccttcggttgctgcggtgataaacagttttgcctggggatccttagagtcgtcttttgggggagataacatctccagccataattttctctccgacgcttcattcgccagcagcgcatcaccagtatcggaaagcactacatggccgttttccagcacgtagccgcgatccgccagctttagcgcctggttggcgttctgctcgacgagaaagatagtcatcccctgctcgcgcagctgctcgatggtgtcgaaaatttgctggatgataatcggcgcaagaccgagcgatggctcatcaagcagtagcaaacgcgggttgctcatcagcgcacgaccaatcgccagcatctgctgttcaccgccggacatggtgcccgcccgctgaatacggcgctcatgcagacgtggaaacagctcatacacccactttatgcgctcctggaactggtcgcgttcagcaaaaaaaccgcccatcgccaggttctcttccaccgtcatccgcgagaagacgcgacgcccttccgggacaatcgccaccgcttcgcgcatgattttcgctgtctgccagtcggtaatgtctttatcatcaaacacaattcgcccgctggtggcacgcggatcgccgcataacgtgccgagcaagggggttttccccgacccgttcgggccaataagcgtgacaatctcgccctgattgatatgcaggctcacctcatgcagcgcctggattttgccgtagtgggcgctgactttgtcaaaggacaacatgactttttccatcttatgcctcacctaaataggcac

SEQ ID NO: 143751 - DNA, 496 bp, Homo sapiens
ttttttcatgcaaaagtgttgttttttattttctttcttgggccagctgcagcttccaaccaagaaaacctcaaagcattagggaaggagcaggtgtggggctggggtggggagaatcccctaagctccagggcccagggtctaacctgagaggtcggggctgcaggaagctggtctcagcggactacatgtgctttagagcttggctctctctgagcagatgggacaggaagacgggcactggggggctgggtggggcttagcgcaggtcctcctcatcgccctggatggtcttcttgatgcgcaaggcattgggtgggtgagccactggtccagccgggagatgggagtcgtattccttcaccgactcggtgtagctgtccacattctgctcctcgtgggcctctagcaattttttcatcaacttgcattcccgggaatcagagaaagctgggaacagctcctcatacttttggacagccagcttggcgttgag

SEQ ID NO: 143752 - DNA, 732 bp, Homo sapiens
agagtgggctgggggacaaaagtgggagagagagagaaaccggcctcatgactcagctggtcaggagatagggggccagatgctgacccccaaatccccggcagcacccctagcaaataggtctgttatcaaaagattctgttacagctggtttttgggggtgaaggggcacctatggggggcttaaataaatggaacaaggggcaaaggatgtagcgagaacagagggtgacttgtccggccagccagcctgggcctctggcgcccctgcatgctgaccccccggtgccaccctgcccactgtggcccgcgggactccccagatgggaaaggagggaagctctccagcaaagtctctggccccgcctctctgtgaacagatgggacaggaagacgggcactggggggctgggtggggcttagcgcaggtcctcctcatcgccctggatggtcttcttgatgcgcagcagcatggtggtgagccactgggtccagccgggagatggagtcgtattccttcaccgactcggtgtagctgtccacattctgctcctcgtgggcctctagcaattttttcatcaacttgcattcccgggaatcagagaaagctgggaacagctcctcatacttttggacagccagcttggcgttgagcatgtcgatgcagaagtggcagagggccgccttgaagaagtagtctttggcgctgtactgaggagggggctgtccatg

SEQ ID NO: 143753 - DNA, 4437 bp, Homo sapiens
atgtcgcgtatccgctgtttttctgcgcgagccatcagataccaggcgataaatccgacaattccgaccgcgccgaggatcaatgttgccagggcgttgatttccggattcacccccatccgcacgctggaaaagaccagcatcggtaacgtggtggctcccggcccggaaacaaagctggcgatcaccagatcatcaagcgacaaagtaaaagccagtaaccagccagaaatgatcgcgggcatgatcatcggtagcgtaatgacgaaaaacactttcagcggcgtcgcaccgagatccatcgctgcttcttctatcgagcgatccagttcccgcaatcttgaagaaataacgaccgccacataagccgtacaaaaacatcgttccaacgccgtttaagaacctatacaaaataacaggacgacacgctaacaaagtccaccgcagccgatcttcattaggtcatgacgttcacgatgccgatgacacatcgattcctgccgatgttgaagaaaaactgctgcgctttgcccgcgccggtttggccgtcgccagcatgaaaggtaaaagctatctgtcgctgggcggcgtttcgatgggtatcgccggttccattgttgatcacaacttctttgaatcctggctgggaatgaaagtccaggcggtggatatgaccgaactgcgtcgccgtatcgatcagaagatttacgacgaaagccgaattggaaatgggcactgggcctgggctgataaaaacttccgctatggcgaagatgaaaataacaaacagtatcaacgtaatgccgagcaaagccgcgcagttctgcgcgaaagtttactgatggcgatgtgtatccgcgacatgatgcaaggcaacagcaaactggccgatattggtcgcgtggaagaatcacttggctacaacgccatcgctgcgggcttccaggggcaacgtcactggaccgatcaatatcccaatggtgacaccgccgaagcgatcctcaacagttcatttgactggaatggcgtgcgcgaaccctttgtcgtggcgaccgaaaacgacagtcttaacggcgtggcaatgctaatgggtcaccagctcaccggcaccgctcaggtatttgccgatgtgcgtacctactggtcaccagaagcaattgagcgtgtaacggggcataaactggatggactggcagaacacggcaatgctgcgatcccaaatttcctggcagatgcgccgagtcgttccacgctcaaactggaagaggcatttcatgtgtttattcctgcggatgagtgggatgaacgcctggcgaacgggatgtgggcggtggatttaggcgcttgccctggcggctggacctaccaactggtgaagcgcaacatgtgggtttattccgtcgacaacggcccgatggcgcaaagtctgatggataccggacaggtgacgtggctgcgggaagacggtttcaaattccgtccgacgcgcagcaatatctcctggatggtatgcgatatggttgaaaaaccggcgaaagttgcggcattgatggcgcagtggctggttaatggctggtgccgtgaaaccattttcaacctcaaactgccgatgaaaaaacgctacgaagaagtgtcacacaatctggcgtatattcaggcacagcttgatgaacatggcataaatgctcagattcaggcgcggcagttgtatcacgatcgcgaagaagtgacggtgcacgtccgccgcatctgggctgcgagcacaagacaaaagagacaaagcacacgaagagatgataacacgataacacaagaggagacagaaaagagaagaacagaagagaaagaagaacacggaaaagcacgaatcacctggaaggtttaccggggcagcgaaattgcccgcatgggcgtggtgcgcaccttccagcatgtgcgtctgttccgtgaaatgacggtaattgaaaacctgctggtggcgcagcatcagcaactgaaaaccggactgttctctggcctgttgaatacgccatccttccgtcgcgcccagagcgaagcgctcgaccgcgccgcgacatggcttgagcgcattggtttactggaacacgccaaccgtcaggcgagtaacctggcctatggtgaccagcgccgtcttgagattgcccggctgcatggtgacgcagccggagattttaatgctcgacgaacctgcggcaggcataagatggaaaaagtcatgttgtcctttgacaaagtcagcgcccactacggcaaaatccaggcgctgcatgaagtgagcctgccttatccatcagggcgagattgtatgctgattggttacgaactcgaattcgtacctggtatagctgttcctgggggaattgtaacaggtccattccccgtactagagcggaacctaagtgtaccggaggctaagatgggaacccgtattggtgggaaggcgttcaggaacccgtggccggataagaggacccggacaacaagccagtgccagcaggcccaggtggcagctgcagatctcactgctcactgcggagcagcagcctttgccgcctcagcccacagggtgccagccccaataacaggggttccccagttgtgcaacagccccccgttgtcaaccacgcggcaaccggccaccaaggccggcgatagtttggacgcgcggagcagaaatcgtccatcgtgcacccgctgttcgccgggcgtcacgtcagccaattgcactggggcggcggaacgccgacgtatctgaataaagcgcaaatcagccgcctgatgaagctgctgcgcgaaaacttccagttcaatgccgatgcggagatttcgatcgaagtcgatccgcgggaaatcgaactggatgtactcgatcatttacgcgccgaaggctttaatcgcctgagcatgggcgtgcaggacttcaacaaagaagtgcaacgtctggttaaccgcgagcaggatgaagagttcatctttgcactgcttaaccatgcgcgtgagattggttttacctccaccaacatcgacctgatttacggcctgccgaaacagacgccggagagtttcgcctttaccctgaaacgtgtggcggagctgaaccccgatcgtctgagtgtctttaactacgcgcatctgccgaccatttttgctgctcagcgcaaaatcaaagatgctgacctgccgagtccgcagcaaaaactcgatatcctgcaggaaaccatcgccttcctgacgcaatcgggctatcagtttatcggtatggatcactttgcccgtccggatgacgagctggcggtggccagcgtgaaggcgtgctgcatcgtaacttccagggctacaacactcagggcgataccgatctggacgcgggactgttctcgtgggggctatatgtgggcgacgaccgggattggctataacgttgataaagttaaagcggtgctgggcgaaaacgcgcccgtcgatagctgggacttgatcctcaaacctgaaaatctggaaaaactgaaaagctgcggtgtctctttcctggatgcgccagaagaagtttttgctaccgtgttgaattatctcggcaaagatcccaacagcactaaagcggatgattacaccggaccggcaacagatctgctgttaaagctgcgcccgaacattcgttatttccattcatctcaatacattaacgacctggcaaacggcgatatttgcgtcgctatcggctgggcaggtgatgtctggcaggcgtcaaaccgcgcgaaggaagcgaagaatggcgtgaatgtctcgttctcgattccaaaagaaggggcgatggcgttctttgatgtattcgccatgcctgcggatgccaaaaacaaagacgaagcctatcagttcctgaattacctgctgcgcccggatgtagtagcgcatatttccgaccatgtgttctatgccaacgccaataaagcagccacgccgctggtgagtgcggaagtccgtgagaacccaggtatttatccgcctgcggatgttcgtgcgaagctgttcactctgaaagtgcaggatccgaaaatcgaccgtgtgcgcacccgcgcgtggaccaaagcgaaaacccgtaaggcgctgacgccgctattagaaatccgcaacctgaccaaatcctacgatggtcaacatgcggtggatgatgtcagcctgaccatctacaaaggtgaaatcttcgcgctgctgggcgcatccggctgtggcaagtccacgctgctgcgtatgctggcaggtttcgaacaaccttctgccggacagataatgcttgatggcgtcgacttgtcacgggtgaaggaatacgactccatctcccggctggaccagtggctcaccaccatgctgctgcgcatcaagaagaccatccagggcgatgaggaggacctgcgctaa

SEQ ID NO: 143754 - DNA, 1293 bp, Homo sapiens
gggttttttttttttttttttgcaaaagtgttgttttttattttctttcttgggccagctgcagcttccaaccaagaaaacctcaaagcattagggaaggagcaggtgtggggctggggtggggagaatccctcaagctccagggcccagggtctaacctgagaggtcggggctgcaggaagctgggggaggctcccggggctgggggaagaggagcctgcccccagcagaaacagcaggtctcagcggctacatgtgctttagagcttggctctctctgagcagatgggacagcgaagacgggcactggggggctgggtggggcttagcgcaggtcctcctcatcgccctgggatggtcttcttgatgcgcaagcaatgggtggttgagccactggttccagccggggagattgaagtcgtattcccttcaccgactcggtgtagctggtccacattctgctccccgtggggcctttagcaatttttttcataaaccttgcattcccgggaatcagagaaagctgggaacagctcctcatacttttggaaaagccagttgggcttgaagcatgtccatgcaaaagtggcaaagggcggccttgaaagaagtaatctttggcgctgtacttgaggaggggggtgtccatggcattggtccccacctgttcgtagatgtcaatggccttctgatactgctccagcagcgcagcgtaaccagccaccttcagcagacacttgttggctgaggctgttggactcctcgcctttgtagtagtctgcagactgctcgtagtgggcaatggccttctcgatgtccaccaactctgtctcatagatctcagcaatggagatgtggtgcttggccgcaatcgtgaatcggcccatgtctgtgtagatctcgattgctcgcatcaaacagttaatggcctcttgggggtcggctttcttgaatgcgttgccagcgtccacaaagcaggtggctgcgtcgtgcttgctctggagctgcaggtgcagctgtgcagcctggcagaacgcgtttccagcagcactccagtttttggccattttgaacatgtttgctgctctggcgtagatttcgcatgcttcctctattttggatgagcctccaaagaggccagagaagaaggactgcgagttcttcactttgcgctccgcctcggccaacagcgccatcgcctccgcttccttcccggaattgtccatggcggccacaaagggactcagcaaagcgcctgaccctgaccctgggaagactcagccgccgggccgc

SEQ ID NO: 143755 - DNA, 756 bp, Homo sapiens
atgctggcgctcgatcagcgcgaagccatgcgcatgatctttcccgccggctggggcacccgctccggccctctcgccttatgcctccggcgaattctggtagatcaacaattctgctaccgccaggtggttgagcaaaacgcgattgccaaaagttgcgccatgattgtcgccgccgatgagttcattcctggcaacggtattccggtcgatagcgtggttattgaccgcaaaatcaatccgctacagatcaaacaagacggtggcaaagccttaaaactgctggtgctgtggcgtagtgatgaagatgcgcagcaacgtctggatatggtgaaagagttcaacgaactgtgccactcacacggtctggtaagcatcattgagccagtcgtccgcccaccgcgtcgtggcgataaattcgatcgcgaacaagcgatcatcgatgccgccaaagagctgggcgacagtggcgctgacctctacaaagttgaaatgccgctttatggcaaaggtccgcaacaagagcttctctgtgcttcacaacgtctgaatgaccatatcaatatgccatgggtgatcctctcttccggtgtcgacgaaaaactgttcccgcgtgccgtacgcgtggcaatgacggcgggcgcatcgggattcctggcaggccgtgcagtctgggcatcggtcgtcggtttaccagacaacgagctgatgctgcgtgacgtttgcgcaccgaaatcgggagaaccaatcctatag

SEQ ID NO: 143756 - DNA, 837 bp, Homo sapiens
atgaccgcgttaagttgcatgatctcgaccatcgttgaaggattactcggtggcctggtacacagcatcctgatccgccgcgggcgcactgataaagtctttaaccccattaccgccggtgccgtcacgttcgtcgctgaaatggtgcaaatgctgatcatccttgcgatcgcccgaccttatgaagatgcggtgcgtctggtgagtaatattgctgcgccaatgatggtcaccaataccgtcggcgcggcgctgtttatgcgtatattgctcgataaacgcgcgatgtttgaaaaatacacttcggctttttctgccactgcgctgaaagtggcagcctcgacggaaggcattttgcgccaggggtttaacgaagtgaacagcatgaaagtggctcaggtgctgtatcaggaactggatattggtgcagtcgcgattaccgatcgagagaaattgatggcctttaccggaattggtgacgaccaccatttacccggcaaaccgatttcttcaacttatactttaaaagcgattgaaaccggtgaagtggtctacgctgatggcaacgaacgcacaccaggtggcgctcatgcccgaaacgtcgccagcggaacagacggtgatgaaaaccgtaataatgcatcagacgaccagcaagcaaaacgatgccgcaaatatcaggtagatcaacagcaaaatattgtatattacaaaatagctagaaaagaggcttatgaatgttgtaagcgtgattttagcgcagcgggcggcagctcgtcggtaaagagcgcagtgacctgtgccacgttaccaatttcaaccgccgccgaagcatga

SEQ ID NO: 143757 - DNA, 2106 bp, Homo sapiens
atggcattcgctacacttttaggaatgttgcaagattacgctaaccgattaattgcacgctatagcaacccggcgttacgtcatcgaacctggcagattgcgatggatggtagccagaaattgccacagcggatgttggattctgttcgctggcatctggcgcatgacagcaagttcgatctgctggcgctgggcgtcgcgggttggatgcgttatgtcggtggtgttgatgaacagggaaatccgatagaaatcagtgacccactgttacctgttattcagaaggctgtacaaagtagtgccgaagggaaagcgcgcgtccagtcattgctggcgattaaggcgatctttggtgatgatttgccagacaatagtttgtttactgcaagagtgacggaaacttcatgccgagacgaatcacgtccagtggtgccactttctcttcacaaccttcaacaactacggtttttccgcggcggatttgctcagcggtcagaccttcagtatcaatcgacaggatcttgcagtgtgaccggtgccgctaaccataacacggctgcacatgttgatttccgtaacggtacgatccagtcagtctcctccaaacagaaagtcaccggtttggacttcattcctgggctccaccccatcctgaccttatccaagatggaccagacactggcagtctaccaacaggtcctcaccagtatgccttccagaaacgtgatccaaatatccaacgacctggagaacctccgggatcttcttcactcatacggcggctgccagttcagggtatacatcgcatctccttattcatccgctttcagcataaacgttattcagacgctgcgcttaactttcatattccggttgtcgcgacggcaacatttcgctaaagtcacgccccttcttcaccggcatggggattatttcgtgtttattggttttgattacggtacagcaaactgttcagtggcggtcatgcgtgacggtaaaccgcatttgctaaaaatggaaaacgacagcacgctgctgccttcaatgctttgcgcgccaacgcgtgaagcggtaagcgaatggctgtaccgccatcatgatgttccggcagacgacgatgaaacgcaggcgctgttacgtcgggcgattcgttataaccgcgaagaagatatcgatgttacggcgaaaagcgtgcagttcggtctttcctcactggcacagtacattgatgatccagaagaagtgtggtttgtgaaatcaccaaaatcgttcctcggtgccagcggcttaaaaccgcagcaggtagcgctgtttgaggatctggtctgcgcaatgatgttgcacattcgccagcaggcgcaggcacagctgccagaagcgattacatcagcgcccaactacattccggggctgattgcggtggtcgggtgtgatggcaccggtaaatccacactgaccaccgacctggtgaaatcgctgcaacaacactggcaaaccgagcggcgctatctggggctgctctccggcgaagacggcgacaaaatcaaacgattgccgttggttggcgtctggctggaacggctcatgcctgtaatatcatctctatccgaggctatggcagtgatgaagatgcgcaaacgtctggatatggtgaaagagttcaacgaactgtgccactcacacggtcttgtaagcatcattgagccagtcgtccgcccaccgcgtcgtggcgataaattcgatcgcgaacaagcgatcatcgatgccgccaaagagctgggcgacagtggcgctgacctctacaaagttgaaatgccgctttatggcaaaggtccgcaacaagagcttctctgtgcttcacaacgtctgaatgaccatatcaatatgccatgggtgatcctctcttccggtgtcgacgaaaaactgttcccgcgtgccgtacgcgtggcaatgacggcgggcgcatcgggattcctggcaggccgtgcagtctgggcatcggtcgtcggtttaccagacaacgagctgatgctgcgtgacgtttgcgcaccgaaattacaacaacttggcgatatcgtcgacgaaatgatggctaaacgccgctaa

SEQ ID NO: 143758 - DNA, 1101 bp, Homo sapiens
ttatgtgtcacctgtaatgagtgccgttaggataatggcacctaatctattgacggaatcgatatcgatagcccattgcttggatagcaaataggaactgatcgccagactggcccctgccagcagcggccccagcgttaaaatcatccagtacacggcgaacgagtaaatttttggtcgcgctcgtttactgcgccagatggtattcaacgcgctatcgatggagtacatcaacaataacgcggtgacgatcagcccgcacgccccaacggcggtcatcttgttggaattggcaacaaattgttcgatataccgctgaataacatcgccagtagcaggcagaaagttggcaaaaataaagtgacgtaactgaatgctgacgtcggaaaacatgggaaaagcggcgaaaagcgcaaaaacaacggcaaccagcggcacgcgccacgctttatagcggttaatcagaccattggtcgagctatcgtggctgctgatttctttatcatctttcagctctggcagaatacggttcgccagctgtttacccagttccacgccccactggtcgaaggtgaagatgttcaggatcacgccctgagtaaagattttgtgctcatacagcgcaatcaacgcacccaggctgaacggagtgatttcacgcagcaggatggagttggtcgggccgttaccttcgaatactttgaacggcaccacgtagtcaagcgttgccggatctttacccttgacacgatattcctgctcaaccacttcgcggaatttaccaaacgccagcgcttccggctggtttttagcgatatccaggttgatgtttttcagggcatggaatttgccgtagtagaagttcaaattacgaaccccggcccaggccaattgctgccattccgcaaacgggctcatcgcaaacttaaagatcgtcaccggcaggttggcgatcggctgcatcatgtccgtgctccagaactggttggagagcgcggtaaacagcagcggcgcggtttcaccagcaatacgggcaatcgccagcaggataccggtcataatcccggacaccgacgctcttagcgtaatcgcagagatcat

SEQ ID NO: 143759 - DNA, 2061 bp, Homo sapiens; identical to SEQ ID NO: 122953

SEQ ID NO: 143760 - DNA, 2388 bp, Homo sapiens; identical to SEQ ID NO: 131931

SEQ ID NO: 143761 - DNA, 3131 bp, Homo sapiens
ttagacatggcgttgagctagagaaacgctgacacgcgtaccgtgcagacaggaaatgtgaaatgccccacccagcgccgtaacgcgctcgcgcattccggtgagcccaaaaccttgttgcccggaacccggcggcaaaccgctgccatcgtcttcaataaccagcatcaaccgttcatcctgctgccagccttgcagggtgaccgcgctggcatcagcatgtttcacaatgttgttcagcccttcctggcagacacgaaacagcgtcacgcgctggttttcgcttaacgctgattcatcgattcgccattcgagatggctgacaataccgcgcccttccagctccatttcccgcatcagtgagcggatggcctgctccagggtgagatcatccaactggcgcggacgtaaccgacccaacaaacggcgcaccgcgtcgtaaacgcccagcgatagttgttcgatgagctgcccgctctgcttcacgctggcgttatctgccgccagccgctgaacaatgcccgcctgagtacgaatagcagtgatggtctgaccgatatcatcatgcagctcacgcgccacatcacggcgcacgctctcttcggtttccagcaaccgttcagccagatgctgattgcgcgccagttccttttgcagcgactggttaagttcacgcaaccgcctgtcagactttgcaccagcagcgagagcaataaatccaccggatgatcgcgccaggtttgactggcgatcagcgcgatggcgttcccgtgctaactcatctcgctgttggtaattttcccccgtaagttgatttcctccccggaaaagaagtccccaaagggtgaacccctccttcccccggattttgaagcctggccaccctcttcccgttgatacccgcaaggatcccgcatcacaccctgtgcgaacagggaccgggacggacatagacacctcaatccgtgggaaccgtacaaacgcgggattatgatcggctttgattccagcatggattacgcatggatatatcgttcgatactggaaagcgtggcgctgacgtttgcgaagcatgtgatcattactggcggcggttcgaacagcgatctgtttatgccagatttttgccgacgtgttcaaccttccggcacgagaacgccataacggttgtgcaagccatgtgagaaagattgggataagcgggtccaacccacgagtgagtcttcccgtggttatggtgtagccagaatgccgcaaacttgccatgcctaagcgaactgttgagagtacgtttcgatttctgactgtgttagcctggaagtgcttgtcccaaccttgtttctgagcatgaacgcccgcaagccaacatgttagttgaagcatcagggcgattagcagcatgatatcaaaacgctctgagctgctcgttcggctatggcgtaggcctagtccgtaggcaggacttttcaagtctcggaaggtttcttcaatctgcattcgcttcgaatagatattaacaagttgtttgggtgttcgaatttcaacaggtaagttagttgctagaatccatggctcctttgccgacgctgagtagattttaggtgacgggtggtgacaatgagtccgtgtcgagcgctgattttttcggcctttagagcgagatttatacaatagaatttggcatgagattggattgcttttagtcagcctcttatagcctaaagtctttgagtgactagatgacatatcatgtaagttgctgataggtttccagttttccgctcctaggtctgcatattgtacttttcctcttactcgacttaaccagtaccaacccagcttctcaacggatttataccatggcactttaaagccagcatcactgacaatgagcggtgtggtgttactcggtagaatgctcgcaaggtcggctagaaattggtcatgagctttaatcgcgtcgcggttaggtacgcggatggtaggaacaatgctgtacagcaaccagaaggagatccacgacaacagcaacggaaaaatacgcagcacgttgtcgatgacagtattgagatcgctcgcccagcgcagggagagcaaataggaactgatcgccagactggcccctgccagcagcggccccagcgttaaaatcatccagtacacggcgaacgagtaaatttttggtcgcgctcgtttactgcgccagatggtattcaacgcgctatcgatggagtacatcaacaataacgcggtgacgatcagcccgcacgccccaacggcggtcatcttgttggaattggcaacaaattgttcgatataccgctgaataacatcgccagtagcaggcagaaagttggcaaaaataaagtgacgtaactgaatgctgacgtcggaaaacatgggaaaagcggcgaaaagcgcaaaaacaacggcaaccagcggcactaatgagagcaacgacacataggcaaggttacctgccagggttgtcatgttgtcctcatcaatgcgttgccagagtagttttagccaggcccatagtggacgggtacggtgcctggctttgtcctgaatggtttttagcataacaccttcgcgaaatagtccgggatggtggttttatctttcaccagaatactggtaatgcccagctgattggctccttctatattgctttgtccccgcggaatacctccagccaacctggccaagccctggcccaggtgaaaaagggcgctccaagatcgggccattcccttgcccggcacgcgagcgcataaccactgttccgtaacagcatgtttgtctttttgcccagcgaagctgacttcacgggcatgaattttcaggaatttcgccagtgcatccgccacaaaacgggtattgcagccgtttttgaggattctaaccagaatatgctcaccttcaccatcaggctcaaagccgggatcgcagtgccatgtttggattgatgttctcacggccatcaaggtcacataccagaagaaggctgtttccattcctattgatttcagcgacaacgctacgtactccgccgaaccaccaaatatagcattagcgaccgcatatgacagaccaacgcctaatgcgcgaacctgtgccgggaacat

SEQ ID NO: 143762 - DNA, 2358 bp, Homo sapiens
atgttcatgattttcaaagaagatgaacttatcggcgttatctcgtttaatcgtattgaaccactgaataaaaccgctgaaataggctactggctggacgaatctcatcagggacaggggatcatttctcaggcgctgcaggcattgattcatcattacgcccagtctggtgaacttagacgcttcgtgatcaaatgtcgggtggacaatccgcaaagcaaccaggtcgctttgcgcaatggttttatccttgaaggttgcctgaaacaggctgagttcctgaatgatgcctatgatgatgtgaacttatacgcgcgaatgccattttctggtttccatccttcccctgagaagcccctgtgtccctctgcacctgagcaccacacccttacgcctagcaatggacctgactggcttgagcggattcccaattcccttgagccaatcagcatagtgttggcccagcaactggtattgggtaaggttggccacgcgaatgtgcggttttttattgccgaaaaaccgggtgccgatcccgtctggtggtttggcggtggcttcgacttaaccccattctatggttttgaagaagatgctattcattggcatcgcaccgcccgtgacctgtgcatgccatttggcgaagacgtttatccccgttacaaaaagtggtgcgacgaatacttctacctcaaacatcgcaacgaacagcgcggtattggcgggctgttctttgatgacctgaacacgccagatttcgaccgctgttttgcctttatgcaggcggtaggcaaaggctacaccgacgcttatttaccaattgtcgagcgacggaaagcgatggcctacggcgagcgcgagcgcaatttccagttatatcgtcgcggtcgttatgtcgagttcaatctggtctgggatcgcggcacgctgtttggcctgcaaactggcgggcgcaccgagtctatcctgatgtcaatgccgccactggtacgctgggaatatgattatcagccaaaagatggcagcccagaagcggcgttaagtgagtttattaagagaggaccacgtctctcgggtatacctttttctgacattccgatcgtgatggtgacggcaaaaatcgaagagaagggcagcactgcatgcagctgcatgcattatgtcgactctagaggatcccagcagatagatgacaactggccagatgtaactgaaatcaggaacagtgcatataacgagtttgtgggcactgggggtgttgccgtggtttccgtcggccacagggatatcggcgtgctgcgcagacgtgataaggcgctcgtcggtgacgacccgtccgcccgacaaatgggttcgccaatggcgagcaatttattgcagcaagggcatcaacttcgcgtctttgatgtgaacgccgaagctgtgcggcatctggtagacaaaggtgcgactcccgccgccaacccggcgcaggccgctaaagatgccgaatttatcattaccatgttgccgaatggcgatctggtgcgcaacgtgttgttcggtgaaaacggcgtttgcgaaggcttatctaccgatgcgctggtcattgatatgtccaccatccatccgctgcaaaccgataaattgattgccgatatgcaagccaaaggcttcagcatgatggatgttccggtaggccgtacttctgcaaatgccattaccggtactctgttactgctggctggcggcaccgctgaacaagttgaacgtgccacaccgatcctgatggcgatgggcagtgagttgatcaacgctggcggtccgggcatggggatccgcgttaagctcatcaacaactacatgagcatcgcgctcaatgcgctttcggcagaagccgccgttttgtgcgaagccctgaatcttcccttcgatgttgccgtcaaagtgatgagcggtaccgccgccgacagtgtccggcatttggtagtcaaaagcgcgactcccgcagccagccaggagcagaccgctaaagatgctgacttgatctatgccatgtccccgaatgtcgatctagtgcgcaccgtgttgttcggtgaaatcggcgtttgcaaaggcttgtcgcgtaatccgttgttctttgatatgtccaccatccttccgatgccaaccgataaattgattgcctatatgctagccaaaggtttcagctcgatgcatgttccgctagcccgtatttttgcgaatgccaacattggccgtgtgcaggtgctggctgacgccatcgttgtacaagttgagcatgccaatccgatcatcctgggagtgcaatgtgagtatatcaacgttggcgctcagcgctttaccaaccccgtatag

SEQ ID NO: 143763 - DNA, 2976 bp, Homo sapiens
  misc_feature (1)...(2976): n = a,t,c or g
gggccttcagcggcgtccttgtggctgattttcgtgctgattatcggtaccaagcgttggggcgattaagagcgatggcgcggtgatggagtttgatgtaaacgaagctaacgtggtaaaaccgaaaatggcgcacgcgagaaatattgtggctggtcgccggtcacactaagtatcatccttgggcggcggttgaaattggtaacgtggcccaggtcattgcgctctttaccgacgagctgccggcccgctgcgctaaaatcacgcttacaagacagccaaattgaaatcattcttccccaggaagacgcgtagatttttgtgaccgttaacctggcttcataccttgccacatagccaaacccatcctttcccgctacagttaatttcttgtggcgcgaaaggaggcaaaaatgctctatatctttgatttaggtaatgtgattgtcgatatcgactttaaccgtgtgctgggagcctggagcgatttaacgcgtattccgctggcatcgcttaagaagagttttcatatgggggaggcgtttcatcagcatgagcgtggggaaattagcgacgaagcgttcgcagaggcgctgtgtcatgagatggctctaccgttaagctacgagcaagttctctcacgggctggcagccgtgtgtttgtcgcgctgcgcccgaaagtgatcgccatcatgcataacctgcgtgagcaggggcatcgcgtggtggtgctttccaataccaaccgcctgcataccaccttctggccggaagaatacccggaaattcgtgatgctgctgaccatatctatctgtcgcaagatctggggatgcgcaaacctgaagcacgaatttaccagcatgttttgcaggcggaaggtttttcacccagcgatacggtctttttcgacgataacgccgataatatagaagggagcaaatcagttgggcattaccagtatcttggtgaaagataaaaccaccatcccggactatttcgcgaaggacaaagccaggcaccgtacccgtccactatgggcctggctaaaactactctggcaacgcattgatgaggacaacatgacaaccctggcaggtaaccttgcctatgtgtcgttgctctcattagtgccgctggttgccgttgtttttgcgcttttcgccgcttttcccatgttttccgacgtcagcattcagttacgtcactttatttttgccaactttctgcctgctactggcgatgttattcagcggtatatcgaacaatttgttgccaattccaacaagatgaccgccgtggggccttttcttgatgtgancgcagaagctgtgcggcatctggtagacaaaggtgcgactcccgccgccaaccgcgcgcaggccgctaaagatgccgatgttatcattaccatgttgcagaatggcgatctggtgcgcaacgtgttgttcggtgacagcggcgtttgcgaaggcttatctaccgatgcgctggtcattgatatgtccaccatccatccgctgcaaaccgataaattgattgccgatatgcaagccaaaggcttcagcatgatggatgttccggtaggccgtacttctgcaaatgccattaccggtactctgttactgctggctggcggcaccgctgaacaagttgaacgtgccacaccgatcctgatggcgatgggcagtgagttgatcaacgctggcggtccgggcatggggatccgcgttaagctcatcaacaactacatgagcatcgcgctcaatgcgctttcggcagaagccgccgttttgtgcgaagccctgaatcttcccttcgatgttgccgtcaaagtgatgagcggtaccgccgccggtaaaggtcacttcaccacttcctggccaaacaaagtcctcagcggagatctttctcccgccttcatgatcgatcttgcccataaggatcttggcatcgcccttgatgtcgccaaccagctgcatgtgccaatgccgctgggggccgcctcacgggaggtttatagccaggcgcgcgcagcgggtcgcggtcgccaggactggtccgccattctggaacaggtccgtgtcagtgccgggatgactgccaaatacaccatcaacgacattacgcgcgcatcgggcggttttgccatgctggcggtcgatcagcgcgaagccatgcgcatgatgtttgccgcggctggggcacccgctccggtagccgatagcgttttaactgatttcaaagttaacgctgcaaaggccctctcgccttatgcctcggcgattctggtagatcaacaattctgctaccgccaggtggttgagcaaaacgcgattgccaaaagttgcgccatgattgtcgccgccgatgagttcattcctggcaacggtattccggtcgatagcgtggttattgaccgcaaaatcaatccgctacagatcaaacaagacggtggcaaacccttaaaactgctggtgctgtggcgtagtgatgaagatgcgcagcaacgtctggatatggtgaaagagttcaacgaactgtgccactcacacggtctggtaagcatcattgagccagtcgtccgcccaccgcgtcgtggcgataaattcgatcgcgaacaagcgatcatcgatgccgccaaagagctgggcgacagtggcgctgacctctacaaagttgaaatgccgctttatggcaaaggtccgcaacaagagcttctctgtgcttcacaacgtctgaatgaccatatcaatatgccatgggtgatcctctcttccggtgtcgacgaaaaactgttcccgcgtgccgtacgcgtggcaatgacggcgggcgcatcgggattcctggcaggccgtgcagtctgggcatcggtcgtcggtttaccagacaacgagctgatgctgcgtgacgtttgcgcaccgaaattacaacaacttggcgatatcgtcgacgaaatgatggctaaacgccgctaa

SEQ ID NO: 143764 - DNA, 2662 bp, Homo sapiens
atggtggaagtcatcgagccgttttaccccaaggctggtaatggccggcgaccttatccgctggaaaccatgctacgcattcactgcatgcagcattggtacaacctgagcgatggcgcgatggaagatgctctgtacgaaatcgcctccatgcgtctgtttgcccggttatccctggatagcgccttgccggaccgcaccaccatcatgaatttccgccacctgctggagcagcatcaactggcccgccaattgttcaagaccatcaatcgctggctggccgaagcaggcgtcatgatgactcaaggcaccttggtcgatgccaccatcattgaggcacccagctcgaccaagaacaaagagcagcaacgcgatccggagatgcatcagaccaagaaaggcaatcagtggcactttggcatgaaggcccacattggtgtcgatgccaagagtggcctgacccacagcctggtcaccaccgcggccaacgagcatgacctcaatcagctgggtaatctgctgcatggagaggagcaatttgtctcagccgatgccggctaccaaggggcgccacagcgcgaggagctggccgaggtggatgtggactggctgatcgccgagcgccccggcaaggtaagaaccttgaaacagcatccacgcaagaacaaaacggccatcaacatcgaatacatgaaagccagcatccgggccagggtggagcacccatttcgcatcatcaagcgacagttcggcttcgtgaaagccagatacaaggggttgctgaaaaacgataaccaactggcgatgttattcacgctggccaacctgtttcgggcggaccaaatgatacaccactcgcatctcgccataacgactgcgtttgcgaatgagcctgtgccccagaaagataaagccgtcattaacatgggggattttagtcttatccatgttcagcctgagtttcagactgccttcgagcacaccccgacactcctccctgatggcttccacctgtgctttggtgcctttgacgatgaggacaaaatcatcggcatagcggcagtacgccaccgcgggtttccactgccagttttctctgaccgccgtacttcggccccgttggatactgttattccagtaccaccgatcttttctggctttcccgctcaggtagcgctcatgcaggatcttggcatcgcccttgatgtcgccaaccagctgcatgtgccaatgccgctgggggccgcctcacgggaggtttatagccaggcgcgcgcagcgggtcgcggtcgccaggactggtccgccattctggaacaggtccgtgtcagtgccgggatgactgccaaatacaccatcaacgacattacgcgcgcatcgggcggttttgccatgctggcggtcgatcagcgcgaagccatgcgcatgatgtttgccgcggctggggcacccgctccggtagccgatagcgttttaactgatttcaaagttaacgctgcaaaggccctctcgccttatgcctcggcgattctggtagatcaacaattctgctaccgccaggtggttgagcaaaacgcgattgccaaaagttgcgccatgattgtcgccgccgatgagttcattcctggcaacggtattccggtcgatagcgtggttattgaccgcaaaatcaatccgctacagatcaaacaagacggtggcaaagccttaaaactgctggtgctgtggcgtagtgatgaagatgcgcagcaacgtctggatatggtgaaagagttcaacgaactgtgccactcacacggtctggtaagcatcattgagccagtcgtccgcccaccgcgtcgtggcgataaattcgatcgcgaacaagcgatcatcgatgccgccaaagagctgggcgacagtggcgctgacctctacaaagttgaaatgccgctttatggcaaaggtccgcaacaagagcttctctgtgcttcacaacgtctgaatgaccatatcaatatgccatgggtgatcctctcttccggtgtcgacgaaaaactgttcccgcgtgccgtacgcgtggcaatgacggcgggcgcatcgggattcctggcaggccgtgcagtctgggcatcggtcgtcggtttaccagacaacgagctgatgctgcgtgacgtttgcgcaccgaaattacaacaacttggcgatatcgtcgacgaaatgatggctaaacgccgctaagatgaggataaaaggaatgaaatggtttaacaccctaagccacaaccgttggctggaacaggaaaccgaccgcatctttgattttggtaaaaattccgtagtgccgactggttttggctggttaggcaataaagggcaaatcaaagaagagatgggcacccatctgtggatcaccgctccagctgactacggcggcccgcgcggctcactccccgcagttcgtcccgtgcgcgaccggagcctggagtttgcaaaacagagcgatgagcacattctggacttagtgcacgacttggcgagcaatgatgaatgcaagacaatctgcgcgcgacatatgactgcgtgtcgcccctggaagcgtgttaagtataaaatggataacaattacgaccacgatcaacataacatggtggatgatgaagagctggctgaaaacatctga

SEQ ID NO: 143765 - DNA, 432 bp, Homo sapiens
ggaggagtgcaaggcgctgctgacgggctcaacaagacgactgcgtgctaccaccacctggtgctgaccgtggtggctcggcggactcgcagaacctgcggcaggagctgcaaaagacgcccagaaggcgcaggagctggcggtgtccacctgcgcccggctgactgcttgctgcgcgaccggggcctggccgccgacgagcgcgccgagttcgagcgctctgggtggccttctcgggctgcctggacctgctggaagcggacatgcacgctcgctggagctgggcgccgcgttcccgctgcacgcgccgcggcggcgctggtgcgcacaggagcgcggggggggttgcgaccccaggaagccctggccgccatccttttcggcgccgtgctgctggcggctgtggccctgccgtgtgcgtggcgaagctga

SEQ ID NO: 143766 - DNA, 876 bp, Homo sapiens
atggagttaccccatcagcaaggatcaccgttttcgcttcaatcacatcgccatcggttctacaccgacgactttgccatcgcgctgtacgaggttatcgacgcggtcccggtaattaactgcgcgcccgcttcttcggcctgctccatcagccagcatcaaatttactgcgcaaaacggagtaagaacgctgggatggcgaggaataatgtgttccagactgtgggcatagagacgcccgccgggacgttcttggcacctgcggaattgccacgctcgataactaacacttgccaccttcgcgggcgagcaccagtgcggcaaccgaaccggcaagccctgcccgacgatgatggcgtcaaagatatcttcggacataagagctccctgtcgcggcagggccaaaatgcagccctgccagagtggatcaacgcgctaaagtgcggtcagcgccggaaggatcttcacggcgtcgccaacaatgccgcctacactagcgacggaggacgcaaaattattgaggagttggcgttggacgcccacaacgcgttgattgataatcgtacgcgcgctagaggtattaccttttacaccactcacacaggaccctatctcggggacacacataagtccattggggctattaatcaaggggacatcacgatagccccgaaccaagggcgaacagacccccatccagtcaaattctttgcacagatatggtacctaccaaccatagtgctgggcgctattgagtattttgttctcgctttatctggcgacgctggttctcgctggcggattaaacgtcgattacgccgtacttcgcggcatactttgcttattctccttcgcctaaaggaactttatggataa

SEQ ID NO: 143767 - DNA, 3126 bp, Homo sapiens
atgcgcaactgcctcaaccagctgataacggaaccgagcgtcgcctccgcgatgtttgaataccgttttggtggcaatggcgaactttccggtcataatctcggaaacttgatgttaaaggcgctggatcaccttagcgtgcggcctctggaagccatcaatttaattcgtaatctgctgaaagtggatacgcatttgattccaatgtcagagcatcctgttgatctgatggcgattgacgatcaggggcatgaagtttacggcgaggtcaatatcgaccagttaactacgccgattcaagagttattgttaacgcctaatgtacccgcaacgcgtgaggcggttcacgctatcaatgaagcggatctcatcattattgggcctggcagtttttataccagcctgatgccaattctgctgctgaaggaaatcgcccaggcattacgccgcacgccagcgccgatggtttatatcggcaatctggggcgtgagttgagtttacctgcggctaatttgaagctggaaagcaagctggcaattatggagcagtatgttggtaaaaaggtcattgatgcggtcatcgtcgggccaaaagtggatgtctcggcggtgaaagagcggattgtgatccaggaggtactggaggccagcgatattccgtatcgtcatgaccgccagttgttacataacgcgctggaaaaggcgttacaggctttagtcttcttcgctatcctgttacgatgccgcgataaacagctcacgcagctgatgcaactggtcacgaatttgcgccgcgttcttcgaactccagattctgcgcgtgttgcatcatcaacccttccagctcatggattgttcgtgctgccgacgctgtatgtcttcccccggctaaatattccgtatgccctgccgcctgctattaagcggaatcggtggtcaccgcggacttacatcgttctatgccgggtaactgatccagaaaatggcgaaagtgggcgtgaaaacccgctgttcctgctcgatgagatcgacaaaatgtcttctgacatgcgtggcgatccggcctctgcactgcttgaagtgctggatccagagcagaacgtagcgttcagcgaccactacctggaagtggattacgatctcagcgacgtgatgtttgtcgcgacgtcgaactccatgaacattccggcaccgctgctggatcgtatggaagtgattcgcctctccggttataccgaagatgaaaaactgaacatcgccaaacgtcacctgctgccgaagcagattgaacgtaatgcactgaaaaaaggtgagctgaccgtcgacgatagcgccattatcggcattattcgttactacacccgtgaggcgggccggttaagcacgttactgctcgataagtcattaaaacatatcgaaattaacggcgataacctgcatgactatctcggtgttcagcgtttcgactatggtcgcgcggataacgaaaaccgtgtcgggtataaacgtgtgatggatcgttgtgcgctcgagctagatgtgtggcgtcgtgtccttgcttatgttgatctgaattattatcacgatccccattcgacggaaattgaagaggatgtcagcactatcagtgacgattcggtgaagctacggggtgaaataaaagtgggagtcacgggcaatatcagtcagcgagtgtccctgcgcggcagcgtggcgtggcagaaagggagtgatgattttgcccagacggcagggtttttgtcgatgacgatggctgaagaggctctggggacgagtttcaagaggttatgtgcgcattatagccggatgcgatgctggcgcatcttatccggcctacggggagccaggccgaataaaatcgtatgccggataaggcgtttacgccgcatccggcctattttaaggctgcgttttccccggcattcgcgggtcgtctttatattcggcggtggcaatccacgccgcgcaaaacagcgtcaaacgggcgaagaagtagaaaaatgccatcagccccagcacggaaccaaatgctgcgccagagggggatttcatcaacgatggcagggtgtaggtcatcacgattttaatcacttcaaaaccaatagcagccagaaatgttccgcgaatcagggcttttttgcgcggacggtggcgcggcaaccgccagaagatccagaagaaaagcagatagttggcgaagatggaaatcgccaggccaatcaatcgccacgtcggtttcagccactcaatgctgttcaggtgcagggcgctaataatcatttgctgcgccgaaccggcaaccgaggtgatcgaaagcgtcacaatcagcgcaatcaacaaaccaatcagcgaaataaatctcgcagatattttacccagacttgggatctcctcgtcttgtctcctcggcgtatgacggaagcactgctctggcagcatgagaccagacatgcgtacaacgcgcaggggctggcgaaccgctgtataccggacagcctgcccgccgtggaatggctgacctacggcagcggttacctggcaggcatgaaactcggcgacacaccgctggtggagtacacccgcgaccgcctgcaccgggaaacgctgcgcagcttcggccgttatgaactcaccaccgcttatacccctgccgggcagttacagagccagcacctgaacagcctgctgtctgaccgcgattacacctggaacgacaacggcgaactcatccgcatcagcagcccgcgccagacccggagttacagctacagcaccaccggcaggctgaccggcgttcacaccaccgcagcgaatctggatatccgcatcccgtatgccacagacccggcaggtaaccgcctgcccgacccggagctgcacccggacagcaccctcagcatgtggccggataaccgtatcgcccgtgacgcgcactatctttaccggtatgaccgtcacggcaggctgacagagaaaaccgacctcatcccggaaggggttatccgcacggatgatgagcggactcaccggtaccattacgacagtcagcaccggctggtgcactacacgcggacacaatatgaagagccgtctaggtcgaagtaa

SEQ ID NO: 143768 - DNA, 850 bp, Homo sapiens
cggtagcgccgagcgagtcacggaccatgaagagcgttcgtgccgcgcggcccaaggccgggatgggggttagccacatcctgccgcgctgagggggaggctaacgggcgcgggcggccgggcccagccggagcccaccgcgatggcgagggaggagtgcaaggcgctgctggacgggctcaacaagacgactgcgtgctaccaccacctggtgctgaccgtcggtggctcggcggactcgcagaacctgcggcaggagctgcaaaagacgcgccagaaggcgcaggagctggcggtgtccacctgcgcccggctgactgctgtgctgcgcgaccggggcctggccgccgacgagcgcgccgagttcgagcggctctgggtggccttctcgggctgcctggacctgctggaagcggacatgcgacgcgcgctggagctgggcgccgcgttcccgctgcacgcgccgcggcggccgctggtgcgcacaggtgtggctggcgcctcctccggcgtggcggcgcgcgcgctgagcacccgcagcctgcggctcgaggcggagggcgacttcgacgtcgcggacctgcgggagctggagcgcgaggtccttcaggtgggcgagatgatcgacaacatggagatgaaggtcaacgtgccccgctggaccgtgcaagcccggcaggcggcgggcgccgagctcctgtccacggtcagcgccggcccctcctcggtcgtgtccttgcaggagcgcggggggggttgcgaccccaggaaggccctggccgccatccttttcggcgccgtgctgctggcggctgtggccctagccgtgtgcgtggcgaagctgagctga

SEQ ID NO: 143769 - DNA, 1315 bp, Homo sapiens
ccagtgccaaagccttgcatgcctccagttcgactctaaaggatttcagccacatggtgggcgttaaccggctccgcaaaccattttcgcccatcaataaagataaaaatgcgccgatcttccagtacgcggattacggcattgttggcgacgccgtgaagatccttccggcgctgaccgcagctttagcgcgttgatccactctggcagggctgcattttggccctgccgctgacagggagctcttatgtccgaagatatctttgacgccatcatcgtcggtgcagggcttgccggttcggttgccgcactggtgctcgcccgcgaaggtgcgcaagtgttagttatcgagcgtggcaattccgcaggtgccaagaacgtcaccggcgggcgtctctatgcccacagtctggaacacattattcctggtttcgccgactccgcccccgtagaacgcctgatcacccatgaaaaactcgcgtttatgacggaaaagtcagcgatgactatggactactgcaatggtgacgaaacctcgccatcccagcgttcttactccgttttgcgcagtaaatttgatgcctggctgatggagcaggccgaagaagcgggcgcgcagttaattaccgggatccgcgtcgataacctcgtacagcgcgatggcaaagtcgtcggtgtagaagccgatggcgatgtgattgaagcgaaaacggtgatccttgctgatggggtgaactccatccttgccgaaaaattggggatggcaaaacgcgtcaaaccgacggatgtggcggttggcgtgaaggaactgatcgagttaccgaagtcggttattgaagaccgttttcagttgcagggtaatcagggggcggcttgcctgtttgcgggatcacccaccgatggcctgatgggcggcggcttcctttataccaatgaaaacaccctgtcgctggggctggtttgtggtttgcatcatctgcatgacgcgaaaaaatcggtgccgcaaatgctggaagatttcaaacagcatccggccgttgcaccgctgatcgcgggcggcaagctggtggaatattccgctcacgtagtgccggaagcaggcatcaacatgctgccggagttggtacaaatcccgtgcattgaacgtaatgccattaatgccgtgaaagcagtaaacgccgcgcggatggcgatgcgccgcacctcggcaccgcgtgtttcactcgataaagtgatcgagacgatgtatgaaaccggcaaagatatgaacgataaataccgcgaaacatcacgcggaggactggccattaaagtg

SEQ ID NO: 143770 - DNA, 2791 bp, Homo sapiens
ctagtgttgcgtgtgctttctgcttgttgttcgtcttttgctgctacgtgcgtcttcctcccgcgttccttttctcttgtccttgcttcgtgagctctcgccgtattggatgtttgttattgtgcttcttgttttggttgttgtgttgcagtctgtggttttggattgtttgttttcgtgtcgtgttgtatggtgcagactccagatctgggctgctggacacaggaacatcgttaagcaaatcccggccgtcgtggaactgacagccttgagccatgggaggaaagcagccagtgagacaggcggggtcgtggggtgaataccgtggaactttggcggaagccaggtccgatgggatctggagtaccagcttgacttcagagcgctctcttctggctttgagctttctttcaagcccttcagactcctcagaccacgtgtctgatgagtaaggaggccttttctttcctcccccaaagggaatgttggcaaaacagctttctttgggaacgcgccgttcacgacgaccagccatctcctggggaactccggtggctggctggcggttcctgcggctgttgaataagtcgctgttaggagctggcacggcaggtcccgtttccgcattccaggcacccacagcgggcctctctctgctgctccaggtcaccatccttagcctcatattcataaaatggttgctctacctccagcctgatatccttgtgatgggcaggcagaaccagggctcttgttagaggaactgttacgaatacttttcataagccaactcagtgaatcttccagtggcccttcttcccctggtccacactgttcaagaccctggcaatcatgaccaactatagcttcattcagggctaggttcccagtgtccctatcgccaggtttgtcatatttttcatactcctctccagactcatcctgtttcattatctcatgggattctgttcttgctgtaaacctgcaggaagtgaagtgctcggcctgtatgtcacctgtgtgatgaatgggtcatggccatgagtgtgctgggattgtgaggcaaactgaaggtcatcgtcccttcccaggtggtagaaagtggggcctgggataagcagggtactggctggattcccggatctgtagccctccttgctgccgtttccacggccctttggcatcttcctctctcctgcatgagggcatgcgctggcccctgggggtaagcacttgactggcatcctctcctttcatccaagaacagccctcagagggggaaacgctctgcaaatccaatgattcatttataggaaacacagagatagagaataagttaaacactgcaacagggatatgatcggtcagatccaggcctgatcatatacaggacaaatgacatggcctttctgaacatataaacgtcagtagcgttgaccatgaagagtaaccgagtcttagcctcaggtatgcgagagaccagctcagttccaggggagatgttgttcaccttgtgaacccggccgcccttggcagccctaaggcggagcgcgcggctctgcagcctgcttgccccggagttggcaccacggaggatggggaccgcaccctcagcttcgcagggagccaccgtggggccagggcggtgcagagacacgacgtgtgactcggagtgcgccgcgatggcggggaggagtgcaaggcgctgctggacgggctcaacaaggacgactgcgtctaccaccacctggtgctgaccgtcggtggctcggcggactcgcagaactgcggcaggaggtgctgctatttcgtgaatctccgcgtccgtgtcctgtacaccagtttctcgtgttttctcgtccctttgtggctggacccgctttcgtgctctaactccaatgcgtggtgctatcgccacttctctgtagtccttcttcgcgggcgagcaccagtgcggcaacgaaccggcaagccctgcaccgacgatgatggcgtcaaagatatcttcgacataagagctccctgtcagcggcagggccaaaatgcagccatcggttctatgccgggtaaactgatccagaaatggcgaaagtgggcgtgaaaaacccgctgttcctgctcgatgagatcgcaaaatgtcttctgacatgcgtggcgatccggcctctgcactgcttgaatgctggatccagagcagaacgtagcgttcagcgaccactactatatgtaaacgccagtacaccagggacgcaagcccattccggcaaagctttagttcggcgggtcgccaggcgggtttcagcaaatcctgtaagtctttggtggtcaggcaaggcgcgcgcagcgccccattgtgcatgttcgcgcacatttgtaggtataatcgcccgttttcactttcgtattgtctcgtccggggcagccgggtcgtgtgctttttagccacaagcatgcagaaggctgtgtagaggcgatagtggtagctcacgccaagaaagtcccccaagtccggacaaggccagcagtagtgggcatcgcgcagggcgtcgccgtcacaagtccgcgggccacacacggtcacaattaccgggggggtgggcccccccccccccatatcatacgccagcgcacgagggtaagcaatacagtacaacacatcgcgaaccgtacaaccgtatgcggcaaagcgtagatcggcggcaggcaagcccggtatacccaaatcctgaatgaggttaggccttggggttggttgcgtgtccaaggtgtcgcccttcgcatagtcccccat

SEQ ID NO: 143771 - DNA, 762 bp, Homo sapiens
ttcgcccgcaaccgaaaaaagtgattcgtgattcgttgcaatcccgctcgccctttaaactggaatttcgccttaccgtaaaagccggtattcgccaaacccgcgccctcgccaaccgggtactgaataaagaaggcgaagtcgaacgtctcctcggcatcaatatggatatgaccgaagtgaaacagcttaacgaggcattgtttcaggaaaaagagcgcctgcacattacgcttgattccatcggtgaagccgtggtctgtattgatatggcgatgaaaattacctttatgaatccagtggcggagaagatgagcggctggacgcaggaagaagcgttaggtgttccgctcctgacggtgttgcatattacttttggcgacaacggaccattaatggagaacatttacagtgccgacacctcacgttccgcgatcgagcaagatgtggtgttgcactgtcggagcggcggcagttacgacgtgcattacagtattacgccgttaagtactctggacggcagcaatattggttcggttctggtgattcaggacgttaccgaatcacgcaaaatgctgcgccagctgagctacagcgcctcccatgatgcagtgacgcatctcgccaaccgcgccagttttgagaaacaactgcgtatcctgctgcaaacggtaaacagtacacataagcgacatgccctggtgttaatcgatcttgatccccgggtgccgagctgggttagtaatcgggtcagccacgccc

SEQ ID NO: 143772 - DNA, 834 bp, Homo sapiens
catttaaggccgctttcgctgttccaactgctcctgggactgtgataaagggccaaacatgatgatcgatgaggacactcacgcgcatctgacccgggaagcgatccctgaactgctggagcggtataaatgaaaaacattatccgtactcccgaaacgcatccgcttgacttggcgtctgcgcgatgacaaacagccagtgtggctggacgaataccgcagcaaaaacggttacgaaggcgcgcgtaaggcgctgaccgggctgtctccggacgaaatcgttaatcaggtaaaagacgctggtctgaaagggcgcggcggcgcgggcttctcgactggcctgaaatggagcctgatgccgaaagacgaatccatgaacatccgttacctgctgtgtaatgccgatgaaatggagccgggcacctataaagaccgcctgttgatggagcaactgccgcacctgctggtggaaggtatgctcatctccgcgtttgcgctgaaagcttaccgtggctacatcttcctgcgtggcgaatatatcgaagcggcagttaatctgcgccgtgccattgccgaagccaccgaagcgggtctgcttggcaaaaacattatgggaacaggtttcgatttcgaactgttcgtccataccggggcagggcgctacatctgcggggaagaaacagcgttaatcaactccctggaaggacgtcgtgctaacccacgctcgaagccacccttcccggcaacctccggcgcatggggtaaaccgacctgtgtcaacaacgtcgaaaccctgtgtaacgttccggcgatcctctagagtcgagctccggc

SEQ ID NO: 143773 - DNA, 550 bp, Homo sapiens
atgcgtgccctgctgattctctatctcaccaatcaactaaaatacaacgatactcacgcctacgagttatttagcgcctactgttcgctggtgtatgtcacgccaatcctcggtggctttttggcggataaagttctcggcaatcgcatggcggtgatgctgggggcgttgttgatggcgatcggtcatgtggtgctgggtgccagtgagatccatccgtcattcctctatctgtccctggcgattatcgtctgcggctatggcctgtttaaatctaacgtaagctgtctgctcggcgagctgtatgagccaaccgatccgcgtcgtgatggcggtttctcgctgatgtatgcggcggcggctcgagatattgcttatctgatgtatctggagaacgccttgcgagctgaaggcgctggcgggaatccgaatctatcgcggatggcgatgccgcctatcaacctctaccagaatcagagaggaggagtggcttgcaaccccctcacccccatcttatacattttcccgaggactccttggattgcttcgc

SEQ ID NO: 143774 - DNA, 605 bp, Homo sapiens
atgaaagaggcgcaaaagccggacaccgccagctaccgcacctttaacgaattctttgtccgtccgctgcgtgacgaagtacgcccaatcgataccgatccgaatgtactggtcatgcctgccgatggcgttatcagccagttgggtaaaatcgaagaagataaaatcctgcaagccaaaggccacaactacagcctcgaagccctgctggcaggcaactatctgatggcggacctgttccgcaacggtacgtttgtgaccacttacctctccccgcgtgactaccaccgcgtacacatgccgtgcaacggtattctgcgtgagatgatctacgtgccgggcgatctcttctccgttaaccatctcacggctcagaacgtgccgaatctgtttgcccgtaacgaacgcgtgatttgcctttctgataccgaatttggcccaatggcgcagattctggtcggagcgacgaatggtggcagcattgagacggaaaatgttgtcgaaaagcgtgtaagaggtgcgcaatgcgtaagcagtggctcgggatctgcatcgcggcaggaatgctcgcggcatgtacaagcgatgatggtcagcaacagacg

SEQ ID NO: 143775 - DNA, 1653 bp, Homo sapiens
atgtatacctctgtgcaggatgggggtcgtcacggttttcgccagtcgggtatcagccactgcggcgcactggatatgcccgcgttacgcattgctaacctactggtgggtaatgacgccaatgcccccgcgctggagatcacgctcggtcagttaactgttgagttcgaaactgatgggtggtttgctctgacgggtgccggttgcgaagcgcggctggatgataatgccgtctggaccggctggcgattgccgatgaaagcaggccagcgtttaacgcttaaacgcccgcagcacgggatgcgcagttatctggcggtcgcgggtggtattgatgttccgccggtaatgggctcatgcagcaccgatctcaaagtggggattggcgggctggaaggccgtttactgaaggatggtgaccgactcccgattggcaaatcgaagcgtgattctatggaagcgcagggcgttaaacagctgctaaaacacaagcacgccgcgcaactattacgtgacgttgccgtcaattgtggaattattatgaataaacacgcatcacagccgcgcgctatttactatgtcgttgcgctgcaaatctgggaatattttagcttttacggcatgcgtgccctgctgattctctatctcaccaatcaactaaaatacaacgatactcacgcctacgagttatttagcgcctactgttcgctggtgtatgtcacgccaatcctcggtggctttttggcggataaagttctcggcaatcgcatggcggtgatgctgggggcgttgttgatggcgatcggtcatgtggtgctgggtgccagtgagatccatccgtcattcctctatctgtccctggcgattatcgtctgcggctatggcctgtttaaatctaacagcttcaaagagcctctgtgccccttctgctccataatcacccttccaatattagaatgcagctgccatgtttctgttatccttcttcacaaagaatattggggaccagggcatgggagcatggtccagattgagtccaagctaaagttcatagccagagcgagcctgtttatgcaggacaacaatcagcaaggcaaaggcgtctctttgtcaaaagcgatcaacatcattgagaacggactgcggctatatggtcaggcgcttgctgcaagccaatttacgcaacgatgtctccgcagtcgaagaagtggaagcattaatgcgcaatattgccgatgcctggaaagagtcgttactctccccttctttgattcaggacccagtctgatgaaccatgcaccgcatttatatttcgcctggcaacaactcgtcgaaaaaagccagctcatgttacgcctggcaacggaagaacaatgggacgaactcatcgccagcgaaatggcgtatgtgaatgcggtgcaggagattgcacatttgactgaagaggttgacccgtccaccacgatgcaggagcagctccgcccgatgctgcgcctgattctcgacaacgaaagcaaggtaaagcagttattacagattcggatggatgaactggcgaaactggtcggtcagtcatcggtgcaaaaatcggtgttaagtgcctatggcgatcagggcggctttgtgctggctccgcaggataacctcttttga

SEQ ID NO: 143776 - DNA, 1020 bp, Homo sapiens
ccgccagccaaacgctcgatcgcgctggcgttgtggtcgatgacggtgattgtcgcgccaatttgcggcccgatcctcggcggttatatcagcgataattaccactggggctggatattcttcatcaacgtgccgattggcgtggcggtggtgttgatgacactgcaaatcatgagctttctttgaacattgctccgcgatcatgccaaccgccgccaggccaaagcccatcgcccagctgtactcttcctgggcgtaaccacaggcgataggtgcgataatagaccccacgttacccgccgcatacatcagcgagaaaccgccatcacgacgcggatcggttggctcatacagctcgccgagcagacagcttacgttagatttaaacaggccatagccgcagacgataatcgccagggacagatagaggaatgacggatggatctcactggcacccagcaccacatgaccgatcgccatcaacaacgcccccagcatcaccgccatgcgattgccgagaactttatccgccaaaaagccaccgaggattggcgtgacatacaccagcgaacagtaggcgctaaataactcgtaggcgtgagtatcgttgtattttagttgattggtgagatagagaatcagcagggcacgcatgccgtaaaagctaaaatattcccagatttgcagcgcaacgacatagtaaatagcgcgcggctgtgatgcgtgtttattcataataattccacaattgacggcaacgtcacgtaatagttgcgcggcgtgcttgtgtttctgagccgttattactccgcgagcctgaacgtttactggcaacattacgtagtcgttgtcggttacattaccttgcgccgccgccggaacagtacgccgtgacctggctttcacgcgaagtgacaatgtcacaggatgcattacttgccgcattgcgcttaagcgccggttcgcctggcgcggcactggcgttgtttcagggagataactggcaggctcgtgaaacat

SEQ ID NO: 143777 - DNA, 3264 bp, Homo sapiens; identical to SEQ ID NO: 139179

SEQ ID NO: 143778 - DNA, 2054 bp, Homo sapiens
tcccaggctttgcccgcctgatggcggcgcatcgtcatgaaatcgcggcggtgatcattgagccgattgtccagggcgcaggcgggatgcgcatgtaccatccggaatggttaaaacgaatccgcaaaatatgcgatcgcgaaggtatcttgctgattgccgacgagatcgccactggatttggtcgtaccgggaaactgtttgcctgtgaacatgcagaaatcgcgccggacattttgtgcctcggtaaagccttaaccggcggcacaatgaccctttccgccacactcaccacgcgcgaggttgcagaaaccatcagtaacggtgaagccggttgctttatgcatgggccaacttttatgggcaatccgctggcctgcgcggcagcaaacgccagcctggcgattctcgaatctggcgactggcagcaacaggtggcggatattgaagtacagctgcgcgagcaacttgcccccgcccgtgatgccgaaatggttgccgatgtgcgcgtactgggggccattggcgtggtcgaaaccactcatccgatgaatatggcggcgctgcaaaaattctttgtcgaacagggtgtctggatccggcctttgacaactgatttacctgatgccgccctatattattctcccgcaacagtccataactggctggcgctgcacggtcgcggccaggattactgccagcttaaccctcaaccgatggcgtactacgatggctgcatcagcgttgatttaagcgccatcaaaccaatgattgcgctgccgttccacccgagcaacgtgtatgaaatcgacacactgaaccagaacctgaccgacattctgcgtgagattgaaattgagtccgaacgcgtggcgcacggtaaagccaaactctcgctgctggataaagtggaaaatggtcgcctgaaagtgcagcaggggattatcgcgggctgttctggcggtaactacgaaaacgtcatcgcggcggcgaatgcactgcgcggtcaatcctgtggcaatgacaccttctcgctggcagtttacccgtcatcacagccggtgtttatggatctcgccaaaaaaggtgtggtagcagatttgattggcgcaggcgcaatcatcagaaccgcgttctgcggcccatgctttggcgcgggcgatacgccaatcaacaacggtttgagtattcgccacaccacgcgtaacttcccgaaccgcgaaggcttcttaagccagctaatggggcagatgttcagcggtggcgtttgatgggacgctcgttctatcgctgcgactgcsgcaaacggtggctatttaacctctgccagcgaacttgattgctgggacaacgtgccggagtacgccttcgatgtaacgccgtataaaaaccgtgtttatcagggctttgtgaaaggggcaactcagcaaccgctgatttacgggccgaacattaaagactggccggaattgggtgcgctgactgacaatatcgtcctgaaagtgtgctcgaagatcctcgacgaagtgaccaccaccgacgaactgattccttccgagaaacctcttttatcgttcaatcgattgtctgccgagtttccctgtctcgcgcgatcctgcagagtaagcgactctaagaaccgggcgaatttccgccacctgatccatcgtctccagagcagagatggccggtttgttatccaccgaaataatcagatcgttgacctgaatacccgcattcgccgccgggccgtcaggaatcgcaaagccgataccttccggcgtttcgccatcgttactcttatcaaacgacagcgtattaatgcccatcagttcgcccagcgagttcaccagcgcgccgccagagttaccgtggttaatggaagcatcggtttggaggaagttttgccgcccggtcgggttcagaccgattcgacccgtggcactaataatcccctgggtaatggtctgcccgaggttgtacgggttaccgatcgccagtactacgtcgccaatgtgcggtacgcgacgtgcattaattggaatggtatgtaa

SEQ ID NO: 143779 - DNA, 7222 bp, Homo sapiens
tttgattcggtgataaacccgtttttgtaacgctattgtcgccaactgcttcagaacggaataagcgccattgccctgaatattcaggtcaatacagcttgcagtaagagctgccattaatcggactccataaaatatattttaatcaattgtaatggtggagcgattaagtgatgagaggcgatatgtcggtaaacaatgacaatttgagacagagtgaaaggtcagatttgcggagtaatgcacataatggttatttaaataaaccacatgaatcattaatgggttattcattatttttgtgatttactcacaatgtatcagggaaatataacttaccgggagatgtaatatgtttaatttttcaaatcgaaatttaaaatattgtgccggaggcatctctggcacattgggcaattacggcaggtaaaacacttcttgcagctcgctactcaccgggctgttatccgggttagcgggcataacatcggtcatatatttccaccaacgttggcaaacatcagtgctggcaaccgcattccagcgttcttcagattcaatctctaccatggcaaacagcagattacgcgctttgtcgagatagatggcgtagttatgcgcaccgtgagatttcagcactgcttccagttctggccagatgggattatgccgacgctgatactcttcgtgggcgtcggggtttacctgcatgacaaaggctttgcggatcatgtttgctccttacagcgccagcgcactggcgagtgcgtaacgccgaaacgcttgccgagcgctatcaactcttcacggctgatggtttcatccagcgtcggtccgctcaagcagacgccgtggaagggccacaacaccagcgaatgtttttgcatctcttgtgcggacctgcaggcgcataatctgggatacgctgaccatgagcaaaatgacgtccgccagacctcaaacgatggcagttttaccgacgccgggttcaccaatcagtaccgggttatttttagtacgacgttgcagcacctgaatggtacggcgaatttcttcatcacgaccaatcaccggatcgagtttgccctgttcggctcgttcgaacgctttaacgatcggctgggtaaccagtttggtgcggctatcacctatttctcatttttgtcgatgataccaattttgatggtgtcgtttgccgcagggggctttgtgctggcctcccatccgatgttgctacaggatatcttcgacaaaattctgcaaaacatcagcgatccgacgctagccgccacgttgaaaaacaccatcaacaccgccgttcagcagcgtacgactgtagggcttgtcggcctggcggtggcactttattccggcatcaactggatgggtaacctgcgtgaagcgattcgtgcccagtcgcgcgatgtctgggaacgctcgccgcaagatcaggagaagttctggcaaatgattattagcgccctgcacctgaacagcattgagtggctgaaaccgacgtggcgattgattggcctggcgatttccatcttcgccaactatctgcttttcttctggatcttgactctagagatccccgatgtgcgaaaccgcctcttcttcccgctcagcaacgcgaaccggtggaatacgcacctcatcacccgcttcgagtttatattcaggcttaatacgttttttgttcacccgcacttcgcctttacgcaaaatacggtaaatcatactttttggtacgcctttcaattggagatccccggtaccgagctggaattcagcgcgctttctaccgatttccgtaacagcgttgacgtgatgaccactgaaacgacctgtttaagctctgtctggcaaaccgatgaagaagtccataacctgctggcgctgcacggtcgcggccaggattactgccagcttaaccctcaaccgatggcgtactacgatggctgcatcagcgttgatttaagcgccatcaaaccaatgattgcgctgccgttccacccgagcaacgtgtatgaaatcgacacactgaaccagaacctgaccgacattctgcgtgagattgaaattgagtccgaacgcgtggcgcacggtaaagccaaactctcgctgctggataaagtggaaaatggtcgcctgaaagtgcagcaggggattatcgcgggctgttctggcggtaactacgaaaacgtcagcgcggcggcgaatgcactgcgcggtcaatcctgtggcaatgacaccttctcgctggcagtttacccgtcatcacagccggtgtttatggatctaacgaaaaaaaggtgtgaagcgtaccggagtacccggattatgaaaatactggtctacggcattaactactcgccggagttaaccggcatcggcaaatacaccggcgagatggtggaatggctggcggcacaaggtgggcgagaactattccgcctggcgctacaaacgagaagagggggccgcacggtgtggcgctgcccgctgtatgtgccaaaacagccgagcaccctgaaacgcctgttgcatctgggcagttttgccgtcagcagtttctttccgctgatggcgcaacgtcgctggaagccggatcgcattattggcgtggtgccaacgctgttttgcgcgccgggaatggccctgctggcgaaactctctggtgcgcgtaccgtgctgcatattcaggattacgaagtggacgccatgctggggctgggccttgccggaaaaggcaaaggcggcaaagtggcacagctggcaacggcgttcgaacgccagtccacctttggcgggaaaactgcaactacctggggctataacggcaatctgctggggccggcggtgaaattacagcgcggcaaagcggtaacggttgatatctacaaccaactgacggaagagacaacgttgcactggcacgggctggaagtaccgggaattatcacgacgccgctgaacgactggctgatctggcatgaatgtcggtcataacgcctgagaaacgccgttgactgtaccgggtgcaactgaagtcgctaacaacgtgctggcgctgtacatgcaggatcgttatctcggcaagatgaaccgtgtcgctgacgatattaccgtcgcaccggaatatctggaggagagcaacaaccaggcatgggcacgcggcggtgcgggtgaccgtctgctgatgtacgcacagctgaaggaatgggcagagaaaaactttgatatcaagaaatggtatccagatggcactcctctgccagagttttacagcgagcgtgaagggatgaaaggctggaacctgttccagttgatgcatcgtaaagcacgcggcgatgaggtcagcaatgacaagtttggcggcaagaattactgtgctgaatccaacgcgcgcgaccacgccgaataaccgcgtcgcggatgaccagggctttttacgccagtggagcaaggtggcgaaagaacgcaaactgcaacggttttatatcggcgaaccgagcgccgaagccgttgccgcgcaaatgccggatctgattttaattagcgcaaccggcggggattcggcgctggcactgtatgatcagctttccaccatcgccccgacattaatcatcaattacgacgacaaaagctggcacccccgactgagcttcaataaggcagatgaaattactaccgtcttttgtggttcgaaaaagagtctggcaaatggcatcccgatggcaaacattctgttccccacatcggtgatcgctacccagcaaacgcagcatttccgcttcgtcgatgacttcaatgcccagttcctgcgcttcgccagtttagatcctgcagcttcacccgctatcaccatatcgggaaaggcgactctagagatccccggtaccgagctagtattctatgcggcgctcgagaaaaagctgaacatcaaaccagggcaaacgacatttgatggccgctttacgctgctgccaacttgctgcctggggaactgtgataaagggccaaacatgatgatcgatgaggacactcacgcgcatctgaccccggaagcgatccctgaactgctggagcgcaaaaacggttacgaaggccgcgcgtaaggcgctgaccgggctgtctccggacgaaatcgttaatcaggtaaaagacgctggtctgaaagggcgcggcggcgcgggcttctcgactggcctgaaatggagcctgatgccgaaagacgaatccatgaacatccgttacctgctgtgtaatgccgatgaaatggagccgggcacctataaagaccgcctgttgatggagcaactgccgcacctgctggtggaaggtatgctcatctccgcgtttgcgctgaaagcttaccgtggctacatcttcctgcgtggcgaatatatcgaagcggcagttaatctgcgccgtgccattgccgaagccgactctagagatccccgcgtgaacaaattccaggacgaagtgggcggcaaactgcgctttggcgatccgggcgtgcgtctgtttgaaaccagcgaaaatggtctggattacttcaccagcgtaccggcacgcttccagccgcaggacgggaaatcgcgtatcgcgccgtattaccacctgtttggcagcgatgaattgtcacagcgtgctccggtcttccagagccgtatgccgcagccgtacatcaaactcaacccagcggatgccgcgaagttgggtgtgaacgcaggtacacgcgtctcctttagttacgatggcaacacggtcacgctgccggttgaaatcgccgaaggactgacggcagggcagtgccgacacctcacgttccgcgatcgagcaagatgtggtgttgcactgtcggagcggcggcagttacgacgtgcattacagtattacgccgttaagtactctggacggcagcaatattggttcggttctggtgattcaggacgttaccgaatcacgcaaaatgtgcgccagctgagctacagcgcctcccatgatgcactgacgcatctcgccaaccgcgccagttttgagaaacaactgcgtatcctgctgcaaacgtcaattgatgctatttccagcggcactatcgacatcagcgatggtacggttttgcgcctgaccgggcaggatacttccgtcgcccttaatgcctcactatttaacggcgatgggacgctggtgaatgccaccgatggtgtgacgttgacaggtgagcttaataccaaccttgaaactgacagcctgacttatctttccaacgtgacggttaatggcaatctgaccaatacgtccggtgcggttagcctgcaaaatggcgtcgctggcgatacgctgacggtaaacggtgattataccggcggcggtacgctactgctcgatagcgaattaaacggcgatgactcggtaagcgatcaattggtgatgaacggtaatactgctggcaacacaactgtggtggttaactccattacagggattggtgagccgacatcgacaggcattaaagtggttgatttcgcagctgatcccacgcagtttcaaaacaatgcgcagttcagtctggcaggcagcggctacgtcaatatgggagcgtatgactacacgctggtggaagataacaacgactggtatctgcgatcgcaagaagtaacgccgccatcgccacctgatccagacccgacttttgcggaaagaattccaaaaacaggtacgacatacatgaatcagaatctgctggtgacaaagcgcgacggtagcacagagcgcatcaatctcgacaaaatccatcgcgttctggattgggcggcagaaggactgcataacgtttcgatttcccaggttgaaaagcctacggccagtttgatgccgcctgcgctgtacgaccacgtggtgaaaatggtcgagatgggcaaatacgataatcatctgctggaagactacacggaagaagagttcaagcagatggacacctttatcgatcacgaccgtgatatgaccttctcttatgctgccgaaaagcagctggaaggcaaatatctggtacagaaccgcgtgaccggcgaaatctatgacctgcaggcactgctgcaaaaaggaaaaaccagaattgctggtagtgacttttgcaaaggatttgccgtcagcggggcagcggttctttgctccagtacggtggccgattatctgctgcaattcgcccgccaccttatctacagcaccagtatgccgccgctcaggcgcaggcattacgtgcgtcgctggcggtcattcgcagtgatgagggtgatgcacggcgcgaaaaactggcggcactcattacgcgttttcgtgccggagatatcgaccgtctgctggaggtgctgcatggcaacggttaataaacaagccattgcagcggcatttggtcgggcagccgcacactatgagcaacatgcagatctacagcgccagagatgtgacgccttactggcaatgcttccacagcgtaaatacacccacgtactggacgcgggttgtggactctagaggaatccccggcagacgccgcatcggctttgctgttgcccaccatccgctgtttgtaatagtcggtttgcagccagatctacctgcgcctattccacgaggccagttgcataacaaactctttataggcttcgtcccgacactgcaggcgggggccgtcgcgaaaagtgtaattcacgcgcacgtcagcgtttcccctgatggattagacctggtcttttttgtcgtcaaccaatgggctggcgtcgtgttctgcttcgatctcttcagcaggaagcggggcaggttcagcgtctggcgtaacaaaggtttcggtagatactgccagcggctggccaattttcgtgacagacaggctttccagttgctcaaccagattcactttacccggtgcaaacaggttgataacggtggaaccgagtttaaagcgacccatttcctggcctttcagcagtgccacagaaccgtcgttttccccggcaggccaggtccagcgcttgatgataccttcgcgcggcggcgtaatggtgcccgcccagaccgtctcaatgctgccaacaatcgtcgctccgaccagaatctgcgccattgggccaaattcggtatcgaaaaggcaaatcacgcgttcgttacgggcaaacagattctgcatgttctgagccgtgagatgggtaag

SEQ ID NO: 143780 - DNA, 556 bp, Homo sapiens; identical to SEQ ID NO: 138686

SEQ ID NO: 143781 - DNA, 1929 bp, Homo sapiens; identical to SEQ ID NO: 138688

SEQ ID NO: 143782 - DNA, 1446 bp, Homo sapiens
atgttgatggcagaatactttgccatccagatgtgtcgggaaatcaagctgcctctgttcccggggtttacggagcgcgccagagaaacattgctgaattatcgttggccgggaaatattcgtgaattgaaaaacgtggtggaacgttcagtgtatcgccacggcaccagcgattatccgcttgatgacatcattattgatccctttaacagcgtccgcctgaagatgtatcgccgtttcagaaaccacctcgcttccaacactgccgctggatttaccgcatcggcggcgcagtatgaagatggtaaacagtacactaccctggaaaaaccggtagctggcgcgccgcaagtgctggagtttttctctttcttctgcccgcactgctatcagtttgaagaagttctgcatatttctgataatgtgaagaaaattcttccggagggggtcaagatgtttgatcaggcaggcgccgatagcaagaaactgccttcacaatacattgctggagtacgccgtgcagatggctccgggacttccttcgtcttcaccagctacctggcgaaagtgaacgaagagtggaaaaacaacgttggtactggctctaccgtaaaatggccgatcggtctgggcggtaaaggtaacgacggtatcgccgcgttcgttcagcgtctgccgggtgcaattggttatgttgaatatgcttacgcgaagcagaacaacctggcgtacaccaaactgatctccgctgatggtaaaccggttagtccgaccgaagaaaacttcgctaatgcagcaaaaggtgcagactggagcaaaaccttcgctcaggatctgaccaaccagaaaggcgaagatgcatggcctattacctctaccacgttcattctgatccacaaagatcagaagaaaccagaacaaggcacagaagtgctgaaattcttcgactgggcgtacaaaaccggcaacgatcgtaaagtcatgcagattgacccgctggaagcgccggatttgatctggctgctgcaacagacgggagatgaagtgctggattaccgccaggcggtggcgtactacgcttcttgccgccagactgtcatagaaggcggcaaccacgcattcacgggcttcgaagattatttcaacccgatcgtcgattttcttgaagtcattgataacagtgtggatgaagcactggcgggtcacgcaaaacgcgtggacgttattttacatgctgaccagtcgttagaagttattgacgatgggcgcgggatgccggtggatattcacccggaagagacctgcaggcatgcaagagctgaaaacgatcctggtgaccaatcccacgctgcaattcgatgcgatattcgccagcacatcaacggaaaaactcatctttgcctcactgtcaatttgactatagatattgtcatatcgaccatttga

SEQ ID NO: 143783 - DNA, 817 bp, Homo sapiens
atggcctttaatgagccgctgatgcttgaacccgcctatgcgcgggttttcttttgcgcgctggctggccagttgggcatcacccggctgacagataccgtctctggcatcacgcttgatgccggacaaatagccgaaccgctggcgctgtttggtgaggatgatgacatggatccccgtccatcacgcagctatcaggtggcaaatggtatcgcggtcttgccggtttccggcacgctggtcagtaaaacccgtgcgcttcagccttattccgggatgacgggttacaacgggatcattgctcgcctgcagcaggcaatcagtgaccccggcgttgacggcattcttctggatatggatacgccgggtggaatggtgtccggggcgtttgactgcgccgacattattgcccgtatgcgcgatatcaaacccatctgggcgctggccaatgacatgaactgcagtgcaggtcagcttattgccagttcggcatcgcgacggctggtcacacaaacggccagaaccggctccattggggtcatgatggcgcacagtaactatggcgctgcgctcaaaactaacggcgttgaggtcacgctgatttacagcggcgatcgcaaggtgcgacggcaacccttacgaaaagcttccgtaaagatgtgcgtgctgatttccagacgcgtatcgatgccactcgtttccgcttataccggcatgtctgttcaggacgtgctgacaccgaagcggcagtattctccggccaagaatcttgggataacgggctggcggagtaactggtacacaccgattggctggg

SEQ ID NO: 143784 - DNA, 280 bp, Homo sapiens
atgaattcatttttcatcaaaaaagagatcaaccactggtgtgaagaagcagatgttgcattcatgagacagcaactctatgaaaccaaagccctgctgactcccggcaaactgaaaaacttcctcgtcgagaaaatgcgtaccctcggtactgcagcctgcccgccgtaccatatcgcgtttgtgattggcggtacgtctgcggaaaccaacctgaaaaccgtcaagttagcaagcgctcactattacgatgaactgccgacggaagggaacgaacatg

SEQ ID NO: 143785 - DNA, 871 bp, Homo sapiens
catttatcccgtggaaagtggcgtggatacccccccacaaaattaaggggttttggcacaacccaaagcccccgggtccgcttccagtcaatcaggccggggtccttttacaaaaaaaaattccccccaggggcccttttattatgaagccctcaaaccagtctgttcaggccccgtgggatgtcaaagtgccgggaaaaagatggtgggttaaccaatttccaggtttgggaagcattgcggccctttcctgactcgccagggacaggttcgctataaatgggccgcgggtcagcccgggccttccatgtcacatcaaactgaaaatgaaaccttttttagcaatgaagtttcctgggggatgctctcaaacacctcgctgtacggcggcctgctgatttttgatgatgactaccattctgccgcaatgggtatcgggcaaaatatgctgtggcttggcgcactgtcctttgatgtcacctgggccagtagccattttgatactcagcaggacgagcggggcttaagctaccgttttaattacagcaaacaagtggatgccaccaacagcacgatttcgctcgccgcttatcgcttctcagatcgtcattttcacagctacgccaactatctggatcacaaatacaacgacagcgatgcgcaggacgaaaaacagacgatcagcttatccgtgggccaaccgattaccccactaaacctcaatctttacgccaacctgctacatcaaacctggtggaatgcagacgcctccacgaccgccaacatcacagcaggttttaatgttgatattggtgactggagagatatctcgatttcgacgtcattcaatacgacccactacgaagataaa

SEQ ID NO: 143786 - DNA, 2990 bp, Homo sapiens
atggctgccacggcaatgtccaccgtgtcgatgtccatcgttggtgcatacatgaccatgctggaaccgaaatacgtcgttgctgcgctggtactgaacatgttcagcacctttatcgtgctgtcgctgatcaatccttaccgtgttgatgccagtgaagaaaacatccagatgtccacctgcacgagctgggagatatcaccttgcattggtccgctagacgttatcgcagatcagcgacatcgtccaatcacgatggacatctcagaagttttgagacgggcatccagaccggcgaaatacagcgtaacggtggcccagaatagtgggcgcaacacacagcaggttggtttccgcagacgtaccgccaatcacaaacgcgatatggtacggcgggcaggctgcagtaccgagggtcgctgggttgaagctcgggagagcgatcagcaggcggcaaaacgctgctatcaggtggcaaatggtatcgcggtcttgccggtttccggcacgctggtcagtaaaacccgtgcgcttcagccttattccgggatgacgggttacaacgggatcattgctcgcctgcagcaggcaatcagtgaccccggcgttgacggcattcttctggatatggatacgccgggtggaatggtgtccggggcgtttgactgcgccgacattattgcccgtatgcgcgatatcaaacccatctgggcgctggccaatgacatgaactgcagtgcaggtcagcttattgccagttcggcatcgcgacggctggtcacacaaacggccagaaccggctccattggggtcatgatggcgcacagtaactatggcgctgcgctcaaaactaacggcgttgaggtcacgctgatttacagcggcgatcgcaaggtcgacggcaacccttacgaaaagcttccgaaagatgtgcgtgctgatttccagacgcgtatcgatgccactcgtcagatgtttgccgaaaaggtttccgcttataccggcatgtctgttcaggacatatatttgcttaaagctttggcagccagaagcctgcaggtccgcccgctgcacttgaaccgcgatattgatatcaatgtgcggattatttctgccactcaccgtgatctgccaaaagcgatggcgcgcggggaattccgcgaagatctctattaccgcctcaacgttgtcagcctgaaaattccggcactggcggagcgcacagaagacattccgctactggcaaatcacctgttgcgccaggcggcagagcgacataaaccgtttgtccgcgcgttctctaccgatgcgatgaaacgcctgatgaccgcgagctggccgggtaatgtgcgccagttggtcaacgtgattgaacagtgcgtggcgctgacctcatctccggtgattagtgatgcgctggtggagcaggcgctggagggtgaaaatacggcgctgccaacctttgttgaggcacgtaatcagtttgaactcaactatttgcgtaagctgctgcaaatcaccaaaggcaacgtcacccacgcggcgagaatggcggggcgcaaccggacagaattttataaactgctttcccgacacgagctggatgatggcataacagaggaaagaaaatgtcactcttccgcagaaatgaaatatggtatccagctccttacgctgtataccacgccggtggtgtatctctttttcgaccgtcagcggatgtacgtaactctcgctggtggagctttccggtcatgcgttaacaagatggatctccgggaactggctcgaccgcgtttgacgcaactgatggataccaccgggctgttatgtcacctggggattattgataacggcagcgcttattacattttgaaagtggagtcatcagccactatcagcgtgcgttcccatgaaggaaaaagcctttcgctttatcgctccggaataggtaaatgcctgcttgcctggcaacctgcagcggtacagcaaagtattatcgaagggctggtctgggagcaggcgacacccacaacgattactcatccacagcaacttcacgaagaactggcgcgtattcgccgtcagggctggagctatgacaacggcgaagattacgccgatgtccgttgtgtcgctgcgccggtgtttaacgccaataacgagcttaccgctgcgatctcggtgcaaacaagtggatgccaccaacagcacgatttcgctcgccgcttatcgcttctcagatcgtcattttcacagctacgccaactatctggatccacaaaatacaacggacagcgatgcgcaggacgaaaaacagacgatcagcttatccgtgggccaaccgattacccctactaaacctcaatctttacgccaacctgctacatcaaacctggtggaatgcagacgcctccacgaccgccaacatcacagcaggttttaatgttgatattggtgactggagagatatctcgatttcgacgtcattcaatacgacccactacgaagataaagatcgcgacaaccagatttatctgtcgatttcgctccccttcggtaacggtggtcgggttggctatgacatgcaaaacagtagccacagcaccatacaccgcatgtcgtggaacgatacgctggatgaacgtaatagctggggcatgtctgccggactgcaatccgatcgtccggacaatggagcccagttgatgtctgaagttactgctcatgcaattctcttagtaaaccagtaccgcacgacggtttttggagtatgccgcttcgtcatgacccagtactgcaggtttttctttaccgtaagaaacgatggagatctggcaacgggagttcagacaaagcaaataattttagaggataagccatgccacgttctctcaagaaaggtccttttattgatgttctataaaatgccggtcgctaacgcgctggcctcggtggtttatggtttcttctacgggttgtggtcatga

SEQ ID NO: 143787 - DNA, 301 bp, Homo sapiens
ttgacgcggtgctgacgctggcgaacgcctcaatatgctgacggttgctgaaggggtcgaaacgccggaacagcgcgatggcgctggacgattttgttcgctggctaaagaaaccgttacgccgcagtggtaaggtgtgcttacgtcccttattattcatagtgaagcatgccggattgcggctaatgatgagtaaaaggaaatccgttgcagatattgtgcgcatactgctgctgtttatcgctctgttcacctttggtgtgcggcgcaggctatcaaggaaagctatgcctttgccgtg

SEQ ID NO: 143788 - DNA, 290 bp, Homo sapiens; identical to SEQ ID NO: 137313

SEQ ID NO: 143789 - DNA, 588 bp, Homo sapiens
tggcctgccattgggctgggtattattccgctggcggtcattgtgcgtatgacacgctcctcgatgctgaaagtgctgggcgaggattacatccgcaccgcgcgcgccaaagggctaacccgcatgcgggtgattatcgtccatgcgctgcgtaacgcgatgctgccggtggtgaccgttatcggcctgcaggtgggaacattgctggcgggggcgattctgaccgaaaccatcttctcgtggcccggtctgggacgctggttgattgacgcactgcaacgccgcgactatccggtagtgcagggcggcgtattgctggtggcgacgatgattatcctcgtcaacttgctggtcgatctgctgtacggcgtggtgaacccgcgtattcgtcataagaagtaaggggacatcatgtcacaggttactgaaaataaagtgattagcgcaccggtgccgatgaccccgttacaggagttctggcactattttaaacgcaacaaaggcgcggtcgtcgggctggtttacgtcgtcatcgtgctgttcatcgcgatccgcgggtaccgagctagattttgtactcgaggtcac

SEQ ID NO: 143790 - DNA, 743 bp, Homo sapiens
tcactggaaaccaacgatctcaacgtccatatgatggtggtgctgatgctgatcgccgcgattgtgggtgacgcggtcaattacactatcgggcggttgttcggtgaaaagttgttcagtaatcccaattcgaaaattttccgtcgcagttatctcgacaaaacccatcagttttatgagaaacatggcggcaaaacgattattctcgcccgttttgtgccgatcgtcagaacgttcgccccgtttgttgcgggaatgggccacatgtcgtaccgtcatttcgccgcttataacgtgatcggcgcactgttgtgggtactgctttttacctacgcaggctatttcttcggtacaatcccgatggttcaggataaccttaagctgctgatcgtcgggattattgtggtttctattttgccgggcgtcatcgaaataatccgtcacaaacgcgacttcactgttgtggacccaccccccggacccagcccggctcggcccagagccccccagcggttctgctcggcaaggatcgcccgccaagttcacgcgtcgggcaataataagggcacgcgcctgactgacgacagttttgacacggatgtactcaaagcggacggggcgatcctcgtcgatttctgggcagagtggtgcggtccgtgcaaaatgatcgccccgattctggatgaaatcgctgacgaatatcagggcaaactgaccgttgcaaaactgaacatcgatcaaaa

SEQ ID NO: 143791 - DNA, 954 bp, Homo sapiens
atgacgcagtatggcggtagcattgttcagggttcagccggggtacgtattggtgcccccaccggcgtggcctgttcggtgtgccccggcggagtgacgtccggccatccggtcaatcccctgctcggtgcaaaggtccttcccggtgaaaccgacatcgccctgcccggcccgctgccgttcatcctctcccgcacctacagcagttaccggacaaaaacgcccgcgccggtggggagcctcggccccggctggaaaatgcctgcggatatccgcttacagctgcgcgataacacactgatactcagtgataacggcggcagaagcctgtattttgagcacctgtttcccggtgaggacggttacagccgcagcgagtcactgtggctggtgcgcggcggcgtggcgaaactggatgaaggtttgcgtaccgtctaccccgacacaggtcgactgaccgaaaccgtaatccgtggtctgtttaaccgcttcatagaaagcggacccacgggcttacacggcacgcagatgcacattatcgccgctgtcttttcgccagatgcgtaccgcgccctggtcttcagcaaatccactggcggcctagtccgtaggcagacaattcagtctggtaacattgaacgtactatgaagctgactattccggaagtagaactgccgaacgcagaactgctaggcaaacgccgtctggaaaaattcgccgctaaagtacagcagcagctggaaagcagcgatctggatcaataccgcgcactgctgagcaaaattcacggcttcacagacgatccgcgatttttacaggccaccgaagccgtggtcctgacgcgagtcgatgattacccaatgcaacaactgctgcgtgccgttgtagataaacacgccctgctcgcccatcaacaacgggtagtgagtggggaacaggaaccgagttattaa

SEQ ID NO: 143792 - DNA, 1590 bp, Homo sapiens
atggggtccccaacaggctacaccccagccccagaggcctcccagtctggagaggactccctgccctctctcatcttggagcagtgttcacgttcacgcccacaatacgcgcacgaactgagcgatctggatcagtatcgctatcaacctgattttcaggatctgctgcgcaagcggcagatcgtgaagtgcagatctatcgtcgcgctaacggcatgtcggggtgcagcagttgctgatggaccattgccgcgacgaagcacgtttgaaaaactggtcaccatggtcaacgacttcaaacagtactttatgcccatgatcagccgatctatgaaaacccatcgccggggaacaaagcggcggtatcaccacgctggaagacaaatcacttggctgtacccagaaagcggttccagcgtcgtggttgacgtgctgcgttacggcgagcggctgaacttgttaagtgcgccgggtaacgatgccgtagcgaccacgccctggcgggtgcgggctgccatatggtgctgttcagtactggtcgtgcacgccgtatggtggatttgtgccgacggtgaaaatcgccaccaacaggaactggcggcgaagaaaaaacactggatcgactttgacgcggtgatccacggtaaagcgatgccgcagttgctggaacgaatttatcgacacatcgttgagtttgccaacgggctgggtgtcatcgcctttctgattggtatcacaacatttttcaatcgtgagaacgtcgcttcaaaaagcagctttcggtctatagcgccgttattggcgacatttttatcttctgggcacctatcccgctggtgccagtgccatccttatgccattcgtacattgattacttgctgtgcgtgctgctgggtggcctcttgcgccaggcgctacgcagatgtcgcggatagcttcggaacggttgttataaccacgacgctggctcagctgtccagcgtctccagtaaatcgtcatcaagcgtgatggtgactcgtgcatttgcgttaaaccttttctgtgggtcagggaaacgttattcagcaccgcctgatgttatgttttccgttaaatccaccgtgcgcatagtgatgggaaaggccggagtgttaagtaaagtcatgatgccagctccataccgtagagggcgagatgacggaaaccaggctgcgcgtcactgtatgtttgggggcgttaaacagcgttctacatcgccctgttcgacaatcttaccgtcagacatcaccgccacgtatccgccagacgcgccacaacgcccatatcatgggtcaccagcagcattccggcgcttgtttttgcataatgctttccagcagatcgaggatgcgcgctgtgctaccacgtcaaggtcggtggtcggttcatcggcgatgataaacgtgattcacacagcaccggcatctaatcatcatgggtacgagctgaatcgatcatggtctagcgtttcgtgtgaatgtatcgtccattcacaaatagaggaactaattaagctgggtccagagagcaccctacacaccctgggtaagagccgcgttcacagctgctaa

SEQ ID NO: 143793 - DNA, 1059 bp, Homo sapiens
atgaagctgatgtgtattgatggctacaacaatcggtatacgtgggagatgatgcacattggagaaatgagtgatgaagaattgtttggcgaacgtagaaacattgatagatcggaacgtcgaattgacagtcatgccgctacctgctggttccatccgcatcagcacggcaaaaccgggcgacaggtggcgatggggctggctgggctggtggtgattgaagatgacgagatcctgaaattaatgctgccaaaacagaaaggcttcgcgcacggcaatgcgagggatctgaataatccccagaccggcaagaccggcgcattctactgcgttgccaaaccgaataagaaaattttcgattatgcgctggaacaggcgggcaaaaatgaccgttcacgcgtgctgctggttggctgtctggtagttgtgttatcgctgattatgggcgttattctcggcctgatcgccggttactttggcggcctggtcgataacatcattatgcgcgtggtcgatatcatgctggctctgccaagtctgctactggcgctggtgctgccaaccacgggcaccagaaaacggaattaccagggcgaaagaatcctttatttaccaaagcgttctacggcggcgggcccgaccttcttccgtaaagaaaacccagaagagttaaataatgataccacattgaaaaaagtaatgaagccgctgatcacttcaaacacggtaactgatgaaatcgagcgcgcgaatgttttcaaaatgaccggcaaatggtacttgttcactgattcacgcggttcaaaaatgacgatcgatggtattaactcaaacgatggatattcacggcgcgaaacaggacgaagacggcgtttaccgcgtacgagtcctaaaaatggcgggataacttgccagagcggcttccgggcgagtaacgtgctgttaacaaataaaggagacgttatgctgggtttaaaacaggttcaccatattgaaataaatgcgacggattatgcgaccattgctggccaccgccaccagatgaagcagaaagcttga

SEQ ID NO: 143794 - DNA, 2250 bp, Homo sapiens
atgcaacgagtcaccatcacgcttgatgacgatttactggagacgctggacagcctgagccagcgtcgtggttataacaaccgttccgaagctatccgcgacattctgcgtagcgccctggcgcaagaggccacccagcagcacggcacgcaaggtttcgcggtgctgtcgtatgtgtatgaacacgaaaaacgcgacttagccagccgcattgtctccacccagcatcatcaccacgacctctccgtcgccacgctgcatgtgcacatcaaccacgacgactgtctggaaatcgccgtgttgaaaggtgacatgggtgacgtgcagcattttgccgatgacgttatcgcccagcgcggctttttcttcgctttttcgtatgaagatactgtcattaaaataatagaaaaggattttacgatgagcggaaaaccggcggcgcgtcagggtgacatgacgcagtatggcggtagcattgttcagggttcagccggggtacgtattggtgcccccaccggcgtggcctgttcggtgtgccccggcggagtgacgtccggccatccggtcaatcccctgctcggtgcaaaggtccttcccggtgaaaccgacatcgccctgcccggcccgctgccgttcatcctctcccgcacctacagcagttaccggacaaaaacgcccgcgccggtggggagcctcggccccggctggaaaatgcctgcggatatccgcttacagctgcgcgataacacactgatactcagtgataacggcggcagaagcctgtattttgagcacctgtttcccggtgaggacggttacagccgcagcgagtcactgtggctggtgcgcggcggcgtggcgaaactggatgaaggtcaccggctggccgcactctggcaggcgctgccggaagaactccgcttaagtccgcatcgttatctggcgacaaacaatgcgccagaacatttccagttgctgatcaggatgcacggcgtccatctcagcgtgttccccgaggctgaatacggcgttcgccagccagcgccagttggcgcgcgggcgaatcacttcgatatcgcagccgacttcgccttcatcactcaacagcagggcgatatctggagcgtgcgcttaagtacagtaactgtccaccagactactccgatacaatcaggggtaggtaccgagctagcggaaggtatcaatcagctcgtacctcgctccttcagtatcactaaaattgtccgtgagatgctcgaagcacacctggtgcaagagctggaaatcaaagaagcggggaaccgtggccgtccggcggtggggctggtggttgaaactgaagcctggcactatctttctctgcgcattagtcgcggggagattttccttgctctgcgcgatctgagcagcaaactggtggtggaagagtcgcaggaactggcgttaaaagatgacttgccattgctggatcgtattatttcccatatcgatcagttttttatccgccaccagaaaaaacttgagcgtctaacttcgattgccataaccttgccgggaattattgatacggaaaatggtattgtacatcgcatgccgttctacgaggatgtaaaagagatgccgctcggcgaggcgctggagcagcataccggcgttccggtttatattcagcatgatatcagcgcatggacgatggcagaggccttgtttggtgcctcacgcggggcgcgcgatgtgattcaggtggttatcgatcacaacgtgggggcgggcgtcattaccgatggtcatctgctacacgcaggcagcagtagtctcgtggaaataggccacacacaggtcgacccgtatgggaaacgctgttattgcgggaatcacggctgcctcgaaaccatcgccagcgtggacagtattcttgagctggcacagctgcgtcttaatcaatccatgagctcgatgttacatggacaaccgttaaccgtggactcattgtgtcaggcggcattgcgcggcgatctactggcaaaagacatcattaccggggtgggcgcgcatgtcgggcgcattcttgccatcatggtgaatttatttaacccacaaaaaatactgattggctcaccgttaagtaaagcggcagatatcctcttcccggtcatctcagacagcatccgtcagcaggcccttcctgcgtatagtcagcacatgagtcatctcatactgcgcgatgtgatgcctgatagctttcattaa

SEQ ID NO: 143795 - DNA, 2721 bp, Homo sapiens
atgacccgcacactcaagccgttaattcttaacaccagcgcactgacgctaacgttaatcctgatttataccggcatttcggcccatgacaaactcacctggctgatggaagtgacaccggtgattattgtcgtgcagctactgcttgccaccgccagacgttatccgttaacgccgctgctctatacgctcattttccttcacgccatcatcctgatggtcggcggacaatacacctacgcgaaagtccccgttggttttgaggtgcaggaatggctggggttgagtcgtaatccgggtaccgagctcatagtcgtatcaaaagccgttcagccgccaccggagccggtggtagagccagaaccggaacgtgagccgatccccgaaccgccaaaagaagcaccggtggtcattgaaaagccgaagccgaaacctaagccaaaaccgaagccggtgaaaaaggtacaggagcagccaaaacgcgatgtcaaacccgtagagtcgcgtccggcatcaccgtttgaaaatacggcaccggcacgcctgacatcaagtacagcaacggctgcaaccagcaagccgggtactcaaaaactcacccagcctcaacttgaaaatgattcatatgccaaggaaaaaccattcaaatccattccgaaatttcctgtcaactttttaagttcaacctggcaggaaggcggcagcatggcgcacttgctgggcaccgatgacgtaggccgtgatgtgctgtcgcgcctgatgtacggtgcgcgcctgtcgctgctggttggctgtctggtagttgtgttatcgctgattatgggcgttattctcggcctgatcgccggttactttggcggcctggtcgataacatcattatgcgcgtggtcgatatcatgctggcgctgccaagtctgctgctggcgctggtgctggtggcaattttcggcccgtcgattggtaacgccgcgctggcactgaccttcgctggcttgccgcactatgtgcgcttaacccgcgccgccgtgctggtggaagttaaccgcgattacgcgtcgctcggtttctctaacgccattctcgatatggctgctcttggtttcctcggcatgggggcacagccgccaacgcctgagtggggcaccatgctctccgacgtgttgcagttcgcgcaaagcgcctggtgggtcgtgaccttcccgggtctggcgatcctgctgacggtgctggcatttaacctgatgggtgacggtctgcgtgacgcgctcgatcccaaactgaagcataagaggttcgagatggcgttattaaatgtagataaattatcggtgcatttcggcgacgaaagcgcgccgttccgcgccgtagaccgcatcagctacagcgtaaaacagggcgaagtggtcgggattgtgggtgagtccggctccggtaagtcggtcagttcactggcgattatggggctgattgattatccgggccgcgtaatggcagaaaaactggagtttaacggccaggatttgcagcgtatctcagaaaaagagcgccgcaacctggaagtttccaaattcagatgtatgcagcgtgaacgccttatccggcatctcaatatcagatcttacatgcgccgctttcagcagccatcgtcctggattgacggcaccagatcgtcttgtgcgtcttcagcgccgtcacggcgcctgcgcggcatggctgggaacgccgatgccagcatcgacaaccaccggcactgtggcctgctggataataatctccagcatggcgcgggtttccagtccctgattcgagccaatcggcgcgccgagcggcatcaccgctgcacagccgacttcttccagacgtttacacaataccggatcggccccgcagtaaggcagcacgacaaatccctgttgtaccagcgtttcggcggctttcagggtttcgatgggatcgggcaacagccagcgggcgtcaggcagggtcacacccgccgcgataagcggttcgaggatagcgtcgttgtgctggcgcaagtcgacacgtttcatcgccagtgtcaccagctggctgccggaagcgcggatcgcggggatcctccaagggcgactgctgagctgcagatcagcccgtccagttacttctggtttaggcaggagttgcacgtcattctcagacgaaccgatgactggatggatggccgccgcagtcgtcacactgatgatacggatgtgcttctccgtatacaccatgttatcggagagctgccaacgtatggttatcgtcgggtatgggcgctgcttcgcagacaggcagaacttgatggtatgcctgcgatcaatgccaaacgtgtttaccggatcatgcgccagaatgcgctgttgcttgagcgaaaacctgctgtaccgccatcgaaacgggcacatacaggcagagtggccgtgaaagaaagcaatcagcgatggtgctctgacgggttcgagttctgctgtgataacggagagagactgcgtgtcacgttcgcgctggactgctgtgatcgtgaggcactgcactgggcggtcactaccggcggcttcaacagtgaaacagtacaggacgtcatgctgggagcggtggaacgccgcttcgggggatctccagaattttctcaaaccgtatggtctggtttgaagatgatcaaatcagtgccgagctggtgcagatcctacaagtattag

SEQ ID NO: 143796 - DNA, 619 bp, Homo sapiens
ctctgtactggggtattcgctggtttgttctagagtgcttttggcctgcttttggcctggttccgatttttggccgcgaagcaggcgaaaaacctatggcaccgccccccagtcgtgctactctttttacgtcgcacttgactgtggaggcgtttcccgtctggtcatatttgtatcctggcgaaacccccaggttgcacccacgagcgcacaccagaaccgtcccagccgcaatccggtatccagaccgccaaacacccaacgggttgcgaggcgcaaacacttgcagggcgggagtagttccccgaatgtcgttcgaggcataccgatcatcacagtactccgattttgtatagctagctccctgatcggatcttctgaagcggacttcaggtgggcttcggttcttcatagtattcatgtagcacgcagacagcagcaacaaggtcattaagcgtccaatgcacattttccatggcaagcaaaccataccacatacaaaccgagccaccataagaaacagagcaatggtccattgattattgcgttccatcaggttacgtaccacatcgttgacaggataaacccatagtgcggtgaccaaacacaattgggccat

SEQ ID NO: 143797 - DNA, 1309 bp, Homo sapiens
ccaagtacggctttgtccactacaccttacacactctggggggcaccgctcgggctctcgtagccactgactaccgcccactaacgaaactctctttggacaatggctttcaaacggtagaccacttgcaaatatcccaatgcccctacattcccccttacaactttcccaccgatacgagtcctggcacgcctggcctattacaacctccggaaggtcacgcgtatgatgcgtattggcgctgcgtacgggcagttcgggggcaacgagtctctgccctgcacggtccgcccgtccatctccgttcagtgtatccatctgcgagtgcatagtgtttgcgcctcgcaacccgttgggtgtttggcggtctggataccggattgcgcctggctacggttctggtgtgcgctcgtgggtgcaacctgggggtttcgccagatacaaatatgaccagacgggaaacgcctccacagtcaagtgcgactactaccgcatggcagccttcggccaccacgcctaccgcatgcaggcgctgacgtgctctatgactgcctgcccctgtaccactcggcaggaaacatcatcggcgtggggcagtgtctcatctatgggcgacagtcgtcctccgcaagaaattctcggccagccgcttctgggacgacgcatcaagtacaactgcacgggaattggaccctgggatgggaagggcgatgagtctggggcttccaggcccagaaagcagcaggccagtggctggctctgggcctgtccccggatcttcctcgtgatccctcattccagccaccctgctgcccgcaggaccaatggcagcgtagggggttccaaccggaaccgctttgttataataaccggaccgggcccccagttggccccaaaaggcctttggcaatggcccattggccaagatccggtgaccgaaatagcgacgctgatcggtacgcatgacctgataatgttcgactgtatcggcagcgtgtcagcgccgacaatacagccattagaaaaactcctatcgattgtgcgctacccggcacaggttgggttattttttgccacgcgtcgctgccaggctggcgctactggcaagcagagccagcagcgcaatccggttttattcattttttaccagcgtggaatatcagtcttcacatcggcttttgcgcccgttgccgtaacagcgccaccacgtcaaagccgtcgccaatttccacgcctttcaccgcttgatgctcatcagcgcatgggcgatgtcagcatccaggcggtcaaagaagctcgtacctgctga

SEQ ID NO: 143798 - DNA, 2830 bp, Homo sapiens
atgctgcccgactcatcagtccgtttaaataaatacatcagcgaaagcggaatttgctcacgccgcgaagcggatcgctatatcgagcaaggcaatgtgttccttaatggcaagcgagccaccattggcgatcaggtgaaacccggcgacgttgtgaaagtaaacggtcagttgattgaacctcgggaagccgaagatttggtacttatcgccctgaacaagcccgttggtattgtaagcaccaccgaagatggcgagcgcgataacattgtcgatttcgttaaccacagcaaacgcgtgttcccgattggccgcctggataaagactcccaggggctgattttcctcaccaatcacggcgatctggtgaataagatcctgcgtgctggcaatgatcatgagaaagagtatctggtgacggtcgataaaccgattaccgaggagtttattcgcggcatgagtgcgggggtgccaatcctcgggacagtgaccaaaaagtgcaaagttaaaaaagaagcgccgtttgtcttccgcattaccctggtgcaggggctgaaccgtcagatccggcgcatgtgcgagcatttcggctatgaagtgaaaaagctggaacgcacgcgcatcatgaacgttagcttaagcggcattccgctgggggaatggcgcgatttaaccgacgatgagttaatcgacctctttaagctcattgaaaattcctcttccgaggtaaaaccaaagcgaaggccaaaccgaaaacagcgggcatcaaacgtccagtcgttaagatggaaaaaacggcggaaaaaggcggtcgcccggcgtccaacgcaaagtagtgatgatgccattagaggccagcagcctgatggggtcgattgccgggattgccgagctggtgaaagacagcgccaacaaacggactcagccatgatggagttaatggtcgttcatccacatattttctggctcagtctcggcggtttgctgctggcagccgagatgctgggcggaaatggttatttgttgtggagcggcgtggcagcggtgattaccggcctggtggtctggctggtgccgctgggttgggagtggcaaggggtaatgtttgccatcctgacgctgctcgccgcctggctgtggtggaaatggttgtcgcggcgggtgcgcgaacaaaagcacagcgatagtcatttaaaccagcgcgggcagcagctgattggccgacgttttgtgctggaatctccgctggtcaacgggcgcggtcatatgcgcgtcggtgacagttcatggcctgtcagcgccagcgaggatctcggtgcaggcattcgccagtgccagcagctggtcgcgcatggattgcagctcctcaatgtgtcgttcgatctccgccaccttttccagcgtgggcggttggagttcggctgtgcgctgcggttgttaacagattcccagtcgcggctttcacgtaagccccgcggttggcgcggattgtacgggtattcgcccccttgtggggacatagttcggtaccatcaccacgacctctctgtcgccacgctgcatgtgcacatcaaccacgacgactgtctggaaatcgccgtgttgaaaggtgacatgggtgacgtgcagcattttgccgatgacgttatcgcccagcgcggctttttcttcgctttttcgtatgaagatactgtcattaaaataatagaaaaggattttacgatgagcggaaaaccggcggcgcgtcagggtgacatgacgcagtatggcggtagcattgttcagggttcagccggggtacgtattggtgcccccaccggcgtggcctgttcggtgtgccccggcggagtgacgtccggccatccggtcaatccgctgctcggtgcaaaggtccttcccggtgaaaccgacatcgccctgcccggcccgctgccgttcattctctcccgcacctacagcagttaccggacaaaaacgcccgcgccggtggggagcctcggccccggctggaaaatgcctgcggatatccgcttacagctgcgcgataacacactgatactcagtgataacggcggcagaagcctgtattttgagcacctgtttcccggtgaggacggttacagccgcagcgagtcactgtggctggtgcgcggcggcgtggcgaaactggatgaaggtcaccggctggccgcactctggcaggcgctgccggaagaactccgcttaagtccgcatcgttatctggcgacaaacagtccgcaggggccgtggtggctgctcggctggtgtgagcgggtgccggaaagcggatgaggtgcttgctgcgccgctgccgccgtaccgggtactgaccgggctggtggaccgcttcgggcgcacacagacgttccaccgcgaagccgccggtgaattcagcggcgaaatcaccggcgtgacggatggtgccgggcgtcacttccggctggtactgaccacgcaggcgcagcgggcagaagaagcccggcagcaggccatttccggcgggacggaaccgtccgcttttcctgataccctgccgggttacaccgaatatggccgggacaacggcatccgtctgtctgccgtgtggctgacgcacgacccggaatacccggagaatttacctgccgcgccgctggtgcgctatggctggacgccccgcggcgaactggcggcggtgtatgaccgcagcaatacacaggtgcgcagctttacttacgatgataaataccggggccggatggtgccgcccgtcacacgggccggacggaatctgtaccgttacacagcgagggcggtgacagacagctaa

SEQ ID NO: 143799 - DNA, 3078 bp, Homo sapiens
atgcaacgagtcaccatcacgcttgatgacgatttactggagacgctggacagcctgagccagcgtcgtggttataacaaccgttccgaagctatccgcgacattctgcgtagcgccctggcgcaagaggccacccagcagcacggcacgcaaggtttcgcggtgctgtcgtatgtgtatgaacacgaaaaacgcgacttagccagccgcattgtctccacccagcatcatcaccacgacctctccgtcgccacgctgcatgtgcacatcaaccacgacgactgtctggaaatcgccgtgttgaaagatactgtcattaaaataatagaacaggattttacgatgagcggcaaaccggcggcgcgtcagggtgacatgacgcagtatggcggtagcattgttcagggttcagccggggtacgtattggtgcccccaccggcgtggcctgttcggtgttgcccggcggagtgacgtacgggcatccggtcaagtccctgctcggtgcaagagtgcttttggcctgcttttggcctggttccgatttttggccgcgaagcaggcgaaaaacctatggcaccgccccccagtcgtgctactctttttacgtcgcacttgactgtggaggcgtttcccgtctggtcatatttgtatcctggcgaaacccccaggttgcacccacgagcgcacaccagaaccgtcccagccgcaatccggtatccagaccgccaaacacccaacgggttgcgaggactctagaggatcccccccatatgatcttgcctgcattgtgctgggtactattccagctggcggtcattgtgcgtatgacacgctcctcgatgctggaagtgctgggcgaggattacatccgcaccgcgcgcgccaaagggctaacccgcatgcgggtgattatcgtccatgcgctgcgtaacgcgatgctgccggtggtgaccgttatcggcctgcaggtgggaacattgctggcgggggcgattctgaccgaaaccatcttctcgtggcccggtctgggacgctggttgattgacgcactgcaacgccgcgactatccggtagtgcagggcggcgtattgctggtggcgacgatgattatcctcgtcaacttgctggtcgatctgctgtacggcgtggtgaacccgcgtattcgtcataagaacgcaccggtgccgatgaccccgttacaggagttctggcactattttaaacgcaacaaaggcgcggtcgtcgggctggtttacgtcgtcatcgtgctgttcatcgcgatctttgccaactggattgcaccctataacccggcggaacagttccgcgatgcactgctcgccccgccagcctggcaggaaggcggcagcatggcgcacttgctgggcaccgatgacgtaggccgtgatgtgctgtcgcgcctgatgtacggtgcgcgcctgtcgctgctggttggctgtctggtagttgtgttatcgctgattatgggcgttattctcggcctgatcgccggttactttggcggcctggtcgataacatcattatgcgcgtggtcgatatcatgctggcgctgccaagtctgctgctggcgctggtgctggtggcaattttcggcccgtcgattggtaacgccgcgctggcactgaccttcgttgccttgccgcactatgtgcgcttaacccgcgccgccgtgctggtggaagttaaccgcgattacgtcaccgcgtctcgcgtggcgggaaacacccggtcaccatttatcacggtggttcgttccccgctaacgactgacggtagtagggtggatcccgatggaatctttacagttgccaacctaatggggtctgaaatgtccatggcgccgcatcctatgaccgagggtgtatacacatatggacccgttgccaaacttgacgctgattccccaggttttaacaatagccagattaccctgctcaaagggtggcattgcggggagaggaatattgtcggcagcctgatggaagtcggtgcccacaacagccggaagctggatagcagagttgctggcggcaaaggacagaacgctggcggcagcaacggcaaagcggaagggctgtatctggtcgcggtggattaccctgaccgttatctcgacaaaacccatcagttttatgagaaacatggcggcaaaacgattattctcgcccgttttgtgccgatcgtcagaacgttcgccccgtttgttgcgggaatgggccacatgtcgtaccgtcatttcgccgcttataacgtgatcggcgcactgttgtgggtggtaatagaatacacccccccgatacttctgagcgaggtctcttctatacgatgccggtcctctgtggaagtttatttagctggccagctcacacctcatggagaccaacacttctttagatgccctaaaacaggaaagttgggtcagttcaccttgcaacaggtatactggtgcatccaggtttttgacgcctctggcttgcagccctacttcctcctgtactacatcctgcagctggtcgacaacttccagcagcctgtagactgccagctggtgaacgacttggccaaaatccagttgtccttagtcctcgaaagctttaaagcagatatccagaaactgctcacttccctgcccgcacaccatttccagattgtgctggaaattaccgagcgcgatatgttgaaagagcaagaagccacacaactcttcgcctggctgcactcggtcggcgtagaaattgctattgatgacttcggcaccgggcacagcgcgcttatctatcttgagcgttttacgctcgattatctgaaaattgaccgtggatttatcaacgccatcggtacggaaacgatcacttcccccgtacttgacgcggtgctgacgctggcgaaacgcctcaatatgctgacggttgctgaaggggtcgaaacgccggaacaggcgcgatggctaagcgaacgcggcgttaatttcatgcaaggctactggattagccgcccgttaccgctggacgattttgttcgctggctaaagaaaccgtatacgccgcagtggtaa

SEQ ID NO: 143800 - DNA, 1557 bp, Homo sapiens
  misc_feature (1)...(1557): n = a,t,c or g
ttangcagcgggctggcgcggctgattaatgacattcctcttcccggtacaacgggcgttgagcgcgtactttttcgcgcacttggcgtctctgaccgtgagatgaactggaagcaatatctttgtgccattctcggcctgaacatgctggggctggcggtgctgttttttatgttgctcggtcagcactatctgccgcttaatccacagcagttgccagtgctgtcgtgggatctggcgctgaataccgccgtcagctttgtcaccaataccaactggcaatcttatagcggtgaaaccacgttgagggtagtggcgctggcaaaagttggcggcggtgttgacagcctcagcacgccaatcggtaaagtcgctggcgtactgctggcaacggtttgttacctggcggtggggccgcttttcgctacgccgcgtacagctaccgtttcctttgaagtggggattgcgccgctgacgggtgattccgcgctgccgctgtttatctacagcctggtctatttcgctatcgttattctggtttcgctctatccgggcaagctgctggataccgtgggcaacttccttgcgccgctgaaaattatcgcgctggtcatcctgtctgttgccgctatagtctggccggcgggttatggtggagagcacgcagggaaaagcaagctctctcacgtcttttaataaaggcactaatgagctgttgccggggatacccatgagcaggtttgcgaggccataaccgaggcctttttcgcccattatggcgagcgcgtggaagcggaaatcatctccccgaacaaaacgccagacttgccaaacttcgccgaaacctttgcccgccagagtagctgggaatggaacttcggtcaggctccggcattctcgcatctgctggatgaacgctttacctggggcggcgtggaactgcatttcgacgttgaaaaaggccatatcacccgcgcccaggtgtttaccgacagcctcaaccccgcgccgctggaagccctcgccggacgactgcaaggctgcctgtaccgcgcagatatgctgcaacaggagtgcgaagcgctgttggttgacttcccggaacaggaaaaagagtttctcttcgatttgccggattttttccggcatttcttgcgcaatgtggcgaaacgcctcgctgatacgcggatctctggcgaccgtttgccagaactgctgcgccagcgggatcgccgttaaccaagcgcttttactgacgttaagatcaaacttcacctcaatggcagcatcacgcagcattccagcgctgtttggtgcatagaccatcggcagcatgtcgtagacgggcgtcagcgcaaatggcggttcagataaataaaacgataaattacctgcgtgcatatcgctgttggcgataagtcgcccaaatgcccagatcacttctgtttgcgccacgctctggtgagtgacaagttgttgctcacacaaacggcgcattgcctgcggccacgatcccggagaagagataaactcaaaccactgtagttcccgaggcat

SEQ ID NO: 143801 - DNA, 4107 bp, Homo sapiens; identical to SEQ ID NO: 132421

SEQ ID NO: 143802 - DNA, 1266 bp, Homo sapiens
atggctcccgaaaatcatgatggggaaaaacactttgctgaaattgtgaaagatttcggcgaaaccagtatgaatgataacgggctggatactggcgagcaggcaaaagctttcgcattgggaaaagtccgcgacgcgcttagtcaacaggttaatcagcacgtagagtcctggctatcaccgtggggaaatgccagtgttgacgtcaaagtggataacgaaggacatttcaccggcagtcgtggaagctggtttgtgccgttacaagataatgatcgttatctcacctggagccagcttggtcttactcagcaggataatgggttggaacaacggatggcgcgcgggtacgacctgacagctcggatgcgcatgccgttctatcaacacctcaataccagtgtcagcctagaacagtatttggagagggaacagatgcgatatccggttgatgtatacacaggcaagattcaggcttatcccgaaggcaaacccagcgcaattgctaaaatccaggttgatggtgagttgatgctgacggagctggggctggaaggtgacgagcaggcggagaaaaaggttcacggcgggccagacagagcgctgtgtcattatcctcgtgagcattatctctactgggcgcgggaatttccggaacaggcggagttgtttgttgcgcctgcgtttggtgaaaacctctcaaccgacggcctgacggaaagtaatgtttatatgggcgatattttccgctggggagaggcattaattcaggtcagccagccgcgctcgccttgctataaactcaattaccattttgatatcagcgatatagcgcagttgatgcaaaacacagccacgatgctgctgaatggcggtttcaacaatcgccagccccaaacctgtaccgccagattcacgatcgcgtgcttcatcggtacgatagaacggacggaaaatctgttcgcgatcttccgggctaacgccaggaccatcgtcgtccaccgtaatggtgataccgtctttatctaccgcaaagcccacttcaatcttcgtccagcccagagccgcgtccgcacccctatgcaggcagaatcacatcgcacccggagagtaacagagcgccacacagccacagccggaaagagaggaacccaaagacccgagcaacagccccacgcgaccaacctgacggcggacccacgacgcaaagagcgccgccccacgcacaagacgcagccacaggaggggggaacgcaacgcagatag

SEQ ID NO: 143803 - DNA, 831 bp, Homo sapiens
atgaaatccatggcttcttctcaggaggagaatcctggggcgcatagcacattgcgaacaagtgaattcagttcacccacccgcgctcgcccttgctataaactcaattaccatttggatatcagcgatatagcgcagttgatgcaaaacacagccacgatgctgctgaatggcggtttcaacaatcgccagccccaaacctgtaccgccagattcacgatcgcgtgcttcatcggtacgatagaacggacggaaaatctgttcgcgatcttccgggctaacgccaggaccatcgtcgtccaccgtaatggtgataccgtctttatctaccgcaaagcccacttgagaagttttattgtggcgcctcgtttatttagaacgggcgcccgtttgtttcaaccggggctttttttagacaccgggtttaacaaagacgccatgtccatgggaaaaggtaacattattttccctccaatggtcggcttacaggcaggcgaacacgtctggactgcggcattcggcttcctcattactgccgttggcctgccggtattaacggtagtggcgctggcaaaagttggcggcggtgttgacagcctcagcacgccaatcggtaaagtcgctggcgtactgctggcaacggtttgttacctggcggtggggccgcttttcgctacgccgcgtacagctaccgtttcctttgaagtggggattgcgccgctgacgggtgattccgcgctgccgctgtttatctacagcctggtctatttcgctatcgttattctggtttcgctctatccgaccctgttgtcgacggcctccgacaaataa

SEQ ID NO: 143804 - DNA, 1831 bp, Homo sapiens
aaaatgttttatcgccccgcacacctgaagggacgggtaaacgatgcgtggaaatcactggaatttaaacgtagtgaccattcactcaatatatataacccaactgaatattacgtcgtatttgccggactggcagtcgataaaaccgatctcacaagcaaaattgaatatatcgcgcccggagaacataaacagttaccacttcctgcatctggcggaaagaacgtgaaatgggctgcgatcaatgattatggcggcagttccgggacagaaactcgtccactgcaataaaaaatataaaaacacaggtcatcagggaatgccacaacgacaccaccagggacataaacgcacaccgaaacagttggcgctcatcatcaaacgttgtttgccgatggtgctcactggcagcggcatgctttgcactaccgctaacgccgaagagtattatttcgaccccattatgctggaaaccaaaaaaagtgggaactcctctagaggaccctttgggcccttttaccagaatcaactctgtactaacatgcgaactaggaatctcttaaacctggcgacgctcatagccaacaggagagaaccgctagacagccagcatcacaacagcaccgaggagggacgcaacgccacgcatgagaccacgaggacgcagtcagagttagacaacacgcagagcgaagcccccacttcaaagccaggagaattcacgcgcaacgcggagggaggatttgctgcgcgcgcaaaacagctcaacttagaactggatgacgcggcaaatcaggtgctctgctactgttatgaaggtaacctgctggcgctggctcaggcactggagcgtttatcgctgctctggccagacggcaaattgacattaccgcgcgttgaacaggcggtgaatgatgccgcgcatttcaccccttttcattgggttgatgctttgttgatgggaaaaagtaagcgcgcattgcatattcttcagcaactgcgtctggaaggcagcgaaccggttattttgttgcgcacattacaacgtgaactgttgttactggttaacctgaaacgccagtctgcccatacgccactgcgtgcgttgtttgataagcatcgggtatggcagaaccgccggggcatgatgggcgaggcgttaaatcgcttaagtcagacgcagttacgtcaggccgtgcaactcctgacacgaacggaactcaccctcaaacaagattacggtcagtcagtgtgggcagagctggaagggttatctcttctgttgtgccataaacccctggcggacgctctgtttggcggcacctttgatccggtgcactatggtcatctaaaacccgtggaaacgctggcgaatttgattggtctgacgcggccggaagcgaacagcgtgcagcgtaaacacatgcttgaactggcgattgccgacaagccattatttactcttgatgaacgcgagctaaagcgcaatgccccctcttacactgcgcaaacactgaaagagtggcggcaggtggtgccaattcttacctctatctggtcacgtaaagtcaaagccagagcagcgaaaatcgaaattttaggcaagattcaggcttatcccgaacgcaaacccagcgcaattgctaaaatccaggttgatggtgagttgatgctgacggagctggggctggaaggtgacgagcaggcggagaaaaaggttcacggcgggccagacagagcgctgtgtcattatcctcgtgagcattatctctactgggcgcgggaatttccggaacaggcggagttgtttgtcgcgcctgcctttggctga

SEQ ID NO: 143805 - DNA, 477 bp, Homo sapiens
atgcaaagtattcgccctccagattgtctatccgtgcatctcaacccgaacgtcagagaaccggtcaatcgcattctggggcatgtgaaaaatgtcattctgatcgatccccaggagtatttaccgtttgtctggctgatgaaccacgcctggctgattttgaccgactcaggcggcattcaggaagaagcgccttcgctggggaaacctgtgctggtgatgcgcgataccactgagcgtccggaagcggtgacggcgggtacggtgcgtctggtaggcacggataagcagcgaattgtcgaggaagtgacgcgtcttttaaaagacgaaaacgaatatcaagctatgagccgcgcccataacccgtatggtgatgcagcgtttgcctcacggcaaaaacaggtaattggtgtcgatatcaaccaacatgcggttgataccttcaatcgtggggacatcgcctatcgtcgaacctga

SEQ ID NO: 143806 - DNA, 586 bp, Homo sapiens
gaagcgccttcgttggggaaacctgtgttggtgatgcgcgatcccactgagcgtccgaaacgggtgacggcgggtacggtgcgtttggtaggcacggataagcagcgaattgtcgaggaagtgacgcgtcttttaaaagacgaaaacgaatatcaagctatgagccgcgcccataacccgtatggtgatggtcaggcatgctctcgcattctggaagcgttaaaaaataatcggatatcactatgagttttgcgaccatttctgttatcggactgggttatatcgggctgccaacggcagcagcgtttgcctcacggcaaaaacaggtaattggtgtcgatatcaaccaacatgcggttgataccatcaatcgtggcgaaatccatatcgtcgaacctgatttggcgagtgtagtaaaaactgccgtagaaggcggttttttacgagcgagcacgacgccagttgaagcggatgcctggctgattgctgtacccacgccgtttaagggcgatcatgagccagatatgacctacgttgaatcggctgctcgctccattgcgccagtgctaaaaaaaggcgcgctggt

SEQ ID NO: 143807 - DNA, 557 bp, Homo sapiens
ctgcagcagcgacagcgtgcgctgcagtgttggggatatcgtggcctttcaggtcaaagaaagatatcacaaccacgctgttgaagttcgcgcacaaactggggcccgaacaatgtacacatctctttgcagaccttcagacgacatccgcttatacgtgtctctatcgcatatcacatcctccactgtatcgcacacgcgacgtcatcatacgatatcacactataacgcgagtcactacggtactatcaaccaacatgcggttgataccatcaatcgtggcgaaatccatatcgtcgaacctgatttggcgagtgtagtaaaaactgccgtagaaggcggttttttacgagcgagcacgacgccagttgaagcggatgcctggctgattgctgtacccacgccgtttaagggcgatcatcccttcatgaggtcagagctgggcatccagggagacagcgaccctggccatgggggccacgccacccaggccccggaggcccagctggccgtccgcccgtgcggacacccgggagccaacactgacccgaagacag

SEQ ID NO: 143808 - DNA, 440 bp, Homo sapiens
atgctgccagctcacctagatgcgtgcgtcactacgctgcagaagatccgatggactcttagcgtggtcgatccaactctggctctacgagttccgttaccagccctgtctatacgtgatgacccaccgctcagggcttatctgccaggcaggggtgcactaaaggtcatcaggttcgacgatatggatttcgccacgattgatggtatcaaccgcatgttggttgatatcgacaccaattacctgtttttgccacgcgtcacttcctcgacaattcgctgcttatccgtgcctaccagacgcaccgtacccgccgtcaccgcttccggacgctcagtgaaatactacccgccggactttgacccatcaaagatccccaaactcaagctccccaaagaccggcagtacgtggtgcggctgatggcccccttcaacatgag

SEQ ID NO: 143809 - DNA, 970 bp, Homo sapiens
gatcagaatgacatttttcacatgccccagaatgcgattgaccggttctctgacgttcgggttgagatgcaccggatagacaatctggatgtcctggtgcgtggtggcgatgtctgccaagtcgtggtatcggtgccgctatcgtacgtcgtttcgtcaccgatggggccaatgtacgattcacctatgcggggtcgaaagatgccgctaaacgcctggcacaagagactggagcgacagcagtattcacagatagtgctgacagagacgctgtcattgatgtcgttcgtaagagcggcgcattggatatccgtcaggtcccgttcacgccgccacacccgttttgccaccctgcggcccagcggtcgtaaagatagcgactttcgaccagcggctcttcatattgtgtccgcgtgtagtgcaccagccggtgtggactgtcgtaatggtaccggtgattctcgcatgcctgcaggtcgtttagatgacaaccagattgtcttcggtacgaccaacggaatgaccatcagtaccgggctggagtatgggccggataacgagagtaatcctttctcaattaacgcaggccgcccatcggcaccatcgcatctttcttggcggacatcgccagcatatcggcatatttgtaggtttcgcgggtgatctgctcgatggtccagtctttgtattctgcttcacgctgcttgatgaaataagcgtttttagcaaagcgcgcggggtccattaccaccggaacgcacagactttgttcaccgtggtattaccccctctcaccccatcatcaatgaccacaataaacgctggtatcagccgtcagactcgccctccaatgatgcacgttgtcagacacaaaggatttagcacagtggcggcatccacctgtacaaggtgtggtcgaaaggttgaatcggccaacgaagtccggagagctctaaatacggagtcatga

SEQ ID NO: 143810 - DNA, 992 bp, Homo sapiens
atgactttagaggcacttcaagacacttttgccgcagagattgcctgctcaggagcgaaacgtctgggacgacctggaacgcgagattgttttttagtgaccattacaaaacctgttgacagaaagttaaaacagttttgtaatgcatgttacataataaatcaaggagtccttatgggcgcttttacaggtaagacagttctcatcctcggtggcagtcgtggtatcggtgccgctatcgtacgtcgtttcgtcaccgatggggccaatgtacgattcacctatgcggggtcgaaagatgccgctaaacgcctggcacaagagactggagcgacagcagtattcacagatagtgctgacagagacgctgtcattgatgtcgttcgtaagagcggcgcattggatatcctggtggtaaatgcaggtattggcgtctttggcgaggccctggaattaaatgccgacgatattgatcgccttttcaaaatcaatattcatgctccttatcatgcctctgttgaagccgcccggcagatgcccgaaggcgggcgcatcttaatcatcggctccgtgaatggcgatcgtatgcctgttgcaggcatggctgcttatgccgccagcaaatctgccctgcaaggcatggcgcgcgggctggcccgtgattttggaccgcgtgggatcaccattaacgtcgtccagccagggccaattgataccgacgctaatcccgccaacgggccaatgcgcgatatgttgcatagtttgatggctatcaaaagacatgggcaaccggaagagtcgctgctctatcatgcgggaattttgccacgtcagaaggcgattattctcggtagctttagcggcagcacgcccaatgattatgacgcaggttacaacctggagtcagtgtacgcgtttttgcgttcccgcctgtcgattccactcattaccggcctcgattttggtcatgaacaacgcacggttacgctgcc

SEQ ID NO: 143811 - DNA, 876 bp, Homo sapiens
ctacagaaagtgctggcgcgtgccggccacggttctcgccgtgaaatcgaatctattattgaagccggtcgtgtgagtgttgatggcaaaattgctaaactcggcgatcgtgttgaagttacccctggattgaaaatccgtatcgatggtcacctgatttcggtacgtgagtccgctgaacaaatttgtcgcgttctggcctattacaaaccggaaggtgagttgtgtacccgtaacgatccggaaggacgtccaacggtgtttgaccgtctgccaaaactgcgtggcgcacgctggattgccgtgggtcgcttggacgttaatacctgtggtctgctgctgttcaccaccgatggtgaactgatactcctgctccagcaccgccagttgcggtaaccagtaactgccgctacccccaagacccgaaatcaacaccactacgggcgcatcagcataagggggaggtgagagtgaaagtttcatcgcggcctcattggcgatatgcgcaattgtggcgatttccaccagcgcgtcaggttttaccagtccgcactgaatgcagaatcgcgccggtttatcacccggaaaaaactcggcgtagatttcgttaatcgcggcgtaatttttccagtcggtaataaagatgctgttgaaggtcacatccgccatcgtgccacccgccgtctcgatcaccttgcggatagtttccagaacgtggcgggtttgcgcctttgggtcatcggcaaacagcacgttattatgttgatcaaaagccagcgtaccggagacatacaccacgccatcagccagcgtgccgggaacgaagggggccagcggtgcgctgctgccagcgggaataattacggattttggcat

SEQ ID NO: 143812 - DNA, 3756 bp, Homo sapiens
atgactgcaagaggtggcttcctccgcgatgggaggaagcttggggagattaatcgtgagcgcctatttcgcgcagtttacgacctttcatcagattacgtcaatatgttccagcgaaacgtgtttggtttccggtaccagccacaatgtcagcaggataaacagtacgttcagagccgcatacacccagaaggtgttggcgttacccagcgtgttgagcatggtcaggaacgttgcgccaacgatcatgttggcaatccagttggtggcagtggagcaggtgatgccaaaatcgcggcctttcagcggctgaatttcggagcacagtacccaaatcagcggaccggcactcatggcaaaaccgacaataaacatcagcagcatggcgatggcgaaatactgcgccgacggagagtgaataccgatatgcatcattgtaccgagtacgcccatgccagcaggcatcgccaggaagcccagccggtcaacaaggccgattgcgataaaggtggcaagtacgttggtcaggccgacaatcacggtcccccacatttgctcggtagtgctggtataaccgtcagatcgaagatttcggcgcgtaataatgatgacacgcctgggaaggcgacaccaaaaggaagctctatgagcgaaaagctacagaaagtgctggcgcgtgccggccacggttctcgccgtgaaatcgaatctattattgaagccggtcgtgtgagtgttgatggcaaaattgctaaactcggcgatcgtgttgaagttacccctggattgaaaatccgtatcgatggtcacctgatttcggtacgtgagtccgctgaacaaatttgtcgcgttctggcctattacaaaccggaaggtgagttgtgtacccgtaacgatccggaaggacgtccaacggtgtttgaccgtctgccaaaactgcgtggcgcacgctggattgccgtgggtcgcttggacgttaatacctgtggtctgctgctgttcaccaccgatggtgaactggcaaaccgtttaatgcacccaagccgtgaagttgaacgtgaatatgccgtgcgtgtatttggtcaggttgacgacgcgaaactgcgtgatttgagtcgtggcgtgcagttggaagatggtccggcagcttttaaaaccatcaagttcagcggcggcgaagggatcaaccagtggtacaacgtgactctgaccgaaggccgtaaccgtgaagttcgtcgtctgtgggaagcggttggtgtgcaggtgagccgcctgatccgtgttcgttacggtgatatcccactgccaaaaggtctgccacgcggtggctggacggagctggacctcgcccagactaactatctgcgcgaactggtggagctaccgccagaaaccagctctaaagtcgctgtagaaaaagaccgtcgtcgcatgaaggcgaatcagattcgtcgtgcggtgaaacgtcacagtcaggtgagcggcggtcgtcgttctggcggacgtaaagcccgttgccatcacctgaactcacgccatgtgctccagcagagtgcgttcggtccgagcctagtaacgccgcgtttgccgcgccagctttaccaatcgccagcgtacccaccggaatgccgcgcggcatttgtacgatggagtaatggtctgcgtactttgcgtggcggacgcattatgctgaatggtaaagagatcaataaattatccactggagaacgtttactgcgcggtctggtttatctgccggaagatcgccagtcatccggactgaatctcgatgcttcgctggcctggaacgtctgcgcccttactcataaccttcgtggattctgggcgaaaaccgcgaaagataatgccaccctggaacgttatcgtcgggcgctgaatattaaattcaaccaaccggaacaagctgcacggacattatccggtggcaaccagcaaaaaatcctcattgccaaatgcttggaagcttcgccgcaagtattgattgtcgatgagccgacgcgcggcgtggatgtctcggcccgtaatgatatctaccagctgttgcgcagcatcgccgcacaaaatgtggctgtgctgcttatctcctccgacctggaagagatcgaactgatggcagatcgtgtgtatgtgatgcatcagggcgaaattacccactctgcactgaccgagcgcgatattaatgtcgagactattatgcgcgttgccttcggcgatagtcagcgaggcgtcatgctgaagtttattcagaacaaccgtgaaatcacggcactgctggcggtggtgctgctgtttgtattacccggttttctcgaccgccagtatttaagtgtgcaaacgctgaccatggtttatagcagcgcgcaaatcctgatcctgctggcaatgggcgcgacgctggtaatgcttacgcgcaatattgatgtttcagtgggttcgattaccggaatgtgcgcggtgctgttggggatgttactgaacgccggaattcacaacctgtggcttgtgtcgcacttactgctgttccctactctcgcatggggagaccccacactaccatcggcgctacggcgtttcacttctgagttcggcatggggtcaggtgggaccaccgcgctacggccgccaggcaaattctgttttatcagaccgcttctgcgttctgatttaatctgtatcaggctgaaaatcttctctcatccgccaaaacagcttcggcgttatagggaccgaactgtctcacgacgttctaaacccagctcgcgtaccactttaaatggcgaacagccatacccttgggacctacttcagccccaggatgtgatgagccgacatcgaggtgccaaacaccgccgtcgatatgaactcttgggcggattagccaaccttcgtgctcctccgttactctttaggaggagaccgccccagtcaaactacccaccagacactgtccgcaacccggattacgggtcaacgttagaacatcaaacattaaaggctggtatttcaaggtcggctccatgcagactggcgtccacacttcaaagcctcccacctatcctacacatccgcgacggcagaggatcccccgccaaagtcaacgatacgggtcactttaccagtgtagacgcggcccacttcgatttctgcagtgatctcttcgatacgacgaatagcatgtttcgctttctcgccgtcggtcgctgcaatcttcacagtaccgtcatcttcgatttcgatggtggtgccagtttcttcggtcagagcacggattacagaaccgcctttaccgataacatctttgatcttgtccgggttgatcttgatggtatggatacgcggatatgcagacgcgcacctttcagcctggttcagcgcaacctgcatgatctctttggtgataccttcaattttgatatccatctgcagtgcagagataccgtcgcgggaacctgcaactttgaagtccatatcgcccaggtgatcttcgtcgcccaaaatgtcagacagtacaacgtagttgtcgccttctttcaccagacccattgcgatacccgcaacggcagctttgatcggcacacctgcgtccatcagcgccagagacgcgccgcacacggaagccatagaagaggaaccgttggattcagtgatttcagacacaacacgtacggtgtacgggaatttgtccatatccggcatgactgcacagcacgccgcgcttcgccaagacgaccgtga

SEQ ID NO: 143813 - DNA, 1101 bp, Homo sapiens
atgcaggggaagattgagcagcacggcactcgaggatctgggtatgaaccaaagacaaaaaccacgggtaccgagctagaagtggtatccaccgaccgggccaaaagcatatcaaacgcctgggaaggcgacaccaaagtaagctctatgagcgaaaagctacagaaagtgctggcgcgtgcggcccacggttcttgccgtgaaatcgaatctattattaagcccgctcgtgtgagtgttgatggcacaattgctaaactcggcgatcgtgttgaatttacccttggattgaaaatccgtatcgatggtcacgtgatttcggtacatgaggtgtgtaccggtaacgatccgaaagcacgtccaacggtgtttgaccgtctgccaaaactgcgtggcgcacggtggattgccgtgggtcgcttggacgttaatacctgtggtctgatgctgttcaccaccgatggtgaactggcaaaccgtttaatgcacccaagccgtgaagttgaacgtgaatatgccgtgcgtgtatttggtcaggttgacgacgcgaaactgcgtgatttgagtcgtggcgtgcagttggaagatggtccggcagcttttaaaaccatcaagttcagcggcggcgaagggatcaaccagtggtacaacgtgactctgaccgaaggcagtaaccgtgaagttcgtcatggcgttcgcaagcctgccacgcctttattgccgggcaatacgctggcgatttttttacccttaaccggtgtgctgtgtgtggttctgctggcgatcctcgcggatcagtcgacgatcaatagtgaagcgctcatcaacagcctgacaatggggctggtggcgacattcatcgctttgctcctgttactgctgtggctggaatgggggccacagcgtcgccagttgtggctatggttgcccattttattacctgctctgccactggtggcgggccagtacacgctggcgctatggctgaaactggatggaagctggacggcggtggtctgggggcatctgctgtgggtgatgccgtggatgctgtttatcctgcaacccgcctggcagcgcattgattcacggttaatttga

SEQ ID NO: 143814 - DNA, 741 bp, Homo sapiens
ttatccggttatcaagccaaagcgccgtagctggcggcaatgaaagcgagcgaggaatatcaccgtcgttaatgcgccaagcagcgcgcagaacatatcggattgcgtgtcccactggtcgccctgggtgccgagaaaatcatccgctccctgacccattgccagcgctgcccaccactcgattaattcatacatcgcgcttatcgccagcgccacgcagcagaccaggaacgccaccattttacgtccgcgcacgtacatcccgcgaacgagaatttctcgtgccaccagtgcaggcaccagccccttcgtgagatagggaagactaaactcgttggagaacatgactgcatccaccccaccattttggagcgccatcagatcgtcccaggctttgtcgataacccagttcatccccaactgcgcatcaaaactcgggtcgccgggcaatgcacgtagatggcacatggcgatgaccgctttttccgtcccaataacctctttcagccaactcattgaaagtactcgtaagaacagcacgacgctggcgacaataccgaccgccacgacaacgccaataatcccaagcgacatcaattcagaaatcgaccaaccgaacatattgcccacggacaacgctgagatttgcgcactttcaccggcaaaactgaaaccgcctttgagcgccatttcagtgaagtaaggcgcgaactgggtggcgatcagcaggacggtaatcat

SEQ ID NO: 143815 - DNA, 673 bp, Homo sapiens
ggcggccttcctgagagaatgtaaagatccgcagaccatggtgcctaaagccattaacagtgtgatttggcgtattggcctgttttacgtcggctccgtggtgttgctggttatgttattgccggtggagcgcgtatcaggcggggcaaagtccgttcgtgacgtttttctctaaactgggtgtgccatatatcggcagcattatgaacattgtggtgctgaccgctgccctctccagcctgaattcaggtctgtactgcaccggacgtattctgcgctcaatggcgatgggcggttccgcaccgagttttatggcgaaaatgagtcgtcagcatgtgccgtatgccgggattctggcgacactagttgtgtatgtcgtcggcgtattcctcaactatctggtgccgtcgcgcgtatttgagattgtgttgaacttcgcgtcgctgggaatcatcgcttcatgggcgtttatcatcgtgtgccagatgcgcctgcgtaaagcgattaaagaaggcaaagcagcggatgcccactttacgccctaccacgcgacgcccctgcgcaacgtcatgttgcacatttatgtgctgaatggcgtaagccgcttcagcgttatcgataccaatcagatcgcgcagcggtgcaatcgcttcgccctgctctgcggcgcggc

SEQ ID NO: 143816 - DNA, 798 bp, Homo sapiens
gagcccagccgagcgtccgccgctgcccgtgcgcctctgcgctccgcgccatggccggcctcaactccctggaggcggtgaaacgcaagatccaggccctgcagcagcaggcggacgaggcggaagaccgcgcgcagggcctgcagcgggagctggacggcgagcgcgagcggcgcgagaaagctgaaggtgatgtggccgccctcaaccgacgcatccagctcgttgaggaggagttggacagggctcaggaacgactggccacggccctgcagaagctggaggaggcagaaaaagcctgcagatgagagtgagagaggaatgaaggtgatagaaaaccgggccatgaaggatgaggagaagatggagattcaggaagatgcagctcaaagaggccaagcacattgcggaagaggctgacccgcaaataccgaggaggtagctcgtaagctggtcatcctggagggtgagctggagagggcagaggagcgtgcggaggtgtctgaactaaaatgtggtgacctggaagaagaactcaagaatgttactaacaatctgaaatctctggaggctgcatctgaaaagtattctgaaaaggaggacaaatatgaagaagaaattaaacttctgtctgacaaactgaaagaggctgagacccgtgctgaatttgcagagagaacggttgcaaaactggaaaagacaattgatgacctggaagagaaacttgcccaggccaaagaagagaacgtgggcttacatcagacactggatcagacactaaacgaacttaactgtata

SEQ ID NO: 143817 - DNA, 2780 bp, Homo sapiens
aaaacgcgcaaatagcctcagtaaaagtgcagtatcttgataaccagaaaaagctggctgtaatgaacatcgaatataactaagtttctgaacaactcacgttgctgagcagaaaaatgcgatttaaccaaaaagcctgctgtacacttaagaaacaagaaggtgtaaggaggcgttatgaaaacgcgtattcatgttgtgcagggtgatattaccaaactggccgttgatgtgattgtgaatgcggctaatccgtcattaatgggaggcggcggcgtcgatggggccattcatcgcgcaacggctggcgttcgactgacgcccaccaacgcgaatatcctgtaccgccatcaggaacagattcgcccccggttctttcgccagttttacgcgcagacggtcgataatttgctgcgccgtttcgctgcgttcgtcgcgtggcttgagggtgataaacatcatcccgctgttcactcgcgaaccgcctgtaaagccggtgacattatccactgccggatcgtcacggataattttcatgaaatcctgcaacttaccgcgcatcgcctgaaacgaaatactctgatccgcctgaatcccgcccatcaacacgccagtgtcctgctccgggaagaaggttttcgggatcgagatatacagccagatattcagcgcaatggtgccaagcagcaccacgcccaccagacggccacacatcattggcggtaatgtcagagaaaccagcaacgatattacaatggcgactgcggcgaatgcggaaattaatgctgcagtcgatctagaagatccccccttcgcatttcaagagtcagtcatggccttttctcaagcggttagcggattaaacgctgccgccaccaacctcgatggtattggcaacaatatcgccaactccgccacctacggctttaaatcaagcacggcctcttttgccgatatgtttgccgggtcgaaagtgggactgggggtaaaaattgccggtatcactcaggactttaccgatggcacgaccaccaacaccgggcgaggtctggacgttgctatcagccagaacggttttttccgtctggtagacagcaacggttcggtgttctaacagccgtaacggacaattttaagctggatgaaaaccgtaacctggtgaatatgcaaggtttacagctgacggggttacccggcaaccggtacgccgccgactattcagcaaggggcgaatccgaccaatatttcgatcccgaataccctgatggcagcgaaaactaccaccacggcatcgatgcagatcaacctgaattccagtgatccgcttcctactgttacgccattcagcgccagcaatgcggatagctataacaaaaaaggttcggtgactgttttcgacagtcagggcgtgggtacagtgttcctcggtagtggtcagccgctggatggcaacaccactggctttcatttaatcaccgataatggcggcttcttcccccacggtttgctgcctgcgctggtgttgattcagggcgtagtgtttgcttttgcctccattgaaatggtgggtacagctgccggagaatgtaaagatccgcagaccatggtgcctaaagccattaacagtgtgatttggcgtattggcctgttttacgtcggctccgtggtgttgctggttatgttattgccgtggagcgcgtatcaggcggggcaaagtccgttcgtgacgtttttctctaaactgggtgtgccatatatcggcagcattatgaacattgtggtgctgaccgctgccctctccagcctgaattcaggtctgtactgcaccggacgtattctgcgctcaatggcgatgggcggttccgcaccgagttttatggcgaaaatgagtcgtcagcatgtgccgtatgccgggattctggcgacactagttgtgtatgtcgtcgggcgtatcctcaactatctggtgccgtcgcgcgtatttgagattgtgttgaacttcgcgtcgctgggaatcatcgcttcatgggcggttatcatcgtagctcgtaagctggtcatcctggagggtgagctggagagggcagaggagcgtgcggaggtgtctgaacttgtttggcgtgacaataccagccctggcgcggcgcagttaattgctcgcctgctggactcactgggcaaagcagaaggtattctgggcaccatcgctggcgatgacaccatctttaccacccctgctaacggtttcacagtcaaagacctacgttatccgttaacgccgctgctctatacgctcattttccttcacgccatcatcctgatggtcggcggacaatacacctacgcgaaagtccccgttggttttgaggtgcaggaatggctggggttgagccgcacatccgtatgacaagctgcggcactttttccaggggtttgtgctttcactggtggcacgagaaattctcgttcgcgggatgtacgtgcgcggacgtaaaatggtggcgttcctggtctgctgcgtggcgctggcgataagcgcgatgtatgaattaatcgagtggtgggcagcgctggcaatgggtcagggagcggatgattttctcggcacccagggcgaccagtgggacacgcaatccgatatgttctgcgcgctgcttggcgcattaacgacggtgatattcctcgctcgctttcattgccgccagctacggcgctttggcttgataaccggataacaacttgcgctttgttgatgccggatgcggcgtgaattcgatatc

SEQ ID NO: 143818 - DNA, 836 bp, Homo sapiens
ggcaacattatcccacgcatggtcagcaaactgacattatctctccgccctggcaggcatcagaaaatcgctcatactttaatcggtaaacagcacctttagatgctgttttcgatacacaatttcaatcaaggagtcattatggctggttggtttgaactcagtaagagcagtgataatcagttccggtttgtgctaaaagcgggcaatggtgagactatcctcaccagcgagctttatacctcaaaaacctctgcggaaaagggcatcgcgtcggtgcgtagcaacagcccgcaagaagaacgctatgagaaaaaaacggcaagtaacggcaaattctatttcaatctgaaagccgctaatcatcaaattatcggctccagccagatgtacgccaccgcgcaatctcgtgaaaccggaattgcctccgttaaagccaatggcacaagccagacggtgaaagacaatacgtaattacgatgccgggcgtgggttgttggcggccggcgccttaccagagccccccacaagcgcttcaatggccccccttaaaggggggggcccttccctaaacggtttatcagggggaagcgggaccttttaagggcgagcctggtgggcttgcagggctttggcccttgccgccggtgtttaccacacggggaccggggaaaaaccttggggggggcccacgcttatgggcctgtaacggcgcggccgggtagcgggcgccggccactacggtgacggacactgggcgctggccgccgctgggaacgggacacgcgggttcgcggggatgggcccactgggggtggccgcctccccggggcgct

SEQ ID NO: 143819 - DNA, 699 bp, Homo sapiens
cttgggcagtatggccattttcacgatattgattcttcctatccatgagcatggaatgttcttccatttgtttgtatcctcttttattttgttgagcagtggtttgtagttcttgaagaggtccttcacatcccttgtaagttggattcctaggtattttattctctttgaagcaattttgagtgagagttcactcatgatttggctctctgtttgtctgttattggtgtataagaatgcttgtgatttttgcacattgattttgtatcctgagactttgctgaagttgcttatttgatcatggtggataagctttttgatgtgctgctggattcggtttgccagtattttattgaggatttctgcatcagtgttcatcagggagattggtctaaaattctctttttttgttgtgtctctgccaggctttggtatcaagatgatgctggcccggtaaaatgagttggggaggattccctctttttctattgattggaatagtttcagaaggaatagtaccagctcctccttgtacctctggtagaattcagctgtgaatccgtctggtcctggactttttttggttggtaggctattaattattgcctcaatttcagagcctgttattggtctattcagggattcaacttcttcctggtttagtcttgggagggtgtatgtgtcgaggaatttatgcat

SEQ ID NO: 143820 - DNA, 5403 bp, Homo sapiens
gagatggagtcttgctctgtcgcccaggctggagtgcagtggtgcaatctcggctcactgcaagctctgcctcccaggttcatgccattctcctgcctcagcctcccgagtagctgggactccaggcacccaccaccatgcctggctaatttttttctgtatttttagtagagatggggtttcaccatgttagccaggatggtcttgatctcctgacctcatgatccgcccgcctcggcctcccaaagtgctgggattacaggcgtgagccaccacacccagcctcttccctcctatcattttcgtgttctggagacagtagcatacttggccctgggtttgacataaaactagttctacatatagaaagctagggacaaaaatgagttctggacaaaactaaaggactgaataatcatgtgaacagccaactctcctacatatgctaagcactgatgaagtgtttcatatattcactcacctaaatttcacaacaatcctatgaaatgctaactagcatgatccccagtttaaaggtgaggaaattgagtcacaggcagaataacttgctctgggtcaccaagctaataaatagatctgggttcaaacccaggcagcctggctccggaatcaactcttaaccacttagagcatcatcactgagatcgggagagggacaggctgctgtaaagagggtgaagcgaaaatgggaggagagcagcggttaagcaatgatgtgatggggctaaataaaaatggatacaaaaacgagtaaaagaccagagtaaaaggaaaagactggagaaggggcctaacattaaaagagaatgaggagaagggagagttgacaagcaaaggtgaaagcagaaagtcagttgtccatatggcttggggagataaagaaggcccaggaaggcctccaggaaaaggctgccatgtcaggcaggacacagaggacaattgaggaaaagtgattcttacaagatggtgaaggtgccattgtgggtgttgggctctggcacaggcacttggcggagcctctgctctgggttgagatcaatacatgacaacatctcatctccgcaggtacagagctcacatatgttggtgcttgtggaggccttgtgttcctctggtgcagttaaagccttattttgggtgtaactttcagactgcaccagtgaatcctgagcaggttctagttcagtaggtggacctgtgacttcagtcaggcttcgatgcagagtctgaacccggtctggacgaggagctgtagtcttctccagggctgtagaatgtccagtctctgtagtgggttctggaatgatggcaagtcccaggtctggaggctgagttgaggtctcctccgtggttggagacggtttaacctctgtagtaggttttgtagttatggtaagctccaggtccagaggttgaacggtggcttgagtcaggtgtgaatgctgagcctgacccttgtctgaaggtggaagtgtcacctcagggtgtcctggaggaggagctgtagtcatcagggctgtagaaggttcaacctctgtcatggattttggagtgatggtaaaccccaggtccaaaggttgaactgtggctcgagtcaggtgtgaatgctgagtctgaacctggtctggatgtggaagtgtcacctcaggatgctttggagaaactatagtcctcttcggggctgtagaatgtccaacctccgtagtgggttctggagtgatggtaagtcccaggtccaaaagttgaactgtaacgctgggtgacactggatgctgagcttgatcctgacctggtgttggatttgttaccccttgatatactcgaagttggggtacaactttcttaggaggctgagttggggtctccttcatggttggagaaagttcaacctctgtcatggattctggagtgatggtaaaccccagatccaaaggttgaactgtggcttgagtcaggtgtgaatgctctggaggttgagctacaactacattagggaactctggagtctgagctggggcctcctgatgggttagggaagactcaccctcctcagcggtctgtggatgctcagctgcagcctcctgctgggttggagaggggttctcattattaataggttccggagattgaaatgaagtctcctgttgaactgctaaaggtccagcttcttctgatgactctgaaagcagaggtgggcccccgtgctggatggcgggaggttctatatcattacctgaccctgagagccgagttgtagcctcctgctggactagagaagttcccacctctgcactaggctctgctgctatggtgagctgcacgtctggaggcttcacagagacactgggtgaatctaaatgatgagtttgatggtgacctggaggtgaaactgtgacttcatgatgttctggaggctgacctggggtctcctgctgggtcggagaagattcgacctccctagaagtctcagaaggctgaactggctgctgctgctcactgatggaaagttcatgctccataggaggaactggaggctcaattggggcctcctgttgggttgcagaaggttccacctcctctggaaactgaattggggtctcctgctgagcttgggaagattctgtctcattggtagcctctgaagttatggtaacctccacatctgcaggtttaactgtaatgttgggcaagtgataataagcttgatcctcacctggaggttgaactgacacctcatgattcggtagagttagactctccatagaggactctggaggcagagctggggcctcctgctgcattgaagaaggttcttcctcaaggagctgtggaagctgtgctggggcttcttgctggagtgaagaggactggatgtcttcaagggtctctggattttgagtttcgggctctagatggaattgagaaggtccaacttgctcagagggccctggaggctcatctgacttcacccggagttctggaggcaggctaccgggatacggtgtatctgtactggaatattcattctgcaaagtctgtttctgactctgaggtgtggataattggcgtataattccaataatctcagcaaggctccaacgctgagctggatctttcttcagcttcttgggcgaaacagggagcctttcctgtggactcagcttgtcctttaaatcctgctgtgaagccaagaactgctctggctccaggggcagctctccagctgaatcccaggtgtccaggaatggaaccaaattttcagtcgattcctggggtggggctggcatctctgaggaagcagagggccccaggtgatcaaagtcccacgggtctgctgggagagtaggcgcatggggagattcccgtgggaaatgggaggagtgggaagaccagggctcaggcggccccagggggttagaggtcagctggagcgggtccttgacccactccagaggctgagcctccttgactagtagccacaatagttgccacataaggaggggccatgggccccagaaacgcagcggggacatgacacacgctagtgccgggcactgagcggaagtcattctggcagctccgagacgctcgtgccccttgtaagcatgagtcccgccctgtctttatgacacctttatttatgccacagaactgctccatgtcaccagggcactcatgtcacaatcccgcccaagcacgccttcccatcctgccctgccggagcacccctctcctccccttagtgaggaaggatttgggcctcagatcctggtggtcccaggactccagcgcctgctgtggtggggtagggtggggtagggtgggatgggggcgcggcagagcttcccaaggaagtcaccggacctcgcctcaggatattcagaagtgctagttcagttctggcagccttcctcctttaaggtgaaatccgagaacactcttccttccagggagagcaactgacctgcaaaatgggcgccaggatgtacattacagtcatttattccaaagtgttgccattttcgctaaactgtcgcatgtttgataattaattcaccaccctattaggtaggggctgccagggaataagcgaggactccaaattttctgtaggaggggtgttgggagttggcaattcggtctgggagagaaggttttaatccgagtgaagagccctttgcactagcctgggaggaggctgaactgtcatcctgccttgactcaacacagccattcccctagaagttacagcacttctagggtcacctgtgttcagagatctaccctgtgtgcacacatggagaagaggcttaggttgttaaagtcagcatgttaaatcatttcctgaaatgcgactgtaactagaacccagctgacttcccccacagccgttcttacctattttattactgtctggcataattaccagcatgtaaactccaagaaggtgcttcatcttattttagtgcctggcatagacatagggtgcatagtgatggctttaaaattgaaggggggccgggtgtggtggctcacacccataatcccagaactttgggaggccgaggcggggggatcactgaggtcagaagttcgagaccagcctgaccaacatggcgaaactccgcctctactaaaaatacaaaattagccaggcgcggtggtgcacacctgcaaccccagctactcaggaggccaaagcaggagaatcgcttgaacccgggaggcagaggttgcagtgagccgagatcacaacactgcacttcagcctgggcaacaagagagaaactccatctcaaaaaaataaaataaaataaaatggaagagattccaagattcacctcatttagggatggagctattattataatcagatttctgaaatgagtgctgacttcctctcacatttcacaggaagctagacttcttaaagcttgaagtctccttggtgggttttatttaaattgaattaaaataattattttacagggaaaaatttcaaaacactttgcaactttggggtaaaagttaaataaaacactgtagccccaagttaagttcccactgaaatgatacttttgctcctttttttaaaaaaaattccataaatagtaaataatgactgttttgagattaatttagaaacaatccctatttaagagctttcatatgcagtcatgcattgcttgccacgtgaggagcttgagaaatgggtcactaggttatttcaccattgtgctaatatcatagcgtatacttacacaaacctaggtggtgtagccaccatacctagggtacacggtatggcttaggactcctaggctacaaacctgtactgtatgttactgtactgaatactaaaggcaactgtcacagaatggc

SEQ ID NO: 143821 - DNA, 1852 bp, Homo sapiens
cttcagtagctgatttgatcaagtggaagaaagggtatcagtgattgaagatcaaatgaatgaaatgaagcgagaagagaagttcagagaaaaaagagtaataagaaatgaacaaagcctccaagaaatatgggactatgtgaaaagactaaatctgcatctgattggtgtacctgaaagtgactgggagaatggaaccaagttggaaaacactcttcaggatattatccaggagaacttccccaatctagcaaggcaggccaacattcagattcaggaaatacagagaatgccacaaagatactcctcgagaagaacaactccaagacacataattctaaatgcccacaagagaaagtaggaaagatataaaattgacaccctaacatcacaattaaaagaactagagaagcaagagcaaacatattcaaaagctagcagaaggcgagaaataactaagatcagagcagaactgaaggaaatagagacacaaaaaacccttcaaaaaatcaatgaatccaggagctgggtttttgaaaagatcaacaaaacggatagatcactagcaagactaataaagaggaaaagagagaagaatcaaatagtcgcaataaaaaatgataaaggggatatcaccaccgatcccacagaaatacaaactaccatcagagaatactataaacacctctacacaaataaactagaaaatctagaagaaatggataaattcctggacacatacaccctcccaagactaaaccaggaagaagttgaatccttgaatagaccaataacaggctctgaaattgaggcactaattaatagcctaccaactaaaaaaagtccaggaccagacggattcacagctgaattctaccagaggtacaaagaggagctggtaccattccttctgaaactattccaatcaatagaaaaagagggaatcctccctaattcattttatgaggccaacatcatcctgataccaaagcctggcagagacacaacaaaaaaagagaattttagaccaatatccctgatgaacattgatgcaaaaatcctcaataaaatactggcaaaccgaatccagcagcacatcaaaaagcttatccactacaatcaagtcagctttatccctgggatacaaggctggttcaatatatgcaaatcaataaatgtaatccagcatataaacagaaccaaagacaaaaaccacacgattatctcaatagatgcagaaaaggcctttgacaaaatccaacagcccttcatgctaaaaactcttaataaactaggtattgatgggacgtatctcaaaataatgacagctatttatgacaaacccacagccagtaccatactgaatggacaaaaactggaagcattccctttgaaaactggcacaagacagggatgccctctctcaccactcctattcaacatagtgttggaagttctggccagggcaatcaggcaggagaaagaaataaagggtattcaattaggaaaagaggaagtcaaattgtccctgtttgcagacgacatgattgtatatttagaaaaccccattgtctcagcccaaactctccttaaactgataagcaacttcagcaaaatctcaggatacaaaatcaatgtgcaaaaatcacaagtattcccatacaccaataacagacaaacagagagccaaatcatgagtgaactcctattcacaattgcttcaaagagaataaaatacgtaggaattcaacttacaagggatgtgaaggacctcttcaaggagaactacaaaccactgctcaaggaaataaaagaggacacaaacaaatggaaggacattctgtgttcatga

SEQ ID NO: 143822 - DNA, 1404 bp, Homo sapiens
atgccctgggctgacaaaagaaatccctctggagcccaatccctgaatggttatgccccgccagacctcatctggggacccagtcatcgggcctttagagcgcaggtcgagtattcaattgggatcagtagcatctacaattctggaacacacaccctcccaatactaaaccaggaagattttgaatccctgaatagaccaataacaggctctgaaattgaggcaataattaatagcctaccaagcaaaaaaagtacaggaccagaccgattcacagctgaattctaccagaagtacaacaaggagctgccgctgtgggatatttttgccaaaatctgttctattcctcacccgtcctatcatgaagagcaactcgctgaatacattgttggttgggcaaaagagaaaggtttccatgtcgaacgcgatcaggtagtgttccaggccttgattcacttggtgaaaggcaacatgggcacagggatcctgggactaccccatcgctgtgaagaacgcgggcatcctgggcagagtcgactgattcaactgtgggaacagctgttttcgatttatggcattcacgtcgggcaaatgctgctgacccgtgctgatatggaagaccgtgaacgcttcctgaacgcccgcgacaccctgcgagcgttgctcgataacaatatcgttccggtaatcaatgagaacgatgctgtcgctacggcagagattaaggtcggcgataacgataacctttctgcgctggcggcgattcttgcgggtgccgataaactgttgctgctgaccgatcaaaaaggtttgtataccgctgacccgcgcagcaatccgcaggcagaactgattaaagatgtttacggcattgatgacgcactgcgcgcgattgccggtgacagcgtttcaggcctcggaactggcggcatgagtaccaaattgcaggccgctgacgtggcttgccgtgcgggtatcgacaccattattgccgcgggcagcaagccgggcgttattggtgatgtgatggaaggcatttccgtcggtacgctgttccatgcccaggcgactccgcttgaaaaccgtaaacgctggattttcggtgcgccgccggcgggtgaaatcacggtagatgaaggggcaactgccgccattctggaacgcggcagctccctgttgccgaaaggcattaaaagcgtgactggcaatttctcgcgtggtgaagtcatccgcatttgcaacctcgaaggccgcgatatcgcccacggcgtcagtcgttacaacagcgatgcattacgccgtattgccgtaatctcagcactttgggagtccgagtcgggcagatcacgaggtcaggagatcaaaaccatcctggctaacatggtgaaaccccatatctactaa

SEQ ID NO: 143823 - DNA, 2636 bp, Homo sapiens
gaccatgaacttggctcccctcccttgcccttcctgcccatgattgtgaggccccccccacccccagaaacgtggaactgttaaagtcccaatgaacctctttccttctgtaaattgccccagtcctcaagtatgtctttatcagcagcatgaaaactgactaaaagagtaaattggtaccagtagaatggggtgttgttgaaaagatacccgaaaatgtgtaagcaactttggaactgggtaataggcagagaggttggaacagtttggaggactcagaagacaggaaaatgtgggaaagtttggaacttcctggagacttgttgaatggctttgaccaaaatgctgatgttatgtggacaataaagtcaaggctgaagtggtctcagatgaaaatgaggaacttcctgggaactggaataaagacattggtagcatttttcccctgccctagagatctgtggaacattgaagttgagagaggttatttagggtatctggtggaagaaatttctaagcagcaaagtgttcaagaagtgacttgggtactcttaaaagaattcagttttatgcattcacaaagatatggtttggaatcagaacttatgtttaaaagggaagcagagcttaaaagttcagaaaatttgcagcctgactatacaatagaaaagaaaaacaaattttctgaggagaaattcaagctgactgaagaaatttgcataagtaatgaggagccaaatgttaattgccaagacaatagggaaagtgtcttcagggaatgttggaggtcttcacagcatccccttccatcatgggtctggaggcctaggaggaaaaaatggtttcatgagctgggctcagagacttgctgcattgtgaagtctcaggactgcattatgtcccagtcatggctaaaaggggccaatgtgcagcctaggcccttgcttcagagagtgcaagccccaagccttgatggcttccacttggtgttgtacctgcaggtgcagagaagtcaagaattgaggttggacaacctccacctagatttcagaggatgtatggaaatgcctagatgtccggaaatgcctagatgtccaggcagaagtttgatgcaggaatggagccctcatgaagaacttctgctaggagtcccagctgtggtactgcctagtggaacagtgggaagagggccaggccaccatcctccagatcccagaatggtagatccattgacagcttgcactgttaatctggaaaagctgcaacggcagcccatgaaagcagctgggaggatttttgataattcggtgtctctttctagaggatttcatagcaacaatatcaggtcgatacctgagaaagcatttgtaggcaacccttctcttattacaatgattctcttgatgaaagatgaatctgttttaaagaatttagtgcaacaagaagctaagaagaaagaatctgttagaaatgctgaagcaaagattacaaaacttacagaacagcttcaagcaactgaaaaaattcttaatgttaacagaatgtttttgaagaagcttcaggaacaaattcacagagttcaacagcgtgttacaattaagaaagctttgactctaaaatatggagaagagcttgctcgggcaaaggcagtggccagtaaagaaataggaaaacgtaaactggaacaagatcgctttgggcagggcatggtccgcggcgtctgcgccgggattgccaactattttgatgtaccggtaaaactggtgcgtatcctggtggtgctgtcgattttcttcggtctggcgctgtttaccctggttgcttacatcattttgtcatttgcgcttgatccaatgccgggacaacatggcctttggtgagcagctaccttccagcagcgaattgctggatgaagtccgaccgtgaactggcggcaagtgaaacgcgtttccgcgagatggaacgttatgtcacttccgatactttcacgttacgtagccgtttccgtcaactgtgaggaaagttatgaatactcgctggcaacaggccgggcaaaaggtaaagcctggtttcaaattagcaggcaagctggtacttcttaccgcactgcgctatggcccggcgggtgtggcgggctgggcgataaaatcagttgctcgccgaccgctgaaaatgttgctggctgtggcgctggaaccgctgttaagtcgggctgctaataaactggcacagcgttataaaaggtgaggggagtttcgcaaaaattgttaaatctcaggcgtataatggatggcaattttcatccatagaaggacgcttacatgtttaaaaaaggcttacttgctctggcactggtgttttcaatgcccgttttcgccgctgaacactggatcgatgttcgtgttccagagcagtatcagcaagagcacgttcagggggccatcaatattcccctgaaggaagtgaaagagcgcattgccaccgccgttccggataaaaacgacaccgtgaaagtgtattgcaatgccggacgccagtcagggcaagcaaaagagatccttagcgagatgggatatacccacgttgagaacgccggtggcctgaaagacatcgcaatgccgaaggtcaaaggttaa

SEQ ID NO: 143824 - DNA, 1518 bp, Homo sapiens
  misc_feature (1)...(1518): n = a,t,c or g
atgcagaagagaccacgctggggcgctgaccgaactgatggcacaaattcccgatacgcgatctactgtacagccaacgctatcgactcgataaatggtcatcaccatatccggaagtggatttcaatgtggtgcaaccggcgaccgctggatatcgcacggcaacagtccatttgggaaaaccctggtggctgccggaccctgagataccgcacggacccgggtgtcccaacaagcgcgattgcggtgttacagacgatgtcgcgaatccgataccacataaaatcggtttcattaataacgccaaacttgccgaagctgccgccttgctcgacgcgccacacgcgcgcaccgaacaggaaagctggaacaagggcgatcgctgttggcgatgggctgtggcgcagtgctatgaaaggtggtcatctggatgatgagcaaagcccggactggctgtttaccgcgagggccgcagtcggtaacccgcgcatacagccgggcagtgacgtcatcgtctgcgcggaaatggacgacagtggggctatgtcggggctaaatcgcgccagcgctggctgttttacgctttgtgcgcgccattaccaccgtcagcgccattgtgttcctgtcacgccggatacccgcgtagcgacggcttacatcctcaaccgcgtggagatggcgaatacgcccggtagcatgaaccattatccgtcaggcactccactggagacgacggaaatcgtagccgaagcggcgttccagcgttcccagcatgacgtcctgtacttttcactggtgaagccgtcggtagtgaccgcccagtgcagtgcctcactatcacagcagtccagcgcgaacgtgacacgcaagtctctctccgattatacagcagaactcgaacccgtcagagcaccatcgctgattgttttctttccggccactctgcctgtatgtgcccggtgtcgatggcggtacagcaggtttcgctcaagcaacagcgcattctggcgcatgatccgctctccgataacatggtgtaacggagaagcacatccgtatcatcagtgtgacgactgcggcggccatcctccagtcatcggttcgtctgagaatgacgtgcaactgcgcacgcgacaccggagacaacggctgactaagcttactccccatccccgggcaataaggggcgtgcgctatccacttttttgcccgtccatattcaacggcttctttgagagttcattttccatcgttttcttgccgagcaggcgctggagttctttatctgcttcatggcggcagcaagttcagaggcaggaacaacctgttctccgcggcgacagcagtaagacttccttcctgntatatgaccaggccgagcttgatcagctaatccacggcagcagctccaacgacaggatcctcgtcgctgccaaaaggcttaacgccgcagacgttacgcacctgtgccagtggattgacgcgcatcaggactatgaattttcaaccgacggctag

SEQ ID NO: 143825 - DNA, 1830 bp, Homo sapiens
atggatgagatgaagtacgatatgtgcggtgcggcagcggtttacggcgtgatgcggatggtcgcggagctacaactgccgattaacgttatcggcgtgttggcaggctgcgaaaacatgcctggcggacgagcctatcgtccgggcgatgtgttaaccaccatgtccggtcaaaccgttgaagtgctgaacaccgacgctgaaggccgcctggtactgtgcgacgtgttaacttacgttgagcgttttgagccggaagcggtgattgacgtggcgacgctgaccggtgcctgcgtgatcgcgctgggtcatcatattactggtctgatggcgaaccataatccgctggcccatgaactgattgccgcgtctgaacaatccggttgcttcctgtcacgctttacccgtaagtacaactgggcgcacctggatatcgccggtaccgcctggcgtactgggttttggcgtaattcttcagtattcggtaatcggtcaaaacagaaacggggaaacgatattagcgcagacgcccccagcggtggcgaagacatctgccatattaaactcaacatcattatttcccaattccggatgtcaggtcagccttcaccttggtatcttgccatcttgctgcaaaacccgatgtttgtcggggaatcactgaccgatccgaacagtttattcgcgcaaatcgtacacattattgaagagggcggttggacggtattccgtaatatgccgctgatttttgctgtcggtttacccattggccttgctaagcaagcgcaggggcgtgcttgtctggcggtgatggtgagtttcctgacctggaactatttcatcaacgcgatgggaatgacctggggaagctacttcggcgtcgatttcactcaggacgcggtggcaggtagcggtctgacaatgatggccgggattaaaaccctcgataccagcattatcggcgcaattatcatttccggcattgtgacggcgctgcataaccgtctgttcgataaaaaactgccggtttttctcggcattttccaggggacgtcttatgtggtgattatcgccttcctggtgatgatcccctgtgcctggctgacgttgctcggctggccaaaagtacaaatggggattgaatctctgcaagcgttcctgcgttcggcgggtgcacttggggtctgggtttacaccttcctcgaacgtattctgatcccaaccggtttacaccacttcatctacggacagtttatctttggtccggcagctgttgaaggcggcattcagatgtactgggcgcagcatctgcaagagttcagtttgagcgccgagccggtgaaatcgttggtcccggatgtgggaccccccgatgcggcaaccattaaagattcgctgcattacggtgtcgtggattacctgatcaaacccttccaggcttcccgctttgaagaggcgctcaccggctggcggcaaaagaaaatggcgctggaaaaacatcagtattatgaccaggccgagcttgatcagctaatccacggcagcagctccaacgaacaggatcctcgtcgcttgccaaaaggcttaacgccgcagacgttacgcacactgtgccagtggattgacgcgcatcaggactatgaattttcaaccgacgagctagccaacgaggttaacatttcgcgtgtttcctgccgtaaatacctcatctggctggtcaactggcacatcttgttcaccagtatccattatggcgtcacggggcgtccagtttaccgttaccgtattcaggcagaacactactcactactgaaagaatattgccaataa

SEQ ID NO: 143826 - DNA, 1297 bp, Homo sapiens
ggcgcggcagctgccctgcggaggtgtcgcgggtggggtgtgctcgctcctccccagtccccgcgtcgcctctcgccgtttggctgcctggcgcctcctgtgtccgtctccccgcccgacgagtgtcgtcacacccccctccaggcgcgtcaaacgccgggggccggtgtctcctctgcctcgtgatctctcctgccgactcccagcctcagggttttccccgggggcgccccctcgctgcgcccacgaactctggcccctcctcccccgcgctcctcgcggcgtctctcaaggcccctaagagtgggacggacaggtttttcccagccccagcgcgttacacccccggccagttccaagctcccgtcccgcaagtcgcttaagaggttcgcgcccgataaggtctacgcctttttgacaaggttgtctcgacaaaagaaaccgactgaggcgtcggttaagcacttgtcgcccgccaggtagaaattctcggcggcagcatcgccgtggaatcggaacccgggattttcacacaattttttgtccagataccctgggacggggagaggtcgaccagatgatcaatgtattaattatcgatgacgacgcaatggtcgcagagctgaatcgccgatacgtagcacaaatcccaggctttcaatgctgtggaacagcctcgacgctggagaaagccaaagagattatcttcaatagcgatacgcttatcgacctgatattgctcgatatctatatgcaaaaagagaacgggctcgatttactgcctgtcctgcataacgcgcgttgcaaaagtgatgtgattgtcatctcctccgcagccgatgcggcaaccattaaagattcgctgcattacggtgtcgtggattacctgatcaaacccttccaggcttcccgctttgaagaggcgctcaccggctggcggcaaaagaaaatggcgctggaaaaacatcagtattatgaccaggccgagcttgatcagctaatccacggcagcagctccaacgaacaggatcctcgtcgcttgccaaaaggcttaacgccgcagacgttacgcacactgtgccagtggattgacgcgcatcaggactatgaattttcaaccgacgagctagccaacgaggttaacatttcgcgtgtttcctgccgtaaatacctcatctggctggtcaactgccacatcttgttcaccagtatccattatggcgtcacggggcgtccagtttaccgttaccgtattcaggcagaacactactcactactgaaacaatattgccaataa

SEQ ID NO: 143827 - DNA, 1578 bp, Homo sapiens
ttaagacgccgccgcttcgcccaaatccttatgccggttcgacggctggacaaaatactgtttatcttcccagcgcaggcaggttaatgtaccaccccagcagcagccggtatccagcgcgtatataccttccggcgtacctttgccctccagcgatgcccagtgaccaaaggcgatgctgtattcttcagcgacagggccaggaatcgcaaaccacggtttcagtggggcaggggcctcttccggcgataacccgcaaatggcgttagcgaaagataacgaacaagacatgatcgtaaaagagatgtacgaccgtgctgccgaacagctgattcgtaagctgccaagcatccgtgctgcggatattcgttccgacgaagaacagacgtcgaccacaacggatactccggcaacgcctgcacgcgtctccaccacgcgagcgtggcgataatcagcgccagcgcgatgcaggccaccaggccacggtcgaccgttcgccaggtcagagagccagccccacagcagcgtaccgaccagcgcaccagcttcaaacagcgtaaagccctgaatcgccaccgctttagagagtttcagttcctggaacgcgtatacggttgaccactggtcgataccaatacgtaccacatagaggaaaatgttggcgaagcacagcagccagatcactttgtttttcagcacatactcaacaaagatctgccacttggtcatatcggtagattctgtctctttgtcctcttcgctgatctcctcgccgaacagttcttcagctttgccgaggccataagattccggggagtcgctgccgtaacgcaggccgataaaaccgacaatcagcgcgataatcgacgggaagataaacatgccgatgacatggccatcgaacaggtaatttgccccgaacagcgccacacctgctgcgcctgcaccgccaaggttgtgagaaatattccagaaaccgaggaatgtcccgcgtttacgacgcggcgtccatttggtgatggtggagtaactgcacgaaccgccggtactctggaaaaagccgcttaaggcgtagaaggcaatcatcaggaacaggctaaccgagccgctgcccatactggcacattgtgggtccgtaattggtgggttcttggtctcactaactttaagaaccaagctgcgaaccctcgcggtgagtgttacagctcttacagtggtgtgtctggagtttattccttctgatgttcggatgcgttcagtttcttccttctggtgggttcgtagtctcgctggctcaagagtgaagctgcagaccttcgcagtgactgttacagctcttaaggcggcgagtctggagttgttcgttcctcccggtggtctcgtggtctcgctggcttcaggcgtgaagctgcagacggcggctgcaggtaaagctgcctgccagtcctgcgccatgcgcccgcactcctcagcccttgggtggtcgatgggactgggcaccgtggagcagggggcggcgctcatcggggaggctcgggacgcccaggagcccatggagggggtgggaggctcaggcat

SEQ ID NO: 143828 - DNA, 532 bp, Homo sapiens
atgaattcgcgtctcggacctggggatcattgcccaggcctggttcatggcgcgaattctgcaacatatgattatggagaatattccccgtgaagccctgctgcttccctttacgtgactggttctgacctttgtactgcgcgcatgggtggtctggttacgcgaacgggtgggttatcacgccgggcagcatatccgctttgccatccgccgtcaggttctcgaccgtctgcaacaagcagggccagcgtggattcagggtaaacctgcggggagctgggcgacgctggtactcgagcaaattgacgatatgcatgattactatgcacgctatctgccgcaaatggcgctggcagtgtcggtgccgttgctgattgtggtggcaatcttcccctctaactgggctgcggcgctcattctgctgggcactgcaccgttaattccgttgtttatggcgctggttggaatgggggctgccgatgctaaccgacgtaactttctcgctcttgctcgcttaagtgggcatttcctc

SEQ ID NO: 143829 - DNA, 652 bp, Homo sapiens
ggatggcgacgtcgtatcgccatccgatttgatattacgcttcttcgacacttactcgcatggccgccagcgccttacgcgccgctttgatcaccagttcacactgttcaatggtcagtgtcagtggcggttcaatgcggatcgttttggcgttattgagcgttccggccaccagtacgcgctggcggaacatctcgctggcaaagttatagccgatttcgttatcaacaaactcaatcgccatcaacatccctttaccacgcgcttcctgtaccagatcgggatattcccgcgccagttgacggaaaccgtccagcaacatatcgcctttttgctcagcctgagccggtaagttctgctccagcaacacattgatggtcgccagcgccgccgcacaggccagcgggttgccgccaaaggtggtggtatgcaggaatgggttgcccaacagaactgaaaacacctcttcagtggcgatggtcgcgccaatcggcattacgccgccgccgagccgctttggcaaggcagaggatatccagctgtacgttctcatgcttacaaacccaacatctttggccgtgccccccatgcccgtgtgtccttcatccgaggataattggtgggggcggagcttcttcgcattatcttgcgg

SEQ ID NO: 143830 - DNA, 2299 bp, Homo sapiens
atgtgccatgttggtgtgctgcacccactaactcgtcatttacattggtacccgatatcgactgtatactgtctacgcacaccaagaagaacaaagatgggtgactgccacgctgccctggcctttatcggtcgacctctacgacgccaaggatcaacgccggcgcattatccaccctttaataagaaaagagacaagtactttattacacttgacgcaaatattacacttttcgtggccacgatattcgtgttctctattccaccgccagatatagaaagacaaagcacaaacgctactgataccttcgtttcggtaccggtttcgtccactggcttagaatatcccgatctggtacaggaagcgcgtggtaaagggatgttgatggcgattgagtttgttgataacgaaatcggctataactttgccagcgagatgttccgccagcgcgtactggtggccggaacgctcaataacgccaaaacgatccgcattgaaccgccactgacactgaccattgaacagtgtgaactggtgatcaaagcggcgcgtaaggcgctggcggccatgcgagcatcatccgctccggcgttaacagcacgctggtcactgccgtcatcggtttccgcacacaacagcatgcattccgacgtttcaccacgcattttcgctttttgcagattgcataagaccaccaccgttttccccatcagctcttcttcgctgtagtacggcagccaggctggtcacggtttgcagagtaattagccccaaatcaaactgtacgatgtacagcttgtcggagtttacatcggcgatatcagcatatcccaacaacatcttatccagacagacgcaattatcccaagaccgtgacacacactccgccgtacagccagcggtttaccctgaatccacgctggccctgcttgttgcagacggtcgagaacctgacggcggatggcaaagcggatatgctgcccggcgtgataacccacccgttcgcgtaaccagaccacccatgcgcgcagtacaaagaattcgcgccatgaaccaggcctgggcaatgatcaatatgccgctcacaaagcccagcagacgagaaatattcagccaacgttgggagatgacgctttgctgttttaaccagcgggttaactctttagtaaccaacagacggacatgggttactgtgtgccaaacaacccatatgctactagatagacacccaagacatttggccacttatccaaagtttgcacacattactagagaatccgaaagacagacctgcctcgtggagcgaaacggcaagatgcttgaggacattcccttggaaacaccaccaccaatttgcaccatcacacgaccactcacaaaaaacaaaccaaccacaatgaaccatgccagcaacacagagtcacaagaccaaggttggcgacgacgacaaacacaagaaacaaagggacacaaactcacaacaagactacaaacaaaagaaacacgtgaaagaccaccaaccataagagaacaccgaactaaccacctaacagtaacgagcagcctaacatacacatacggtcgaccactagaaaaacccacagcagacagggagccaacaccaccgagcaacgaacaacatagggacaccagcaacgccaatcaccacaacccatacaaacgcagtaaacaccaacaaaatgcgcgtgaaggaagcgtgcgatatctggcaacattgttgttatctctggcggtgttaatcaccgccgggtgtggctggcatctgcgtgataccacgcaggttccttccactatgaaggtcatgatcctggactcaggcgatccgaacgggccattaagccgtgcggtgcgtaaccagttacgtctgaatggtgtcgagttgcttgataaagaaaccacgcgtaaggacgttccatccttgcgtttgggtaaagtgagcatcgcgaaagataccgcatcggtattccgtaacggtcaaacagcagagtatcagatgatcatgacggttaatgcgaccgtgttgatccccggccgtgatatctacccgattagcgccaaagtcttccgttcgttcttcgataacccgcaaatggcgttagcgaaagataacgaacaagacatgatcgtaaaagagatgtacgaccgtgctgccgaacagctgattcgtaagctgccaagcatccgtgctgcggatattcgttccgacgaagaacagacgtcgaccacaacggatactccggcaacgcctgcacgcgtctccaccacgctgggtaactga

SEQ ID NO: 143831 - DNA, 409 bp, Homo sapiens
ctcagtatgagaagtccctctacaggatgatcaacaaggacacctctggcgagtacaagaagactctgctgaagctgtctgggggagatgatgactgaagggaactgtgcgcccagccaatgacttcaaccctgacgcagatggcaaagcgctgcggaaagccatgaagggactcgggactgacgaagacacaatcatcgatatcatcacgcaccgcagcaatgtccagcggcagcagatccggcagaccttcaagtctcactttggccgggacttaatgactgacctgaagtctgagatctctggagacctggcaaggctgattctggggctcatgatgccaccggcccattaccatgccaagcaattgaagaaagccactggagggaagccgcacacaatgaaaagt

SEQ ID NO: 143832 - DNA, 1076 bp, Homo sapiens; identical to SEQ ID NO: 139434

SEQ ID NO: 143833 - DNA, 2199 bp, Homo sapiens
tcatttaaaatcattgtataatattccatttaataaatataccttttgtgcattccgaacatcagggttaaacgatccaactttctggtcattgacgtagacgtcgaactgccgggccttacggatatccatgatgaagctgaaccaggcattatctccgttacgccagccaagggttgagggaatggcatattgcttatggtccatcaccactgtgatgccggtactgtcatcatgcgagctgaccgttttatccccggcgaggatcagaaaaaccgagtgctggtaaataccgttctggtccggatttcccgtgcagttgatggtaaacatctttccgctggcatccgtcacactgtattccgcattgccctgaccgtacccctgttgccagagtccggggaccgcagaggctgtaaagctggcgaacattgtaggtatcagcagccgtcccatcagtttgccgtcatgggaatattcgaagtatttttctttcgtatacgggtcggaaggcaggaaatcttccctcgggatctcagcgacgtcctgaaggttatccagtgagtccagccgcgatagcgtgagcagttgatcaaccagacgagtagcgcgatcgatcccggaatgtaattggagcagtgcttttttccgcgcctgcggatcatcgtcagagagctgcgcaacttcggtttgcacttttggtggtttatataatttacgtggattggattttacgctaacaggcattttcattgcccggtcacgacaaatgatttcccccatttcatgaaatggcgggctgctgcacatggcggcgagaatattgccttcaagctggcgaatctgccgttcttcggtgatatccgagaaagtcattaccaggttgtcataaaccgggctgatagaggctttaatccagattttttcaccggtgcgcgtcaacagcagaaattcgtcctgatcgcgggcggttttccatagcaactgttgtaaacgaatgcggttatcggcagggaattcaggaatgttcaggagtgtatcgggctgcataccgctggcttcgctaatgcagtaaccaaacatttcggtaaatgcgcgattgcactgcacaatatggcgttccggatcgaggacaatcaccggtcggtcgagatggtcaacggcaataatcaattgtcgggtctgttctttttgcgccatttctacgctggcatcccgtaccagcgccaggtaataaactttcccctcggcgctcactttcgatagcgcaaaacgggtccagattttactgccgtcttttttctccagctgcagctcccgactcatcccctcaacacgcgctttaccgccttcacggttgtgacgaatggattcaggatgcgcaggacgcatttgaatattgcagttgcgcgtccagccggtgacgccgtttgcgttatcccaacccggtgtcatgacgacgcttagcccattgagactttcttgcccggtcagcgacaccacgccctttgccacactcatggctgaaacatagcgggtggtggtaggcgagggaatgccattgctgccaccgtcgcaggtatctaacggcaaagttccagcatcgattgccagatctgtttgctgggttcccctgttgccgccgcaagtttggtcaccagctgttttagcgcattgtgcaaagttatgacggatataatccgtgaccgcctgacgattattccccagacgtaaatactcccctaattgcgctaaaagctggcgggcagaatggcttttttgcgcggccagcagacgttgcgccagattatgctcagcggcagggaagtgacgcgaaagcagcggtgaatctcccgacagaccaatatcgtgcctgatacccgcccacagttctgctctttgctgttgcgtcagtgaggtcactttcgtcattaagctttccagcgaagtacgttgctgactggataaaggctgaaatcttcgcaagtatgcctggccgcgatgattatggcacacttgtccggttaactctcgtctcatacaggtaacacaaacgtctgattcgactcggtcccttgtcagatcgagccggtaccggggatctctagagtcttttgttgtccaggcttcagaggcaggtaagctctgcaccgtccagattgcaggggacctattatacaactccttgacccttgccat

SEQ ID NO: 143834 - DNA, 1362 bp, Homo sapiens
tcacgagagctgtaggtaccgagtggtcgcatccgttgtcgtcgccggtaactcactgtgcgcgtcatcgtagcggtagcgtactgtctccccgctgcgcgatgtctccgataccagcctgcccggttcatcatattcccggcggctctccagcccgtccggggacaccaccgccgtcagctggttcccgtcgttatagtaaaatttcgtctcccgcccgtccggtgtggtgatgtccgtgatatcgccggacaccacattcagaccgtactctgtcctccgtcccgccgcgtccgtctgcgccgtgagccttcctgccgcgtcatacccgctgcgcgtgacgctgccgtccgccagttcttttttcaccacccgtttcagcccggccccgccttctgtatgcagcacctcacgccggttcaggctgtcggtgacggtgatgcggtcctgctcataaagatagcggtagcttaaccctgccgggttcagttgctccaccacccgccccgtatcgtcgtagcggtagcgcatctccggccttcccgcgtaacggtgcgccaccatccggcccgggtgctgcgcgtcatacgtgaaagcgcgcacctgcgtattgctgcggtcatataccgccaggctgctgcctctttcatgaaggaaccagcggagtacctggggccccaggagcgccggaacatgccaggccgggtagtcagcccgcccgtcgctgtcgtaacggtcggatttccggggcccgtgtgacggtgcgccaatccggccccggtatttatcatcgtaagtaaagctgcgcacctgtttgccactacggtcatacaccaccgccagttcgccgcgtggcgtccagccatagcgcaccagcggcgcggcaggtaaattggcagacagacggatgccgttgtcccggccatattcggtgtaacccggcagggtatcaggaaaagcggacggttccgtcccgccggaaatggcctgctgccgggcttcttctgcccgctgcgcctgcgtggtaagtaccagccggaagtgacgccagcacaatccgtaggcggtaccagctattattccttgccgtagcgtcgcatcaggcaacggctgccggatgcggcgtaaacgccttatccgacctacggttatgttccgtttgtaggcctgataagacgcacagcgtcgcatcaggcaacggctgccgaatgcgggcactgccgtcttctccattttctgtgatcctctgaagctttcttctctcaactcgtcaaagtcattctctgtccagctttgttcaattgctggtgaggaactgcgttccattgcttttggtgttttagtcatgaggtctttgcccat

SEQ ID NO: 143835 - DNA, 1392 bp, Homo sapiens
atggatcgcaccagcgcaccgggcgaaagcgagttgtacaacattttttgtcaggcgctggaatccgccaacggacgcagcattattgtgcgcactatggacattggcggcgacaaacccgttgattatctgaacattcccgcagaggcaaacccgttcctcggttatcgcgccgtgcgtatttatgaagagtacgcgtcgttgtttaccacgcagctacggtcgatcctccgcgcctccgctcacggcagcctgaaaatcatgatcccgatgatctcctcaatggaagagatcttatgggtgaaagaaaaactggcggaagccaaacagcaactacattctgtatgggccgacgttggcgatccctttaaagttggacctcgaagcatgcaagctttgtcctggcccacgatttgcaacgggccgaatgggaaaaaccctcactacgcatccaatcccttacggcacgccatcacataccgcttgaacttcattcctgcattgagactctatggatccccacaaggaggaaccatgaacattaccccgtttccgacgctttcgccggcaactatagatgccataaatgttatcggacagtggctggcgcaggatgatttctccggtgaggtgccgtatcacgccgattgcgtgatccttgcaggcaatgcggttatgccgactatcgatgcggcatgtaagattgcccgcgatcagcaaattcctttactgattagtggtggtatcggtcactcgacaacttttttgtatagcgccatcgcacagcatccgcactacaacactatccgcaccactggcagagcagaagcgaccatcctggcggatatcgctcatcagttctggcacattccgcatgaaaaaatctggattgaagaccagtcaacaaactgcggtgaaaacgcacgctttagcatcgcgctattgaatcaggccgtaaaacgagttcatacggctatcgttgttaatgaccccaccatgcagcggcgcacgatggcgacgttccgccgtatgactggggacaatcccgatgcaccacgctggttaagttatcccggattcgttccttcacgccgccagaatcacctctttttccacttccaccaacggctgaatatcctgactttgtcccagcgggatcggcgtactggcaatcgccagcggcagctcgcgttcggaaatatattccccgaatacttggcaatatgcccgggttttcctcatctcgaccgcgtatttgtgccagtcggcggcggcggtctggctgctggcgtggcggtgctgatcaaacaactgatgccgcaaatcaaagtgatcgccgtagaagcggaagactccgcctttgagcatttgagcctctgtttactcacctga

SEQ ID NO: 143836 - DNA, 4752 bp, Homo sapiens
ttacggcaagcctgtgaggcggataggaccagccctgatcttgtgtccagcatcgctgagcaccttggcggccaccagcccggccacaccagcgccaaccacaatcacctctggggacggccaagcattcgagacgaccccgctaagagcccagagtgcgggctgagtagagactatgtcgtacgacgaggtatagactatgtcgtacgacgaggtagagactatgtcgtacgacgaggtagagactatgtcgtacgacgaggtagagactatgtcgtacgacgaggtagagactatgtcgtacgacgaggtagagactatgtcgtacgacgaggtagagacttgtggtaggaagtgacaactggggttactgactcgccgcagccactctttcttctgacagcccggtaaagcgcatgatgtcagccccatcaggtcgcgttgacgaatatgtttttgaattaactccagcagcgccatacgtcggtgctgcatgatttcatcatcaggcatgacggtgacatcaatcagcggaaatgcggaggcataaagctgccttgccagtttgggatcggcgaaacaatccagccaacacagcgaatagggataggggctttcaataccgtggtaaaacaacaatggcaccaccatcggcaacgttttgtatccagcatcaaggtgattttgcattgcggcaatagcgtaacgcatcatgcgaaatgcgatcagtttgtttgaggtgctttgatgttcaatcagacaatagatgtatcctggtccttgttccgttttcaccgaccacagcacatcggaatagctttctacgcagatcgtcatcaataaagatggagaccccccaggcatggccgggtgtcgcaagtcacgttgggcttcgctgaagttgtgataaaccccggtgccgacgcgggcgcaagggcagccaaagcagccggtttcttccacctgcggcagctcgatacgcagaccgctgacgtccgccagcatttgcatccagacatcggagtgcgccgggccgccagtgacgcgtagggtgtgaacatcagtaaaacgttcgcgcattcggttgaggtgggtcatatggctgaacaccaccccttcatagatggcctgcaacaggtgcgcgcgggtgtgaatggcctgcatcccgtagaaaccactggtcatctcgagtccggcgttgctgccgtacaggaacggcaggaaaaagagatcgcccccagccttcggcaagctggcaacggcctgattgatctcatcaaacgagatttctccccactgtgcggtaaaccattcgaggttgccggaagaggtagggctggcttcgtgaacgataaattcaccatcgttaacgtagcgaccatagacatacggatgcgcttcaccgtcacgtaaaccgcgggttatgccgctggtcaccgcccaggtccccatcaccgcattgagggtaaattcgtcttcgatcccggcgcagagtgcggtggaaaccacatcaaacaggccgccaacaacgggcgtacccgctttcagaccggtcatgtcatctgacagcaaagcggaagcttcattggtcagttcttttgccttttctggatcgccatgaaacagagccaggcgcgctacctgcacgtcacgcatcgcatataaaccttgttcagagatacgctctgtgccgctgccgttttctgggtttgctgaacttgctgagtttgctgttgtgccgccatcgccctgatgcatcaccagcacctggtcgctaatgtgcttcatcattccgatatgctgggtaacataaatatacgaaatgccctgtttttcctgtaattccaacttcccgggcacgttcttgcgttgaagttgcccgtctgccgaaagacgtgaagattgagatcgaagcgatcgctgttcgtcgctaatcttgatggaaattcgggctatcatgcccggattaagtcctgccagaatcgcaaccagccacgggaaatagcttaacggcagcgcctgtaattgcagataactggccagcggtgaaaacggcaatgcgatcccgacaatcatcacgatcacggtcatgatcattaacggccacgatgcacagctctgaataaacggcacacggcgggtgcggatcatatgcacaatcagcgtttgcgacagtaagcccaccacaaaccatcccgactggaacagcgtttgcgtttccggcgtgttgaccgagcccttcttgacgacagtaattgttgggttgggcactacgccgtcgtaaatcgcccatgccagccctgcagcatccatcttatcggtcactttcgccaccacgccgcattgcaccagcgttttatcggtgacgatcagcgccttctgataaccacggcgtttcacctcatcggttaaagccccaacagcaccccgaccaaaccatgccgtttcgttcagaatcatttcttcaattcgtaacccataggttttgaatttctccagcactacggcaatctcttcatcgctcagcactggcaccgggtccgtaatcgccagggtcgtcaggtaaagttgcgccagcacttcaacttcatgcgccagccataacgctttttccagattcacctcacaagcgataagcccatgatgttgtaacaaagttgccttacgatttttgagagccagcgcaacatgttcagaaagttcgcgtgttccaaaggtcgcataaggcgcgcaaggaatagaattaccgccagccgccgcaatcatgtagtgaatagcggggatcgatcggttaagaatggaaactgccgtgcaatgaacggcatgattgtgaacaaccgcgttggcatccggtctgctttgataggctgccatatggaaacggacctgcaggcatgaccggccagcaagcattatataatgccaggccagttcttcttcaattgtcccgttttgaaaagctgtgcttgatatcgagatcatccatgataattccgccgcccatattagcttcgccgaggatttaccggagctatgattagcgcaatcagagatatagtctgagggaaaaacagcaaatttattcaacaaggcgataacctgctctggggcgggtgaatgcaccaggccctgggcttctgacattaaagcgcagtgcgcgggtggtatatcgcggtttgccactggtaacggcttcaaacggctgtgcgacacgctgcgatatttgcaggcgattgaaaacggcttgaaaaactggcggttgatccacattgcgaccgtgcgcagatgcccgtttccgacgtttcgccggcaactatagatgccataaatgttatcggacagtggctggcgcaggatgatttctccggtgaggtgccgtatcaggccgattgcgtgatccttgcaggcaatgcggttatgccgactatcgatgcggcatgtaagattgcccgcgatcagcaaattctggctgagggcgatttcggtttgcgttgtgagattcgtgattggtgtgcgaatttcgtgagcgatatccgctgagaggttgggctggcgggtgagagcatcctcagtacgctcgatcgtgtggttgagcgacagtaccagctgttccagctcagtgggcacggtctgcgggtcgagcgagacgtcgagatctttcgaggtgatgttctggatttgagcgctgacgctgcggatcggcgcgtgacctttatgtaccgccaacagtacgataaagacgatcaggatgctgattaccgatgcggtcataatgagtttattcgtcaagtcatttatgtaatgaagatgaaaatcgatcgaaagcgcgatgtagagcgtataaatcggtttgccgtccaccaacgggccaaccggcaagttaatcatccgccagttgctgtgttccatatgcccgtgaccgtggcctggcatcatcatcgtcgggccggaaaggagatacacctcgccaccctgagcgtctttatcgggtatggcgtcacgcgtaaactcgcggatatccggcgcaccgggggagtgatacacgcgttttagccctgactgaccttcggtttcgcgcgcgacaataaagtcgtccagcgtaccatccagcgccgcgagaatttcagcggcaatggcgtcaagatcctgctcctgggctgccatcacgcccggccagcgtagaatatcaaccgggttgatttccccttcgtcactctgcatttttacccagttcgcggcagttaccagctgtttagccagtttttcgttgaggatcagctcaccttgcgcgctacactgaccctgtggggctagtccgttgctggaaccggttttatccgtgaaaaccatccggggcaggtgatgaataaattgcgccgtctgtttccccgtgcgcgcccggaaagccaggagttgaatatcctgcgcgggattctggcttctattgagcagcagaataaaggtaacaaggccgaataacagccgttgcctgatgcgacgcgtaatgcgtcttatcaggccaatccggttaaacggcaagcgcccaggaccatacccccagcgtaagacgtgcagcgcggcccattcaaaaaagccggactcatccagcagcaggctgatgataatgacggcgataaacgcagccgtcgcgttccagacgatatcccacaccaccggaatatcacccggatggaccacgcccgtaactaacgccagtactgcgcgacgaatttgttcgataaccgcagccat

SEQ ID NO: 143837 - DNA, 1100 bp, Homo sapiens
ttagtttttaattccctgacctattttaatggcgcaggcaatatttcgcgcgctgttgaagagattggtttcaccgctggcgagcacttcggctaaaggtgccagacgaggcaaaatgctgaataccgcgtcaatgccgtactggtgcaccacttccacgccatcacccacatacgccagcaatcccagatcacacggtacattaaactgcttcgccaccgacgccacacccagcggcgctttaccgcctgccgtttgcgagtcgatgcgcccttccccggtaatcaccagtgctgcgccctgcactgcctgcgcaagattgaccgcattcaacacaatttcaatgcccggtttaatatccgcattgagaaataccgccgccgcaatacccataccgcccgcagcgccgccgcccgccatctggcagacattaatttcagtttgctgttgtaaaacacgggcgtaattttgcagcccctgttcaagttcttcgaccatctccggcgttgcccctttttgcgggccaaacaccgccgccgcgccgcgtgcccctaccagcgggttatcaacgtcacatgctacttcaatatgaccaagccaccgtgaactgatacccaggtattcaccatttttgctggcattaaaacgtaggccggataaggcgctcgcgccgcatccggcgctgttgccaaactccagtgccgcaataatgtcggatgcgatgcttgcgcatcttatccgacctacagtgactcaaacgatgcccaaccgtaggccggataaggcgctcgcgccgcatccggcactgttgccaaactccagtgccgcaataatgtcggatgcgatacttgcgcatcttatccgaccgacagtgactcaaacgatgcccaactgtaggccggataaggcgctcgcgccgcatccggcactgttgccaaactccagtgccgcaataatgtcggatgcgatacttgcgcatcttatccgacctacacaaaatttgtcgaacgacgagctgctgcccgttgcgcgtgcgtttagtcagttcctggacctgggccacaccgccgagcaataccacagcatttctgatgtcgtgt

SEQ ID NO: 143838 - DNA, 753 bp, Homo sapiens
ggcccagcggtggtccattccacgagcggcagtttctgaaaagatatagttagtaatgccaggaatgccgtcgtcgcggcgcttttctgaccaagccccatttccagacacagtttgctgttgcgggcgcggtggcctataagcaatttctggatttcacaccagttctccgagtcatcctgctcgagaaacccagcaggaccaaaagcacgagtggcgctgttttcaaaagcggctttaacttcatcggaggcggctttgtcagtaatacagaacgcccacacttcaacttgatcagggccgcgcggatgccagacgcggagtgtggcagtgccgtttagccatgaaagcgtggggaaaatattgttatgacccgccaggcgcagggcgcgaacttcacctaaacgttgttctgcttcggcataggtttcgcggtaatagcttgaaactgcgccatcgacccagacattagcatccggtttttcagtaaagaagaaaccgctaccgtgaccgtcctgaccaaattgcagcgcatctttggcggtttcccacaccgggcgggcggtttgtccatcaccgaggcgcttatcgctgccatcatctttcgcccctaatacctgaacggcagaagcatggctgaacagagcatgatactggtcactggcgaactgctcgtggaactgaatcttgaaccgagtcaggttggtaatgaatttgccgagaaatattacggcccggcaagccaggtggtgc

SEQ ID NO: 143839 - DNA, 1561 bp, Homo sapiens
tcgccctgttgacgttgggcgtggcatccatgctgctcggctttctcatccgtccgacgattcagccacaaggggcaagtcgccagcaggagagcaccggttggtctgcgtggttggcgctggttcgccagaactggcgctttctggcctgcgtttgtttattgcagggggcacatgcggcctattacggttttagcgccatttactggcaggcagctggctactcggcctcggcggtggggtatttgtggtcgctgggcgtgggtggcggaagtcattatctttgcgctgagtaataaacttttccgccgttgtagtgcacgcgatatgctgttgatctcggcgatttgcggcgtagtgcgctggggcattatgggagcaactacggcgttgccgtggttgatagtggtgcaaattatgcattgcggcaccttcacggtctgccacctggccgccatgcgttatattcctgctcgccagggtagcgaagtcatccgtttacaggcggtttactcagccgtcgcgatgggcggcagtatcgctatcatgaccgttttcgccggtttcctgaaacaaaatatggacctcggcgtgttatgggtaatggcgatgtgtggcgcttccggcaatgtttttgcgcccgaaagttgttccctcatgctgattcgagcattttgcggatctgctcctgttgatgtgttgtcagcgtcaggtccgtatagatcagcggtggtgaaaagagcggtaatggcatggtataaggcgcaataatcagtgccgcgccagcggcagcgcctgtctgcaaaaatgcctttaccgacatatgcttaatgttgagcggcagtaacgttagttcgcgtaactgctgctcaatctgcgcttctcgctcgctatcattcccggtaagaagaataatctgtttttcatgcagatcgttttcctgcattagccaggcaccgaaaatcaccgcgaccagaccactttcctcatcagaaagatggacgccgtattcactttcaaatccggccagcgccgcgcgggtggtgcgcaccaggcgtgggtacagtctggcgaactcttccggcagggtattatcaataccgatggcaaacaaactgcgatttaacgccgaaaccggataccctgcccgacgatacaacgctttatcgactaacttctgatctacagccttattgtctttaaattgcgtaaagcctgctggcagtgtgtatggcattgtctgaacgttctgctgttcttctgccgatagtggtcgatgtacttcaacataacgcatcccgttaggctccacggaatatttcaccggttcgttgatcactttcccccgcgtcaccgaacacacgaccaaacgacgagcacacgacggccagtgaccaaaggcatcattcaggatcaacaccgggccgcggatttctgtgtcgtccaactgttgcagcaaatattcatccgccgcttcccacgcctgtagcgggttaacgtcatccgtcgccggaaaacgttgtagtgtcagtgaacggaaaccgttgtctaagtggctcat

SEQ ID NO: 143840 - DNA, 5892 bp, Homo sapiens
ctattggcacccgcagacactagaccccctggtgccacactgtacctccatggccttcttcaactgcttggcatcgtaatgggccggtggcatcatgagccccagaatcagccttggcaggtctccagagatctcagacttcaggtcaatcattaagtccttttgtgcattccgaacatgagggttaaacgatccaactttctggtcattgacgtagacgtcgaactgccgggccttacggatatccatgatgaagctgaaccaggcattatctccgttacgccagccaagggttgagggaatggcatattgcttatggtccatcaccactgtgatgccggtactgtcatcatgcgagctgaccgttttatccccggcgaggatcagaaaaaccgagtgctggtaaataccgttctggtccggatttcccgtgcagttgatggtaaacatctttccgctggcatccgtcacactgtattccgcattgccctgaccgtacccctgttgccagagcggatgcggcacacgtatcgcttctactgcgcgcgcattacggataaaaaactcaggatttttaatcagataatcgacaaccgcccggtcatcaagctccgtgagtgtttcctgcagttcttcccctggttgcttcatagatgaataaatccgtcgtagacatgtaccgccgggccagtcatatataacgggtgacccggactcatcttccattctccgctcttcatcctccagttgccgacgctcctgatcaagctggcgctggcgatcgtccagctgcctgcggcgatcttcaaactggcggcggcggtcgtcatattgtctgcgccgatcgtcgctcacttcacgctgccagccgtcgtcgcgcgaatcttcatagtcaatatttttggtgtcgcgatggcgttttttcacccgcggcttctctttctctttagcttttttcttctcagcacgtttagccagtactttcttcgatggcttgccggtctgcttttcgcttggcgcacgcgttttcgggcgtaactcatcaataacgcgagctttaattggctcttcaatatagcggcctactttacccagcagcagatggtcatgggcttccaccagcgaaattgcggtgcctttacgaccggcgcgcgcggtacgtccgatacggtgcaaataagtatcgccactgcgcggcatatcgaaggtaaagacgtggctgacgtcaggaatgtcgataccgcgcgcggcaacatcggttgcgaccagtacgtttacgcgaccttcgagatacagttgctgatgtcgtagtgtgctcacgagcgctaccgtgcctaccctacgctcaacctcgggcatattcacggtggcgacgcttctaaccgtatttgcgcttgctgtgagttgcgtgtggatattcgtccgctgcctggcatgacactcaatgaacttaatggtttgctcaacgatgcattggctccggtgagcgaacgctggccgggtcgtctgacggtcgacgagctgcatccgccgatccctggctatgaatgcccaccgaatcatcaactggttgaagtggttgagaaattgctcggagcaaaaaccgaagtggtgaaccgcgaactgataacccaggtaattcaccatttttgctggcattaaaacgtaggccggataaggcgctcgcgccgcatccggcgctgttgccaaactccagtgccgcaataatgtcggatgcgatgcttgcgcgatcttatccgacctacagtgactcaaacgatgcccaaccgtaggccggataaggcgctcgcgccgcatccggcactgttgccagactccagtgccgcaataatgtcggatgcgatacttgcgcatcttattcgaccgacagtgcatcacacgatgcccactgtagccggataagcgctcgcgggcatctttgggtacgtttttgtgtctctcctgagctctaaagcgggcgattcgccgctccagctggtctttggtgtcattaaaaatccaggttgtcggtggctggacgcctttgcggcggtcgcgtgtttgcgcgttaactgtggtgcgcatggtgtaacgaatctcttcgtcgagctgcgccagccagtcacgaaatttccagtcgtccagtaagctggcttcgtgaaagagaaactggctaatgcggtgatgtaactctagtgaaacttgcgcactcatttcatcacctccagttctccgagtcatctgctcgagaaaaccagcaggaccaaaagcacgagtggcgctgttttcaaaagcggctttaacttcatcggaggcggctttgtcagtaatacaaaacgcccacacttcaacttgatcagggccgcgcgaatcccaccgcgggatgttggcacgcccgtttacccttgaagcgtggggaaaatattgtatgacccgccaggcggcgggcgcagattggcgtgtcgtgacgttaagaccaccgtgatcatacggacctgacgctgacaacacatcaacaggagcagatccgcaaaatgctcgaatcagcatgagggaacaactttcgggcgcaaaaacattggcggaagcgccaccagcgccattacccagaacacgccgtggcccagatattgatacaggaaaccggcgaaaacggtcatgatagcgatactgccgcccatcgcgacggcagagtaaaccgccctggcgagcagcaatataacgcatggcggccaggtggcagaccgtgaaggtgccgcaatgcagaatttgcaccactatcaaccacggcaacgccgtagttgctcccataatgccccagcgcactacgccgcaaatcgccgagatcaacagcatatcgcgtgcactacaacggcggaaaagtttattactcagcgcaaagataatgacttccgccaccacgcccaacgaccacaaataccccaccgccgaggccgagtagccagctgcctgccagtaaatggcgctaaaaccgtaataggccgcatgtgcccccagacgatgccagttttctccggctcctacatgtaaataccacgcatcaggttcatcatgaatttcgatacctttgatccggttgatgatcaccgtgccgcgatagtcctccagaaaaagtacattacttccttcacccagaataagaacgggttgtccttctgcggttgcatactgccaggcattgagtaattgttgttcgtcttcggcacatacaatgtgctgagcattatgatcaatgccaaatgtgttccagggttttaaggagtggttcatagctgctttcttccgcagccaatctgttcctctaaggtccgccagcatcgactccatactgcgcgtcagcccgccctgcgtggtgctgaccgcctttccccacgcatcgtactgtgtctcgctccggttgccgtccggggtgataacggcagtcaggtcgcctgcggcgttgtattcataccgcgtttcacggccctgtgcgtctttcaccgaggttaaccggccacggttgtcatagcggcggtaaaggctgatgccttcctcgcggtggaccgccgtcatctggccgaagcggtcgtattcataacgggtctggtagcccgagcagtcggtgaacgccagcaactgcccgtagcggctccaggtcatctgccgggtgctgcccgtcgcatccgttgtcgtcgccggtaactcactgtgcgcgtcatcgtagcggtagcgtactgtctccccgctgcgcgatgtctccgataccagcctgcccggttcatcatattcccggcggctctccagcccgtccggggacaccaccgccgtcagctggttcccgtcgttatagtaaaatttcgtctcccgcccgtccggtgtggtgatgtccgtgatatcggcggacaccacattcagacggactctgttctcgtcccgccgcgtcgtttgcccgtgagccttctgccgggtatcccgctgcgcgtgaccccgtttccgacgctttcgccggcaactatagatgccataaatgttatcggacagtggctggcgcaggatgatttctccggtgaggtgccgtatcaggccgattgcgtgatccttgcaggcaatgcggttatgccgactatcgatgcggcatgtaagattgcccgcgatcagcaaattctgattagtggtggtatcggtcactcgacaacttttttgtatagcgccatcgcacagcatccgcactacaacactatccgcaccactggcagagcagaagcgaccatcctggcggatatcgctcatcagttctggcacattccgcatgaaaaaatctggattgaagaccagtcaacaaactgcggtgaaaacgcacgctttagcatcgcgctattgaatcaggccgtagaacgagttcatacggctatcgttgttcaggaccccaccatgcagcggcgcacgatggcgacgttccgccgtatgactggggacaatcccgatgcaccacgctggttaagttatcccggattcgttcctcagttaggaaataacgcagacagtgtaatctttattaatcagttacaaggattatggccagttgagcgttatctctcactactcactggcgagctgccgcgtttacgcgatgatagcgatggctacggtccccgcgggcgagattttatcgttcacgttgattttccggcagaagtcatccatgcatggcaaacgctgaaacatgatgcggtgctcatcgaggcgatggaaagggtaccgagcacggattcgtctatgcgtatggcgcagcatacggagcagggggggattgtgattctgactacccaccagccgctcaacgttgctgaaacgtttcgccatagcgccgaaatcgccaacccgctgtggttcttcctgattgtaattaccctttttccgctcagtatcggtccggagccgcaactgctggcgcgtattgcaccgggcattatctgggttgctgcgctgctttcatccttgctggcgctggaacgactgttccgtgacgatttgcaggacggcagtcttgaacaattgatgttgttgccgttacccttgcccgccgttgtgctggcgaaggtgatggcgcactggatggtaaccggtctgccgttactcatcctttcgccactggtagcaatgctactgggaatggatgtttatggctggcaagtgatggcgctgacgctgctgctgggaacgcctacgcttggctttctcggtgcaccgggcgtggcgctgacagtgggacttaagcgcggtggtatgctgctcagggtaccagctagagattcgtctacttgtagaacctatggacgtgaagggcgtaactttacgcattctaatgaaacgacgcgcagttccctccgcgatggcctggctgttgattattttaccgttcaggatgcatcagcacaaggttgcatgacctggcttgcgccacaaaacggtgaacacattttggatctttgtgccgcccccggcggtaaaacaacgcatatccttgaggtggcaccagaagcgcaggttgttgcggttgatatcgacgaacagcgcctctctcgggtttacgacaatttaaaacgccttggtatgaaggcgaccgtgaaacaaggtgatggccgttacccttctcaatggtgtggcgagcaacagtttgatcgcattttattagatgcgccttgttcagcaaccggtgtgattcgtcgccatccagatattaaatggttacgtcgcgatcgcgatatcccggaactcgcgcaattgcagtggttcagatttcttagcgaaatacgtaagacccttcatgagttagcccttaatatatgtctcagttctcatcttcaccactttcttgaatgtgtccaatag

SEQ ID NO: 143841 - DNA, 2468 bp, Homo sapiens
acagacagaggttcaggatgtttattggatctgacatagcccaaaccagggcagaggctgtagcaaggggaggaagctgggaaagcctgagggtcagaggggagtggaggtggacaggatctatggctacggtttttcagccgctcagccgtgctgggccctcgatggcccgtgggagtgggagcgtttcctaagctccactgaagataagagcccaacccaacccctccccccacccctgccccttccttagtctctggagctggaacaatcaggcttggccatggcggctggtgctgataaccatttcttggcagaagtgcccgccaaagctgtggccctagtcctcaccaccacagagagccagcaaggccttcaggaagtctccggaggtgtcaccctcaatggcttggtggagagacttgtcatatttctcaatgaattccctccggatgttgagcaggtcaatctcactgcgggataccatgatcctggtcagagtcttctcatctgtgccagcacccttcatggatttgtaaagtttgtcggcaaagaagagaggcttgttcttgacactttgaacaatggccacaaatgcatccctgacatccccagacatctccttcttgatggtgtgctccacgtcatagttggtcatcttgatgaactcctggaagactctccggaggtgcggatagctccgggtacacaggatcgtcatgaaacgtgtctccaaggaagttttgtctccactgggtgtgtctgctatttccaagatctcagcagccacctgggcatcttcccgtgcctggtccaggttttctcctccctcctcacgatgccccgtggccagagaaatgaggatcctcctgaagtggccagatgtgtctgagctcagagcatccctccagggacttgtgatagtcctcccttataggcctcattgatggcccggatttcaagcattggtccgagtggccaggatttacaataagagccttttcaatctgtgccggctccctccatggccttcttcaactgcttggcatcgtaatgggccggtggcatcatgagccccagaatcagccttgccaggtctccagagatctcagacttcaggtcagtcattaagtcccggccaaagtgagacttgaaggtctgccggatctgctgccgctggacattgctgcggtgcgtgatgatatcgatgattgtatcttcgtcagtcccgagtcccttcatggctttaccgcagcgctttggcatctgcgtcagggttgaagtcattggctgggcgcacagttcccttcagctctactcgggccactgcactaagttcccacatctgataggccacctgcgctgcctccgggaagaactggccagcagcatcatcatctcccccagacagcttcagcagagtcttcttgtactcgccagaggtgtcattcttgatcatgctgtagagggacttctcatacttggtccggaagatctcccgaatgtcgagcatgtccaactcactacgggagaccatgatgcggatcagggtgttgtcccgagtccccaggcccttcatagccttgaagagcctttcagcaaaatattccggggtgctccggatacacttcactacggccagcattagcttctcaaagtccccagacagctcccctcggatgctggcttcaatcggcttccctgtggtcttcagatactcatcgaacaccaaccgaagatgctgcttgctgcgatttcccaagatgtaaatgaactgggcttcatctgttccccatttcagttcccctgcctcgtataggtcctggacatcctgttgtaccaggtcctcgctcactacgtcatcctcctccctggttccctggagcaggaccacaagcatcttctggaagtggccagaggtgtcgccgatgatgtcagcctccaggtcccgctcgtaggcatctttgtatgctgccaccagctggtgcatctgctcattggtccgggaagccaagatctcaatgaggcacttctcatcagtgccaatgcccgagatggcatctttaatttctttggcatcacaataggcaggtggcctcatcaggcccacaatcaaccgttcaaacttgcccgtcaattcatactttaaatcagcaatgaggtccttgccgtagagggacttgtagctctggcagacctcctgcctctgcctgttgctccgtgaggtgattatgtccagtatggcctccttgtcactgccaaagcccttcatggcagtgtacagagcctcggcatcctggttggggtcaaagcctgggaagtcatggatggagccccggtacttggcaccctgtgctggtttggccatggtctccggttcgcagcagaatccacgcgcagcggaggcctcgggtcgcagacggacgcacgggcgcagggactcgaggacgcagcgctcgctggatcgg

SEQ ID NO: 143842 - DNA, 1215 bp, Homo sapiens
cagccccgatccctaaccgcgcgatcgcgtgtctacctcgagcgaaccgatccatgtgattccgaccgggcccgatcgatccggtggagccgatcaccacccgtccctgccgtaccgttcgcaatcggtgcacatttgatacgatcgcatcggccgcaagcgggcgactacaatcgcgacatccccagtgatcctaccaaccaggcggtcggtaaaacgcaggcccagtttcaacgctggtatcgccgccagattgtttctagagtatcaaagcggctcgcgccattttttcacgagcggggggggcgctgtcaggcttccgtttcagctttatcgcgtaaagcgccttcttccaaaggtgagggcgctcttcgctgagactgaaagcttcatttttcgtccatgatggcgttgtaaatctggaactgacttatttccttgtctaaggattaagataatctaagaaatacctgacaatataaaaagaattttcagcctggtaatttaccgcttcaggtctatatttgtgttgaatatattttgcgcggaagtattcatctaacggggctctctattttttagaatagagtgcatattttcaattaagacattcttagaggataaaaaggaatttactactatcagtgtcttaaataaagtaatcggttatatacggatgtggagtcgataaatgagattgaaggaatatatatgaaattaagatttatttcgtctgcgctggctgccgcactattcgccgctacgggtagttatgctgccgttgtagatggcggtacaattcactttgaaggcgaactggtgaatgctgcctgttcagtgaatactgactcggcagaccaggttgtcacactcggtcaatatcgtaccgatattttcaatgctgttggtaatacctctgcattaattccattcaccattcagttgaacgactgcgatcctgttgttgccgctaatgctgccgttgcattttctggtcaggctgatgcaatcaatgataatttattggccattgcatccagtaccaatacaacaacagcaacgggtgtcggtattgaaatacttgataatacatccgcaattctcaaacctgatgggaatagcttctcaaccaaccagaacttgatccccgggaccaacgttctttatttttctgcacgttataaaggcaccggtacaagtggcatgatgctctag

SEQ ID NO: 143843 - DNA, 1668 bp, Homo sapiens; identical to SEQ ID NO: 143029

SEQ ID NO: 143844 - DNA, 2224 bp, Homo sapiens
aaaatatttccccgcccccggcgagaaggtgtggcacagtgcgccaaggaatagcgggacgagcatcatcccccccgggattttctcaatcgagcgttttatctgcatttccatcacctgtcggcatatttttaagggctgatgcgtaattcctcaatggagcatcagtgttgatggaaacgaagatagacattcatttaatcaataaaagtgatcaaaaccacatcaattgaaacgctgttttatttttatcggatcattgtttttattttgaaattgatcacaaaaaaaccaccgccgttggcgatggttcattttttaagctgatatgcggcctatacgcctcattgcagcaggcggcaaatgattattttttcgccgcaaaacgtgccgctgcttcgtcccagttcaccacgttccagaactctttaatgtagtccggacggcggttctggaatttcaggtagtaagcatgttcccacacatccaggcccataatcgggaagccggaagcgccagaaatagcttcacccatcagcggagaatcctggttagcagtagaaaccaccgccagtttatcgcctttcagcaccagccatgcccagccggaaccaaagcgggaagctgccgctttttcaaattctgctttgaagttatcaacggagccgaagtcacgttcgatagccgctttcaggtcaccctgcagggtggtgccttttttcagacctttccagaacaggctgcgcgttagcgtgaccgccagcgttgttgcgcagtacggttttcttgtctgctggcagctggtccagtttggtgatcagctcttcaaccggcaggttggcaaattctggcaggctttccagcgccgcgttggcgttgtttacgtaggtctgatggtgtttggtgtggtggatttccatggtctgcttatcgaagtgcggttccagggcatcgtaagcatacggcagggatggcagggtatagctcatattcatctccagtattgtcgggcggccgattgttaatgccgcgtaagcagttggttcattatagttaattaaatgatattgaaaatgattatcaatgccgtacttttcgtaagggtatggttttgcaggaaaatgcccgagatgtgaagcaaatcacccacttaatgccgtgattgccagtaaatcgacaacggcggcaacaggcgaaaggttaatcgacagcacgatttttacactcatctcgtcggagatgtgacgcgacgaaaaatgatgaggataagaagatgagtaacgcgattacgatggggatattttggcatttgatcggcgcggccagtgcagcctgtttttacgctccgttcaaaaaagtaaaaaaatggtcatgggaaaccatgtggtcagtcggtgggattgtttcgtggattattcatccgtgggccatcagcgccctgttactaccgaatttctgggcgtattacagctcgtttagtctctctacgcgactgcctgtttttctgttcggcgctatgtgggggatcggtaatatcaactacggcctgaccatgcgttatctcggcatgtcgatgggaattggcatcgccattggcattacgttgattgtcggtacgctgatgacgccaattatcaacggcaatttcgatgtgttgattagcaccgaaggcggacgcatgacgttgctcggcgttctggtggcgctgattggcgtagggattgtaactcgcgccgggcagttgaaagagcgcaagatgggcattaaagccgaagagttcaatctgaaaaaagggctggtgctggcggtgatgtgcggcattttctctgccgggatgtcctttgcgatgaacgccgcaaaaccgatgcatgaagccgctgccgcacttggcgtcgatccactgggatcttgtccgcctcaaaagcccgacttctcgctggcaaaatcgctgatcattcacaatgtgttactctcgacactgggcgggttgatgtggtatctgcaattctttttctatgcctggggccacgcccgcattccggcgcagtatgactacatcagttggatgctgcatatgagtttctatgtattgtgcggcggtatcgtcgggctggtgctgaaagagtggaacaatgcaggacgccgtccggtaacggtgttgagcctcggttgtgtggtgattattgtcgccgctaacatcgtcggcatcggcatggcgaattaa

SEQ ID NO: 143845 - DNA, 269 bp, Homo sapiens
cgtgtaacggaacggcgctgtcgctgccgttatatccgtgcgatacgtcgatttccaggtcaccacctccgttccatccgccgccagctgtgcactgaagagatcctgcgtcagggtcgcgagatgatccaatggtcgtcaccgaaccgcaaaatggtgactggcacatcggtcgcggcgtcgccattatcatgagaaatcgggtatcccggatatcgatcaggctaactgcatgatcaaactgaatcggacggttcttaaaccactga

SEQ ID NO: 143846 - DNA, 970 bp, Homo sapiens
agcgattgtagctttcctgttatctggaaatgctacagaaccagattgggttgaccacgatgttcgcgcctacatagcagcgatggaaatgaaagtggaaatacaaactaccattagagaatactataaacacctctacacaaataaactagaaaatctacaggaaatggataaattcctggacatatacaccctccgaagaataaaccaggaagaagttgtatccctgaatagagcaataacaggctctgaaattgaggcaataattaatagcctaacaaccaaaaaaagtccaggaccagatggattcacagccgaattctaccagaggtacaaggaggaactggtaccattccttctgaaactattccaatcaatagaaaaagaaggaatcctccctaactcattttatgaggccagcatcattctgatatcaaagccgggcagagacacaaccaaaaaagagaattttagaccaatatccttgatgaacattgatgcaaaaatcctcaataaaatactggcaaaccaaatccagcagcacatcaaaaagcttatccaccatgatcaagtgggcttcatccctgggatgcaaggctggttcaatatacgcaaattaataaatgtaatccagcatataaacagagccaaagacaaaaaccacatgattatctcaatagatgcaggaaaggcctttgacaaaattcaacaacccttcatgctaaaaactctcaataaattagatacaaaaagtgaacttttagatataaacaacctttatcaagcagcctctgatgaaataagagcgattgtagctttcctgttatctggaaatgctacagaaccagattgggttgaccacgatgttcgcgcctacatagcagcgatggaaatgaaagtggacctccggcttacaggaatactagtccgcttttctgattcagggatcggagcggattatcaaacgtga

SEQ ID NO: 143847 - DNA, 2688 bp, Homo sapiens
  misc_feature (1)...(2688): n = a,t,c or g
ccgccaggcaggccatgaaatttatcttgaggattttgggacggagtattcctgtttaagtcatttacaggatctgactgtcgacattctgaggatcgatatatcttttattgatgcgcgaggagatataaaaaggccacgcctgcaatcatcgaaatggctaaaacactgaaactgaagatggtaacggagggaatcgaaaccatgtaaacaagaagagtggttacgccagcatggggtgcactacggtcagggcgtgctctacagcaaggcattaccgaaagaagatttcttacgctgggccgagcaacatttgtaaatttttgggctgacggcacgccgcacagcccgtcacgctacctattcgtcgatgattgactcgaatccgccatagatcattcgcttgccgtcaaacggcatggactcgccgaactctttcatccgtgggtccgacatcatcttttgattagcagcgtcgcggacctcggcggggtcgtatcctctctgggtaaaggcattgccgcagcctccctcgcttccattcttgaagcccgtggcctcaatgtgaccatcatgaaactggatccgtacatcaacgtcgatccaggtactatgagcccaatccaacacggggaagtgttcgttactgaagacggcgctgaaaccgacctggacctggggcactacgagcgtttcattcgtaccaaaatgagccgccgcaacaacttcaccacgggtcgtatctactctgacgttctgcgtaaagaacgccgcggtgactacctcggcgcaaccgtgcaggttattccgcacatcactaacgcaatcaaagagcgcgtgctggaaggtggcgaagcgattcgccagatggctgttgaaattggccgtgagcacactctgtttatgcacctgacgctggtgccgtacatggcagcgtctgatacaaaaagtgaacttttagatataaacaacctttatcaagcagcctctgatgaaataagagcgattgtagctttcctgttatctggaaatgctacagaaccagattgggttgaccacgatgttcgcgcctacatagcagcgatggaaatgaaantgcagcagttagttccgccaccgggcgttaaggggagagataagatggtccattacgaagtagttcagtatttgatggattgttccgttatcacttacaaccagcctgtccagcctttacgcagcaacgattggaatctctgccagccagaattcgctatacgtagcaacaagataacctataactcaacgcaagcgcagcagtgcccgattgaaaacacatattgcctttatttgtatggacgcgattcgttgggttatcccgccctccacccaggtaccatggcacttacgccgccagttcgcgcgcctcgtgggcatgaaacagcataaagttcatgtcattaaagagcgagttgcgcagcggttttggttccaaacaggacatcctgctggaagaagtgtgcgttgtggcaaacctgcgagaacgggcgtccggtactgttccgctacacccgtgaagaagagtttattgctaacacctctcgtcacgtcgcgaaagtcaccgtcaaactgggagcgaaaaaagatggtcgcctgacggcagtgaagatggatttccgcgccaacactggcccttacggcaaccactcactcaccgtaccgtgtaacggaccggcgctgtcgctgccgttatatccgtgcgataacgtcgatttccaggtcaccacctactacagcaacatttgcccaaatggtgcttatcagggttatggcgccccgaaaggtaacttcgctatccccatggcaaaagcggaactgggtattcatatgggtagccacgatatggctcccctgcccacccgtttgctcaaaaagctcaaaaacgccgatgcgctgatcgtcgaggcggatgtttccaccagcgatacgccttttgctaatttgcctgcctgcgaggcgctggaagagcgcattagcgaggagcaactccaaaacctgcagcacattagccaggagatgggcatttctccctcactcttttctacccaaccgctgtggcaaatcgcgatggttcttcaggcgacgcaggcacaaaaactggggctgcgggcagaatacggtatcgattaccagctattgcaggcggcgaagcaacaacataaacccgtgattgaactggaaggggctgaaaaccagattgccatgactggcgctgctggacgatacgctgacccactggcataccaacgcacggttgctgcaacaaatgatgagctggtcgtgctgttccggcgcttaggggcttcctttatgcagtactgcctgcgaccggaaatagggaaggtggaaattgcgccgttcgcctatatgcgtggacgtacctttgaaaatgcagtcgtcattcttgacgaggcgcagaatgtgactgccgcgcaaatgaaaatgtttttaacccgcctcggggagaacgtgacggttatcgtcaacggtgatatcacgcaatgcgatttgcctcgcggcgtgtgctccggattaagtgacgcgctggaacgtttcgaagaagatgaaatggttgggatcgtccggttcggtaaagaggactgcgtacgttcggcactttgccaacgtacgctgcatgcctacagttaa

SEQ ID NO: 143848 - DNA, 544 bp, Homo sapiens
  misc_feature (1)...(544): n = a,t,c or g
ggaattcggctgagtggcacttaagcgggccatgccatgcaaccttgggcgctgccaaccgtgggcgagctctgggtgtgcgggcggcctggcgcggcgctccgctgtgtcagcgtgttatgatgccgtcccgtaccaacctggctactggaatccccagtagtaaagtgaaatattcaaggctctccagcacagacgatggctacattgaccttcaggctccctcctgctgtcaggctacatcagcaaagggggggcagaccgggccgttccagtgctgatcattggcattctggtgttcctacccggattttaccacctgcgcatcgcttactatgcatccaaaggctaccgtggttactcctatgatgacattccagactttgatgactagcacccaccccatagctgaggaggagtcacagtggaactgtcccagctttaagatatctagcagaaactatagctgaggactaaggaattctgcagcttgcagatgtttaagaaaataatggccagattttttgggtccttcccanagatg

SEQ ID NO: 143849 - DNA, 1477 bp, Homo sapiens
ctagtcatcaaagtctggaatgtcatcataggagtaaccacggtagcctttggatgcatagtaagcgatgcgcaggtggtaaaatccgggtaggaacaccagaatgccaatgatcagcactggaacggcccggtctgcccccctccgggcgtcgcgggccccgcgcgtggtccgctcccggtctccgccaagccgggtttttctctgactaggcgccttatctcgttcgcgcgttccaactccgcctgatcgcctcacgcaagcacgaagcgcgctttgaggcccagccgctcgtgacctcaatagaaacaccgcgaagagcgggctgaacgccagcgcattgaagcggaacagcgtgcggaacgcgagaagaaggaaaccgaagagcgtgcgcgccgcgaaaaagaagaagccgttgccgccgagcgccgccgccaggaagaggcagaagccgcccgtttggtcgaagagcagcgcaaagctgaagaagaagcgcgccgagccgcagacaaagagcaccgccgcaccgtcaatcgtcgtgtctacgcagatctgattgctcagggcatcccagaagaatacgcacagaaagcagtgctggcgatcgctggcggcaaagtgcaggacgcgcacatcaaatattgaggcaaacatgaacgcatacctcacttacgaccgcatcgaagaacggcgctgggttgagcagcaactcaccgacgagaaagagaagtggatcgacgaccgggcgaaagaactgatcgccatgttcccgaaatatgctctgcaaatgagtagcctgtttctcccaaaagaagcgcaaatggcactagtcggtgaaaaggcagaggaagcctataacgactatgtcacacgcatctgttacgaccgcgccgaagaagaaaacgcccagttccgccgcgaggggctcgataagccgccgatccacatctacaaggactttgatactgaagagcagcgcggggacattgtaggggcgtatgtaacggtaaaaactgacgatggtgattaccttacccatacgatgggcatcgatgccatctactccatccgtgaccggtctgaagcatggaagaagtacaaatctgacaacagcaagaagtgtccatgggtcaccgatgaagagcagatgatcctaaagacggtcgtgaagcaggcagcaaaatactggcctcgacgtgagcgcctggatgccgccatcgaccatgttaataccgagggtgaggaaggtatcaacttctcagcagaacgccagccagaacgcgatgtaaccccagcaggagacgaaattatcaaggagattaacgacgtccttatcgcaatggataagacatgggaagaaaacctgctcccagtctgttcgcaaattttccgtcgtgatattcgcgattcatccgagcttacccaagccgaggcagttaaggccttaggcttcctcaagaagaaggcggcagcatga

SEQ ID NO: 143850 - DNA, 1134 bp, Homo sapiens
atgcaaccttgggcgctgccaaccgtgggcgagctctgggtgtgcgggcggcctggcgcggcgctccgggcggggacagaaccgtcctctcgggctctgggcgtgtccgagaccgcgctccccgccgaaatcaagctccgagtcatccgtgtggggcattcgtcccccctggcacagttggcctctttccagaagcccgttttgtttgttttacgtctaaattcgcgtcggttcttatttctctccctggcaaggtctgaagacggaatcctctttgccaagagtaaacattcgtctcccctctccctcacgcccctgcgatgtattgttttgatgcggatgtatgaacagttaatgtcaggggacctgtgtcagcgtgttatgatgccgtcccgtaacaaccctggctactggaatccccagtagtaaagtgaaatattcaagggctctccagcacagacgatggctacattgacctgcagttttaagaaaccccctcctaagatcccttataaggccatcgcacttgccactgtgctgtttttgattggcgcctttctcattattataaggctcccctcctgctgtcagggctacatcaagcaaagggggggcagacccgggccgttccagttgctgatcattgggcattcttggtgttcctaccccggattttacccacctgcgcatcgctttactatgcatcccaaagggctaccgtgggttaatcctaatgaatgacattccagacttttgaatgactagcacccaccccattagctgagggagggagttcacagtgggaactgttcccagctttaaggatatctaggcaggaaactatgagctggagggactgaagggaatttcttgcagcttgcaggatgttttaaggaaaataatgggccagattttttggggtccttccccaaagatgtttaagttgaacctacagtttagctaatttagggacaagctctatttttttcatccctgggggcccttgacaagtttttccacaggaatatgtatcatggaagaatagaggttattctgtaatgggaaagtgttgcctgccaccaccctctgtagagctgagcatttcttttaaatagacttcattgccaatttgtt

SEQ ID NO: 143851 - DNA, 426 bp, Homo sapiens
gattgccgactccgcgcgggcgatcctcgacggtcacattgtgctgtctcgccgactggcggaagccgggcactatccggctatcgatattgaagcgtcgatcagccgcgcaatgacggcgttgatcagtgagcaacattacgcgcgagtgcgcaccttcaaacagctgttgtcgagttttcagcgtaaccgcgatctggttagcgtcggcgcgtatgccaaaggcagcgatccgatgctcgataaagccatcgccctgtggccgcagctggagggctatttgcaacaaggcatttttgaacgcgcggactgggaagcgtctctccaggggctggagcgtattttcccgacagtgtcataacccaggagataacggcagatggcagaacatggtgcgctggcgaccctgaaagatccccgggtacc

SEQ ID NO: 143852 - DNA, 1735 bp, Homo sapiens; identical to SEQ ID NO: 139056
  misc_feature (1)...(1735): n = a,t,c or g

SEQ ID NO: 143853 - DNA, 4182 bp, Homo sapiens
atgggctttcatctttccgtggcgacgggcactggctttatcgccctcgccggggtcgccgccgaatttggcgtggtgatgctgatgtatttacgtcacgccatagaggccgtgccgtcgttgaataatccacaaacattcagcgagcagaagctggatgaggcgttatatcacggcgcggtcctgcgcgtgcgcccgaaagcgatgacggtggcggtgattatcgccggtctgctgccgattctgtggggaacgggggctggttcagaggtgatgagccggattgccgcgccgatgattggcggcatgatcaccgcacctttgctgtcgctgtttattatcccggcggcgtataagctgatgtggctgcaccgacatcgggtgcccctcaacaaaaaagacacacaggggaaaggcgtgaaaaacgcgtcaaccgtatcggaagatactgcgtcgaatcaagagccgacgcttcatcgcggattacataaccgtcatattcaactgattgcgttgggtggcgcaattggtactggtctgtttcttggcattggcccggcgattcagatggcgggtccggctgtattgctgggctacggcgtcgccgggatcatcgctttcctgattatgcgccagcttggcgaaatggtggttgaggagccggtatccggttcatttgcccactttgcctataaatactggggaccgtttgcgggcttcctctctggctggaactactgggtaatgttcgtgctggtgggaatggcagagctgaccgctgcgggcatctatatgcagtactggttcccggatgttccaacgtggatttgggctgccgccttctttattatcatcaacgccgttaacctggtgaacgtgcgcttatatggcgaaaccgagttctggtttgcgttgattaaagtgctggcaatcatcggtatgatcggctttggcctgtggctgctgttttctggtcacggcggcgagaaagccagtatcgacaacctctggcgctacggtggtttcttcgccaccggctggaatgggctgattttgtcgctggcggtaattatgttctccttcggcggtctggagctgattgggattactgccgctgaagcgcgcgatccggaaaacagcattccaaaagcggtaaatcaggtggtgtatcgcatcctgctgttttacatcggttcactggtggttttactggcgctctatccgaacatccccattgactcgataaacacgatgattaacacggcagtcatggtcagaatggaaacgggatcgaaaatcggcataccaaacgacatcggcgtaacaatcgcaaaccatgaagcatcatgtagcccggataaattgacttcattcatcatccacgaaagaggtcagatgggtatcatagctcaaaataaaatcagttcattgggcatgctgttcggtgccatcgcttggatgatggggattatccacttttcattcggccctttctccgcaccaccgccaacgtttgaaagcatcgtggcggacaaaacggctgaaattaaaagaggtcttctcgccggaataaaaggcgaaaaaattaccaccgtggagaaaaaagaggacgtagatgtcgataaaatcctcaatcaaagcggtatcgcactggccattgctgcgctcctttgcgcatttattggcggtatgcgtaaggaaaatcgctggggcattcgcggcgcgctggtttttggcggcgggacgctggctttccataccttgctttttggtatcggcatccattttgctgatattccttatcttttccttcctgaccggcggttcactggtttaagcagcctgaataatgcccgccgggtgatcatcagcgggcattatcgtcagaacttctgttttttctcctccaccttcaccccttgtgtcggccggtgtcatagtcgcgtacaactggcgaatagccatcttgtggacgtggacgaaacgcccccatccagcgcggccgtgcatctttacgccacggacgcagactccattggtaactgcggaacggatcgcgaattttgtccatgtaatccaataaggcgtcatgcattttgctgcgaacgtctgcaaaacggatatcatcgatcagggtatgcatttcatttgggtcattacggcgatcgtaaagtcatcactaacttttattctctgattgccaaaaatcatctttcacactggctcgaaacgctgcccgcgcagattgctaactggcagcgcgagcagcagcacgggttgtttaagcagtggtcaaatgcggtggagtttctacctgaaattaaaccgtatcgtcttgatttattgcatagcgttacggcagaaagcgaagagccactgagcgcagggcaaattaaacgcattgaaacgctgatgcgcaacctgatgccgtggcgcaaagggccgttctcactgtatggcgtcaacatcgataccgaatggcgttccgactggaaatgggatcgtgttctgccccatctttctgatttaaccggacgcaccattctggatgtcggctgcggcagcggttatcacatgtggcgcatgattggcgcaggcgcgcacctcgcggtggggatcgaccctacgcaactgtttctgtgccagtttgaagcggtgcgtaaactactgggtaatgatcagcgcgcgcatttgttacctattgaacaacttccggcactgaaagcctttgataccgtcttttcgatgggcgtgctttaccatcgccgttcaccgctggagcatctatggcagttgaaagatcaactggtcaatgaaggtgaactggtgctggaaacgctggttattgatggtgatgagaacacggtgctggtaccaggcgatcgttacgcgcaaatgcgtaatgtctatttcatcccttccgcgctggcgctgaaaaactggctgaagaagtgtggttttgtagatatccgcattgcggatgtgagcgttaccaccacagaagagcagcgacgcaccgaatggatggttaccgaatcgctggccgatttcctcgacccacatgatccggccattttccagatctggccatgcaccttcatgcacgcataccacgccttttttgatcccgtcagtcaccaccgcgcctgtcaaaatctgaccacgtttgttccagacacgcaccagatcgccattcgcaataccaaagcgtgcagcatcttcgtttcatttgcgcttcgtaccacgcattcgtgcgccatttcacattcgtctctagaggatcccccggcgattctgtttaagattgccgatcgaatggaacaaaacctcgagctgttagcgacactggaaacctgggataacggcaaacccattcgcgaaaccagtgctgcggatgtaccgctggcgattgaccatttccgctatttcgcctcgtgtattcgggcgcaggaaggtgggatcagtgaagttgatagcgaaaccgtggcctatcatttccatgaaccgttaggcgtggtggggcagattatcccgtggaacttcccgctgctgatggcgagctggaaaatggctcccgcgctggcggcgggcaactgtgtggtgctgaaacccgcacgtcttaccccgctttctgtactgctgctaatggaaattgtcggtgatttactgccgccgggcgtggtgaacgtggtcaatggcgcaggtggggtaattggcgaatatctggcgacctcgaaacgcatcgccaaagtggcgtttaccggctcaacggaagtgggccaacaaattatgcaatacgcaacgcaaaacattattccggtgacgctggagttgggcggtaagtcgccaaatatcttctttgctgatgtgatggatgaagaagatgcctttttcgataaagcgctggaaggctttgcactgtttgcctttaaccagggcgaagtttgcacctgtccgagtcgtgctttagtgcaggaatctatctacgaacgctttatggaacgcgccatccgccgtgtcgaaagcattcgtagcggtaacccgctcgacagcgtgacgcaaatgggcgcgcaggtttctcacgggcaactggaaaccatcctcaactacattgatatcggtaaaaaagagggcgctgacgtgctcacaggcgggcggcgcaactgctggaaggtgaactga

SEQ ID NO: 143854 - DNA, 1191 bp, Homo sapiens; identical to SEQ ID NO: 139917

SEQ ID NO: 143855 - DNA, 504 bp, Homo sapiens; identical to SEQ ID NO: 139059

SEQ ID NO: 143856 - DNA, 2058 bp, Homo sapiens
atgccagcaattcttcgcattctgtctggcgaccattctccgccaaccacgcagccatcaacagcagtgaaccaaaatgatcttccggttcgttttgcttcatttcaaactgaatgcctttctcgcgcatccactgacgaagtgccaatgttgaatcgccaaacaccaatcccgaatggctaccagtgcatcagcgacattaaaggtggtgtaatccctggcgaatacatcccggccgttgataaaggtatccaggaacagctgaaagcaggtccgctggcaggctacccggtagtagacatgggtattcgtctgcacttcggttcttaccatgacgttgactcctctgaactggcgtttaaactggctgcttctatcgcctttaaagaaggctttaagaaagcgaaaccagttctgcttgagccgatcatgaaggttgaagtagaaactccggaagagaacaccggtgacgttatcggtgacttgagccgtcgtcgtggtatgctcaaaggtcaggaatctgaagttactggcgttaagatccacgctgaagtaccgctgtctgaaatgttcggatacgcaactcagctgcgttctctgaccaaaggtcgtgcatcatacactatggaattcctgaagtatgatgaagcgccgagtaacgttgctcaggccgtaattgaagcccgtggggagagcactatagtaaggaatatagccgtgtctaaagaaaaatttgaacgtacaaaaccgcacgttaacgttggtactatcggccacgttgaccacggtaaaactactctgaccgctgcaatcaccaccgtactggctaaaacctacggcggtgctgctcgtgcattcgaccagatcgataacgcgccggaagaaaaagctcgtggtatcaccatcaacacttctcacgttgaatacgacaccccgacccgtcactacgcacacacacctcaccagatcattcagacccgcaacgcccgtgaactggtcgatagcatcaccagcgccggttcggtatttcttggtgactggtcaccggaatcggcaggtgattacgcctccggcaccaaccacgttctaccgacttacggttacaccgccacctgttccagcctcgggctggcagatttccagaagcgcatgaccgtacaggaactgtcgaaagaggggttctccgcgctggcttcaaccatagaaacactggccgccgccgagcgcctgaccgcccacaaaaatgccgttactttgcgagcaagcatgagcaccgtgactattaccgatttagcgcgtgaaaacgtccgcaacctgacgccgtatcagtcggcgcgtcgtctgggcggtaacggcgatgtctggctgaacgccaacgaataccccactgccgtggagtttcagcttactcagcaaacgctcaaccgctacccggaatgccagccgaaagcggtgattgaaaattacgcgcaatatgcaggcgtaaaagcggagcaggtgctggtctaccgtggcgcggacgaaagtattgaactgctgattcgcgctttttgcgaaccgggtctctctggcggcgaacgtcagcgggcgtggatcgccatgctggtggcgcaggatagccgttgtctgttgctcgacgaaccgacctcggcgctggatatcgcccaccaggttgatgtgctgtcgctggtgcaccgtttaagtcaggagcgtggcctgacggtcattgccgtgttgcacgatatcaatatggcggcacgctactgtgattatctggtcgccctgcgcggcggtgaaatgattgctcagggaacgcctgcggaaattatgcgcggcgaaaccctcgaaatgatttatggcatcccgatgggtattttgccgcatccggcgggtgctgcacctgtgagttttgtttattgatgagcggcttacctcttatttcgcgccgtcgactgttaacggcgatggcgctttatccgttgtatatggcagatgaatcccgctctcgcgacggctattgatctccgggtcggacgcttgaattcgtaatcatggtta

SEQ ID NO: 143857 - DNA, 3586 bp, Homo sapiens
tcaattacgatgggtcagaatcgaatcgaccagaccgtattccaccgcttcaggggcggaaaggaagcgatcgcgctcggtatcacgttcaatctgttctaatgattgacccgtatgaagcgccataagttcattcatgcgccctttaactttcagaatttcacgggcatgaatttcgatatcggtcgcctggccctggtagccgcccaacggttggtgaatcatcacgcgcgaattcggcaggcaaaaacgtttaccttttgcccctgcggtcagcaagaaagcgcccatcgaggccgcctggcccatacagatggtgctgacatcaggcttgataaactgcatggtgtcatagatagacatcccggcagtgatcaccccgcctggggagttaatgtacagatagatatctttttctgggttttccgcttccaggaacagcatctgcgccacaatcaggttagccatgtggtcttcaacctggccatcaagaaaaaatgacgcgttccttgaccagttgtatgtcttgggaacatttgcgctcctcgtctttctcttcgtgcagattattctcttcctcatccgcacggttcggaccgacacccacgtagtggaagatactggccgcaaaggtagccgcaaagccaacagccgcgagcggtttccagatgcctttccagaatttcacggtttcgctgatttccgggttctccggcaatccatgatacagatttggcttgtcagcatggtgcagcacgtacatgacgtgtgtccacgtatccgggcgctacaacatgatctcagtgatgttatcggtcaggaacaaggaaagcgaggactggaaattaccgctgctggcgggcacaaccttttactgattgggccgccgggaacaggtaaaacaatgctcgccagccgtattaatggcctgttgccagatttaagcaatgaagaggcactccatattgcgccaggtaaaaaacagtggagttggggacacagtgaatttggccaggcgtgggataagagtctgaccgacaataacggcccgtatatcgaactgatgaccggtatttttgccgataaccagcccgattttacctggcttgatgcttacgaagagaagcgttttgagcagtatttcctgccttatcattctttgggcatggtgcaaaatgcctcccgcgatgcggtgataaaactccagcgtagtaagcgggggattgagtgggggctgtatgccatctctccgttgaacggataccgcctggcgatccgcgaaatcggtaaatgcaacgcgttacttgatgatgccgtggcactgatgcctgcgaccgccatccagggcgtgttgcacggtatcaatcctgaaaggctgaccattgagctctccgatgccgacggcaatattgtactgagttatcaggaacatcagccgcaagcgttgccgttaccggacgtcgccaaagcgccactggcagcacaagacattaccagtacagatgaagcctggtttatcggtcagcatctggagcaatatcatcacgccagccgttcaccgttcgattactacctgcgcggcgtggcgctggacccgctggatatcgctggcgatgaccagcaggatccgattgccgactccgcgcgggcgatcctcgacggtcacattgtgctgtctcgccgactggcggaagccgggcactatccggctatcgatattgaagcgtcgatcagccgcgcaatgacggcgttgatcagtgagcaacattacgcgcgaattcagtttcaccgcgtatgcccagcgcagaaccgtaaacagataggcatcagcaattgtaaatctttgcccgcagatccagtgctcatccttcagtgcctcgttcacatattgcagcttcttctccagctgcgcgcgaactgtcggtttgtactcttccggtgtatcagggcgaaacagaggtgtgaaacctttatgcagctcggtggcgatgtaattcagccattcgatggttttatagcgggaaatactgtttaccggtgccagcaactggcggtcggggacgctgtcggcaagatactgcataatcgctacgccttccgtcagcaaagtaccgtcatccagcagcaatgcaggcacctggcccttagggttaacggcaaagtgttggctgagctgcaagctagccagctggacgtcacatgtggtaccccgacacgcacagcctccctggcagctgctagcgtgaagcatctatggcagttgaaagatcaactggtcaatgaaggtgaactggtgctggaaacgctggttattgatggtgatgagaacacggtgctggtaccaggcgatcgttacgcgcaaatgcgtaatgtctatttcatcccttccgcgctggcgctgaaaaactggctgaagaagtgtggttttgtagatatccgcattgcggatgtgagcgttaccaccacagaagagcagcgacgcaccgaatggatggttaccgaatcgctggccgatttcctcgacccacatgatccgggtaaaacggtggaaggttatccggcacctaaacgcgcgctggctgatcaaacgccgttaacttcggtgcattgcccgtatatttttcgatatacaccaacgctgagttaccggcacaggcatttgccagctgcgagctggggatatccgccgttaacacgttcgcactgccgtttttacacaagccattttccagatctggccatgcaccttatgcacgcataccgggatagccgttgtctgttgctcgacgaaccgacctcggcgctggatatcgcccaccaggttgatgtgctgtcgctggtgcaccgtttaagtcaggagcgtggcctgacggtcattgccgtgttgcacgatatcaatatggcggcacgctactgtgattatctggtcgccctgcgcggcggtgaaatgattgctcagggaacgcctgcggaaattatgcgcggcgaaaccctcgaaatgatttatggcatcccgatgggtattttgccgcatccggcgggtgctgcacctaccaaaacgcatcaaagtttgtttgtctacgagcacgaagatgacagtgatgatgacgacccgcatcacggtaaaccgtctgcccatagcagcctgtggcatgctatctggttgattatccatctgattgccgttattgcggtgaccaaaatgaacgccagctcgctggagacattgctcgacagcatgaatgcccctgtcgcctttactggcttcctggtggcactgttgattctgtcgccggaaggtttaggtgcattaaaagcagtgttgaacaaccaggttcagcgcgcgatgaatctgttctttggttcagtgttagcaaccatttcgcttaccgtacctgtcgtcacgctaattgcctttatgacgggtaacgaattgcagtttgcacttggtgcgccagaaatggtggtgatggtggcctctttagtgctgtgccatatctccttctccaccggacgtactaacgtgctcaatggcgcagcgcatctggcactgtttgccgcctatttgatgacgatatttgcctga

SEQ ID NO: 143858 - DNA, 655 bp, Homo sapiens
cagcgctgaacctgcccacgcgacaggacgccattttgccgactcccataccgcaaagaacatcgccagcgccagcccgacaatcaatgcacaaacggcaaggccgacggtcatcccggcggcgcttgttctggaaccatttgttgtagatggtttcgtaagtgccatctttcttcactttttccagcgcagtgttgagtttctgctgcagctcagtgttgccctgacgtaccgcgatgccgaggccagtgccgaagtaatctttatcggtcactttgtcgcccaccgccgccagtttcgggttatctttcagccactcagtgaccactgcggtgtcaccgaagacgccgtcgatacgcccgttttgcagatccagttttgcgttctggtagctgtcatacggaacggtagtgatttccgggtgcttatccataatgaatttctggtgtgtcgtcccgttctgtacgccgacttttttgcctttcagctgatcaacactggtgtatttgccttgctgacccacaaacagggcagagttgtcatagtacggggtggtaaacagcacctgcttttcacgctccggagtgatatccatgcccggcatcacgggttctaagcgacggaatttcaggcttgggatccaggtgtgaaacgc

SEQ ID NO: 143859 - DNA, 924 bp, Homo sapiens
atgagcagcaatacatttactctcggtacaaaatccgttaaccgtcttggttatggcgcgatgcaactggcaggtcctggagtttttggccccccacgagatcgccacgtcgctataaccgtgctgcgtgaggcgctggcattgggcgtcaatcatattgataccagcgacttttatggtccgcacgtcaccaatcagattatccgcgaagcgctttatccttactctgacgacctgacaattgtcactaaaattggtgcgcggcgtggagaggacgcatcctggttgcccgcattttctccggcagagctgcaaaaagcggtgcacgataatctacgtaatctcgggctggacgtgctggatgtggttaacctgcgcgttatgatgggggatggtcatggcccagcggaaggatcgattgaggccagcctgaccgtgctggcagagatgcaacaacaaggcctggtaaaacatattggcctgagcaacgtcacaccgacgcaggttgcagaggcgcgcaagattgccgaaattgtctttgtgcaaaacgaccacaacttcgcgcttcgcgacgcgctgcatgcattaaagttacgagttcgtcagggcgaaggtaaagacctgaataacgaaagtacgccaatggctttcgaaaatattaaacaagttattgatgacatggcgaccgatgccaccatgtttgacgttaacaaaaagtgtttgctgttgttcaatgtattggcggatgacggatattggcgcacctccgcagctactggcaaaatagccaggactccacaaaacgcctttgtagtaatacctgaatgcaatatctggtcgatctcgtcgcagtcacctacccgatacgcctttgaggctgtttaccagactggatatcgccagtttgggaggatagttaattaa

SEQ ID NO: 143860 - DNA, 1761 bp, Homo sapiens; identical to SEQ ID NO: 132046

SEQ ID NO: 143861 - DNA, 519 bp, Homo sapiens
tgcaaaacgggcgtatcgacggcgtcttcggtgacaccgcagtggtcactgagtggctgaaagataacccgaaactggcggcggtgggcgacaaagtgaccgataaagattacttcggcactggcctcggcatcgcggtacgtcagggcaacactgagctgcagcagaaactcaacactgcgctggaaaaagtgaagaaagatggcacttacgaaaccatctacaacaaatggttccagaagtaattcctgatgaatgaattttttcctttagcaagcgccgccgggatgaccgtcggccttgccgtttgtgcattgattgtcgggctggcgctggcgatgttctttgcggtatgggagtcggcaaaatggcgtcctgtcgcgtgggcaggttcagcgctggtaaccattttgcgtggcctgccagaaattctggcggagcctgattatctattttggctcctcgcagctgctgctgacgctttcggatggcttcactatcaatcttgggttccgtgca

SEQ ID NO: 143862 - DNA, 1086 bp, Homo sapiens
atgcatcagaccaagaaaggcaatcagtggcactttggcatgaaggcccacattggtgtcgatgccaagagtggcctgacccacagcctggtcaccaccgcggccaacgagcatgacctcaatcagctgggtaatctgctgcatggagaggagcaatttgtctcagccgatgccggctaccaaggggcgccacagcgcgaggagctggccgaggtaagaaccttgaaacagcatccacgcaagaacaaaacggccatcaacatcgaatacatgaaagccagcatccgggccagggtggagcacccatttcgcatcatcaagcgacagttcggcttcgtgaaagccagatacaaggggttgctgaaaaacgataaccaactggcgatgttattcacgctggccaacctgtttcgggcggaccaaatgatacgtcagcgtccatttaccgttagcgataagtttttcattgagcgcaataccactgctggccagcgcgtctttatacccggcaagacgttcaatgctggtgggggaatccatcgagccggcatactaacttcggtatgtgttgaatgtgtaaaccgtggtaaaacgctggatctgggctgtgtcaatggtcgtaacagtctttacctggcagccaatggttatgatgttgacgcatgggataaaaatgccattagtatcgccaacgtcgagcgcataatatccattgaaaatctggataatttacacacccgattcgtctatctgaatatcctcacatttgatagacagtacgattttattctttcgactgtggtgctgatgttccttgaggctaaaaccatccccgggttgattgccaatatgcaacgttgcactaaacctggtggttacaacctgattgtggcggcgatggataccgctgattatccatgtaccgtcggcttcccgtttgccttcaaagagggagaattacgtcgatattacgaaggctgggagagggtgaaatacaatgaagacgtcggcgagctgcaccgcaccgacgccaacggtaatcgtattaaactgcgtttcgccacgatgctggcacgtaaaaaatga

SEQ ID NO: 143863 - DNA, 2444 bp, Homo sapiens
atgttaggcaagcactcgcacggaccaccggacgagcacgaacattggaccaaggataacgccaaaagctcacgagaagcccggcacccacagacagaacaaaacgaaaactcacctagggcaaaaacctcgagacgtggaacacgagataaagcgcacatgaggacgacaacagcggggtcacaaaaggtacgtctatattacgaaggctgggagagggtgaaatacaatgaagacgtcggcgagctgcaccgcaccgacgccaacggtaatcgtattaaactgcgtttcgccacgatgctggcacgtaaacctgttttacgttgggtagacccgagttttgatcaaagcaaatatgacagcatcgtctggaacccaatcacttattatccggtaccgaaaccgtcgacccaggtagggcagaaagttctggataaaattttgaactataccaacaccgaaatgaaagaagcgatagcgcagcgtaaaccactggttaccaccgctgggccgcgtagtctgattttccgtggggccattaccggtgtagataccagcaaagaagggctgcaattctatgaagtggttcctgttgcattagtggttgcggggacgcaaatggctacaggccaccgtaccatggatactcgcctctattttgaaggtgagctgattgatgcagcgactaataaaccggttatcaaagtcgttcgtcagggcgaaggtaaagacctgaataacgaaagtacgccaatggctttcgaaaatattaaacaagttattgatgacatggcgaccgatgccaccatgtttgacgctggaggtaccagcaaccaattcaatgatcataccgtcacgtttgcggtattaagcggatcggcaacttccttcaacaatcaaaacaccgcaaaaacggatgttaatggtctggcgacttttgatctgaaaagtagtaagcaggaagacaacacggttgaagtcacccttgaaaatggcgtgaaacaaacgttaatcgtcagttttgtcggcgactcgagtactgcgcaggttgatcagaagctagctcaagcagccacgcacacatctccggctgcgatggggaaaatcaagttgtgcattgccagaaggagtcctggaagcatgttgaccaccccgaacattttaatgccacagatgcgtaatccggttgccagcagcaataaaccgcctacggcgctgaagtctgccatgatcctcccacggccgacccgtaaccccggggggcgcagggagtcggccgaggctgcacggccgcgacgtcgggccgctaagcccgtcaccgttgttggcatagcgatagcgtgtagctttgcacagacgcacaccatcaataatagacgcgtggttcagtgcgtcggagataatggcgtcttccgcacccaagaagcgtttcaaacgaggccaccgttagcatcaaagcaggaagagtagagaatcgcatcttccatccccaggaaggccgccagtttttgttcaagctctttatggctgtcctgagtgccgcaaataaaacgcaccgaagccatgccgaagccgtgagaatccattcccgcattggccgccgcaatcagatcaggatgattcgccagccgaagatagttgttggcacaaaagttaatgacgtggcttccatcagccacagtgatatctgcttgctgcgcagacagatcggggcgtttgtaatagcacatgacaaaaatgccctggtcatcgtccacaatgtttctgactgcgacacaattgtggaagctgcagcactattacccgcttttgatcataggcgttttacgaggtcgactcatagctggattcccgtgatacctgatgctctgaattcggaggagaaaaccacagctgtgcaaggtacacgttcggatatgaactggcaggatgttagcggtaaatctgccgccagcgtcgcgcactggcagaaaatcagccagttccgcgcccgccatcccgcaattggcgcgggcaaacaaacgacacttttgctgaagcagggctacggctttgttcgtgcgatgggcaagattgtagcccgtttctccttcccggtccccctccccactttggcccctgggacctgctcagaaccccagggtgaaggagacatctcaagtgtgacccattggctgcttctgctgcgggagagggagagacgggcaagcgccgccgggatgaccgtcggccttgccgtttgtgcattgattgtcgggctggcgctggcgatgttctttgcggtatgggagtcggcaaaatggcgtcctgtcgcgtgggcaggttcagcgctggtaaccattctgcgtggcctgccagaaattctggtggtgctgtttatctattttggctcctcgcagctgctgctgacgctttcggatggcttcaagtggattcctaagtag

SEQ ID NO: 143864 - DNA, 2763 bp, Homo sapiens
atgggcgttgattgctttaagaccgactttggcgaacgtatcccaactgatgttcagtggtttgacggttccgatccgcagaaaatgcataaccattatgcgtacatctacaacgaactggtgtggaacgtgctcaaggacaccgttggtgaggaagaagctgtcttgtttgcccgctcggcctccgtcggtgcgcagaaattcccggtacactggggtggcgattgttacgctaactacgaatcaatggcggaaagcctgcgcggtggtttgtctattggcctttcaggttttggcttctggagccacgatatcggcggctttgaaaataccgctccggcgcacgtttacaaacgctgctacgccaaaacgaaccatctcttcaagagaggcattttctgccagtttcagtgtcatcgcgccgaccatgctgtcaccagcgccaacgttttagaaaacgccgccatcatattggatgtctttgctgaacatacacatgatttttgtgagctggtgattgtctggcgcggtaatggcctgcatgtactcaacgatcgcccttatcgcattacccgtggcgatctcttttacattcatgctgacgataaacactcctacgcttccgttaacgatctggttttgcagaatattatttattgcccggagcgtctgaagctgaatcttgactggcagggggcgattccgggatttaacgccagcgcagggcaaccacactggcgcttaggtagcatggggatggcgcaggcgcggcaggttatcggtcagcttgagcatgaaagtagtcagcatgtgccgtttgctaacgaaatggctgagttgctgttcgggcagttggtgatgttgctgaatcgccatcgttacaccagtgattcgttgccgccaacatccagcgaaacgttgctggataagctgattacccggctggcggctagcctgaaaagtccctttgcgctggataaattttgtgatgaggcatcgtgcagtgagcgcgttttgcgtcagcaatttcgccagcagactggaatgaccatcaatcaatatctgcgacagttaagatgcgcactgaaaaacggttctctgttagacttcagagaaactctctacattatggcacttgcaatgaaagtaatctctcaagttgaagcgcagcgcaagattctggaagaagcagtttccactgcgctggagttggcctcaggcaaatcggacggtgcggaagttgccgtcagcaagaccaccggcattagcgtaagcacgcgttatggtgaagtggagaatgttgaattcaatagcgatggcgcgctggggatcactgtttatcaccagaaccgcaaaggtagcgcatcatccaccgatttaagcccgcaggccattgcccgtactgtacaggcggcgctggatattgccgttataccctcgcagaatcctgtggcggcgtggcagacaaagagctgctggcctttgacgcaccagatctcgacttggttcaccctgccgaagttttcccggatgaagccattgaactggctggaccgcgccagaacatgcccgcattgcaggcggaccaacgcattacccgtaccgggtgcttgtggcgtgcgtctcaatgctgacgatgatgtttctgaaatcttcaaaaacggtcgtgcgtctatttcgctgggttacatcggcatccacgaaaccattaacgcgctgttcggcggcgagcatgtttacgacaacgagcagcttcgcgcgaaaggtatcgccattgttgaacgtctgcgtcaggcagtggatcagtggaaagaagaaacgggttatggtttcagtctctacagcacgccgagtgaaaacctgtgcgatcgcttctgccgtctcgatactgctgagtttggcgtggtgccgggcgtgaccgataaaggttactacaccaacagtttccacctcgatgtggagaagaaggtgaacccgtacgacaagatcgactttgaagcgccttacccgccgctggcgaacggtggtttcatttgctacggcgagtatccaaacattcagcacaacctgaaggcgctggaagatgtctgggattacagctatcagcatgtaccgtattacggcaccaatacaccgattgatgagtgctacgagtgtggctttaccggtgagttcgagtgcaccagcaaaggcttcacttgcccgaaatgtggaaccatgacgccctccgtgtgtcggttagtcagcatcaactctccggcaattcgtcgtctgcaacaaaagacccaggtttttccactggagcgcaatgccgccgtgcgcacgcgtcttacccactcgatggaagtccagcaggtggggcgctacatcgccaaagaaattttaagccgtctgaaagagcttaaattactggaagcatacggcctggatgaactgaccggtccctttgaaagcattgttgagatgtcatgcctgatgcacgatatcggcaatccgccgtttggtcattttggcgaagcggcgataaatgactggtttcgccaacgtttgcacccggaagatgccgaaagccagcctctgactgacgatcgctgcagcgtggcggcactacgtttacgggacggggaagaaccgcttaacgagctgcggcgcaagattcgtcaggacttatgtcattttgaggggaatgcacaaggcattcgcctggtgcatacattgatgcggatgaatctcacctgggcacaggtgggaattgaacaatga

SEQ ID NO: 143865 - DNA, 987 bp, Homo sapiens
tgacggttcagcccctgcaccagggtaatgcggaagacaaacggggcttcttttttaactttgcactttttggtcactgtcccgaggattggcacccccgcactcatgccgcgaataaactcctcggtaatcggtttatcgaccgtcaccagatactctttctcatgatcattgccagcacgcaggatcttattcaccagatcgccgtgattggtgaggaaaatcagcccctgggagtctttatccaggcggccaatcgggaacacgcgtttgctgtggttaacgaaatcgacaatgttatcgcgctcgccatcttcggtggtgcttacaataccaacgggcttgttcagggcgataagtaccaaatcttcggcttcccgaggttcaatcaactgaccgtttactttcacaacgtcgccgggtttcacctgatcgccaatggtggctcgcttgccattaaggaacacattgccttgctcgatatagcgatccgcttcgcggcgtgagcaaattccgctttcgctgatgtatttatttaaacggactgatgagtcgggcagcataaattctcctgtaaaaaacggaatataccgtacctttgggttgataaaaaatagtcatgagcgaactatttgttatttccattggcttgaattcgttacctgctcaaatcactttccagaagcaatgtgcgacatcgtgagccatgtcagtaagtggttaaattcgcagtggtagcatgcctcccgtgatttcttactaaccggagaagtaatggaactgcttttattgagtaactcgacgctgccgggtaaagcctggctggaacatgcactgccgctaattgctgaacagttgcagggtcgccgctcagcggtgtttatccctttcgctggcgtaacgcagacctgggatgattacacagcgaaaacggctgcggttctcgctccgctgggtgtttctgtcaccggtattcatagcgttgtc

SEQ ID NO: 143866 - DNA, 1943 bp, Homo sapiens
  misc_feature (1)...(1943): n = a,t,c or g
atgactgggagccagcaggtggggtaccgagctcgaattcgtgcctttccccctcttgccagtgctcaggccacacctgtgaggtacgggtatattccgttttttacagaagaatttatgctgcccgactcatcagtccgtttaaataaatacatcagcgaaagcggaatttgctcacgccgcgaagcggatcgctatatcgagcaaggcaatgtgttccttaatggcaagcgagccaccattggcgatcaggtgaaacccggcgacgttgtgaaagtaancgtgaccaaaaagtgcaaagttaaaaaagaagcgccgtttgtcttccgcattaccctggtgcaggggctgaaccgtcagatccggcgcatgtgcgagcatttcggctatgaagtgaaaaagctggaacgcacggcgcttcatgaacgttagcttaagcggcattccgttgggggaatggcgccgatttaaccgacgatgagttaatcgacctctttaagctcattgaaaattcctcttccgaggtaaaacctaaagcgaaggccaaaccgaaaacagcgggcatcaaacgtccagtcgttaagatggaaaaaacggcggaaaaaggcggtcgcccggcgtccaacgagatccacgaatacgttctgcgtaactggcgtatcgtcaaagttgcgaccaccaaagcgcagcgcaaactgttcttcaacctgcgtaaaaccaagcagcgtctgggctggtttaaccaggatgaagtcgaaatggtggcccgtgaactgggcgtaaccagcaaagacgtacgtgagatggaatcacgtatggcggcacaggacatgacctttgacctgtcttccgacgacgattccgacagccagccgatggctccggtgctctatctgcaggataaatcatctaactttgccgacggcattgaagatgataactgggaagagcaggcggcaaaccgtctgaccgacgcgatgcagggtctggacgaacgcagccaggacatcatccgtgcgcgctggctggacgaagacaacaagtccacgttgcaggaactggctgaccgttacggcgtttccgctgagcgtgtacgccagctggaaaagaacgcgatgaaaaaattgcgtgctgccattgaagcagaggagcctcctgtacacagaactgctggccagactccatttcttcgccacctcacatccagcactggtgggacagctatgccaacaggcccagagctggttccagttgtgcgcacaccctgtgctggtgcccctcggaggattcctccagcccccgggaggacccctccgggcaactctcagcggctgtcacaaagtatatgttgcgtggtttccactgcgctggagttggcctcaggcaaatcggacggtgcggaagttgccgtcagcaagaccaccggcattagcgtaagcacgcgttatggtgaagtggagaatgttgaattcaatagcgatggcgcgctggggatcactgtttatcaccagaaccgcaaaggtagcgcatcatccaccgatttaagcccgcaggccattgcccgtactgtacaggcggcgctggatattgcccgttatacctcgccagatccctgtgccggcgtggcagacaaagagctgctggcctttgacgcaccagatctcgacttgttccaccctgcggaagtttccccggatgaagccattgaactggcggcccgcgcagaacaggcggcattgcaggcggacaaacgcatcaccaataccgaaggtggcagctttaacagccactacggtgtcaaagtttttggcaacagccacggcatgttgcagagcgccagcgacgggcgacgaacatcaacacgattgaatgtcgcggcggcggcattcagattcgccgagccactccagaagtcgctgcatgcctgcagtcttattccttaa

SEQ ID NO: 143867 - DNA, 1467 bp, Homo sapiens; identical to SEQ ID NO: 127950

SEQ ID NO: 143868 - DNA, 602 bp, Homo sapiens
aactgggcaaacaggacatcgtgtttgctggcggcggcgaagagctgtgctgggaaatggcttgcgaattcgacgcaatgggtgcgctgtctactaaatacaacgacaccccggaaaaagcctcccgtacttacgacgctcaccgtgacggtttcgttatcgctggcggcggcggtatggtagtggttgaagagctggaacacgcgctggcgcgtggtgctcacatctatgctgaaatcgttggctacggcgcaacctctgatggtgcagacatggttgctccgtctggcgaaggcgcagtacgctgcatgaagatggcgatgcatggcgttgataccccaatcgattacctgaactcccacggtacttcgactccggttggcgacgtgaaagagctggcagctatccgtgaagtgttcggcgataagagcccggcgatttctgcaaccaaagccatgaccggtcactctctgggcgctgctggcgtacaggaagctatctactctctgctgatgctggaacacggctttatcgccccgagcatcaacattgaagagctggacgagcaggctgcgggtctgaacatcgtgaccgaaacgacc

SEQ ID NO: 143869 - DNA, 2700 bp, Homo sapiens
ctatgaagttaccaagaaatagtctgaccacattttgtgctttttacttgctttatcttcaaatggcctatgtaccaagccagagacattaccggcactaacatttgataaggctttgttccggtcagattcacactgttcccaaccgataaattgcttccttcccaaacttttccaaatcctctttttctccactgccagatcggtgccgtcggcaatctcggcaaatgagagatcttttttagctttgctgagcaaaatggcatcggcaagatcaagacgaatattgcggttaatttgtgactgaatcatggtggattcgcgcgccggatcccccgactgcacccagtttttcgggtagcgtgtcgaggcattgataccttcgcgctgggcatcagcatcaagaatgcagccataggtacgcaggccacgagcctgggtattccccagcaccattgtcaggtccggcagataattctttttgacgtcgttttcgacgtactggccggagtacaccacgattgccacatcgccaaacatccccttgtatgaaacagccatacccaggtctttcacggcagtttccagctcagagttagaaccacgacgcgtatccagcttcttctcaacagccttgaaggaacggaacagcgcccagcctttcggatcgaacacaatgatgttgaccacaccgctggcgttgagcgcgtaggcttcaatgtcatcggtcgggtcatacgtttctttgtcgcgggttgaccatgcagccgcaccggcctggacaatgtagttaccagcgctgcggcccatatcgacttcaacaggctcgaacgcttccccggtcatggtgtatttaccgctgagcaccgacgaaacagcctgtttctcttcaccgtagcactcggcggtttcatcttcagtacgaaggatcgcgggaagcgacagaccggacgacgaacagggaactaaccgaagaggggacaccccgggtacacgggacggacataccgccgcccacgttagccgcgagcccatacgacacgacaacgagccaacccgaatggaagacccatcaagagtggccctgccccagctggtagaggcaggatttgaacccagacagtgtagttctagagccagcattcctaaccacctcaacagttgtctggagtctaagtctgctcttatgaaacaggactctccacaagccccacataagccttttgactcaaaatagttctgaaggcttaaaatacctttaaagagtgtaaattttctcaagctccttttaggtttggcaatgatccctttttggcttccgttgtctcccgtgacggtttcgttatcgctggcggcggcggtatggtagtggttgaagagctggaacacgcgctggcgcgtggtgctcacatctatgctgaaatcgttggctacggcgcaacctctgatggtgcagacatggttgctccgtctggcgaaggcgcagtacgctgcatgaagatggcgatgcatggcgttgataccccaatcgattacctgaactcccacggtacttcgactccggttggcgacgtgaaagagctggcagctatccgtgaagtgttcggcgataagagcccggcgatttctgcaaccaaagccatgaccggtcactctctgggcgctgctggcgtacaggaagctatctactctctgctgatgctggaacacggctttatcgccccgagcatcaacattgaagagctggacgagcaggctgcgggtctgaacatcgtgaccgaaacgaccgatcgcgaaactgaccaccgttatgtctaacagcttcggcttcggcggcaccaacgccacgctggtaatgcgcaagctgatgataatctctgcttccaccacatcaatactgcgatgaaccgacccataagtatctttatattgttttactctcttattctcttcagagagcacaatatcttcgccttgaacaaacgcatcacgcgcttcttctgctgccagtggacgcagagcttcaaagttgaccatctgggcatgaccgtagaataccggtgcctggacgacgctagccgaaatcatcagcccttcgtcctgcaggattttgcgtacttcgtcaacgatacgacgttcttcacgcacgctaccttcgctatccggcagtaacggcagcatgttgaacgccagctgacgcccgaagaaatcttcttcgtcaatcggaatgccgttgagcaatttcgcactctgccccgctaacgcatcgaccgcttttttgccctgggcggaggctgaaatcaggctggtaacgctgatacgtgataaaccgccctgatcgattaacggtttcagtgccgccagcagctggctggtcagactgtctggtacggcgatgacattccggttccggtaatctgtcagtacaaacgggtttacttccggcaccaccagcggtacgtcgggttcgagagcaaacaatccactgctgtcgatcaccaggcaacctgagttggtcgcttcttcaacccaggcagcggtagcttctttggctgcgacaaaaaatggccgctgcgcctgcgtccagtcgaattcagcggcattctgcccgtgattgtctgataaatcaatcgcaaacagcaagaaccagtgttcctggcatctggcaagggtgtgcaggaagatggtgtctgcaatcat

SEQ ID NO: 143870 - DNA, 2475 bp, Homo sapiens; identical to SEQ ID NO: 123345

SEQ ID NO: 143871 - DNA, 2742 bp, Homo sapiens
ctatttaatagggaggtatgttgtcttggacaaggtcaaagttaacaaatggctttgtaactccttggaatagagtcctacattacctgattgtaaagtggtggcgataatcgccagcattggcgtaatacctgatcctgctgcaattgccagatagcgcccctggcgttcggcctgcggctgatagccgaaatgccccctggcggatgtgttcgcggggcatagcgggagaaaacgtccgccttcaatggctttcaccgccacactaatttcgccaggcactggcagacgagcgattaactccgtcctggcgcagttcaaggcaggcgaatcaaacatatggttgagtgcgttacctacaccgttgacgcccaccatcaggatcacaaacggcgctttgccttcaacattcagcggctcatcgactttcgccagaatctcgcccatctcttctttcagcaggccatagagcgcctcggcgtcacgaagctgcttgcgggatgcgccttccgtcagattggtgataattttacgtgtggtttccacacccacatcggcgatcaaaagctgctcttccagctcctcaaacagatcatcgtcgatttttttaccgcggaacaggctgataaatccggaaccgagattttctttggtttttaacaggctgcgtttcaggcgcgcgaaaaaaccttctttggtcggtttttcctgctcctgagcgatttcttccaccggctgctcttcttctgccggaggaaccaccatcaccgcctcttctgccgccacggtgtggatactgactatccgctggatcacgagtttatcaccggtggcgaatatcgtcgtatctgcacgctgggtgagaaactgcgtggcttgccagagcttccagacagcgtggtcggaaacagaaactaattgctgacctttttgccagcttttcagcataaatggtccggaaccggcggtattttgcgcgaggaagccgcgagcatcatccgctgcatgttcctgtccgttttcagtgtccagcggcataaaacgaatggcaaaacggctcttatgtccggaaatttgcggataaagctgtgaatcgagcgacagattcaggcgcagcaagtcggcatcgccaccgttatcctgataaaaaccattcaggctggtttgtttacggaagggggccgactggcgaattaaatccagcaccatggtaagtgcctgggtgagcgggttcaggctggcaatccaggtttctacctggctgtcgcgctgcgcctggggtagatgcagccaaatgtgcaatgtaggtaaatcaaagcaatgacaataccgggcgatgtggagcaggcgatgaaaacgctgcaaacttttccgggtatcgggcgctggacggcgaattattttgctttgcgtggctggcaggcgaaagatgttttcctgccggatgattatctgattaaacagcgatttccgggaatgacaccggcgcaaatccgccgttatgccgagcgctggaagccctggcgttcttatgcgctgttgcatatctggtatacggaaggctggcaaccagacgaagcatgacgttggtcgccggatgcggtgcgagcgccttatccggccatcaagtagcaggtaatctgccatattcgctttcagacgagtgaaggtaccgagctgaaggtgctgggggccggtggtgaagccatcgcaagaaatgaagtcgcgcagccgggcgttcacgaaacgctggatgagctgacaacacgtctggcagaaggtctgctggaagcggcagaagaagccggaattccgctggtcgttaaccacgttggcggcatgttcggtattttctttaccgacgccgagtccgtgacgtgctatcaggatgtgatggcctgtgacgtggaacgctttaagcgtttcttccatatgatgctggacgaaggtgtttacagcatggaagatatcaataacaccatcgatgctgcacgtcgggtgtttgcgaagttgtgatccagcatggtttgtcggatgcggcgtgaacgccttatccgacctacgattcggggccgtttgtaggcccgataagacgcgccagcgtcgcatcgggcatccgttgtcgcgtaaacgagggccgttatatggaaaaattaacggctctgctttctcaacaaatagataaaatatggcgcgccgataaaggttgacagcagccccgccgggattgtcgatgacttgatccgtactatcgatcagctgtgccgtgaatacgacatcaacattgcctttaaccagcttgaagtgcatttttccgccgtcagtcagtcgctgcgtgtaattgtctgttgtcatgaagtcacggcttgtactaatatcgcagcgcgtcgcagcgacggtactggcagggatctgattttcctccagcagcacaatcaaatcgacagccagtttgacatcgtctaggggcattttgccagtgacatattctctccattgccggtgatggtgtggttgtgtgccgtggtggtgcttgttttgtgttcgtgtgtcctcatggtcgcggtattttcgtattctgctgagtttcggtttttccgcgttatcccgcttgtctctgtttcctgtcgtttgtgtcgcctcctccggctttccatttcctggtttcctgtcggatcccttggcgcccgtctgataatgttcttgtgatcccttgaggtactcacagctagttagaggcat

SEQ ID NO: 143872 - DNA, 3342 bp, Homo sapiens; identical to SEQ ID NO: 140052

SEQ ID NO: 143873 - DNA, 1328 bp, Homo sapiens
  misc_feature (1)...(1328): n = a,t,c or g
gtgagcgaaatggttgatacaactcaaactaccaccgagaaaaaactcactcaaagtgatattcgtggcgtcttcctgcgttctaacctcttccagggttcatggaacttcgaacgtatgcaggcactgggtttctgcttctctatggtaccggcaattcgtcgcctctaccctgagaacaacgaagctcgtaaacaagctattcgccgtcacctggagttctttaacacccagccgttcgtggctgcgccgattctcggcgtaaccctggcgctggaagaacagcgtgctaatggcgcagagatcgacgacggtgctatcaacggtatcaaagtcggtttgatggggccactggctggtgtaggcgatccgatcttctggggaaccgtacgtccggtatttgcagctcttggtgccggtatcgcgatgagcggcagcctgttaagtccgctgctgttcttcatcctgtttaacctggtgcgtctggcaacccgttactacggcgtacgcctggtggtactggatttagggttacccgacgaagatggactgcattttctcgcccgtatccggcagaaaaaatataccctgccggtactgatcctcaccgctcgcgatacgctgaccgacaaaatcgccgggctggatgtcggtgccgacgactatctggtgaagccttttgcgctggaagagttacatgcccgtatccgcgccctgctacgacgccataataatcagggcgaaagtgagctgattgttggcaatctgacgctgaacatgggtcgccgtcaggtatggatgggcggtgaagagttgattctgacgcccaaagaatatgctctgctgtcacggttaatgctcaaagcaggcagtccggtgcatcgggaaattctctacaacgacatctataactgggacaatgaaccctcgaccaacaccctggaagtgcatatccacaatctgcgcgacaaagtgggcaaagcccgtatccgcaccgtgcgcggctttggctatatgctggtcgcgaatgaggaaaactaattgaatctgatgcattttctgcgccgaccaatatcgctgcgccaacgcgtgatattgaccatcggggccattttgttggtggttgaactgaacagcgtctttctgctatggcatgaagtaccgagcagattcagctgtttgagtcaggtgtanggccaatcgccaccacgaccgccccatcatgcgtgagatncgngaggcggccgcacagcttgatgttccccgggtttttatatggcagcctgacgctatttatctgctataggggggaacgaaataacccgccg

SEQ ID NO: 143874 - DNA, 4129 bp, Homo sapiens
ccccttcctctttgtctcgccagtggagtttttggacaggcccataacaggtcacaatgcgtttttggtgctttggtaatcccgggtcctgcgtttggtcggtgggtgaagcgccattcgcagataactttcggcctcccttgtttcaaaagacaggccggtacccggccagcctttttttgtctgcctcaaaccagtatttcataaccatatcgggtcggcaaaatccgggactccagttgccaatcgcaatgtcgtaatcacctttacccactctgtcgcgcatggtggcgttcgccagcttttccagcttcacaatgatgcccagcttgttgagactggattgtgtcgccagagcaataggctcccagttcggatcgttatcggagtagagaaacgtcaggctggtgggtttgctcgtcactttatcccattcggctttggctttcgtttcgtcatggttgtattgcattgccgtcgcatcgtagccccacatgccttccggaatcgggccgcgcatctgttttccgttaccactcagaatgccgttaaccatgccctgataatcggtagaccaggaaatggcccgacgcagatccgcctgattaagaggcgctttgctgttattcagatacagataggtaacgcgcagtgacggatactctgccacattgactttattttcctgcttcagggcgttgagttgatccaccggcagcgcatcggcaatgtcaatgtcgccacgggagagctgcaggcgacgggaggcactttcaccaataatttttaccgatacccgtttgaagttcggtttattgcctgggtaatgcggatttggcaccagaactaattgctgacctttttgccagcttttcagcataaatggtccggaaccggcggtattttgcgcgaggaagccgcgagcatcatccgctgcatgttccttatgaagacagaatttgttatgccttggaaagcagtcagcaatttcatccagtgtctctttcccggtgagtaattttgcctcggcaaaattaggaaacagataatcgacataactcaatgcttcgcaaatatcatccagcgtttcattcaaccgcggtttgatcatatcggcacagataatcatctgccgggctttagcttgcgtaaaaatttctgttagcgctttaccatccaatagtggactgttgaaaatactggccagtgataataatttcgcctgagaaaaccgcgcaaaatcaacatcgtcaatattcaatttccacagactgccattacggtttgtgacaaacgtccgctcgccatcctccgtcaccagtccaacgttaatagaggtatctatgctgacgtcctgcttcaggctttgaatatcaatattctctttgcggcaatggtcgagaataaattgccctgcggcatctttaccaatacgactcattaatgctgtgcgatggcccagacgagaaataattgttgcttcatttattgcatcacccccggtggtcattgcgattctttcaagaggataagaatccacatcaaagatatttttactgaccggttgcaatggaatatcaacaatagcggcacgtacttcacgttctaaatgcaggaaaggctgatcctggttttctttcactgcaaccattgcggcctgacagagctccgtatgaatgttgattttcgcgatacccaacgaacttgcagttttaatgtcggcatcactgatccccgatgcaccgtgcaaaaccagcggaacagaaacggcatcgcgtacgcgtttgacgacctcaaagttcaattgtggctctgacgtataaaccctatgctggttgccgatggcgacagccaatgaatcacagcccgtacgttcaacaaattcagccgcctggtcaggatcggtatagtgatagcccgccagcgcttcctcataaacggtttcattaccgacatgccctaattccgcctctgattcggggagcagcaatgaagaagcccagccgttgggggaacctggtttagaggggcaggaactcagagtggaacaggatgagggggcacgggatgggcctggagataccgctgagcccctgttgggtgtctgacccatggctgaccagagagatgtaggttctgaggcctccacgttcctgtccacccggtgggatgacagctcagtggtccctgcaggtcctccgtgggccagagctccgggcaggtaggcgaggaagtgaagactggacatggagcgtctcagtttttccctgtgaggtggagaggaaaagggcagcatgtgatccctcgctgcccacagctgttggacgggcagtttgcctgaactcgcctttcttgctccccaggtcctggggtcgtggcagtgggtgatagcaatcgccagcgcatcggcggcatccgcctgtggattagcgggcagtttcagcaaggtgcggaccatatgctgcacctggcttttttcggcactgccaatacctaccaccgtttgctttacctgacgtgccgcgtattcaaatactggcaactcctgattcaccgccgccacaatcgccacgccgcgcgcctggcccagtttcagggctgagtcagcgttctttgccataaagacttgttcaatggcgaaataatcaggctggaactgggtgatgatttccgtcacgcccgcatagatgagtttcagacgagacggtaaatcatccactttggtgcggatgcatccgctacccaggtaggacagttgcctacctacctggcggatgacgccgtagccggtcacgcgcgaacccggatcaatgccgagaataatagccatcacgcgtctccgttttgtttctctcaggagctgaaggattccggcatgcgtagccacgtctggggcaacgtaaaactggataccactggcctcattgaccgcaaagttgtgcgctttatgagcgacgcatccatttatgcattcctttctatggagcaggcaatcgctgatgcgggcctctctccggaagcttaccagaataacccgcgcgttggcctgattgcaggttccggcggcggctccccgcgtttccaggtgttcggcgctgacgcaatgcgcggcccgcgcggcctgaaagcggttggcccgtatgtggtcaccaaagcgatggcatccggcgtttctgcctgcctcgccaccccgtttaaaattcatggcgttaactactccatcagctccgcgtgtgcgacttccgcacactgtatcggtaacgcagtagagcagatccaactgggcaaacaggacatcgtgtttgctggcggcggcgaagagctgtgctgggaaatggcttgcgaattcgacgcaatgggtgcgctgtctactaaatacaacgacaccccggaaaaagcctcccgtacttacgacgctcaccgtgacggtttcgttatcgctggcggcggcggtatggtagtggttgaagagctggaacacgcgctggcgcgtggtgctcacatctatgctgaaatcgttggctacggcgcaacctctgatggtgcagacatggttgctccgtctggcgaaggcgcagtacgctgcatgaagatggcgatgcatggcgttgataccccaatcgattacctgaactcccacggtacttcgactccggttggcgacgtgaaagagctggcagctatccgtgaagtgttcggcgataagagcccggcgatttctgcaaccaagccatgccgcactctcggtccaggtagtagataccacatgttcccatgggggctgacggcgacccatgttcagcgtcagattgccaacaatcagctcactttcgccctgattattatggcgtcgtagcagggcgcggatacgggcatgtaactcttccagcgcaaaaggcttcaccagatagtcgtcggcaccgacatccagcccggcgattttgtcggtcagcgtatcgcgagcggtgaggatcagtaccggcagggtatattttttcagctctgcttctacaacgctctctttactctcactttcagagcacagtcccaactgctcttgcacggtttcgtctagcagcatgcgtcttatcctccagttccaggtattttcccattgcatcgagcccat

SEQ ID NO: 143875 - DNA, 957 bp, Homo sapiens; identical to SEQ ID NO: 139082

SEQ ID NO: 143876 - DNA, 821 bp, Homo sapiens
gcgcaggccaggtggcggataaggttcatgcttcgtactactgcacccgcaacgatctggaactggtggctgtctgtgacagccgcctttcccaggcgcaggcgctggcagaaaaatacgggaatgcatccgtgtgggacgatccgcaggccatgctgctggcggtgaaacctgatgtgcggggctgccatgtgatgtgcgaaaaaccgcccgccatgacgccagaacaggcgcgggaaatgtgcgataccgcgcgcaaactgggcaaggtgctggcctacgactttcaccatcgttttgcgctcgatacgcaacagctgcgtgaacaggtgaccaacggcgttttgggagagatttacgttaccaccgcccgcgccctgcgtcgctgcggcgttcccggctggggtgtctttaccaataaagaactgcagggtggtggcccgctgatcgacatcggcattcatatgctggatgctgcgatgtatgtgctgggctttccggcggtgaaaagcgtgaatgcgcatagctttcaaaagatcggcacgcaaaagagctgtggtcaatttggtgagtgggatccggcaacttacagcgtcgaagattcgctgtttggcaccattgaatttcataacggcggcattctgtggctggaaacgtcatttgcactcaacatccgcgaacagtcgattatgaacgtcagcttttgtggtgataaagctggtgcgacgctgtttccagcacatatctacaccgataacaacggtgaagtaatgacgctatgcaacggaaatagcggtcaggctagtcatctaacacaatag

SEQ ID NO: 143877 - DNA, 776 bp, Homo sapiens
gtatcacgcagcccaacggtgcggttaaataccggtttttccgccgtagaatggcggctatcgaggcagaagtaaccttcacgctcaaactggaatgctttacccgcaaccgcatctttcagcgactgttcagcaaagccctgtttgaatcacagcgattccgggttaatcaccgacaagaaatcatccgcagcaactggaatcaggcgttctttccggaaaacattctggagaaatttcgttatatcaaagagatgggcttcgatggttttgagattgacggcaaactgctggttaacaacatcgaagaagtcaaagcggcgatcaaagaaaccggtttaccggtgaccaccgcctgcggtggctatgacggatggattggcgactttatcgaagagcgtcgtcttaatggcttaaagcagatcgagcgcattctcgaagcgctggcagaagtgggcggtaaaggcatcgtcgttccggctgcgtggggcatgtttaccttccgcttaccgccgatgacctcgccgcgtagcctggacggcgaccgcaaaatggtgagtgattccctgcgcgtactggaacaggtcgccgcgcgtaccggaaccgtggtgtatctcgaaccgttaaaccgctatcaggatcatatgatcaacaccctcgccgatgcccgccgttacatcgtcgaaaacgatcttaaacatgtacagattatcggcgatttcagtgcagacgggtgcgccgtcccaagcttgctatgccatgcgtggcgcatttag

SEQ ID NO: 143878 - DNA, 2076 bp, Homo sapiens
atgctgctttcggacgggcgctatgtaatggcgtattgctcgactaatttacactggatcacccgccgcgcgccgtttggcgtggcaacgttgctggatcaggatgtggaaatcgacttcagctcgcagaccacaccgaatgatgtggtcacgcgcttttgggcatcccaaatcatgttggcaccgatacggcacttaacgctgaagctggggttacgagattccaccttcgccagaatgcgtccgttaccgatgcgattcaggcgaaccagcggccaatcgacccacatcgccgtcgcgccacaaacggcaacgggcatgatgaacagattaagcagcgggatcatcgtaaacaggctggttaaagcaccaaactgcatattggtgattttgcgtgtgcgcagggcgcagatcgagcgcattctcgaagcgctggcagaagtgggcggtaaaggcatcgtcgttccggctgcgtggggcatgtttaccttccgcttaccgccgatgacctcgccgcgtagcctggacggcgaccgcaaaatggtgagtgattccctgcgcgtactggaacaggtcgccgcgcgtaccggaaccgtggtgtatctcgaaccgttaaaccgctatcaggatcatatgatcaacaccctcgccgatgcccgccgttacatcgtcgaaaacgatcttaaacatgtacagattatcggcgatttctatcacatgaatatcgaagaagataacctggcgcaggcgctgcatgacaaccgcgacctgctcggtcatgtgcatattgcggataaccatcgctaccagccgggcagcggcaccctggatttccacgcgctgtttgaacagctgcgcgcggataactatcagggctatgtagtgtacgaagggcgtatccgggcggaagatcctgcccaggcgtaccgtgattcgttggcctggttgcgtacctgctaagaggtctttgtgaaaagtgcaatgacaagctctccgctgcgggtcgcgataataggcgcaggccaggtggcggataaggttcatgcttcgtactactgcacccgcaacgatctggaactggtggctgtctgtgacagccgcctttcccaggcgcaggcgctggcagaaaaatacgggaatgcatccgtgtgggacgatccgcaggccatgctgctggcggtgaaacctgatgtggttagcgtctgctcacctaaccgttttcattacgaacataccctgatggcactggaagcgggctgccatgtgatgtgcgaaaaaccgcccgccatgacgccagaacaggcgcgggaaatgtgcgataccgcgcgcaaactgggcaaggtgctggcctacgactttcaccatcgttttgcgctcgatacgcaacagctgcgtgaacaggtgaccaacggcgttttgggagagatttacgttaccaccgcccgcgccctgcgtcgctgcggcgttcccggctggggtgtctttaccaataaagaactgcagggtggtggcccgctgatcgacatcggcattcatatgctggatgctgcgatccttgcagccacaccaggggcctttcagcccctttacccactctacgcgcgcacaccactggacgcgccagcactacgacggcaggcttggcgccagctgaaccttggccggcagcaccacggtgaatggggtcaaaatggaaacagcatgagaggggccacagaagggattcaccaggaagaagaggaaagaccttgctggagaggtcatggcctgctgtggctcctgggctggcagagaagtcactggggtgctatgctggcagaacttgctagaaatctaccctctaagatgctaaggaaagctattcatgtggaggtctttcactggatgcattctgctgcaaaatcaaccgagagggatgccagtggaagctgctggaggctgggaggtgctgaccatcatgttcagcaggagccagttgctgaagaaggtgtggatactctaggagccatgcgtgtttgcagcagcctgcagaaagagtgtaccggaaccaggaaggaaaactgcttctttctgtaa

SEQ ID NO: 143879 - DNA, 1263 bp, Homo sapiens
atgtacaagtggacgccaatcatgagcaccgtgatggaaatcggctacgacaacgtcgaatcccagcgcaccggcgacaagaacaatcagtgcagaattaccctcgcgcaacaatggcaggctggcgacagcatctggtcacgcccggctattcgtgtcttcgcaacctacgccaagtgggatgagaaatggggttacgactacaccggtaacgctgataacaacgcgaacttcggcaaagccgttcctgctgatttcaacggcggcagcttctgtcgtggcgacagcgacgagtggaccttcggcctacaacggctgtcaaatgtaggccggataaggcgtttacgccgcatccggcatgaccaacgatcacgttatcagtcatttcaggctggatggctccagcctcgcattagcaaagatgagattatttcgcctgtggtgcagttttgctggtggattgaacacaaagaaaaacacttcatcgcgcgaggcaatggcggcaatactatcaatatcgcgtccatgctctccttccagggcgggatccgagtgccttcttataccgcatcaaaaagcggcgtgatgggtgtgacgcgattgatggcgaacgaatgggctaaacacaacattaatgttaatgcgatagccccgggttacatggcgaccaacaatactcaacaactacgggcagatgaacaacgtagcgcggaaattctcgaccgcattccagctggtcgttggggactgccgagtgacctgatggggccgatagtgttccttgcctccagcgcttcagattatgtgaatggttataccattgccgtggatggcggttggctggcgcgttaattcattcttcttacttttatgaccctgccgcatggcagggttttttatacctgtagatcatcataatccatatcatggttatgaaataatccatattaattatcaattaatgaactttatgaattttatctgctgtaaaattaggtggttaataataatctcaataattcaacttaatttgaaaattggaatatccatcacataacgacatgtcgcagcaatttaatccatatttatgctgtttccgacctgacacctgcgtgagttgttcacgtattttttcactatgtcttactctctgctggcaggaaaaaatggttactatcaatacggaatctgctttaacgccacgttctttgcgggatacgcggcgtatggataatgtgggttcggtagctgctgcggtcgcaa

SEQ ID NO: 143880 - DNA, 967 bp, Homo sapiens
atgcacagaacctgtcagcaggtgctgctagagtaccagcgcgactgtactcgcaaagacacctacgacgacagtgatggcactgagtgtcctgaagggctttaacaagtttgttgttcagtacgctactgactcgatgacctcgcagggtaaagggctgtcgcagggttctggcgttgcatttgataacgaaaaatttgcctacaatatcaacaacaacggtcacatgctgcgtatcctcgaccacggtgcgatctccatgggcgacaactgggacatgatgtacgtgggtatgtaccaggatatcaactgggataacgacaacggcaccaagtggtggaccgtcggtattcgcccgatgtacaagtggacgccaatcatgagcaccgtgatggaaatcggctacgacaacgtcgaatcccagcgcaccggcgacaagaacaatcagtacaaaattaccctcgcacaacaatggcaggctggcgacagcatctggtcacgcccggctattcgtgtcttcgcaacctacgccaagtgggatgagaaatggggttacgactacaccggtaacgctgataacaacgcgaacttcggcaaagccgttcctgctgatttcaaggggcggcagcttcggtcgtggcgacagcgacgagtggaccttcggtgcccagatggaaatctggtggcaaaaaaaatatgcctggcatgatacagtgcccctgatactttgtgttgctgctgctatcgcctgcgccctggcacctttcacgcccatcgtgactggcgcactctttctctatttctgtttcgtactcacgctcagtgttattgattttcgcactcagctcctgcccgacaaactcaccttaccgctgctctggcttggcttggtatttaatgcgcagtatggattaattgatttacatgatgcggtttacggcgcggtagcgggctatggggtgctgtg

SEQ ID NO: 143881 - DNA, 2001 bp, Homo sapiens
atgccgatccgacacgaagtgtgttcaagcagcagtgcaggggagttatgcagaccagccgtggcacaaacatcaatgcaaatgtctgtcatctcacacaaacccatcatcatatatacaaaacatttcagccaggtgtgttggttggcgataggccatcatcagtcccaagcctcactcgcagcaggcctgcagagtcgggccagcatcccatatgcagcccaaggcagatttcaggggatgtatggaaatgcctgtatgtccaagcagaagtttgctgcaggggtggggtcctcatggagaaactctgctaggacagtgtggacgggaaatgtgcggttggagttcccacacaaagtccccactggggcaatgcctagtggagctgtgagaagagggctactgtcctccagactccagaatggtagatccactgaaagcttgcatcatgcacctggaaaagccacagacactcaacgccagcctgtgaaagcagccaggagaggggctttaccctgcaaagtcacagagctgcaagctcagccgaacacaaacccagttgacacaattagtgttttggagagttgtgaacaaactctagatgttgctgttgttgttccgcctttaagtgaccaagtgtctgaggaagaggggaaaaacgacaagccgaagaacgagctagagccagcgcaagagagaagcgggaagccaacagcgctgacgagcagcgagcgacggcacagcgacagacagcgcaggacacacccaacagaggagcgaagaccgggcgagaacacggacagacgcagcacgagcgaagccggcgaagcgcgcaccgccggaaggaggcaccgacgcgcacacgacacggcaggcagcgagaccaagacagacgagcagaggagacgagcagagaaacaaaagacaagaaatagagagaagaagatgacgcatgatcagaacataaaacatgaaactaaccaacaagaaagcagagagaggtcaaacaagacagcagaaagagacgaagagtcacagactcagggtggtccagaagattcggcattgccactggagtttatcccaagagacgcccagcgatccgaacaccgtcatcgcaccaacagcaataatgatgtagttaaggatggtagtaatggcatacgacgcgccctggcgcaatgtgctggtggcagcgaccggctggatggttggcgtcagtgtggcgctggcgggtgctatcggctttattggtctggtgatcccccatattctccggttgtgtggtttaaccgatcatcgcgtattacttcccggctgcgcgctggcaggggcgagcgcattgctgctggccgatattgtagcgcgcctggcattagctgccgcagagctgcctattggcgtggtcaccgcaacgttaggacaaaacgacacacgacacacaacaacacgaagaacagacgcagcgacacagaaaagagacagcagaaagaagatcgaacgaacagaagaagacgaacaagacacaagaaggagaaagaagcacagacgaacaaaacgaacaagcagaaggacacacgagagaacgaagagcacaaaagagcagcacacaccacaccttggttgggtcgacagcgggttgtggtgtgggagcccgccagcattcgccaacgggcattgtgggaactactgcaaggaaacacatgggaaaataaaggaatcatttccagggattctactagatcggcattcctgaaaccgggcctaaccacaaggtgcttattacgggtcgaaaatccagtacccgtggaggcaagcagtttttttaaaagcgggtccaagagggagagtgatagactgtccgggaacgcccgtgggctccaaagtctgattaacgtgatgccacacgctcccccgccagttgtggaaaaagattgtgagcaagggttgttgaataccgggatgtggacccccaggatagaaagagacaactatatttga

SEQ ID NO: 143882 - DNA, 513 bp, Homo sapiens
agcatcgacgccagtttttccaccaatgtcagacgcaggttaagcggcgcatttaacatcccgccgttcgtccatgtctgaagctgcacacgcgaaaaaagttcctgcatcagtcgttcacgaaactgctgctgatgggcttgtggaaggcgggcatcatcaccctgcgccagatccactaaaaagcggggataaaccgactccagcacgcgaccggggccgtcaagtaacgtcttggtcaatatcgttctgccgtgaaaagtgtttgaatatcatcgcgtaacagctgggcgtcggtgtaaatccagccgtgagtcatcacagtctgctgcaattgctgttgcatcagcctgaccaccgattcattttgttgacgcagagccagactttcgcgtaaacgcgtctgtaattccgtcaaacatgaagcgaactcagcgaaaaaagtattcatgcctgccgtaacagattcatcgacctgctctgccagaactttagccatttgttggcaataga

SEQ ID NO: 143883 - DNA, 1812 bp, Homo sapiens
atggccggtctggatgttactcataaagcacaaatccacgttgaagacaccgagcgtttccgcgcgattggtaaccctgtttcaaccattgttgccgaactgctggatttcttcctcgaatatcataaagacgaaaaatggggctttgtcggcgcaccactgcatgacccatgcaccatcgcctggctgttgaaaccggagttatttacctctgttgagcgctgggttggcgtggaaacacaggggaaatatacccagggtatgacggttgttgattattattatctgacaggcaataaaccgaatgccaccgtaatggtcgatgttgatcgtcagaatctcaaagaagagatttccgagttcgcggtgaaccttgatgcattgcacagccaggaagtcaaaagcagcttaatgatgtcggacaaacggtgtactcggcaaacagggccagaagctcactggaaatcaacgttcacccacgacgacttcgcagcgttcgtgataccaccgtccacagttgaaatgctcggcttatcacaccgccatgttggcagtttacatgctgccgatgagcggatggcactggaaaatgcccgtgatgcttacacccgtcgtagcgaaggatgttcaatttgggtggtgaaggcgagtgaaattgttgcctcgcaaccggaagaacgcggtcaggcacgcaacttcttatcgtatgccgctgaattagcgggagaaggcgatgaagataccctggccttcacccgagacgagcgccagttcagcaacttattgttggttgaacaaccaaacggcaattttgccgacaccattgcacgccagtatttcatcgatgcatggcatgtggcgctctttacccgtctgatggaaagcccaattaaagaagcgcgctatcacctgcgttttagtcgtggctggctggagcgactgggcaatggtactgacgtatcagggcaaaagatgcagcaggccatcaacaagttgtggcgttttaccgccgaactgttcgatgccgacgagattgatattgcactgagtgaagaggccgaagtttttgccgggatcaacgaagccacattgaacgtaccgcaagagcaggcgtatcgcactggcggtaaaaaaggactgcataccgaacaccttgggcccatgctggcagaaatgcagtatctccagcgtgtcttgcccgttattgaacttggcgcgaccatcatggcgaaaatagcctggactgtgagtctgactcgcccgggaaatgcgctggtcaacaaccctggcagcgcgcatctggaaggtttttgctcgcttgcgggtgtcgcgaaagcgaaaggtgaaatctttagcggctgccggaaaacgcgtcgatgttctgctgccgttgccggggcgtcacaatattgcgaatgcgctggcatgactgcgctctccatgtccgtgggcgcaacgcttgatgctatcaaagcggggctggcaaatctgaaagctgttccaggccgtctgttccccatccaactggcagaaaaccagttgctgctcgacgactcctacaacgccaatgtcggttcaatgactgcagcagtccaggtactggctgaaatgccagggtaccgcgtgctggtggtgggcgatatggcggaactgggcgctgaaagcgaagcctgccatgtacaggtgggcgaggcggcaaaagctgctggtattgaccgcgtgttaagcgtgggtaaacaaagccatgctatcagcaccccagcggcgttggcgaacattttgctgataaaatgcgttaattacgcgtcttaa

SEQ ID NO: 143884 - DNA, 1521 bp, Homo sapiens
tcagacatccgcaaactgcgaattatcgcaggtccagcaagtccgtaatgcgtctgattccaagatatctcggagaaaccacttaaggggttcggcattgaaggctaaaactggtttctcaaagtgtcgccggtgaaattccgattcctcgtgtccactggctgcctcttcatcacgagttacttcctgatcggtaaaccagttgctggcattctcgaagggctgactcactggctgcagaccatggggactgcgaatgcggttctgctgggggcgatcctcggtggcatgatgtgtactgacatgggcggtccggtaaacaaagcagcgtacgcattcggtgtgggtctgctgagtactcaaacctatggcccgatggcggcgattatggcggcaggtatggtgccaccgctggcaatgggtctggcaacaatggtggcgcgtcgcaaattcgacaaagcgcagcaggaaggtggcaaagccgctctggtattgggactgtgcttcatttcggaaggtgcaattccgtttgctgctcgtgatccgatgcgtgtgctgccgtggttgcaacgcggtcatcaccaccatcggtttaaccgttgagccaggttcaaacacgtcggtgatggtacggttacgcatcgcctctttcggcgtgccgctcagattgttagggttgtatgacgggctgttagccatcgccagcacttcaccggtgttgacatccaccagcacggcgctaccagattcagccttgttaaaggccaccgcattgttcagttcgcgataaaccagcgcctgcaggcgttcatcaatactcagcgccaggttgtgcgcagcctggctgtcagtagaagaaatatcttcaattacgcgaccatagcggtctttacgcacaatgcgctcacccggctgcccggtaagccatttatcgaaactcttctcaacgccctcaatcccttgactatcgacgttagtaaagccaatgaggtgagcagtcacttcgccggatggataataacggcgagattcttcacgcagatgaatccccggcagtttcagttttttgatgtagtccgccatgtcagggttcacctgacgcgccagataaataaagcgccctttcgggttggcgttaatgcgggctgaaagctgatccagcggaatattgagcgcgttagccagcgccttccagcggtcaccgacgctgataccgccagcgtcatgcacttctttcgggtcagcccaaatcgcttttaccggcacgctcaccgctaacgggcgaccagaacggtcagtaatcatgccgcgggaggtggaaacttgctgaacgcgaagagaacgcatgtcgccctctttcaccagcatatccggggagataacttgtaaccacgctacgcgtccgagcagaaaagccagcgccaggagaatacagccgcataacaacgcaaaacgccaactgataaagttggcatgttcttcctgacgttttggtttctgcgttttcgccgctgctttcat

SEQ ID NO: 143885 - DNA, 969 bp, Homo sapiens
tcagcaacgcgacgtgctctcgttatccgggttaagacgacgacgactaataattcgcagcagacgccacagtacccatgccagcaatatcacactgatagccgccagcaccgccagcagaatcggatggtttgccagcgcataccacacgcgctcgaaccacggcagatgacctacgtaataaacgtcgccaacacgtaggctgttgataccggactcgcggatcaccgcgaccgaaccgaacatggtggcgcgtttgccgctatcgttcaccgcatcgttaagcatttcataaccgcgtgggctatctgccaacagcgcaatcacgctgcgctggtcgttatacggcgactggaagccaatcaccgccgccatcgcaccggaagaggtcagcgttgaccgggtttctgccgcgcgatcgctctcgtccggcacaatgccggggaacggggtctggcgcatcggtgttttcacccagctttcggtcgcctgcaccaataggtcgatctgcttatcgtctttcagtttgtccgggataccaccgatgatcatgatgtcggcatctttgccctggcggctaacgaccgtgcagctttcgataatattctcgacccaaccggtagcgtcgatgttctgctgccgttgccggggcgtcacaatattgcgaatgcgctggcagccgctgcgctctccatgtccgtgggcgcaacgcttgatgctatcaaagcggggctggcaaatctgaaagctgttccaggccgtctgttccccatccaactggcagaaaaccagttgctgctcgacgactccttcttggttaatgccgcacaacaaaacattcttagcgtgcacattttgaaccagcaaacaggaaaacccgctgctgacgtgacagtcactctccaagagggtgacggctagacatgattgggggaacagcggcaggaactcagggttaaaggggcgcat

SEQ ID NO: 143886 - DNA, 2412 bp, Homo sapiens; identical to SEQ ID NO: 129879

SEQ ID NO: 143887 - DNA, 3198 bp, Homo sapiens
atggcatggcgtcggttgtcccggcggcgtgtcgctggcaatgaccggacatggcctgcaccacagcgacattggcggtacaccaccctgtttgagatgaagcgcagcaaagagctgcctgtgcgctggtgcgatttcagcgccttcacgccgatgatgcgcacccacgaaggtaaccgtcctggcgacaactggcagtttgacggcgacgcagaaaccatcgcccatttcgcccgtatgaccaccgtcttcaccaccctgaaaccttacctgaaagaggccgtcgcgctgaatgcgaagtccggcctgccgcaacttgtggatatcagagaggagatgccagagcagacagccaaacgaatgttgagccttcttggtattcttaagtacaaaccttcaggaaatgccacagatatgggtaaagaacaccggactttgccagctaatttcgcgtttaatgaattcgtagcgcggcacctgcgacaccgccgcacggttaaccagctccagccgggagaaaatcacctgggtggtggtgtcgcggtcgcgtcttcttttggcaccagcatcatcgccacgccaatcgccgttacgccgccgatcaacttgccgacaatcatcgggaagatcatggcgttcatgttggcagcggcgaagcctaagtggtcgcccagggcgaaagcagcggaaacggcgaaggcgcagttgatgactttgccgcggaactcggtgatcttgtttgcaagcaggctctcatcccacgctcctgcagggctccaaggtcacattaactttactattagtacaaagattctggacagcaatgaaccatgtgggggccagaaggggtttgttccccaaaagggccgaagtgacacgctcatcaagccagttctcgtcaaagacccaatggtgagtcagggtctacggtgtctcaagaattcggccacctccacgaccaacctctacacacaggccctgttggcttacattttctccctggctggggaaatggacatcagaaacattctccttaaacagttagatcaacaggctatcatctcaggattcattttagtaacagttattaagtcatcaaatgctgatgacacatcaatctacatgttttatcaaaaggtcggcgacaactcaatcgacagctggaaaaacgcgggccgtgtctttaaagacagcgataagttcgacgccaacgatccgatcctgaaagatcagacgcaagaatggtccggttgtgatccccagctcggatgcgatttcgtcgtatctgaagcgagggctttcgcgtcggatcatcgccaagccgaatggagcagcaaagacgactttatgcgtctgggtaaaccgattctgtttttcggtgttactgctggcaacatggattcgatgatcaaccgttataccgccgatcgccgtttacgtcatgacgatgcctacacgccggataacgtcgcgggtaagcgcccggatcgcgccacactggtttatacccagcgttgtaaagaggcgtggaaagatgtaccggtgatcctcggcggtattgaggctagtctgcgccgtaccgcgcattatgattactggtccgataccgtgcgccgttccgtgctggtggattcgaaagccgacatgctgatgtttggtaacggtgagcgtccgctggtggaagtggcgcatcgtctggcgatgggcgagccaattagtgaaatccgcgatgtgcgtaataccgcgattatcgtgaaagaggcgctgcctggctggagcggcgtggattccacccgtcttgatacccctggaaaaatcgacccaatcccgcatccgtatggtgaagatttgcctcctgtgcgttcagacgaacaggctgaagcactgccggaagcgtatgaaccgattgaggttaacgaattcggtgaaatcgatctgcttgcaatggttgaagatgaaatcatcctcgccttgccggtagttccggtgcatgattctgaacactgtgaagtgtccgaagcggacatggtctttggtgaactgcctgaagaagcgcaaaagccaaacccatttgccgtattagccagcttaaagcgagtaaggtccatggccgtacaacagaataaaccaacccgttccaaacgtggcatgcgtcgttcccatgacgcgctgaccgcagtcaccagcctgtctgtagacaaaacttctggtgaaaaacacctgcgtcaccacatcactgccgacggttactaccgcggccgcaaggtggtgtgggatgatgtgctcatgagtgaacaagggaagcagctagcttccaggtgtctaatatcctgggatggatgtgtgtggcatgacctgctgatgaaagatgcggctcttctgcgtctggaggccaatgcaaatgtaggttcatccagcactggggagtactatgggatgttccaattctggtatggtcactacccctatcaagtggctgagtatgatcagtgtccagtgtctggccaatggaactttcctcagcccttcattgaccaaatgccccaagggcattcgagccagcgttccattatctggaggccctcgttctctgaaggcacggaccttttcagctttttccggccagccatccagccagccatccagccagccaaccaactatccatccacaatttgtggacacaattccggcattcaaccaaaattccagttgaatgggtgaatggtgaatggctgaatggacgaatgccaggggatcatcatgaatggcaatgcaactatcaggacccaatggtgagtcagggtctacggtgtctcaagaattcggccacctccacgaccaacctctacacacaggccctgttggcttacattttctccctggctggggaaatggacatcagaaacattctccttaaacagttagatcaacaggctatcatctcagatttaccacacatgaaagctgccaaagcttatggctggcatcctctgaagcagcagccccagttgcagctggacccctttgagccacagctggagctggagcagctgggatgcaggaaacagtgtttggaggctgtgcagcagcttccaggagcagaagtggagctgcagctgcaggcagctcccggatccctgaggcgctccgggcggtggatgagagtgtcttactgcttaggccagacaaagagctga

SEQ ID NO: 143888 - DNA, 1310 bp, Homo sapiens
ttactggcaggtacggcgctggttggcggcgtacagcctgctgacgccatcaccgttgacgcgatgatcccgaacttcaactgggcgttcctcggcgttaccacctggatctttatggccgcaggtggcgcggagtccgtcgctgtgtacgttaacgacgtcaaaggcggttcgaaatcgttcgtttaagtgatcatcctcgccggggattttatccgggtatgtatcccgctcctcgggctctcccatctcatctctcatctccccggcctcactctgcgctggccacatgcgtttcttctgttcctcaagcaaaccaacttgttccaaccccagaacctttgcagcagctctttcctctgcctggagctctccttctccaaatgaaggtttcagctccaatcctgctttcttagggacatctctgatgatgttccacttagagttgcgaaggtgcatcgccccaattgttaccacagatcttctcccattgacatctggagacgttggccttgtgttactctgtgttggcttagatggaagtttatggagcgactgcaggatgacagaaagcgtttctaccacgaacacgccccccataatcaccagcaggaattcctgacgtagcagtacggcgataatgcctaacgcaccacctaacgccagcgaacctacatcgcccataaagacctgcgccggataggtgttaaaccacaggaagcccagtcctgccccgactatcgcggtacagacaataaccagttccccggcgtgtcgcagatacggtatatgcaagtagctggcaaagttcatattgccggtcgcccacgccaccagcgcaaaaccaccggcgacaaatacggtcggcataattgccaggccgtcgagaccatcggtcaggtttaccgcgttgccagtacccacaatgacgaagtaagccagcagaatgtagaacagccccagctgcggcatcacatctttaaagaatgggaccaccagctgcgttgcgggcgtgtctttgccggcaaggtacagggcgaaggcgacacccagcgcaatgaccgacatccagaaatacttccaacgagcgatcaaccctttggtgtctttacgcaccactttgcgataatcatcaacaaagccaataacaccgtaacctaccagcaccaccaacacgcaccagacgtacggattggacgggtaagcccacagcagtacggagatcacaatcgccgtcaggatcataatcccgcccatggtcggcgtacgcgcttgctgaagtgtgattcaggaccgtcgttacgcaccac

SEQ ID NO: 143889 - DNA, 1171 bp, Homo sapiens
gacagccataaagagcttgaacaaaaactggcggccttcctggggatggaagatgcgattctctactcttcctgctttgatgctaacggtggcctgtttgaaacgcttctgggtgcggaagacgccattatctccgacgcactgaaccacgcgtctattattgatggtgtgcgtctgtgcaaagctaaacgctatcgctatgccaacaaagatatgcaggagctggaacaccatctgatcgtctttatcgtactgttggcggtacataaaggtcacgcgccgatccgcagcgtcagccgtcaaatccagaatattacctcgaaagatctcgacgttcgcctcgacccgcagaccgtgtttcattgagctggaacagctggtactgtcgttgaaccatatgatcgagcgtattgaggatgtctttacccgccagtccaatttctcagcggatatcgctcacgaaattcgcacaccaattacgaatctcataacgcaaaccgaaatcgccctcagccagtcgcgcagccagaaggagctggaagatgtgctctactctaatctcgaagagctgacgcgaatggcgaaaatggtcagcgatatgctgtttctcgctcaggccgataacaaccagctaatccccgaaaagaaaatgctcaacctggcggatgaagtcggcaaagtgttcgattttttcgaggcgttagcggaagatcgcggcgtggagttgcggtttgttggcgacaagtgtcaggtcgcgggcgatccgctgatgctgcgtcgggcgctaagcaacctgctttcgaacgccctgcgttatacgccaaccggagagacaattgtagtgcgctgtaagacgggcgatcacctggtgcaagttatcgtcgaaaaccccggtacgcccattgcgcccgagcacttaccgcggatgtttggcccggttttattttggtgaccccttccggtcagcgaatggggggaggggagcggccatttgttctggggaaccggccaaaaggtcatcgatagcctctctactaaggcccccgttgctggtcaccctccgctttgtcccgcgggacccgggtacgattttcaccttgacggcgggtacgcccttcaagccccacttcgttttggactgaacatatggaggacgtcgtcctcgccgccc

SEQ ID NO: 143890 - DNA, 2651 bp, Homo sapiens
ggtgtacatcttcacctgacccaccctctggccttcctccaggttttgctaagctaacctcccttatcgtgacacttgttgaggtgggagtttcccctgaacctgatgaaggctggctgtatctggcagtggtcattgacctgtggtcacgtgccgttattggctggtcaatgtcgccacgcatgacggcgcaactggcctgcgatgccctgcagatggcgctgtggcggcgtaagaagccccggaacgttatcgttcacacggaccgtggaggccagttcggtgaccgctggaagggctggctaacgcgctcaatattccgctggatcagctttcagcccgcattagcgccaacccgaaaggcggctttatgttatctggcgcgtgaggtgaaccctgacatggcggactacatcaaaaaactgaaactgccggggattcatgtgcgtgaagaatctcgccgttattatccatccggcgaagtgactgctcacctcattggctttactaacgtcgatagtcaagggattgagggcgttgagaagagtttcgataaatggcttaccgggcagccgggtgagcgcattgtgcgtaaagaccgctatggtcgcgtaattgaagatatttcttctactgacagccaggctgcgcacaacctggcgctgagtattgatgaacgcctgcaggcgctggtttatcgcgaactgaacaatgcggtggcctttaacaaggctgaatctggtagcgccgtgctggtggatgtcaacaccggtgaagtgctggcgatggctaacagcccgtcatacaaccctaacaatctgagcggcacgccgaaagaggcgatgcgtaaccgtaccatcaccgacgtgtttgaacctggctcaacggttaaaccgatggtggtgatgaccgcgttgcaacgtggcgtggtgcgggaaaactcggtactcaataccattccttatcgaattaacggccacgaaatcaaagacgtggcacgcatcacgaccgaggaagactttaatcatgcgagtgcagctcgattcgtatgcgctgccgccgaaagacgttgcaaaaccaccattaacctggtgccggaaaacgaagtgctgaacgtgctggaaggcgaagatgctgaaaccaacgcgctgcgcgcaaaacgtcgttgcccgaaatgcggcacggcgatggacagctatctcatcgatccgaaacgtaagttgcatgtctgtggtaataacccaacctgcgacggttacgagatcgaagagggcgaattccgcattaaaggttatgacggcccgatcgttgagtgtgaaaaatgtggctctgaaatgcacctgaaaatggggcgtttcggtaaatacatggcctgcaccaacgaagagtgtaaaaacacacgtaagattttacgtaacggcgaagtggcaccaccgaaagaagatccggtgccattacctgagctgccgtgcgaaaaatcagatgcttatttcgtgctgcgtgacggtgctgccgttgccgcaaggttcaacgatgatcgccaccgacgtggcctcgccgttctttacgccgatcaagctgacctttatggtgtcgctgattctgtcagcgccggtgattctctatcagcgctgtataagcatgaacgtcgcctggtggtgccgctgctggtttccagctctctgctgtttttatatcggcatggcattcgcctaccttgtggtccttccggcggaatttgggctccttggcaaatacggcgcggaagacaggctgtgaattgcctggcaccgatgatcaccctggaaaaaatcgtgcgtggaaaacgtactgcagtcagtgagccattgttccccaactacctgtttgtggaatttgacccagaagtgattcataccacgactatcaacgcgacccgcggtgtcagccacttcgtgcgctttggcgtcgcagcgatagtcccatcggcggttattcatcagctatcggtatataaaccgaaagacattgtcgatccggcaaccccttatccgggtgataaggtgattattaccgaaggcgcgttcgaaggctttcaggccattttcaccgaacccgatggtcacaccggcattctgattgccaacggcgcagatatgaaacgctggctggcgaagctgaccaacaataatgctcagggcgaatactacatcaccgacattattgcgctggcgtatcaggaagggcgtgaaatcgtcgccgttcatccgcaacgtttaagcgaagtagaaggcgtgaataaccgcctgcaactctcccgtctggagcgtgtttatcagtccgaacaggctgaaaaactgctgttagcaggcgttatgctgcgcgatccagcgcgttttgatctgcgtggtacgctaactcacgggcgcgatgttgaaattgatactaacgttatcatcgagggcaacgtgactctcggtcatcgcgtgaaaattggcaccggttgcgtgattaaaaacagcgtgattggcgatgattgcgaaatcagtccgtataccgttgtggaagatgcgaatctggcagcggcctgtaccattggcccgtttgcccgtttgcgtcctggtgctgagttgctggaaggtgctcacgtcgtctctagtcccacccgatga

SEQ ID NO: 143891 - DNA, 2814 bp, Homo sapiens
atgcggtcgcgttttttacgtgtcgcgttttaccactattcagtcacttcccttcccgcactccccgcgcttcggtactaccgccttgggtctggggtcaatgtaagccataataccggctttctccgcagtcccaaacgttgcggccaggccctcacatgcccggtaacattattcggccaaagttctcagctggttcaccggcgagcagaaacagcgcgcgttcaggcgctgacccgcgttggcatggtgcattttgcccatcagcgcgtttcaccctctccggcggccagcagcaacgtgtggcgattgcccgtgcgctgtgcagcaggcgaaaaatcagcgcgcatcgtgatggacaccctgcgcgacatcaaccagacgacggcatcaccgtggtcgtcacgctgcatcaggtggattacgccctggctactgcgaacgcatcgtcgccctgcgccaggggcacgtcttctacgaggcagcagccaacagtttgataacgaacgttttgaccatctctaccgcacattaaccgcatatggagaagaagctgagcgtgagtcacgccttcttgtccccggactacgcgggtaccgagctgagttaggcatgaatacttttttcgctgagttcgcttcatgtttgacggaattcagacgcgtttacgcgaaagtctggctctgcgtcaaccaaatgaatcggggtcaggctgatgcagcagcaattgcagcagactgtgatgactcacggcggatttacaccgacgcccagctgttacgcgatgatattcaaacacttttacggcagaacgatattgaccaagaccggttcggtcggttaaacatagatcccccattagaattcgatgtaattttcagtgtagaccataattttcttaactgaggttcatcgcggctttatggacttttctgaaagcgttgtgaatgcgcaatcagatcacggtacataccgtatggccatgcaattaagatgttcaccggaatcgctaccaatctggaataaaaagactgttcgaagctcattccggagaggaaaacttcaatacacatgttcacgacagaacagtaaacaaccatcgcgaaccacggcgctaccagattcaccttgttaaaggccaccgcattgttcagttcgcgataaaccagcgcctgaggcgttcatcaatactcagcgccaggttgtgcgcagcctggctgtcagagaagaaatatcttcaattacgcgaccatagcggtctttacgcacaatggctcacccggctgcccgccatttatcgaaactcttctcaacgcctcaatcccttgactatcgacgttagtaaagccaatgaggtgagcagtcagcgaaatcgaaagcgattcaccgccaccaatatccatgtgacctcgcacggtacggaatttaccctacaaaccccaaccggtagcgtcgatgttctgctgccgttgccggggcgtcacaatattgcgaatgcgctggcagccgctgcgctctccatgtccgtgggcgcaacgcttgatgctatcaaagcggggctggcaaatctgaaagctgttccaggccgtctgttccccatccaactggcagaaaaccagttgctgctcgacgactcctacaacgccaatgtcggttcaatgactgcagcagtccaggtactggctgaaatgccgggctaccgcgtgctggtggtgggcgatatggcggaactgggcgctgaaagcgaagcctgccatgtacaggtggtgcgtaacgacggtcctgaatacacttcagcaagcgcggtacgccgaccatgggcgggattatgatcctgcggcgattgtgatctccgtactgctgtgggcttacccgtccatccgtactctggtgcgtgttggtggtgctgggtggcgccccgtggccggtcgttcaaataaatgttgccccccacccaacccaaccaacccgcccaatccaacccaacctccttatgcccatcacgcaacctttcgtagtcctgcacgccggcatttagctaatccccgaaaagaaaatgctcaacctggggatgaagtcggcaaagtgttcgattttttcgaggcgttagcggaagatgcggcgtggagttgcggtttgttggcgacaagtgtcaggtcgcgggcgaccgctgatgctgcgtcgggcgctaagcaacctgctttcgaacgccctgcttatacgccaaccggagagacaattgtagtgcgctgtcagacggtcgatacctggtgcaagttatcgtcgaaaaccccggtgacggaaatggacgtcaaaaggctcacttctgtttgcagatgcccattcgccgaattaaacaacgccagtccatatagaagcgaaggtgacggtaacgctcgagtgtcagcgttgcgggaagccgtttatcatcaggtctacacaacgtattgttttagtcctgtgcgttcagacgaaaggctgaagcactgccggaagcgtatgaaccgattgaggttaacgaattcaaccgtcggacgcaagttagtggcaacggctggagttccgcagtggccctttcggtacacataccgttcactcttgggcgctgtcttcgttcgttatttctccgtgcatacagggcgcacacagcttttagttttgcttgttcggcatgccggtgctacctttcctcctgtatccctcacggtgcttattaggggcccttgctgtaatgctggtagcagtcgtttctgtaacaaaagggtaccccttaaggccccgtatgcacgtaaactacgcgttaaagctatctaa

SEQ ID NO: 143892 - DNA, 361 bp, Homo sapiens
  misc_feature (1)...(361): n = a,t,c or g
aaggatagtctttcccattaataggaaggtattctgaacccctagtctaataagctcacatttgaacgcgcatggacttccttctacctaaactttcgaactttttttagacacaggaagtagcaagaagggagatgccaagtgacaatcaccaggaagatgcctctctctagtgacctgggtagtttgcacggcttggctggaaaccacagtccccccatctgtgccagaaccccccatgtggccactgtcctcagacagctcctggagcttgaggataagcactggaatggctccggctccctcctcctcaacaagaagtttctcgatgatcttctgcacaaaaaccaacagctgaccn

SEQ ID NO: 143893 - DNA, 411 bp, Homo sapiens
gatactgaccagtctcatgtgccactggtgaggaggaagacaacgtgcttttcccaaagggcgatgatctccccagatgatgacccttctcaggaggcaggagcgctttcccggaataaccttttggctccttattcagctctgactttcatggagaatggcaactgtcttctccagctttttcagctgggcaagctcctggttcaggcaagccacctgcatggtcagctgttggtttttgtgcagaagatcatcataagtatgtgactgttgcccactcacaattgagatggcagcaccttcctccaactgttgaattttttctgacaaaatgaggttttcctccagcactctgaccagtttttgcttcaaactttccgagaaacttcttgttgaggaggagggagccgg

SEQ ID NO: 143894 - DNA, 594 bp, Homo sapiens
ttggctggaaaccacagtccccccatctctgccagacccccccatgtggccactgtcctcagacagctcctggagcttgtggataagcactggaatggctccggccccctcctcctcaacaagaagtttctcggaaagtttgaagcaaaaactggtcagagtgctggaggaaaccctcattttgtcagaaaaaattcaacagttggaggaaggtgctgccatctcaattgtgagtgggcaacagtcacatacttatgatgatcttctgcacaaaaaccaacagctgaccatgcaggtggcttgcctgaaccaggagcttgcccagctgaaaaagctggagaagacagttgccattctccatgaaagtcagagatccctggtggtaactaatgagtatctgctgcagcagctgaataaggagccaaaaggttattccgggaaagcgctcctgcctcctgagaagggtcatcatctggggagatcatcgccctttggtaaaagcacgttgtcttcctcctcaccagtggcacatgagactggtcagtatctaatacagagcgcgttggatgctgcccagagcctggcttatagagc

SEQ ID NO: 143895 - DNA, 1742 bp, Homo sapiens
atggagccaaagcaaatcgcacgcgtggtccgtcagcaagaggcgctgtttagttcggtttatgaagggctgattgcggtggatccgcatggttacattaccgccatcaatcgtaacgcaagaaagatgctggggctgagttcccccggacggcaatggttgggtaaacccattgttgaagtggtcaggcccgccgatttctttaccgaacagattgatgaaaaacgtcaggatgtggtggcgaactttaacggtctgagcgttattgccaaccgggaagctattcgttcaggtgatgatttgctgggggccattatcagctttcgtagtaaagacgaaatttccaccctcaatgcgcaactgacgcaaataaaacaatacgttgagagccttcgtacattgcgacacgagcatctcaattggatgtcgacgctcaatggtctgttgcagatgaaagagtatgatcgcgtgctggcgatggtgcagggggagtctcaggcccagcaacagcttattgacagcctgcgcgaggcgtttgccgatcgccaggtggcggggctgctttttggtaaagtgcagcgcgcccgggaactggggctaaaaatgatcattgtccccggtagccagctttcgcaactgccgccaggactggataaaagcgcctgtagtgaggctaccgaggccagcggtgcaggtaacatggcctggaacgcatctggcaacattgcccggacagaaccagacatgttgtccatcactttgtcgaagaagctctgctgctttggcgaccgcatcatcgaaatccccgagactatcgaccagcccgttagcttttgcatcctgaccggtccagacgtggcactgggcaattttatcaatctgctccggcgtcgaatgacgcgcatcagcaaccagcgtgacagtacggtggatgtcgctaaccgcctgattgactggtgccagtcgcgcggtgaagcggttatcgccagtcaggactggcacccggcgaatcacggcagttttgccagtcagcacggtgtagagccttatacgccaggccaactcgacggtttgccacaaaccttctggccagatcactgtgtgcagaacagtgaaggcgcacaattacatccgttactgcaccaaaaagcgatcgcagcggtgttccataaaggcgaaaatcctttagttgacagttacagtgccttttttgataacggccgtcggcagaaaacctctctcgatgactggttacgcgatcatgaaatcgatgaattgatcgttatgggcctggctactgactattgcgtgaagtttaccgtgctggacgcgttacagttaggttataaggtaaacgtgattaccgatggttgtcgtggcgtgaatatccagccccaggacagtgcgcacgcgtttatggagatgtcagcagctggggcaacgctatatacgctggcagactgggaagagacacaggggtaattttacgctggcctacaattctgtactggcattgtaggccaaataaaacacgtcagtggcacatctggcaattgatgccatcaacgaaagatttaattcacctcagaaatctcttccaacgacaccttccgcgtttcgatgccaaaaatggagagaaccagcgcacagagcaataacataacaccaagtaccataaacaccgtgatcgacccataatgtgttaataatgccgcaacgccatagggcgtgaagactgcgac

SEQ ID NO: 143896 - DNA, 2043 bp, Homo sapiens
gcggtattgtggtggtcaacctgacacaatgtatgtccggtaaagtgaacatgggtggttatgccaccggtaacgccctcgcccatgccggcgtaattggcggtgcagatatgactgtagaagccacgctaaccaaactgcattacctgcttagccaggaactggatactgaaaccattcgcaaggccatgagccaaaacctgcgcggcgaactgacgccggatgattaaggagactgtaatgccccctcgcgccctgttactggtcgatttacaaaatgatttctgtgctggtggcgcgctcgccgtgccggaaggtgacagtacggtggatgtcgctaaccgcctgattgactggtgccagtcgcgcggtgaagcggttatcgccagtcaggactggcacccggcgaatcacggcagttttgccagtcagcacggtgtagagccttatacgccaggccaactcgacggtttgccacaaaccttctggccagatcactgtgtgcagaacagtgaaggcgcacaattacatccgttactgcaccaaaaagcgatcgcagcggtgttccataaaggcgaaaatcctttagttgacagttacagtgccttttttgataacggccgtcggcagaaaacctctctcgatgactggttacgcgatcatgaaatcgatgaattgatcgttatgggcctggctactgactattgcgtgaagtttaccgtgctggacgcgttacagttaggttataaggtaaacgtgattaccgatggttgtcgtggcgtgaatatccagccccaggacagtgcgcacgcgtttatggagatgtcagcagctggggcaacgctatatacgctggcagactgggaagagacacagggaaccccccatgtggccactgtcctcagacagctcctggagcttgtggataagcactggaatggctccggctccctcctcctcaacagaagtttctcgacagtaattcacaccaaccccaccaatcaaaatgtgctgctcctcttttcaggccatcccattgctctccagcctggaatccagtatttatgttcactccaagacctgaatttatattataacaacattccttcattagtggaagtgtcccgtctacaaccgttacccttcctcaaagaactggatttgagacttaatcctgttgtaaggaaagatacagattataggctctttgctgtatatacactacaaactctggagaaattagtattgccttttccagaatgtcatatagttggaatcattcaatccctggtggtaactaatgagtatctgctgcagcagctgaataaggagccaaaaggttattccgggaaagcgctcctgcctcctgagaagggtcatcatctggggagatcatcgccctttgggaaaagcacgttgtcttcctcctcaccagtggcacatgagactgaggctctcaccgccattgccaccagtatggtgctcccattgtccgccatcccgcccgccgtcactgccaccgcccgcgagaccacccggcgcacgccaggccccgcccattgccccgccccccgcgcgcgcgccgccgcgaccccgggaaccgttattggccgggtcacaagcccgcccgcccgctgctggagccgcgaccatgcctccatctgtggcctggaccccaggatcctaccccctaaactccttctaggcaaccatcttggtcaacttcacccaatgactacctatgctcctcctgttattgacagccctgaaaaaatggagttcaaggtcataggccccattggacctgatatcttcaccaggctcctgagaacccaactgagcagccctgtcctcagattccagctcggacataacattgggggtcagaaaactgactcccaaggtacaaactggaacagccaggatgatcttctgcacaaaaaccaacagctgaccatgcaggtggcttgcctgaaccaggagcttgcccagctgaaaaagctggagaagacagttgccattctccatgaaagtcagaggtag

SEQ ID NO: 143897 - DNA, 594 bp, Homo sapiens
ttaaacacaaaaagtgccaaataagttgggggatcgtctagagtcaacgtgcctcaagttttcatctctcttgtaagccagatgttcagtgaaaacgatctgccgctcgtgcggaagcgcaagacagaaccatgattccgtattacgcgtcgcgcccggcgcatagcgatgacgtaaatgtgaaaaaatttcaaactctaccgtgcgctgacagacaattaaggtcagttgttcagcgacaacatcaatggtgacctcttcctttactttggatactgatggtaagaagtcaatatgggccgtgcacagtggctcacacctggtgggattgcttgaatccaggagttcacgaccagcctgggcaacataatgatacctcatataatatttcaaagagaatactcttggtgacaggcagctctcctccacacagtaattcaagcgcctagcattctttaatcttattgcttcaccactcattgacatctgataattacctacatctctatcatcccatacaaagaaatattgtttcttcagggtagcctttctaggttctgcctcctcaacctctttaatctgtctagccagcat

SEQ ID NO: 143898 - DNA, 1434 bp, Homo sapiens
tcacgctaggacgacgtggtgccagttatcgccgccttccaacagatgccagtcgaggctggcgtcatggttccactcgcggccctgggcaaattcgttacccatgaacagtagtttcttgcccgggaatgcccacatccagccatagtaggcgcgcaggttcgcgaatttctgccatgcgtcgcccggcatgcggtcgagaatcgattttttaccgtggaccacttcatcatgcgacaacggcaggacgaagttttcagtgtagttgtagagaatcccgaaggtcagtttatcgtgatgatactgacgataaaccgggtcgagcttcatgtagtccagggtgtcatgcatccagccgaggttccacttgtaccagaagcccagaccgcccatatcctgcggacgagaaacgccagggaaatcggtagactcctcagccattgtcaccgcaccggaaacctgctcaccaagaatacggttggtattacgcaagaattcaatcgcttcaagattctcgcgcccgccaaattcgttcgggatccactccccctctttacgggcatcaataccaaaacggttcatccagtaaagcgcgttaccgacgagaaagtaactgacttcacggcgaccatagttgtagatcagcgtgttccagtcctgatgatagctttcacgcgaatcgctgtgttcatacaagttcgtgccatcaaattcggcaagcgcaaagtcatcagtcgggaagtggcctggcacccagtcgagaatcacgttcagaccagctgcgtgtgcggcatcaatgaaataacggaagtcgtcgcgagtaccaaaacggcgggttggcgcatacaggccggttggctgataaccccaactgccatcgaagggatgctcgttaatgtgcagtagttcgaggtgggtaaagcccatccatttagcataaggcaccagttgatcggccagctcgcggtagctcaaccagaaattgttgtcggtgtggcgacgccaggaacccaggtgaacttcataaatagagattggcgcatcaaactgattcgcttttttgcgctcttcagtctgtacaaccttttccggcagcccgcaaataagagacgcggtttccgggcgcatttgcgcttcaaaggcataagggtcggacttcagacgcaagttgccattggcatcaatcatctcgtatttatagagctgaccgttatgcgccccagggataaacagttcccagatgccgctctctttacgcaggcgcatctgatgaactttgtcggcgtcggcgttaaattcgctgatcgactcccggaggaacagcttgatctgatagagctggaggctgattcgaagttgtgggagctgttccagcttgaagatcgcagtccgccagtcacactgtccctgatatgcactggccagggggatcat

SEQ ID NO: 143899 - DNA, 2312 bp, Homo sapiens
aaggatcgtactgccgcgcaaagatggcgataatgattttttttgggtcccgacaccagaaaaaattgttgccgacgcgatgggtgcactgcgcctgaaagtgggtaaagaccttggtctgaccgacgaaagcaaatgggcaccgctgtgggttatcgacttcccgatgtttgaagacgacggtgaaggcggcctgacggcaatgcaccatccgttcacctcaccgaaagatatgacggctgcagaactgaaagctgcaccggaaaatgcggtggcgaacgcttacgatatggtcatcaatggttacgaagtgggcggtggttcagtacgtatccataatggtgatatgcagcagacggtgtttggtattctgggtatcaacgaagaggaacagcgcgagaaattcggcttcctgctcgacgctctgaaatacggtactccgccgcacgcaggtctggcattcggtcttgaccgtctgaccatgctgctgaccggcaccgacaatatccgtgacgttatcgccttcccgaaaaccacggcggcagcgtgtctgatgactgaagcaccgagctttgctaacccgactgcactggctgagctgagcattcaggttgtgaagaaggctgagaataactgatatgactcaaatacacgaaatcattcgcgttgcatcgaggcggcaactgagtgaactcccatgagcatagataactatgtgaatgggatgagcgaaggcagtcaacgaagaggcagcgtaaaggataaagtgtataagcgtcccgtttcgatcttagtggtcatctacgcacaagatacgaaacgggtgctgatgttgcagcggcgtgacgatcccgatttctggcagtcggtaaccggcagcgtggaagagggtgaaaccgcgccgcaagctgccatgcgcgaagtaaaggaagaggtcaccattgatgttgtcgctgaacaactgaccttaattgactgtcagcgcacggtagagtttgaaattttttcacatttacgtcatcgctatgcgccgggcgtgacgcgtaatacggaatcatggttctgtcttgcgcttccgcacgagcggcagatcgttttcactgaacatctggcttacaagtggcttgatgcgcctgctgcggcggcgctcactaagtcctggagcaaccggcaggcgattgaacagtttgtaattaacgctgcctgaacaggcagggctatctggagatatttttatggcaggtcatagtaaatgggccaacaccagacatcgtaaagctgcgcaggatgctaagcgcggtaaaatcttcactaaaatcattcgtgagctggtaaccgcggctaagctgggcggtggcgatccggacgctaacccgcgtctgcgtgcggcggtggataaagcactgtctaacaacatgacccgtgacacactgaaccgcgcaattgcacgtggtgtgggcggtgatgatgatgcaaacatggaaaccatcatctacgaaggttacggtcctggcggcacggcaatcatgattgaatgtctgtctgacaaccgcaaccgtaccgttgctgaagtgcgtcatgcatttagcaaatgtggcggtaacctcggtactgatggttccgttgcctatctgttcagcaaaaaaggcgtgatctccttcgagaaaggcgatgaagacaccatcatggaagcagcactggaagcaggtgctgaagacgttgtgacctatgatgacggcgcgattgatgtctacactgcatgggaagaaatgggtaaagtgcgcgacgctctggaagcggcaggtctgaaagcagacagcgcggaagtttccatgatcccgtctaccaaaggaagagacctgcagcaaagcaagcttcgcgccgttctccgtggccacttcccgactgatgactttgcgcttgccgaatttgatggcacgaacttgtatgaacacagcgatccgcgtgaaggctatcatcaggactggaacacgctgatctacaactatggtcgccgtgaagtcagtaacttcctcgtcggtaacgcgctttactggattgaacgttttggtattgagtgctgcgcgtcgatgcgccgtaaagagggggagtggatcccgaacgaatttggcgggcgcgagaatcttgaagcgattgaattcttgcgtaataccaaccgtattcttggtgagcaggtttccggtgcggtgacaatggctgaggagtctaccgatttccctggcgtttctcgtccgcaggatatgggcggtctgggcttctggaaaaagacggtgcagggaatccggaattaa

SEQ ID NO: 143900 - DNA, 918 bp, Homo sapiens; identical to SEQ ID NO: 124836

SEQ ID NO: 143901 - DNA, 1389 bp, Homo sapiens
tcaacaggaggatacgcatgccaactcaagaagcgaaagctcatcacgtcggtgaatgggcatctctgcgcaatacgtcgccggaaatagccgaggccattttcgaagtcgccggtacgacgaaaaagccaggctgtatttacgatcaacatcctgcgagaaatcacggggatgagtcgcttgccatttttctgacgtccacagcaggaacggaatggtgtacatatgacgcgtcgggttgtcctcattacgcccctgagttttgtgcggcggcgtgtcgtaaacctcttcaccgtggtcagagaaataaaccaggaaaccgttcgggtttgctgctttaaagtctttaatcaggctggcaaccacatgatcgttatacaggttagcgttgtcataatcgttatatgactccagctcttccgcgtttaatcccggcggaacatgatcggtattgccatcaaacttgccctgattttccgggtagcggtatttgtatttgatatgcgtacccagcagatgaacaatgatcagtttcttcggcgcagggtcattcagcacttcctggaacggattcagcacgttggtgtcgtattcacgcgcactctgcgtacgttgctggtgcatgtagtactgcttgtcgatctggcgcgaaaataccgtcagcatggactctagagaagagtccgctggctgaccgaatttgatgatgttcaggcatattgcaccgcgatgacgcctaaaacgactatgcttcagcggaatggcgcgaatagtacgcacattagacgtgatatcttccccggtggtgccatcgccacgggtcgcggcactgactaaaacgccattttcatacagaataacaatgccgccaaacagttcgcggtcgaacggttccagttcagcaataacctgggtcgcggcctgatgcgggaaacccgtcagcgcgggtggtcggatgcagcagacagctctagagtcttccgcgtgcacagatggcgatggctggtttccatcagttgctgttgactgtagcggctgatgttgaacgttttcgctcgggaagacgtacggggtatacatgtctgacaatggcagatcccagcggtcaaaacaggcggcagtaaggcggtcgggatagttttcttgcggccctaatccgagccagtttacccgctctgctacctgcgccagctggcagttcaggccaatccgcgccggatgcggtgtatcgctcgccacttcaacatcaacggtaatcgccatttgaccactaccatcaactttatttgaagcatggtttcgctgattgcgaaccgtttgctgattatcgacttgatccacacagtcgatttttatcattgacgctatgcgaaaataatgaattgccat

SEQ ID NO: 143902 - DNA, 768 bp, Homo sapiens
ctgggtttcgtcgagatgttggcgaccgtgattggtttgcgtggcgtcatgcctgttgaaatcagcactacgcgtcggcgtccgtggcgtaatagtgatttccagcgcatgatcaataatctgggcaccgctttccacgttaatacgtgctgcatctgccatttctttcggatcgctaccagcaatttgcacggtgcgaataccgggttcatcaatgtgcaccatccgtaaacgagatttgtcgctttcccaaacctgtgggttagaagacatcatctcggatactgtcaatccggctcccatctcgtagcacaacgtccgaaaaggtctgtctggcgtgcgttcaaccaactctttcagcatttcatcaggatatgtgttcttaataccggcaaattcgtcctcttcatcatactcaaattcaacaccttctatgctggcatcatcctgaaaactacctgcaaacttttcagcagcagaaccgtccgcaatacaccacggacagagatgttcaacttcatcaacgcaataaaagggacccgagtaataaactgacgtctgttgttcacagcaatcgcactctacggttttatcctgttcaaatgcgcctgtttccagtggcttgggatgatatttgaattggggtaacggcctgatattttgagtcatagaaacatcctgtctcacaatccgctcaacaagatcatctgtgaagaaaccattcgcctcggcggttcgatggtgcaccaccacggtatcggtaaacat

SEQ ID NO: 143903 - DNA, 762 bp, Homo sapiens
tcacgccacagtcacagcgtgccggcagtggagacagcggaaaagataaccctgacaatggccacccttatgcaggcatttagctagatcagaatttctaataccgaaattctcacaatcttcttcaaggttggcaaattcatcgaggcgatcttttatatcattccagcccacatagccgataaaaacacagaaatcgccacaatgcgcgagccagaattcctgctgccatccatgataacctggcgtgcgttcaaccaactctttcagcatttcatcaggatatgtgttcttaataccggcaaattcgtcctcttcatcatactcaaattcaacaccttctatgctggcatcatcctgaaaactacctgcaaacttttcagcagcagaaccgtccgcaatacaccacggacagagatgttcaacttcatcaacgcaataaaagggacccgagtaataaactaacgtctgttgacgcaaaagaggccgtaaatgacccctgcatttgcttcctggaatgaatttttcgcaatgggcggttacgccttttttgtctggctggcggtggtgatgaccgttattccgctggtggttttggtcgtgcactcggtgatgcaacatcgcgcaattgtgctgcgcaacagcaggaggctgcatgaatattcgccgtaaaaaccgcttgtggattgcctgtgccgtgttggcagggctggcgctgactatcggtctggtgctatatgcgctgcgctcgaatatcgatct

SEQ ID NO: 143904 - DNA, 4188 bp, Homo sapiens
atgcggaatgtgccagaactgatgagcgatatccgccaggatggtcgcttctgctctgccagtggtgcggatagtgttgtagtgcggatgctgtgcgatggcgctatacaaaaaagttgtcgagtgaccgataccaccactaatcagaatttgctgatcgcgggcaatcttacatgccgcatcgatagtcggcataaccgcattgcctgcaaggatcacgcaatcggcctgatacggcacctcaccggagaaatcatcctgcgccagccactgtccgataacatttatggcatctatagttgccggcgaaagcgtcggaaacggggtcacgcgcagcgggatacccggcagaaggctcacgggcaaacgacgcggcgggacgagaacagagtccgtctgaatgtggtgtccgccgatatcacggacatcaccacaccggacgggcgggagacgaaattttactataacgacgggaaccagctgacggcggtggtgtccccggacgggctggagagccgccgggaatatgatgaaccgggcaggctggtatcggagacatcgcgcagcggggagacagtacgctaccgctacgatgacgcgcacagtgagttaccggcgacgacaacggatgcgacgggcagcacccggcagatgacctggagccgctacgggcagttgctggcgttcaccgactgctcgggctaccagacccgttatgaatacgaccgcttcggccagatgacggcggtccaccgcgaggaaggcatcagcctttaccgccgctatgacaaccgtggccggttaacctcggtgaaagacgcacagggccgtgaaacgcggtatgaatacaacgccgcaggcgacctgactgccgttatcaccccggacggcaaccggagcgagacacagtacgatgcgtggggaaaggcggtcagcaccacgcagggcgggctgacgcgcagtatggagtcgatgctggcggaccttagaggaacagattggctgcggaagaaagcagctatgaaccactccttaaaaccctggaacacatttggcattgatcataatgctcagcacattgtatgtgccgaagacgaacaacaattactcaatgcctggcagtatgcaaccgcagaaggacaacccgttcttattctgggtgaaggaagtaatgtactttttctggaggactatcgcggcacggtgatcatcaaccggatcaaaggtatcgaaattcatgatgaacctgatgcgtggtatttacatgtaggagccggagaaaactggcatcgtctgggggcacatgcggcctattacggttttagcgccatttactggcaggcagctggctactcggcctcggcggtggggtatttgtggtcgttgggcgtggtggcggaagtcattatctttgcgctgagtaataaacttttccgccgttgtagtgcacgcgatatgctgttgatctcggcgatttgcggcgtagtgcgctggggcattatgggagcaactacggcgttgccgtggttgatagtggtgcaaattctgcattgcggcaccttcacggtctgccacctggccgccatgcgttatattgctgctcgccagggcggtttactctgccgtcgcgatgggcggcagtatcgctatcatgaccgttttcgccggtttcctgtatcaatatctgggccacggcgtgttctgggtaatggcgctggtggcgcttccgccaatgtttttgcgcccgaaagttgttccctcatgctgattcgagcattttgcggatctgctcctgttgatgtgttgtcagcgtcaggtccgtatgatcacggtggtcttaacgtcacgacacgccaatctgcgcccgccgcctggcgggtcatacaatattttccccacgcttcaagggtaaacgggcgtgccaacatcccgcggtgggattcgcgcggccctgatcaagttgaagtgtgggcgttttgtattactgacaaagccgcctccgatgaagttaaagccgcttttgaaaacagcgccactcgtgcttttggtcctgctggttttctcgagcagatgactcggagaactggaggtgatgaaatgagtgcgcaagtttcactagagttacatcaccgcattagccagtttctctttcacgaagccagcttactggacgactggaaatttcgtgactggctggcgcagctcgacgaagagattcgttacaccatgcgcaccacagttaacgcgcaaacacgcgaccgccgcaaaggcgtccagccaccgacaacctggatttttaatgacaccaaagaccagctggagcggcgaatcgcccgctttagagctcaggagagacacaaaaacgtacccaaagatgcccgcgagcgcttatccggctacagtgggcatcgtgtgatgcactgtcggtcgaataagatgcgcaagtatcgcatccgacattattgcggcactggagtctggcaacagtgccggatgcggcgcgagcgccttatccggcctacggttgggcatcgtttgagtcactgtaggtcggataagatcgcgcaagcatcgcatccgacattattgcggcactggagtttggcaacagcgccggatgcggcgcgagcgccttatccggcctacgttttaatgccagcaaaaatggtgaattacctgggttatcagttcgcggttcaccacttcggtttttgctccgagcaatttctcaaccacttcaaccagttgatgattcggtgggcattcatagccagggatcggcggatgcagctcgtcgaccgtcagacgacccggccagcgttcgctcaccggagccaatgcatcgttgagcaaaccattaagttcattgagtgtcatgccaggcagcggacgaatatccacacgcaactcacagcaagcgcaaatacggttagaagcgtcgccaccgtgaatatgcccgaggttgagcgtagggtaggcacggtagcgctcgtgagcacactacgacatcagcaactgtatctcgaaggtcgcgtaaacgtactggtcgcaaccgatgttgccgcgcgcggtatcgacattcctgacgtcagccacgtctttaccttcgatatgccgcgcagtggcgatacttatttgcaccgtatcggacgtaccgcgcgcgccggtcgtaaaggcaccgcaatttcgctggtggaagcccatgaccatctgctgctgggtaaagtaggccgctatattgaagagccaattaaagctcgcgttattgatgagttacgcccgaaaacgcgtgcgccaagcgaaaagcagaccggcaagccatcgaagaaagtactggctaaacgtgctgagaagaaaaaagctaaagagaaagagaagccgcgggtgaaaaaacgccatcgcgacaccaaaaatattgactatgaagattcgcgcgacgacggctggcagcgtgaagtgagcgacgatcggcgcagacaatatgacgaccgccgccgccagtttgaagatcgccgcaggcagctggacgatcgccagcgccagcttgatcaggagcgtcggcaactggaggatgaagagcggagaatggaagatgagtccgggtcacccgttatatatgactggcccggcggtacatgtctacgacggatttattcatctatgaagcaaccaggggaagaactgcaggaaacactcacggagcttgatgaccgggcggttgtcgattatctgattaaaaatcctgagttttttatccgtaatgcgcgcgcagtagaagcgatacgtgtgccgcatccgctctggcaacaggggtacggtcagggcaatgcggaatacagtgtgacggatgccagcggaaagatgtttaccatcaactgcacgggaaatccggaccagaacggtatttaccagcactcggtttttctgatcctcgccggggataaaacggtcagctcgcatgatgacagtaccggcatcacagtggtgatggaccataagcaatatgccattccctcaacccttggctggcgtaacggagataatgcctggttcagcttcatcatggatatccgtaaggcccggcagttcgacgtctacgtcaatgaccagaaagttggatcgtttaaccctcatgttcggaatgcacaaaaggtcctgccaacattagcggactgcactaacgactga

SEQ ID NO: 143905 - DNA, 909 bp, Homo sapiens; identical to SEQ ID NO: 124837

SEQ ID NO: 143906 - DNA, 870 bp, Homo sapiens
ctgaaaagtgtggcctgaggggagttcgatgtaaacattgcggcagttgtattgccggatgtggcgtaaacgccttatccagcctaccgccgcgatctgatcgccatagggcagtgtgtcgtaatcgatcagtgcgtttttcttatacgggttaccaatccagcgggtagtttctttgaactgcggattcaccactgaacgggttggatcgtaaccgtcgtaagataagcccgccaaatctgaccaggtgtggatcagttccgccaggctgtatttacgatcaacatcctgcgagaaatcacggggatgagtcgcttgccatttttctgacgtccacagcaggaacggaatggtgtacatatgacgcgtcgggttgtcctcattacgcccctgagttttgtgcggcggcgtgtcgtaaacctcttcaccgtggtcagagaaataaaccaggaaaccgttcgggtttgctgctttaaagtctttaatcaggctggcaaccacatgatcgttatacaggttagcgttgtcataatcgttatatgactccagctcttccgcgtttaatcccggcggaacatgatcggtattgccatcaaacttgccctgattttccgggtagcggtatttgtatttgatatgcgtacccagcagatgaacaatgatcagtttcttcggcgcagggtcattcagcacttcctggaacggcttcagcacgttggtgtcgtattcacgcgcactctgcgtacgttgctggttcatgtagtactgcttgtcggtctggcgcgaaaataccgtcagcatggtattgcgggcggtcatcgtctgctggttggtgatccagaaggttttataacccgcctgtttcatcat

SEQ ID NO: 143907 - DNA, 1028 bp, Homo sapiens
  misc_feature (1)...(1028): n = a,t,c or g
gaaacagaatgacgaaagagccccgccgggagcagaagccgcaggggagggacgaacacctcgacaagagcgcaagaaggcaagaaacagggaccgcccccgccagaagaagacccgaacaaaagaagacaaccgcaccccacaagaagaagacgaccaaagactaaaaaaaaaaaggaccacaaaaaaagcgcccgggagctcaagcaacacacaacgccagccggacggaagacaccgaacccgggggaacctaaagggaagacccccacccaccaacccccccgagaaaaagggggaacaccaggggcggaaaaaacccacccccccgaagaaaaagaggatccccgactttaaacgtgcgttcgacctgaacctgcgtgtgaaaaacatgctgccgtctctgtatcgtgaagatcctgaattctatgaaaacatgcgtattcaggaactggctcagaatatccacaaactgattgttcaccacaatctgccggatctgatgtatcgcgcatttgaagtgctgccgacgatggtaatgactccgtatgctgcattccacaaagagctgcacggtatgaccgaagaagtttacctcgacgaaatggtaggtcgtattaacgccaatatgatccttccgtacccgccgggagttcctctggtaatgccgggtgaaatgatcaccgaagaaagccgtccggttctggagttcctgcagatgctgtgtgaaatcggcgctcactatccgggctttgaaaccgatattcacggtgcataccgtcaggctgatggccgctataccgttaaggtattgaaagaagaaagcaaaaaataattagctcgtacaagggaagtggcttgccacttcccttttttgctcataaggagaacacatgaaaacaccctcacagccgcgcgcgatataatatatcgtggcgatccaaatctgggagtacttcagtttatacggcatgcgtgccttactcattctctatctcacccatcgcnctgactagggtctacgaggt

SEQ ID NO: 143908 - DNA, 559 bp, Homo sapiens
tgattatgcgtttattcttcaaagcaaacgcaccgtggcgctcgatatcaaacaaacgggcgtgattcagggactgccgttgttgttcagcggcaataatctggtgaaggcgattcgctctggaacgcctaaagatgcacaaacgctacggctggtggtcgatcttaccgaaaacgttaaatccgaaccggttaagcgcgcagaatggcagcaatttacactgtcgtctttacgattaacgccgatgtgccggccaccgcctcctccgccgcccgtggttgcgaaacgcgttgaaacgcctgcggttgtcgcaccgcgcgtcagcgaaccggcgcgcaatccgtttaaaacggaaagtaaccgcactacgggtgttatcagcagtaatacggtaacgcgtccggcagcgcgcgcgacggctaacactggcgataaaattatcatcgctattgatgccggacacggcggtcaggaccctggcgctatcggccccggtggtacgcgggagaaaaatgtcaccatcgccatcgcgcgtaaattgcgtactttgctcaatgac

SEQ ID NO: 143909 - DNA, 4524 bp, Homo sapiens
  misc_feature (1)...(4524): n = a,t,c or g
atccagccgcagtacagggcaccacgactttggttaatgataccggctttgaccccgtgggttccggctctatcgctcaatcatggggtcagcattcgggcacaccatcctattgttgagactgggaggctgccaccatgcttcgcgctttccctctggcgaaaaagggagaaggacgggcccgtctgccttcactttatgccagcttcgggatggatatcgggacggcgaagccgaacgctgaagagttactcgccgcgccgcaccgattgctggatattcgcgatccgtcgcaggcttactcggctgctgattttcgccgcgatgcgctggcggaaatggccgatatcaccgcggcggggcggatcccactgcattgctggaagggttgtcgccgctaccgtcggcagacccggaagtacggggccagaattgagcaacaggcggcagagcaaggttgggagtcattgcatcgtcaacttcaggaggtagatccggttgcggcagcaaggattcttccaaattgtcccccaaaggctttcccgggcactggaagtttttttcatttcgggtaaaactttaacggaactgacgcaaacgtcaggagacgctctaccgtatcaggtgcatcagttcgccatcgccccggcgagccgtgaactgctccatcaacgcattgagcagcgttttcatcagatgttggcttcaggttttgaagcagaagtccgggcgctttttgcccgaggagatttgcatacggacttgccttccattcgttgcgtgggttatcgccagatgtggtcttaccttgaaggcgaaatctcatacgatgaaatggtttatcgaggtgtttgcgccacgagacagttggcgaagcggcagataacctggctgcgtggttgggaaggggttcactggcttgacagtgaaaaaccagaacaggcgcgtgacgaagtattacaggcgggttataaaaccttctggatcaccaaccagcagacgatgcccgcccgcaataccatgctgacggtattttcgcgccagaccgacaagcagtactacatgaaccagcaacgtacgcagagtgcgcgtgaatacgacaccaacgtgctgaagccgttccaggaagtgctgaatgaccctgcgccgaagaaactgatcattgttcatctgctgggtacgcatatcaaatacaaataccgctacccggaaaatcagggcaagtttgatggcaataccgatcatgttccgccgggattaaacgcggaagagctggagtcatataacgattatgacaacgctaacctgtataacgatcatgtggttgccagcctgattaaagactttaaagcagcaaacccgaacggtttcctggtttatttctctgaccacggtgaagaggtttacgacacgccgccgcacaaaactcaggggcgtaatgaggacaacccgacgcgtcatatgtacaccattccgttcctgctgtggacgtcagaaaaatggcaagcgactcatccccgtgatttctcgcaggatgttccaaagaaatgggttttgcttacggcccaatcatggccccctcccaagatnaacgtcagggtcttgagcgcagtgtcgggcatcaatagcgatgataattttatcgccagtgttagccgtcgcgcgcgctgccgcacgcgttacagtattactgctgataacacccgtagtgcggttactttccgttttaatcggtatgcgcgccggttcgctgacgcgcggtgcgacacccgcaggcgtttcaacgcgtttcgcaaccacgggcggcgaagaagctggtggcggcacatcggcgttaatcgtaaagacgacagtgtaattgttgccattctgccgcttcaccgcttcggttttaccgttttcggcgcatttgaacaggataaagccgtagagtgcgattgctgtgaacaacagacgtcagtttattactcgggtcccttttattgcgttgatgaagttgaacatctctgtccgtggtgtattgcggacggttctgctgctgaaaagtttgcaggtagttttcaggatgatgccagcatagaaggtgttgaatttgagtatgatgaagaggacgaatttgccggtattaagaacacatatcctgatgaaatgctgaaagagttggttgaacgcacgccaggttatcatggatggcagcaggaattctggctcgcgcattgtggcgatttctgtgtttttatcggctatgtgggctggaatgatataaaagatcgcctcgatgaatttgccaaccttgaagaagattgtgagaatttcggtattagaaattctgatctagctaaatgcctgcaaaagggtggtcattgtcagggttatctcttccgctgtctccactgcggcaagctgagactcacctggcacggcttcaaaaacatcgataacgagcacatgtatcttgacccgatcaaagtcaccctgctgactccggggatggaaaaagacggcaccatgagcgactttggtattccggccagcatcgtggcgaaatacctcgacgaacatggcatcgttgttgagaaaaccggtccgtataacctgctgttcctgttcagcatcggtatcgataagaccaaagcactgagcctgctgcgtgctctgactgactttaaacgtgcgttcgacctgaacctgcgtgtgaaaaacatgctgccgtctctgtatcgtgaagatcctgaattctatgaaaacatgcgtattcaggaactggctcagaatatccacaaactgattgttcaccacaatctgccggatctgatgtatcgcgcatttgaagtgctgccgncgatggtaatgactccgtatgctgcattccagaaagagctgcacggtatgaccgaagaagtttccctcgacgaaatggtaggtcgtattaacgccaatatgatccttccgtacccgccgggagttcctctggtaatgccgggtgaaatgatcaccgaagaaacccgtccggttctggagttcctgcagatgctgtgtgaaatcggcgctcactatccgggctttgaaaccgatattcacggtgcataccgtcaggctgatggccgctataccgttaagcttggttttgatgataaccatgccatcagcngctgttcagcgcatatgctttctctggtttacgttacccctatttctcgggcggctgggcttgccgaccgcctgctcggcaaccgcactgcagtgattgccggcgctttagagcacatccacaacggcacctggaaatccaagctacttggaagacacgacatcagaaatgctgtggtattgctcggcggtgtggcccaggtccaggaactgactaaacgcacgcgcaacgggcagcagctcgtcgttcgacaaattttgtgtaggtcggataagatgcgcaagtatcgcatccgacattattgcggcactggagtttggcaacagtgccggatgcggcgcgagcgccttatccggcctacagttgggcatcgtttgagtcactgtcggtcggataagatgcgcaagtatcgcatccgacattattgcggcactggagtttggcaacagtgccggatgcggcgcgagcgccttatccggcctacggttgggcatcgtttgagtcactgtaggtcggataagatgcgcaagcatcgcatccgacattattgcggcactggagtttggcaacagcgccggatgcggcgcgagcgccttatccggcctacgttttaatgccagcaaaaatggtgaatacctgggtatcagttcacggtggcttggtcatattgaaagtagcatgtgacgttgataacccgctggtaggggcacgcggcgcggcggcggtgtttggcccgcaaaaaggggcaacgccggagatggtcgaagaacttgaacaggggctgcaaaattacgcccgtgttttacaacagcaaactgaaattaatgtctgccagatggcggggcgcgggcgctgcgggcggtatgggtattgcggcgccgggtatttttcaatggggatattaaaccgggcattgaaattgtgttgaatgcggtcaatcttgcgcaggcagtgcagggcgcagcactggtgattaccggggaagggggcatcgattcgcaaacggcaggcggtaaagcgccgctgggtgtggcgtcggtggcgaagcagtttaatgtaccgtgtgatctgggattgctggcgtatgtgggtgatggcgtggaagtggtgcaccagtacggcattgacgcggtattcagcattttgccttgttttggcacctttagccgaagtgctcggcagcggtgaaaccaatctcttcaacagcgcgcgaaatattgcctgcgccattaaaataggtcagggaattaaaaactaacccttacctttaaagcggatgcgatttatatcgcataagagtgcagtactcatgccggatgcggcatgagtaccatatccttcctgaaaatcgagaaaattctatatattgcaga

SEQ ID NO: 143910 - DNA, 776 bp, Homo sapiens
atggaaacattgcgtatttttggtcgtggtgaagctgaaattgaaagtattcgttctgcttcggaagatttccgccaacggacaatggaagtgctacggctggcgtttttatcctccggcattctcgaattttttacctcgctgtcaattgctctggtggcggtctactttggtttttcctatctcggcgagctggattttggtcactacgataccggtgtgacgctggctgcgggttttctggccctgatccttgcgccagagtttttccagccattacgcgatctcggtgccaccctccataaaccgaaattttctgaagcattgcgaaccggccttatttttggtgccgtcgaaaccctgacgccgctgatcggctggggaatgggcatgttagccagccggtttgtccttgaatggaaccactggattgcgtttgtgctgctgatattcctcggcgggcgaatgattattgagggttttcgtggcgcagatgatgaagatgaagagccgcgccgtcgacacggtttctggctactggtaaccaccgcgattgccaccagcctggatgccatggctgtgggtgttggtcttgctttcctgcaggtcaacattatcgcgaccgcattggccattggttgtgcaaccttgattatgtcaacattagggatgatggttggtcgctttatcggctcaattattgggaaaaaagcggaaattctcggcgggctggtgctgatcggcatcggcgtcaagatctctggagcacatcaccg

SEQ ID NO: 143911 - DNA, 729 bp, Homo sapiens
gctcggccgagttaaacgacgcacaagacaaggtggcaagccccagttccccttagaggatcccctgtagtggcactcagaatcccttccgaccagtctgaagcggtccctctttgtcaggggtcctcatagcgctttttcgcacacatcgtttcctgagcggtcggatgttccctgatcaccgagtctggtttaggatgatcggctctgagttggtaccaggttaccgtctgtcctggctttcctttttcaatcgtcactatatatgcttcacgaggataaggcggtttcgttggcatcgatcttccttatttcacgggatgaacgttaagtataggcgctcgaaaatcaacaattgatcgtctgtgccagggcgctgcgaatttcagaaatcacctggctgggttcgtttgttgcgtcgatgataatatgcgcaacttcgcgatatagcgcatcgcgttcttccagcacttcctgaacttcttcgctcagcggttttcccgttaaggttggccgtaaatcttcttccggtgcagcttgcagtcggttaaccaggactgatactggcgcacacaaataaaccacgatcccgttattttgcatgaagtgacgattaaattccgtcagaataatgccgccgcctgtagcgataacggtggatggcgcagttaccgcttccagcgccgccgtttctctggcgcgaaatcccgcccactcttccctttcgac

SEQ ID NO: 143912 - DNA, 1404 bp, Homo sapiens
ctacaaaccaataaatagatattgccaatatatgacaaagtatattgttcctatcaggagaaaatgaacacctggctcgcacccgtcgatataaatcgtttgttgctgccacggagtaagggcatcaatatccacaccaaccagcgttggaatgttgaacgaacgggcaaggatcaccgtatgtgaggtggtgccgccgcttttgagcaacaatcctttgaggtgatttttatccagttcgaggaactggctgggggtcagttcatcagccatacaaatggcgggctgcgtcagtttgcccggtgccgggaagcgttgctcaccgtagatttgctggagtaactggaagcagacgtcgcgtacgtccagggcacgttcttgcaggtagctgctgctggaacgggaaaactcttcgcaaaagtgattcgcgctggcaacaattgcttcggcgcagcttaatccggcgctgacgcctgccaataaatgttcgcgcagggaagtatcgccagccacggatcggtgagcttccagaatcgcgctggtagcaccgtcgctatccagcaaacaaaactcaatgtttttcaagaccaaagtcaggccgttttccaatgcagattgctcggcgtcaacgcctttggctgcgggaagattacccagcgcattgagatctccaagtgatacgaccctgagctcggcacccggatttagtaacgcacgggccaccgccacgcgctgcgcctgccccacggaaaggcgggcagcctggtcgccaacaggcgtatcaacgccttgtgggaggagcggtagaaactcgctgacccaggcgttatccagcgctgcttgtaattcttgttcgctggcatcaggtcgcgccagtagtacgttatcccgcaatgttgctgccggtaattgtgggttttgcccaacccaggagagatgtttacgccatgattctggtgataaatcgcgtaattctatcccgttgattcgtagcgatccctgatatgagagaaaaccagaaagcgcgttcagcagtgagcttttacctgaaccgctgcgaccaaccaacaccgcacgttggcctgctggcaaagtaaagttcagcggtccggccagcgttttaccttccggcgacgtgataaacagctcctcggcctcaatggtcaccggatcggtcgatgctaattccgcctcaccacgttgcggatgggcgagcggggtttccataaacgttttcagactgtcagctgcgccaacagcctgggcgaaaccatcaccattttctttggaaaggctacggccatcaccactaccggaaccttcctgcccgaatggtccaccactttcattattaccctgatattgcaaagcaaagttcaagccatcgacctcccaagtccccat

SEQ ID NO: 143913 - DNA, 6396 bp, Homo sapiens; identical to SEQ ID NO: 139797

SEQ ID NO: 143914 - DNA, 5052 bp, Homo sapiens; identical to SEQ ID NO: 138853

SEQ ID NO: 143915 - DNA, 2801 bp, Homo sapiens
tgaacaccggtaacaccacctacaaagcggtacagcgttctgccgacctgatctccatcgggccgatgctgcagggtatgcgcaagccggttaacgacctgtcccgtggcgcactggttgacgatatcgtctacaccatcgcgctgactgcgattcagtctgcacagcagcagtaatctcgtcatcatccgcagctttgcgctgcggatatctgaaccggaaataatcactatttccggttttttattctcttaatttgcattaatcctttctgattatcttgcttaactgcgctgcatcaatgaattgcgccatcccactttgcatacttaccactttgttttgtgcaagggaatatttgcgctatgtccgcaatcactgaatccaaaccaacaagaagatgggcaatgcccgatacgttggtgattatcttttttgttgctattttaaccagccttgccacctgggtagttccggtggggatgtttgacagtcaggaagtgcagtatcaggttgatggtcaaacaaaaacacgcaaagtcgtagatccacactcatttcgcattctgactaacgaagcaggcgaacctgagtatcaccgcgtacagctgttcaccacgggccgaggaacgccccgggcctgatgaacttcccgtttgaaggattaacctcaggatcgaaatacgggacagccgttggcatcatcatgtttatgctggtgattggcggcgcgtttggcattgtgatgcgtacaggaaccattgataacggtatcctggcgcttattcgccatacccgcgggaatgaaattctctttattcctgcgctgtttattctgttttcacttggcggcgcggtatttggtattgctatgtcaactccacttcaaggaataaaagttctcgatttcaccggtgtgcaatctggcccatcttgtactcaaatgctggcctggtttggcgctgacgttattaaaattgaacgtcccggcgttggtgacgtaacgcgtcaccagctgcgagatattcctgatatcgatgcgctttacttcaccatgcttaacagtaacaaacgttctattgagttaaataccaaaacagcggaaggcaaagaggtaatggaaaagctgatccgcgaagctgatatcttagtcgagaactttcatccaggggccattgatcacatgggcttcacctgggagcatattcaagaaatcaatccacgtctgatttttggttcgatcaaagggtttgatgagtgttcgccttatgtgaatgtaaaagcctatgaaaacgttgctcaggcagcgggtggcgcggcatccactacgggtttttgggatggtccgccgctggtaagcgctgcagcgttgggtgacagcaacaccggaatgcatttgctgatcggtttacttgctgctttgctgcatcgcgagctcaatatgacggtcgcggagatcgtcgaaagggaagagtgggcgggatttcgcgccagagaaacggcggcgctggaagcggtaactgcgccatccaccgttatcgctacaggcggcggcattattctgacggaatttaatcgtcacttcatgcaaaataacgggatcgtggtttatttgtgtgcgccagtatcagtcctggaagatttccgccaacggacaatggaagtgctacggcctggcgtttttatcctccggcattctcgaattttttacctcgctgtcaattgctctggtggcggtctactttggtttttcctatctcggcgagctggattttggtcactacgataccggtgtgacgctggctgcgggttttctggccctgatccttgcgccagagtttttccagccattacgcgatctcggtacgttttatcatgctaaagcccaggctgttggcgcagctgacagtctgaaaacgtttatggaaaccccgctcgcccatccgcaacgtggtgaggcggaattagcatcgaccgatccggtgaccattgaggccgaggagctgtttatcacgtcgccggaaggtaaaacgctggccggaccgctgaactttactttgccagcaggccaacgtgcggtgttggttggtcgcagcggttcagggagccgctactgcccgtatatcaaccatcgaaatgtccgtctgggcccaattgtaacagatgtgccgtgggaaaattcgggcgacaaatcattgccggaagccactgcgcaggtcatctcgagcgggtcaggggcgacaaaagttgaagacggtttgggcgacctcaacaagccggtgagtaatcagaacttagttactggaatagatacgccggtctataacgcgccgagtgcgggaagtgcgccatttggggtactggcggacaatatgcgctacccgattttgcataaactgaaagacaggttaaatcaaacctggtatcagatccgtattggcgatcgactggcctatatcagcgcactggatgcccaacccgataatggcctgtcggtgctaacctatcaccatattctgcgcgacgaagaaaacacccgttttcgccatacttcgacgaccacatcggtacgcgctttcaataaccagatggcctggctgcgtgacaggggatacgcgacactgagcatggtgcagctggaaggctacgtgaagaataagatcaatctccctgcgcgagcggtggtgattacctttgatgatggcctcaagtcggtgagccgctatgcgtatcctgtgttgaaacaatatggcatgaaggcgacggcgtttattgttaccacgcgcatcaaacgtgtttag

SEQ ID NO: 143916 - DNA, 198 bp, Homo sapiens
ggaggttgcgggaatttgtaggcctgataagacgcgcaagcgtcgcatcaggcagtcggcaccgttgccggatgcggcgtaaacgccttatccggcctttcaccttcagatctttaatgatggtaacgctgtcgccgtcagccagcagattgccgttagcatctttaacgatcagctcgtcgctttcctgtgcaggtt

SEQ ID NO: 143917 - DNA, 1593 bp, Homo sapiens
atgtcaccggtgatcgacaaaatgtatgtagatgcgtaccagccattcagcgaagagaaaatatcaatgcaggaggcgctggaaaaaggggcgcagccgctgcgtgagtatatgctgcgtcagacccgtgaggcagatttagggttgtttgccagactggcgaataccggcccgttgcagggacctgaagccgtgccgatgcgcattttgctcccggcctacgtgaccagcgagttgaaaaccgcatttcagataggcttcacgattttcatcccttttttgattatcgacctggtgatagccagcgtgttgatggcattggggatgatgatggttcccccagccaccattgctctgccctttaaactgatgctgtttgtactggtggatggctggcaattgctggtcgcgttggtcacgggccttatcatcagtattttgcaggccgccacgcagattaacgaaatgacgctgtcgtttattccgaaaatcatcgccgtatttatcgccattattattgccggaccgtggatgctcaatctgttgctggattacgtccgcaccttgttcactaacctgccgtatatcatcggccgtactatgttgcaggtgacaagcgaacaatggctatcctggttaaacctgtacttctggccgttactgcgcgtgctggcgctgatctccaccgcgccgattctgagcgaacgcagcgtacagaacgggtggtacccctctgcaacgctaagtagcactaactggcaatacgcctgttcctgctctgcgggcaaacgacattccaggactcacaaccgaccaggttgtctctggttaacaaaggcgcgacggtgtgcggtgttcgtgtacgtaaccatctcaccggcgaaactcaggcccttcatgcacctgtcgtggttaatgccgctgggattctgggggggcaacacagttgcccgaatattgccggatctgcggcgattcgcatgcaatatctacaagggtcgtgtaagtcgtgtacttccgggtatgcaggcggcttttgtagatattgggctggataaagccgcgtttcttcatgcatccgacatcatgccgcacaccgaatgtgtggcgggtgaagaacaaaagcaattcacggtgcgcgacatctcggaactggttcgtcaggggcaagatctgatggtgcagaccctgaccccacagtccttatgcctgatgtctaaccttcggaaattttgggatatgggtcacgtgttttggttctcagagatttttgacaaaaggtggtgcaatctagtgaaactcctggtgctttgttttttgttctgccggcttttccgggccataccgagatgtggtgagatttttgcccggcggcaagtcagatacttgcctgctgtgatcaacattgaagccgcgcggctgggtttcctgttggttggaaatgcgagctttgcccggaacagtaagccaatggagttcaggacaagaaagacgccgagcataaagagtggggcgtttgccagcaaggagagatccaactctgaaaatgctttgatatggaaaatatcaagcaaattgaccgacataccatag

SEQ ID NO: 143918 - DNA, 5421 bp, Homo sapiens; identical to SEQ ID NO: 139296

SEQ ID NO: 143919 - DNA, 933 bp, Homo sapiens; identical to SEQ ID NO: 127837

SEQ ID NO: 143920 - DNA, 1546 bp, Homo sapiens
atgaatggcactatttatcagcggatagaagacaatgcgcatttcagggagttagtcgaaaaacggcaacggtttgccaccatcctgtcgattattatgctggcagtttatatcggctttattttactgatcgccttcgcgcccggctggctgggcacgccgctgaatccgaacaccagcgtcacacgcggtattccaattggtgttggagtgattgtgatctcctttgttctcaccggtatctacatctggcgggcgaacggcgaattcgaccgtcttaataatgaagtcctgcatgagcggggccgtagagcgccagccaacgaactggcaggcgattcttatgttcctgattttcgtcgtgtttacgctcggcattacctactgggcatcaaacgcgtacgttctcgccggataaggcgtttaccccgcatccggcaacggtgccgactgcctgatgcgacgcttgcgcgtcttatcaggcctacaaattcccgcaccctccgtaggccggataagggcgtttacgccgcatccggcaacagtgccaactgcctgatgcgacgcttgcgcgtcttatcaggcctacaaattcccgcaccatccgtaggccggataaggcgtttacgccgcatccggcaatcgggtgcacgatgccctgatgcgacgcttgcgcgtcttatcatgcctacagccgttgccgcacccgccggataaggcgctcgcgccgcatccggcagtgtttacccgcggcgactcaaaatttctttctcataagcccgcacgctctccagccattcgctacctgctggcgtcggtctggggcccagtcggcatgatggcgatgatgctggcgatgactggctttgtcgtggcaacccggaaactcagaaggcgatttgggtttaaatcttgcaaaaacggggtgctttatcggatctcgtcatcttcaatcaccaccagcccagccagccccatcgccacctgtcgcccggttttgccgtgctggatgcggatggacccgatgctcgatatgatggggatgcagatgctaatggagaaatatggcgatcaggcgatggccgggatggatcacagccagatgatgggccatatgttcctcggtcacaaagtgattcgcgcaaaccacgtcggcgactggggcactcagttcggtatgctttttcgcatcgcggtagaaaccttcaaggaagactgggaagccgtctgggatcagctcgacgacctgaaccttgaaggtaaaattgttgcgctgtatgggcttggcgatcaactgggatacggcgagtggttcctcgatgcgctcggtatgctgcatgacaaactctcgaccaaaggcgtgaagttcgtcggctactggccaacggaaggatatgaatttaccagcccgaaaccggtgattgctgacgggcaactgttcgtgggtctggcgctggatgaaactaaccagtatgaccttagcgacgagcgtattcagagctggtgcgagcaaatcctcaacgaaatggcagagcattacgcctga

SEQ ID NO: 143921 - DNA, 1215 bp, Homo sapiens
atgggcagcaaaatttttcacaatctcatcccatactgcacaacaggccggataaggcgtttacgccgcatccggcaacagtgccaactgcctgatgcgacgcttgcgcgtcttatcaggcctacaaattcccgcaccatccgtaggccggataaggcgtttacgccgcatccggcaacgcaacacgaggagacaacacaagacgacgaggtgaacacagcgaacaggagcgagcacgcagacgaagcaagcagggagcagaaacgacaacgacaacgctgcctgcaccggcgctacaactcccagccctggcgcgccgcgcaaacggccactagcctggtccgcactactccgatccgaacgccgaaccgaaaaccaccccaagcacacaggccacccagcaagtccggatctcccaagaacccttgccctggcaagccccggcccaagaaatatcctcggtcgagtctagaggatccccaattgcagatcacaccaggtttctgtttcacgtcccaaacgctggtgttaatcacctcgttgacgtttattccggcaattttactgatgatgaccagtttcacccgcatcatcattgtttttggtttattgcgtaacgcgctgggaacaccctccgcgccacctaaccaggtattgctggggctggcactgtttttgaccttttttattatgtcaccggtgatcgacaaaatttatgtagatgcgtaccagccattcagcgaagagaaaatatcaatgcaggaggcgctggaaaaaggggcgcagccgctgccgttgagtggggtaaacagcgatgtatacgtagccgcaactaccaagagtatcggcttcgcaggtaaaaccgttgtggtacagggtgacgcattgggcattgcggggattcagttcaccagtggtcagcatcgactctatctggctgataaaatgtggaaataccacatccagcttaggacattcggcgtcactaaacttaccggtgatactggcccgagaaagaagacgacacatgaaagacgaagagagaacgagagagagcagagtacgcaagctgcaactctctatggacccgatgctcgatatgatggggatgcagatgctaatggagaaatatggcgatcagacgatggcgtcaatttcgttaatcaaaccagccagacctttgatgtcattatctggtatcggccggacctctga

SEQ ID NO: 143922 - DNA, 1608 bp, Homo sapiens
ctagccggttgtgtatggtgttcggtgtatattgatggcacgttgatttgttgatgcgggcatatgagtgtgggcgggggcagttgtgcgcatagttttggtagttgcgggatcatactcggtactgtgataagtcactaacttggtgatgggggttgctggtgggcgttggtgtagctttgggtcatcgcgcatacagtcgactggcgctgagagcgttgaagcagcggtgacaagtggatatgccaagaggcggtgatcgtgtatgatgatgggtccgatatatggaatataatgtatattaacgggatagaggaggtaaggttgagtattgatcagtttagatgagagtaacgacggtgcagctgcacacagcgaggatgttgtcggaggactggctgctggaagtcctacatacagtctgagcagggcgagtgctcctgtagctccttccttgggtaggcgacgcatgttgtccggtgtactcagaaggtcgttgctgtccgacccagactcgccgagcgcatgacgagccatcagaaccatcgcactcaggtgtgccatcgctgaactcgagtcatctaacagtcgagatagcgtgaagcactctatggcgacactcatatggagcactggatttagaggtggagctatgaatgagagaagtgctggctcatcagttgatgggatgcacgtgcactcatagccagcaacgttaggcttccggtctgctggctcgtacaggttgtagctacgacaacatctagctgcagaccaggacatggagctgctcattgcatcatgagaacggctccggccacgtggttctttgtagttctcggttcggcgttcggctgggtctctctcctctacgtactctcttagaaatgtcttccagttgtctcgtcttcggcggtggccgtctgccctctcgcacatattcacgacggtacgattaaagtggctatcgatgccattaatgccgccggtgcgccgcactgcttcctgtccgtaacgaaatgggggcattcggcgattgtgaataccagcggtaacggcgattgccatatcattctgcgcggcggtaaagagcctaactacagcgcgacgacgttgcacacccgtggctttagagttgccgttatcacgttccctgatcgagtgcttctcaggggatgctgtccatagagtaccccgaatccccgtacagatcagtttcgcccgggctgtcgcgtatgagctcaggtgctctcgcagcttgtattgaccagccttggatggatgcatgggcatttggattgctgacgtcactgtatatctgtttgggcgactccatagttgttcccccggatgcgtgccgcttccgtgtgtggacagagcttggtcatgctggtacctggtgtgcgaatgggcttgtgatcctacccccatggctgagtcttgaggggatgctccttggatgcttctgggaccaggtgttttcttgctacaggcagcgattgtaagcggcatatatcttttgtgttctctgattcttgctctctctggcgatggttttctgatcttgctactgatccttatgaccttgcgattgatcgcatagtccat

SEQ ID NO: 143923 - DNA, 802 bp, Homo sapiens
ctgatgccccaggtgctctagaggaccccgaacgttcttcaaatgctctgggactacatccgctttattttggcgataccctgtttcgcagcgcctcggtcctgccgctgattaaagacagtcccccggtttccatcacccccggattgtggagcacgctgattatctatctggtgtcgattccgttaggcattcgcaaagctgtttataatggcagccgctttgacgtctggagtagcgcatttatcatcatcgggtacgccattccggcctttttgtttgccatcctgctgattgtcttcttcgcgggcggcagctatttcgacctgttccctctacgcggcctggtttccgctaactttgattcgctgccgtggtatcagaaaatcaccgattatctgtggcatatcacgctgccggtgctggcgacagtgattggtggctttgcggcgctgaccatgctgacaaaaaactcattccttgatgaagtgcgcaagcaatacgtggtgaccgcgcgtgcgaaaggggtaagtgaaaaaaatattctctggaaacatgtgttccgcaacgccatgctgctggtgattgccggttttccggcgacgtttatcagcatgttttttaccggctcgctgctgattgaggtgatgttttcactcaatggtctgggcttactgggctacgaagcgaccgtctcgcgcgattatcctgtaatgtttggtaccttgtatattttcaccctgattggcctgctgctgaatattgtcagtgatatcagctatacgctggttgatcccgggta

SEQ ID NO: 143924 - DNA, 541 bp, Homo sapiens
ttacccgaagatcaaacgcagcgcgataaaatattgatggcaattatgggttccggcaacgatctggaaattgacggtattggcggcggtaatccactgaccagtaaagtcgccattattagccgttccagcgatccgcgtgctgatgtcgattatctgtttgcgcaggtaatcgttcatgagcaacgtgtcgataccacgcctaactgcggcaatatgctgtctggtgttggggcattcgccattgaaaatggtttgattgcagcgacttcgccagttactcgcgtacgtatccgcaacgtcaatacgggtacgttcatcgaagcacaaggatttaatatcgttataacccacgccaaagatgaccggacctgccgcgccgccatagtgagtaaccatgccgccataggagttggagaacaacagtgccagcgcggttaacattaacggtgcgccggagacgttcgccagcatggcaaataccggtaacatagcaacgatataggcactaccggaagcgaagaaataacgcacgataatg

SEQ ID NO: 143925 - DNA, 3390 bp, Homo sapiens
tcatccggactgaatctcgatgcttcgctggcctggaacgtctgcgcccttactcataaccttcgtggattctggcgaaagggtcaggctattaagggtgccataatcgcccgttattgtccaggcagaccagtcacagtgacacctggacttcacagcaggacgccagcgacaagttatctccaacacccactggataacggttcgcagcagtgattcgtcggttgcagccggaacaatgcggtcgaccatggttcccggaagactgacgtgctcttttatccacccggcgagttctggcgaacgcttttctgccattcccagcaccgcgtttttcaccacatgaccattgtcgggaatattgtcgcaggagagcacggtaaacggtgtaaggccgcgctcacggcggcgtttcagtgcttcgacgagaatacccggtgcggagtgaggttcttcaggggtttgtagatcgtgaataatccgcggattactggtgtcgagtgcaccggtggccgggtcaatacaatagcctttttcggtaatcgtcagggaaacaattgccacctgtggctcgcaaaatttctcaataattgccgctaaggaatccagttttgcattaaggcattcgtgaacggcaccgacaattatcacctgattgccgtccgcacctttctccagcacggtatataaatggttctgtgcgcggagctggctcatcagttgatcaccgctgaacaagctgatttcacagatcccccagtcgcctacctgggcattcagcacacgatcggtcagtaacgcctgatgagcgcggtgaaaggctccaaagccaaaatgaacgatacgtgattgcaactgctggcgatcatagcgtggagcgtgtacatgatgcgggagcgtaacggaggcgattgtattcataggagtcacgtgggcgctggcagatgcccctttgatgcctggtgcggtttcaacgatttccagatcaacggtctgcggcagctcaagcgccagcagttgaccgtcccaggtcagcacctgcatgtccggcatgccgccctctggcataaacagcaactcttcttcaatccaaccacggcaacatattcggacttcagaccctggcactctttgcctgggcgcgcaggctctgatccgcgtctggctgcggcgcagcgcaattccggttggctcgcgcagaaaatcgtgcagcgagccgctgtcgaagcgtcgcagcgtcggccagagggtgaggtccgcgaagtagtggtcgattaaacagagcgcgacgccgttgacacgacgcagggtgcgcaggtggatgacgttctccccctcggtaatccccagtgcgtcagcgacgtggccggacgcggggcgcaataccgaaagcagtttttcgctggtgggatggctgccctgatccagcagattctggctaaaacgcgcctgggcgttgagcgggtaatcgaacgggcgcatcagcaccagcacgccgacgccctgacggcgctgtacccagcctttttccaccagttggtcgatggcgcggcgcagggtgtggcgattcacctcaaagcgcgctgccagttgctgctcggcgggaagatagtcgccgcagcggtagtgttgacgaagctcctgctcaagttttgcggctatctcttgatagcgtgttgggtaggcaaccgttgagagaggaaatccagcaggctgaccgtgacgatgataagcaccatcagggcgcaggtttgtgggaactggaaaccgcgaatcgcttcccacagggtgacgccgatcccgcctgcgccgaccatgccgacgacggtcgccgcgcggacgttggattcgaagcgatggagggagtacgagatcagcagtgggatcactgtggcagacgccgtagaggatcccgcgaggaaaccgtgcgaaagcgggggtccgcaaaacagcaaagctggggggtgacgacgtaccgcggtccgggaatacccaccagcgtgaagcaattgagaaagcgcacacgcttccacagaggcgaagaaaggccggacaaggtatccaattaaccagcaatggtccggtaacaaggagaagcgcatcgagggaacctttccaaggtgggtaaacgcctgggatatcgtggagcctggaatacacggcttcgccacggcaagcccagtgactgtacacggaggcagcaaaccggagttctagtcggagcacgaaggtaaagcaggtaaggaggcggccagcaaagtaccgcaaaacacgacactgcgtccacccggcagccgtgtggcacaggagtgcaatgtgaatggcaagcattggcaacgtactagggttgtcaccggacgtcatttctggctctttcttttgttctgctattatggaccgaaaggagactgccacgcataatttcttcagccctttccattcaaacgtgaaatcaataagttcatcagggacatcgcaaacaatatgaagacggatttcttctctgccgtgactcttttcactgattgcgtaactgtcatgctctggattatttaattctttcagcggaaatttttcctcaaaggctttatttagccgcccctgggttccttttaccgcgaataaataatcacctccctgtttttgtatcttctctgcaatatctttctggcaacccatcgcatcagttgtgatgatttttcctttaatatccagcatgttaagaagttctgggatagctgtaatctcattagatttctcatccgtcttgatctgtccgatgaccagactgtgcattgttgagaacgcactaatgacatgaatcgctcccctgcggcgactcttgtcataagagtgccggagcgtttttccatcaattgcaatgacgtctttatcatcagtgaccccgcgtaacatgcaaaccaaaccacatgatggcggcaattccgcccctaataatccgggaaacagtgcaccacgtacaccgtaagaagcacgcaggatcatggcaaaaggcacaccgtatttactgcccgcagcaccgtttaataccattaccgcggcaatgaaaaaggcgctgaggataattgccagcataatacggcttttgaagccaaatagcagggcttcagaaaccgcttcaatattgagcgccacgataatctgatttgccactttgcaggtttgaccatcgccgttaccgcccacgagggtgatatttttaccgagcagttcaaacagcggtttaacacgttcaaataccgcttcatcaccgccaaccataatcgacaacgtcccttcacgttggttggcagccaagcggcggttctgatatttgggtgtccataggtgcccgggttcgggttcttgtggcgtggttctatagctcat

SEQ ID NO: 143926 - DNA, 3732 bp, Homo sapiens; identical to SEQ ID NO: 124456

SEQ ID NO: 143927 - DNA, 708 bp, Homo sapiens
tcacacaaaagacaaagtctttccttcctcagcttccagagagtcctggtaccaggaatcatatggggatccaaagagtcgactgcacacagcaagttcgaagctcgacataatgatccactttccattccacagcgttatatgggatagaatttctgggacttgagctgtcaccttggagtccatggtgctgatcttcatggtaaggttagggaaggagccaggagcatgggccactgtgagagcgagttgctgggtactccttcctcttcccctggaaattccagaaatcttttgggagtagctgagagccttttccatctcagacgtgatggagtcgatgtcatcactctcataaagtgaagatggccaggtggggagagcagcagacagaaggaagctgttttctgatttctgcccatggctgtttggggtcagggactctagagagctacttcttccctcagacacagccccacgaagtctctgcccatacatgtaaccgccgctggcagcgactttgtctaccgtaacagttaaaggaatgtttttatcgcgcagacgctgcagttgcgaagccgccagcccgtaaccatgcaccatgccaccagggctttccagacggagcacaacctgatcctgcggtttgaatgctgcgagtacagccgttatctcttcacgtagcgagttcacttcatgggcgtccat

SEQ ID NO: 143928 - DNA, 1338 bp, Homo sapiens
atgacgaggcactacggtgctgaagcaacaaatgccctgcttccaggaaaagcctctaagcatcagattgtcggatgcggcgtaaacgccttatccgacctggatccccgtaggccggacaagacgcgcagcgtcgcctccggcataggagcggcgctactgcttcgcctcatcaaaacactggctgatgatctccagaacctgacggatctgagcgtcttcaatggtgagcggtacaaggatgcgcagcacgttgtaatacgggccgcaggagagaagaatcaggcctttatcgcgggcgcgagacacgatctcggcggggagttaggggtcggcctggtgtggatcccggcttcaaaggtcaatgggataatgggcccaagcccggtgtggctaacgtttcgcgtgtctaacattgcgggcgaatcagcggaagggctgctggtgaccaagccgaagaactacgatcaggttccggcgaacaaacccattgttgacgcgatcaaagcgaaaaaacaggacccaagtggcgcattcgtttggaccacctacgccgcgctgcaatctttgcaggcgggcctgaatcagtctgacgatccggctgaaatcgccaaatacctgaaagcgaactccgtggataccgtaatgggaccgctgacctgggatgagaaaggcgatctgaaaggctttgagttcggcgtatttgactggcacgccaacggcacggcgaccgatgcgaagagatattgcgccaacgtgaagggggtgaatcccgacacgcaggaaccaagtccctcgggcgttaaggttaacgatccgaaagttgacgagcgcctgattcgccaggaagcaggtatggtgttccagcagttttacctcttcccgcatctgacagcgctggaaaacgtcatgtttggcccgctacgcgtgcgtggcgcgaacaaagaagaggcggaaaaactggcacgtgagctgctggcgaaagtcggtctggcagaacgtgcacatcactacccttccgaactttctggtggtcaacagcagcgtgtggcgattgcccgcgcgctggcggtgaagccgaaaatgatgctgtttgatgaaccgacttccgctcttgacccggaactgcgccatgaagtgctgaaggttatgcaggatctggctgaagaagggatgacgatggtgatcgtgacccacgaaatcggttttgccgagaaagtagcttcgcggctgatctttatcgacaaaggccggattgcggaagatggcaatccgcaggtgttgatcaagaacccgccgagccagcgcttgcaggaatttttgcagcacgtctcttaa

SEQ ID NO: 143929 - DNA, 1794 bp, Homo sapiens
ctacatgttctttttttcattcagcaaagtattctcggcgttgacaatacgttgcgtgaaaaccaaagaggtgccacgcattgatgttatttcagtctgtatttcgagcatatcgtcgagccgcgcaggtgcgtaatattccaccgtcattttacgtaccacaaaggcaacgcgttcagccatcagcgcctgctgactgaagtgatgatgacgcagcatctctgtgcgtgctctttcataaaaagcgacgtaactggcgtggtacaccacaccaccggcatcggtatcttcatagtagacgcgaaccggccatcgaaacagcgttgtattcactttacatcccggtaatgcaacaaaagttagagcttttaaacgctgcttctgcggacgaaagcccacgccgtgaatcacaccagcacagacggcccacatcagcaataaaccatgccagatttccagttcactgttcttcgcggcaaaacgagatgggtcccaaaacatacatccgctatgtaggctgtagtctttactcgcctggttaagcggaatcaatatcttcgcatcatccagaatcgcaattgccagcccgctggctgcatccgtaccactttcaatggacaacatttcgctctgcactccgtcgggggttcctgaaaaggtgacgtcaaccgtgctgacatctgttccgcaatcctgcaaattaatgatgaaagatttctccgggccataattcccatgagaaaaacgtgtcagcgagacatcgcctaactgcacattgatttgcttgctatcctgtgccagcacgcatgtattacggcgaaacgatccgctaatgttgaccgtgccatcatgggcaaatagctcacagccccacgttaatcccaataagaacagaatccagattatcccgttcaacatcactccttcactggtaaaccagatcaaaatagagacccgccgcgcatttacgccgttgctcccgctttgtggacttataacgaagtgatactgctctttgtttcctgtcgccgttccttgcagtgcggcttgcaacggtttcattcccgcttccagatgacgtgcaatgttttccagcaccacgatggcgtcatccaccacgaaaccagtagcgatggtgagcgccattaacgaaaggttattgagactgaatccgcacaggtacatcgccgcaaacgtaccaatcagcgaaaccggcaccgaaacggcgggaataatagtggcgcgacccgagcgcaggaataaaaacaccaccagaatcaccagcgccaccgagataatcagcgtttgctcgacttcttccagcgaggcgcgaatggtgggggagcgatcctgggcaatttgcagatcaatcgccgccggaatggtttcctgcaactccggtaattttgcccggatgctgtcaaccgtctggataatattggcttccggcagtttgcggatcatcagtaaaatagccggtttggcgttggtcatcccggcgttgcgcacatcctgcactgagtcggtcaccgtcgccacatcgcccagacgaaccgcgccgccgttgttgtagtgaataatcaacggctgatattcagcggcggtttttagctcatcattggtctggatctgccagcggtgagtgccatcttccagcgcgccgtcgtccagcgacacgctcttgattaaacagcgccttgcgaattcagcccgacgcgtacggcgggcaggtgagctgccttcgagcatcgacatcaccatcaacgttcgatttgccgaaatcgtcggaaccat

SEQ ID NO: 143930 - DNA, 2517 bp, Homo sapiens
ttatgacggcgaaaaaaaccgcagtaaacggggcgatgctgcctggtgaattggtgtgcgtaacgcaaagggtttcctcgctgtagaacttgtgcaaggatcatttccgaagtaccgactggaccacctgctgattgtaccaagaaggtccacagctgtctcctgctctcccgggccggggtgagtgttgtggtctggtcttgtcgttctcgagtggtctgggcctgcgcgcgcggtgacccgctcctcatcgttcttttgcccgttgttgcgcgggcccgggtagaaggttttcttagctgggtggggccatgtgaatgccgtcgggccaatgggcggtattacttctgccagtatgccgatgctggtggttgagaacgtgaccgacggcaaccgggcgtactgcaacctcaacgaaggtatcggcaaagtgatgcgttttggcgggcgaagatgtcctgactcgccatcgctggatgcgcgatgtgttaatgccagtattaagcgcggcactgggataaacatcatcccgctgttcactcgcgaaccgcctgtaaagccggtgacattatccactgccggatcgtcacggataattttcatgaaatccagacgggtatgattgagcacccattttagtgacttgccgtagccttgttgcagggctaccaacatgcgaccaaaaccacgcagtcgcttttgctcgcgcggcttgctggctttcagcatccagccacacatcattggcgttaatgtcagagaaaccagcaacgatataccaatggcgacagaaagcgtcacggcaaattcgcgtaacagtcggcccggcaatccgcccatcaacagcagcggcaggaacaccgccaccagtgacagactcatcgacagcaccgtaaaaccgacttcgcgagtaccttgcagtgcggcttgcaacggtttcattcccgcttccagatgacgtgcaatgttttccagcaccacgatggcgtcatccaccacgaaaccagtagcgatggtgagcgccattaacgaaaggttattgagactgaatccgcacaggtacatcgccgcaaacgtaccaatcagcgaaaccggcaccgaaacggcgggaataatagtggcgcgacccgagcgcaggaataaaaacaccaccagaatcaccagcgccaccgagataatcagcgtttgctcgacttcttccagcgaggcgcgaatggtgggggagcgatccgtctggattatattggcttccggcagtttgcggatcatcagtaaaatagccggtttggcgttgccatccggttcgctcggttcgaaagtcttcgccccttcgctgcggaactccaggtactgctgtttcacgtcggtatcagccgttttgttcgtgttgccaaatgcaatcgagcggctgctgtcaaggttgtgaacgtcgtaacgcaaggcgttattccagttcatgccgttatcgaacgacatctgatgtttcaggccaaaaaactggctataaccgcctgtaacgccattatcacccgctttctgcgcaccatcaccatcgagacgagcgataccgtactccagactcatcgtctggctttcgctcaggtcgatagttttacgcaatgccagcatgtcgtattcggtattattacctaactcggcacgcggatcgcctttcgcgacaacgttgaacgccagaccgttacccactttcggcgcggcatctgccagcatactaaagcggttgcttaacacgcgcgcttcgcggaataccgtggtcgcctggctaccgctgacctgtttcagagcactgttcagttcagcagtcgtgccgacgttcaggctggtaaacagttcgttgttggtgtaacccgcatccagtgctttcgcgatgtcattcaccgaggcatctgttgccacatcggtgtaggcatttttgctcatggtgacgtcaacgttaccgctggcatcggtgctgcctttggcagtccataccacggacgttgaggtgatggcgtcagcgtcggtcaggttgctaccttccactacgttatcaaaactcacagtggtgtctgccgtaccagcggtaaagcccgtgttaatctccacgccgttcatgctggcattgttaaccttcagcttcccggcgctgccgttaacgttggtaccgacgacatagccgttgaggttgttcatgctgccaccagcctcatcacttcccgacgttacactaaccgtattgggcttcggcacatccggcaacgtatagtcgccataatgcacttcgctgctattaccgttgttaccgttcataccttcaacattgatgctgtcgccctgcttgatcagtccagaacccgtaaccccatcggcaatcaccaccgtgccgttgttaaccacatgacctactgtacccagtacgctaaatgcaaacgagtcattggcgaagatattgatggtgccgttgttttcgattaccgcatccgccgtggcgttggcatcgagttgcataccgatcat

SEQ ID NO: 143931 - DNA, 2502 bp, Homo sapiens; identical to SEQ ID NO: 143147

SEQ ID NO: 143932 - DNA, 2187 bp, Homo sapiens; identical to SEQ ID NO: 138934

SEQ ID NO: 143933 - DNA, 1272 bp, Homo sapiens
atggctggcaccgtgacacttttccgggcccggaaggatacccgagttggcccctgcgggacaggcaagtctgtgacttgcacgtactcccctgccctcaacaagatgttttgccaactggccaagacctgccctgtgcagctgtgggttgattccacacccccgcccggcacccgcgtccgcgccatggccatctacaagcagtcacagcacatgacggaggttgtgaggcgctgcccccaccatgagcgctgctcagatagcgatggtctggcccctcctcagcatcttatccgagtggaaggaaatttgcgtgtggagtatttggatgacagaaacacttttcgacatagtgtggtggtgccctatgagccgcctgaggttggctctgactgtaccaccatccactacaactacatgtgtaacagttcctgcatgggcggcatgaaccggaggcccatcctcaccatcatcacactggaagactccagtggtaatctactgggacggaacagctttgaggtgcgtgtttgtgcctgtcctgggagagaccggcgcacagaggaagagaatctccgcaagaaaggggagcctcaccacgagctgcccccagggagcactaagcgagcactgcccaacaacaccagctcctctccccagccaaagaagaaaccactggatggagaatatttcacccttcagatccgtgggcgtgagcgcttcgagatgttccgagagctgaatgaggccttggaactcaaggatgcccaggctgggaaggactatttcgacctgttccctctacgcggcctggtttccgctaactttgattcgctgccgtggtgtcagaaaatcaccgattatctggggcatatcacgctgccggtgctggcgacagtgattggtggctttgcggcgctgaccatgctgacaaaaaactcattccttgatgaagtgcgcaagcaatacgtggtgaccgcgcgtgcgaaaggggtaagtgaaaaaaatattctctggaaacatgtgttccgcaacgccatgctgctggtgattgccggttttccggcgacgtttatcagcatgttttttaccggctcgctgctgattgaggtgatgttttcactcaatggtctgggcttactgggctacgaagcgaccgtctcgcgcgattatcctgtaatgtttggtaccttgtatattttcaccctgattagcctgctgctgaatattgtcagtgatatcagctatacgctggttgatccgcgtatttga

SEQ ID NO: 143934 - DNA, 2316 bp, Homo sapiens
atggaaccttccaatgctactgaagcttacattggtcaaccctacgtagtctcaacgaacatcgagtataacgttaacaatggccggaccaagcaagcagactttgcctcattcgggacttgctattatactactcagggtcagagaccacttgaggaggcagtctgtccattctcagatctccagcgtgcatcctgggagaaccatgcgacaccgcgggcccggggtcaccacgggttcacggggagactgaagttggccaaagtttcagtgacttacgcgctgggggaacgagagggagaaggcgtaatcacatgtgctatcgacctgttccctctacgcggcctggtttccgctaactttgattcgctgccgtggtatcagaaaatcaccgattatctgtggcatatcacgctgccggtgctggcgacagtgattggtggctttgcggcgctgaccatgctgacaaaaaactcattccttgatgaagtgcgcaagcaatacgtggtgaccgcgcgtgcgaaaggggcccgttgggcgcgttttcgtcataaccgtcgcggctactggtcgttatggattttcctcgtcttgtacggtttgagtaagtgttctgaacttatcgccaacgataaaccgttgctggtgcgttatgacggcagttggtatttcccgttattgaaaaactacagcgaaagcgattttggcggcccgctggcaagtcaggctgatgatcaggacccgtggctgagacgacggctggaaaataacggctgggtactgtgggcaccgattcgctttggtgctaccagtatcaactttgctaccaataagcccttcccttctccaccctcccggcaaaactggctgggaacggatgccaacggcggcgatgtgctggcacgcattctctatggcacgcggatctcggttctgtttggcctgatgctgactctctgttccagcgtgatgggcgtgctggcgggggcgctacaaggctattacggcggtaaagtcgatctctggggacaacgctttattgaagtatggtcggggatgccgacgctgtttttgattattttactttccagcgtcgtacagcctaacttctggtggctgctggcaattactgtcttgtttggctggatgagtctggtcggcgtggtgcgggcggagtttttacgtactcgtaatttcgactacattcgtgcggcacaggcgcttggcgtcagcgatcgcagtatcatcctgcgtcatatgttgcctaatgccatggtcgcgaccctcacctttttaccgtttattttatgtagttcgataaccagcctgacctcgctcgatttcctcggcttcggtctaccgctcggttcaccgtcactcggtgaactgctaaagaagttccaggttttggtgaagtgttccgcaccgttgtcgtttgaagagattggcacttccacgttgcaatctcgtgcggtagcgggcgtcgccaacaaaacgctgattttcgccattgagcgacacagaagacaggtgatttctgcatttccaactgagctatgcagcatcgacatgtcccctgccttttccaaggatccggggcacaaaccgttgatcagctgcccatgccttgccactttaactcggaactcctgggcaccaaactgcatgctggtgggaagaagtgctgtgcttattgccggatactttgcgagcagccttcatatcgctgccgtttccctccgagcttccaccttgcagcctccgccctggctggcctctgggatcggttatccgggctttgccgtgcctgaagccggggtcactctagccgtacaaccttcaaccatgtgcccggatcaatggtacatgattgagcacttgtttatggatgctggattcagcacccgcacgagatgccgcaccaccgatgtggaacgtacgcatggtcagctgtgtacccggttcaccgatggactgtgccgcgataacaccgattgcttcacccttgttgagatccccggccgtgttgttatacatgcatcgccggactatagcggaggcgacggtaccgcacgttcagactacatgggaatgtacgccagttacatggcacaaaacggtttttacagcgatctcgttataaaagcatcgcgccagaaaaatagtttccacgtactggacagtcagaacaacggcgttaacgccaacggcactgcgaatggaatgagcatctccctggaccgggcagaggttccctgtcccctaggttatgggttctatagagccgaacccagcttacatacagcaccagaatga

SEQ ID NO: 143935 - DNA, 1755 bp, Homo sapiens; identical to SEQ ID NO: 136928

SEQ ID NO: 143936 - DNA, 918 bp, Homo sapiens
caatgccaacgtgcgtaacccgcagggcgcgctggaagatggcactcaccgctggcagatccagaccaatgatgagctaaaacccgccgctgaatatcagccgttggatgtgcgcaacgccgggatgaccaacgccaaaccggctattttactgatgatccgcaaactgccggaagccaatattatccagacggttgacagcatccgggcaaaattaccggagttgcaggaaaccattccggcggcgattgatctgcaaattgcccaggatcgctcccccaccattcgcgcctcgctggaagaagtcgagcaaacgctgattatctcggtggcgctggtgattctggtggtgtttttattcctgcgctcgggtcgcgccactattattcccgccgtttcggtgccggtttcgctgattggtacgtttgcggcgatgtacctgtgcggattcagtctcaataacctttcgttaatggcgctcaccatcgctactggtttcgtggtggatgacgccatcgtggtgctggaaaacattgcacgtcatctggaagcgggaatgaaaccgttgcaagccgcactgcaaggtactcgcgaagtcggttttacggtgctgtcgatgagtctgtcactggtggcggtgttcctgccgctgctgttgatgggcggattgcccggggccgaactgttaacgcgaaatttggccgtgaacgcttttctgtcgccattggtatatcgttgctggtttctctgacattaacgccaatggttgtggatttgtcgccaacgcaatgttatcagaggatcccgttattacctaataactggtacggtaaatatagagatcccaattaccccggttatcggaattttgacaaggtcttcaggaattaccgactggatcgaaaaacgctgttgtaa

SEQ ID NO: 143937 - DNA, 857 bp, Homo sapiens
atggaaggcaaatatccaaatgaacaaaacaataatcaatatacagaacacacaatcaaaaaagtccccaactgcccccaattgcacctggcaccaaccacaaacgaatacctggggggaccctcacagacggggagcccacctactgcactttcgttggtgcttctgattgccaccgaccactctggacccccacaagacgtaacacacgaacccaacttaccacgaaacacgttgaccaaccccacaacacctaacctaccacgcgttaactggatctaccattatgtcccaacgcggagtggacatcccttgccactggcacgacataacctgtggacacgcccactcacttccccacaggcgaggccgaaaggcgtagtcgatgggaaacaggtaatattcctgtacttggtgttactgcgaaggggggacggagaaggctatttggccgggcgacggttgtcccggtttaagcgtgtaggctggttttccagcaaatccggaaaatcaaggctgaggcgtgatgacgaggcactacggtgctgaagcaacaaatgccctgcttccaggaaaagcctctaagcatcaggtacatcaaatcgtaccccaaaccgacacaggtggtcaggtgaagcgacttgctcgtggagtgaaatcagtcgaagataccagctggctgcaactgtttattaaaaacacgcactgtgcaaacacgaaagtggacgtatacggtgtgacgcctgcccgggccggaaggttaattgatggggttagcgcaagcgaagctcttgatcgaaccccggtaaacggcggccgtaactataacggtcctaaggtagcgaaattcttgtcgg

SEQ ID NO: 143938 - DNA, 872 bp, Homo sapiens
atggtggaaggatgggttaccagcgcctgggcgaagaaacatcacccgcgctggtaccgtgaggtccgcaagccacggaaaaggttcgcggcacggaagcaaaagccgcccatcagcgcctggcgcacaacgtaccgggtccgcaccggcttttgaagcaaatagcaggggcttcagaaaccgcttcaatattgagcgccacgataatctgatttgccactttgcaggtttgaccatcgccgttaccgcccacgagggtgatatttttaccgagcagttcaaacagcggtttaacacgttcaaataccgcttcatcaccgccaaccataatcgacaacgtcccttcacgcgcaccgatttcaccgccggagactggcgcatcgagataatcgccgcccagttcattcacctgacgagcgaaacgcttagtttcaatcggggaaatggagctcatatcaacaatggttttgcccttcagcgaggctttggtacaaccattttcaccgaacagaacttcttcaacctgagccatcacactgacgtaagctggctttcgatgctgtatctgccgtggccttttacctttcattattgtgctgttgatgtgaagcgccgtgcgtctgccacgaatgaagcttttttgatcttccttaccccggtgatgatggtgtcgctgatgatggccgcggatccttccctgcttgctacgccgcgtacgtacctgatgagccatatgccgtggctaccgtttttgctgatcctgctgcccgccaacatcatgaccatggtgatgtatgcctttcgtgcggaacgcaaacacatttccgaaagcgaaacccactttcggaacgcgatggaatattccgctatcg

SEQ ID NO: 143939 - DNA, 1253 bp, Homo sapiens
tctgtgtgagttttccggtcaggtcataatgataacgttgcgtccgcccgtcaaagccgccctgctgtaccagccggtccagcgcatcgtaactgaagacgctgtggctgccgtccaggaaccagttccccacagataccatggggcgacagtattcagaataatgcagacgattttcataaaacagatctgccgtttgctgctgtaaggcggcaacctcggcgttaaccggtttgatggtggtaggagggcgatgatctaagtaagaggcaatcaccggtgccggtaagcccatcgtttttgccagtaaagcgatgctttgctcgcgctggctgcgggttaacgcatcggcctcactaaaggttgccagtacgccctgaataaaagcgccgtttttttctgcatagggacgagctgccagataaaacgatccagtttgattgagatcggtgccgtctttcagcacccgcacgccgccctgtaataatgcagcagagtagtagggatcccagatagcccaggcgtcaacggttccccttgtttggaacggcggcgcggggcctccagcggggctccaggtaagtgggttgggatatcggtaaacttaagtccgggcctgccgcagtgcacgcagtaaaaggttgggtgaactggaaccttactgaacggcacctttgcgacctttacgatcggctaccgttttgatcgggctgttttctgccaccagaatcacttcggctttgggcttcggtggctcgacgcccacgtacaccaaatcagccccggcagcctgggcaaagattggcggaatatccccggtactgccgagatcaatactgccaacgtttaacgcttccaacatttgcggacccgcggggaactccacccaggagatttttgattccggatagcgcttttccagtaactggtggctttttgccagcaccataccaatactgcctttctgatagcctatacgtaacgcttcaggcgaggattctgcagcaaccgcaaaagtagagacgctaagcaatcccgccagcgccagtttaatgaagttacgcatgggcattacctcgcagagacagaaggtcaggaacctgaacatcgcggcggggcaatgcctgccagaaaggttctagcgcgggaacaagaacggtttggcagatttggcgtgaaatgggcggcttggatgggaatcaatatacttgtgagtcattcggccaaacacgccctggcaggaatcctctaga

SEQ ID NO: 143940 - DNA, 2816 bp, Homo sapiens
atgtcagcggcacagattggttttctctcgcggcgatcccgctcggcgcggctattgcgcgagcggttttggtttgttgattatcggcgtgttgttattgctggtctggtggagttgcgacattttcgccagacgccgccgcaggttgaccatcgccttaccgcccacgagggtgatatttttaccgagcagttcaaacagcggttaacacgttcaaataccgcttcatcaccgccaaccataatcgacaacgtccttcacgcgcaccgatttcaccgccggagactggcgcatcgagataatcccgcccagttcattcacctgacgagcgaaacgcttagtttcaatcggggaatggagctcatatcaacaatggttttgcccttcagcgaggctttggtaaaccattttcaccgaacagaacttcttcaacctgaggtgtgtccggcacataataaaaatgatgtccgatgcttccgttacctggcgagcagtttcaaactgacggcacccagtgacagtaattcatcagcaaccgatcttttttcgacaagaccaacacgccacaacaagagcaaaaagaacaacagagacaccgatcagacgaacaacagaaacccaaagaccaaacgacgacacccacgaaccaaaaacggcaacaacaagaccacaggcttccagttatgcgctaatataattagacacagggagcgcggggtgttattgactgccgaactaccggtagctgcagttacaaagctatgcctgcgggtctaccacgcgctatggcgactacggcgattgcaccactgctgcacccaagtgaactgtcccgatatggtcccccagtcgattagtgcaaaatttttccgcggttacatttacgatgcttcaaggtgtttcttacccttttgtggatttcgaggcttcccggttgggttctgctctggttcccgggacaccgccgaaccgtcaaacggaggaccaatgccacgcatcggtctgcgcgctaccaagttccaggaccacatcgccgcacacgagcactgcagaatttgccctcagccgcatccttcggggaaaccaggaaccgtaatcactggccattcgggcgaacgattctcgccgccctggaaaacgcagttccccggcgcggtgctggatgagagcgacaaacgcctgaacagagatgctgcttgctacgccgaatatggaacaacgcactcagggcatggccttctcgaccgacaaatcgaccgtgctttgcgctttgatcaccccacgccgactacggcaatattccaaaacaactgtatacctttaccggagggacggtacctccgagtgatggaccggatgacgtgcaatgttttccagcaccacgatggcgtcatccacacgaaaccagtagcgatggtgagcgccattaacgaaaggttattgagacgaatccgcacaggcaaatccggaaaatcaaggctgaggcgtgatgacgagcactacggtgctgaagcaacaaatgccctgcttccaggaaaagcctctagcatcaggagggtaaaaagaacggaagaggagactgtgtgcggggccctgtggatgggagagcagtggcttcacgaattgaaagacacggcagatgcggtgccttggaatgagtttttgtcgcatggtcagcgccgcaaagccaccaatcactgtcgccagcaccggcaggtaatcgttcatgagcaacgtgtcgataccacgcctaactgcggcaatatgctgtctggtgttggggcattcgccattgaaaatggtttgattgcagcgacttcgccagttactcgcgtacgtatccgcaacgtcaatacgggtacgttcatcgaagctgatgtgcaaacgccaaatggtgttgtcgagtacgagggtagcgccagaattgacggcgtaccgggtactgccgcaccggttgcgctcactttcctgaatgccgctggaaccaaaaccggaaaagttttcccgactgataatcagattgattattttgacgatgtcccggtgacctgtatcgatatggcgatgccagtcgtcattattccggctgaatatctggaaaaacagaatcctcgctgaagcgttacgtataggctatcagaaaggcagtattggtatggtgctgcaaaaagccaccagttactggaaaaacgctatccggaatcaaaaatctctgggtggagttccccgcgggtccgcaaatgttggaagcgttaaacgttgcagtattgatctcggcagtaccggggatattccgccaatctttgcccagctgccggggctgatttggtgtacgtgggcgtcgagccaccgaagcccaagccgaagtgattctggtggcagaaaacagcccgatcaaaaccgtagccatcttaaagatgaacaaggattgccaagcgccaaaagcaccgcggtgtttaatatgttcaaacacctggcccatgtgcttcagaaaaatatcatctggttgattaaagcaaaacgcgaggtcttagctcgcgtttgtcttttacatcaatggcttttgaccccgctgccaccagcgtagcaacaatcgatcggcgctctctgccgcgctgccggaagcggttaaagttgggcatttgcccaccacgccaatggaacccacaatagcaaacggtgcggaaacattttgccgccacacaggccatcatgtaaccgccgctggcagcgactttgtctacgtaacagttaaaggaatgtttttatcgcgcagacgctgcagttgcgaagcgggatcctctagagtgaactga

SEQ ID NO: 143941 - DNA, 795 bp, Homo sapiens
ctaaacagagtaaattctaatattaaggatgtagttgatggtatccgccacgccgtaaggcacgatgccgagcgccagcagtaattccaccggcaaccactccagcgccacaatacgattgggatcaatagccgccgcgtgggcggtattcatctccccgtcgttcgcatcgaccaccacgtagacgccatgtttcctgtcgccgccgatatgcaaattgtcgccacctgcaagatctaccacatcgtgcctgccgataaccgttccgctgctgccactgacttcaaggccatcgttgtatgatctgccgctctgccaggtggagaaatcagagagatcgagcacaccgccgtttaacacgatcgactgcggatcgtcctggagagcggtaagatctgccgcgtcgccttccagagaaagcaccgcaccatcatcaacgactatatcgccggttagcgccatcgactgcgcccctgccagcacgtagctgccgttttgcgcaatggtgagctgaccagcaccttcgatgatgccagcaaaactgccctgattaacagtaacgttgccaccagcatcgatatttaaagtgccattctgaaagcccgtcaatgcgtgcacaaaagtttgttgggtcgagccaacgtttagctcagcctgattttgatacggatctatactaacgagcagccacgcaagaatgcgggcccacctgcacgcgggcgcatacgccggatgcactggaagaacaaaaaatctggtcgagctggcgcagctggcacgcgaaaacgacgccat

SEQ ID NO: 143942 - DNA, 2016 bp, Homo sapiens
atgataactggatttgcccctatatttccagacatctgttatcacttaacccattacaagcccgctgccgcagatattcccgtggcgagcgataacccagcgcactatgcggatgccattcgttataatgctcgaacgcctctgcaagccggagtgtactttgtgcgggatgggcctgggcccttagcttcggtccgtaacaaagagcggtacttcgcgaacaactacatttacgacatgggtcgtaataaagatggtcgccagagcacctggtacatgggtctgggtaccgatatcgacactggcctgccgatgagcctgtccatgaacgtctatgcgaaataccagtggcagaactatggcgcagcgaacgaaaacgagtgggacggttaccgtttcaaaattaaatactttgtgccgattaccgatctgtggggcggtcagctgagctacatcggcttcaccaacttcgactggggttccgatttaggggatgacagcggtaacgcaatcaacggtattaagacccgtactaataactctatcgcttccagccatattctggctctgaactacgatcactggcactactctgtcgtagctcgttactggcacgacggtggtcagtggaacgacgatgcagaactgaacttcggcaacggcaacttcaacgttcgctctaccgcgcgggggtggttacctggtacaatctgtaggccggataagatgcgtcagcatcgcatccggcattgtgcaccaattgccggatgcggcaccggttgtaggcctgataagacgcgtcaagcgtcgcatcaggcacaaatgtctaatgcctacgactacagcgaaatacagccgccgtcggaaggggagattcttcttgatgcccaaccgctggaaagctggagcagcaaagcgtttgcccgcaaagtggcttatttgccgcagcagcttcctccggcagaagggatgaccgtgcgtgaactggtggcgattggtcgttacccgtggcatggcgcgctggcgctactgggggcggcagatcgcgaaaaagtcgaggaagctatctcgctggttggcttaaaaccgctggcgcatcggctggtcgatagtctctctggcggcgaaccgggcgtggatcgcatgctggtggcgcaggatagccgttgtctgttgctcgacgaaccgacctcggcgctggatatcgcccaccaggttgatgtgctgtcgctggtgcaccgtttaagtcaggagcgtggcctgacggtcattgccgtgttgcacgatatcaatatggcggcacgctactgtgattatctggtcgccctgcgcggcggtgaaatgattgctcagggaacgcctgcggaaattatgcgcggcgaaaccctcgaaatgatttatggcatcccgatgggtattttgccgcatccggcgggtgctgcacctatgaataccgcccacgcggcggctattgatcccaatcgtattgtggcgctggagtggttgccggtggaattactgctggcgctcggcatcgtgccttacggcgtggcggataccatcaactatcgcctgtgggtcagcgaaccaccattgccggactcagtgatcgacgtcggtttgcgcacagaacctaaccttgaactgctgaccgaaatgaaaccatcgtttatggtctggtcggcaggatatggcccttcaccagaaatgctggctcgtattgcgccgggtcgcggatttaacttcagtgtacgcaatacgccgttggcgagaaccctgcagttaattttgcgggaaggcccaaggggtcaccctgctttggtccaggtggtggacttattaattgagccgccccaacttcctctcctggtcccctctgttcaaactcgcatccccaggatccagccccaatcacacccagcccatggggtcaatgaggctgtcaggaaccctacggtctgggtggcccccttcatagacgagatcatttcttcaatccacaagtattccatttag

SEQ ID NO: 143943 - DNA, 1587 bp, Homo sapiens
atgtgggagcggcaaaaacaaaaaactggctgcccgccgagatacatgcgcggcgaaacgcgtggaaatgatttatggcatcccgatgggtattttgccgcatccggcgggtgctgcacctgtgagttgggatcattgatgagcggcttacctcttatttggagcggtcaactgttaacggctatggcgctctctccgttgctatggcagatgaataccgaccacgcggcggctattgatcccaatcgtattgtggcgctggactggttgccggtggaattactgctggcgctcggcatcgtgccttacggcgtggcggataccatcaactatcgcctgtgggtcagcgaaccaccattgccctactcagtgatcgacgtcggtttgcgcacagaacttaaccttgaactgctgaccgaaatgaaaccatcgtttatggtctggtcggcagaatatggcccttcaccagaaatgctggctcgtattgcgccgggtcgcggatttaacttcagtgacggcaaacagccgttggcgatggcgcgtaaatcgctgacggaaatggcagatttacttaacctgcaaagcgcagcggaaacgcatttagcgcaatatgaagactttatccgcagcatgaaaccccgctttgtgaagcgtggggaattacctctggcgaacagagaagaattaaaccttttgctaaacaaaggcattctccctttgtgtgaccagagacaggagatagaatctgaatgtgcttttaccatcttctgtgctggagatgccaactgttttcccccgtccccaacacacctgcccctcacagcccttcagcagaggccctgtggccttagtggctctgcctccaaggaagcctggggcagacagcagatctgtaggggaccacagaaaatatctgacataagaatgagaggtgacacaagaacagaggcgttgccgtggaggaggagccagacaggaaaagaactagaatttggctgtacccttcgcgtaaccgtactgggtacgttcattatgctggcaacctatacgctgttttacatcatgacggtctactctatgacctttagtaccgccgccgcgccagttgggcttggcctgccgcgtaacgaagtgttgtggatgttgatgatggcagttattggttttggcgtgatggtgccagtcgctggattactggctgatgcctttggtcgccgtaaaagcatggtaatcatcaccacgctgatcatcctgttcgcgctgttcgcctttaacccactgctcggttctggcaacccgattctggtttttgccttcctgctgctggggttaagtctgatgggtctgaccttcgggccaatgggtgcgctgttaccagagctgtttccgacagaagtgcgttacaccggagcatcgttctcttacaacgtagcgtcgattctcggggcttccgttgcgccatatatcgcagcctggttgcagactaactacgggctaggtgcggtggggttatatctggcggcgatggctggcttgacgttaatcgccctgctgctgacccatgagacgcgacatcagtcgttgtaa

SEQ ID NO: 143944 - DNA, 1191 bp, Homo sapiens
atgttcccctcagggaaggggcggctattatgtacgttcaccatcttcttcatcttgctcacacagaccatctcagaggctgtttaccaaggaacccaacataagacagcaaagaaattggaacaggatgctgttttggcagtggccatggatggaccggatgccactgttgctgcaggtgactctaaggatcccgagatgatagagtggctgcctactcgtctgtacagatggctcttcaggactgacatgtccctgcccccggctgcactggtgttagccactgaaggttcacagcccagtgcctctccagaaattactctcatccaagacagggaggttcagggagcggggagccacatgcactgcgtgcagacaaacagtacaagcgaaaaacggcccgctggactgcgtacagaaaaattaccacgttgccgaaagcactccagacagcaaaccggcgatggtagcggaagactacaccaaccgctgcgtaagaacctcaaaaaattcgagaagtgggctcgccaggaagggattgaatgttaccgcctgtatgacgccgatctgccagaatataacgttgccgttgaccgttatgccgactgggtggtgatcaaaggatattgtggtcgatggcggctcaacgctgggggcataagcatgatctggaaacgccatttaacgctcgacgaactgaacgccaccagcgataacacaatggtggcgcatctgggaattgtgtatacccgtctgggcgatgatgtgctggaagccgaaatgccggttgatacccgtactcatcagccgttcggtttactacatggcggcgcgtcggcggcgctggcggaaacgctgggatcgatggccggatttatgatgacccgcgacggacagtgtgtggtaggcacagaacttaatgcaacacaccatcgcccggtgtctgagggaaaggtacgcggcgtctgccagccgctgcatcttggtcggcaaaatcagagctgggacatcgtcgttttccgattgaaccaggcggcgctgggccgtttggcttggcaaccttggctccccgggcccttggcggggttacccggggcaacgatttctccgggggcgcaccttcggacccaagcccccccaccccagtctgggaaagtgcttcaggataaacccagcctaatgctaaaatag

SEQ ID NO: 143945 - DNA, 2235 bp, Homo sapiens; identical to SEQ ID NO: 124941

SEQ ID NO: 143946 - DNA, 2934 bp, Homo sapiens
atgccacgctttcctgcgaagtggtgctggaaaatctcgccgcctcccctgtcgtcacgacgctggaatataccctgtttgatggcgaacgcgctggtgcacagcagcgccattgatcatttggcaattgaaaaactgaccagcgccagtcttgcttttactgtcgaacagccgcagcaatggtcagcagaatccccttatctttaccatctggtcatgacgctgaaagacgctaacggaaacgttctggaagtggtgccacaacgcgttggcttccgtgatatcaaagtgcgcgacggtctgttctggatcaataaccgttatgtgatgctgcacggcgtcaaccgtcacgacaacgatcatcgcaaaaggcgcggcgttggaatggatcgcgtcgagaaagatctccagttgatgaagcagcacaatatcaactccgtgcgtaacgctcattttgtcgattatgtgaacagcggtttttataacaacactacctttcaccgcgtcattcctggctttatgattcagggcggcggtttcaccgagcagatgcagcagaaaaaaccaaacccgccaatcaaaaatgaagccgataacggcctgcgcaacacgcgtggcaccatcgcgatggcacgtaccgctgacaaagacagcgccaccagccagttctttatcaacgttgccgataacgccttccttgaccatggtcagcgtgatttcggttacgcggtatttggtaaagtggtgaaaggcatggacgttgccgataagatttcccaggtgccgactcatgacgttggtccgtaccagaatgtgccgtcaaaaccggcttctgttcgttatgacgttaacgatcaacgtctggatatagacgttcctcaagcctgggtaatgaaaaattaccaaaactatgttgatccatcgttatgggaaaacggcattaatgcggccatgttgtcatacaacctcaacggatatcatagtgaaacccctggtcgaaaaaatgaaagcatttatgctgcatttaacggtgggatgaatttaggtgcatggcgactgcgtgcctcgggcaactacaactggatgaccgattctggcagtaattatgattttaagaatcgcaagccggggcgtcggcgttatctgacgctggtgatgatctttattacggtagtcatttgttatgtcgaccgcgccaacctggccgtggcttccgcccatattcaggaagagttcggcattaccaaagcggaaatgggctatgtattttcggccttcgcctggctttatacgctatgtcagatccccggcggttggtttttagatcgcgtaggttctcgcgtgacttattttattgcgatatttggctggtcagtggcgactttattccagggctttgccacgggcttaatgtcattaattggtctgcgcgcgataaccggtattttcgaagcgcctgctttcccgaccaataaccggatggtgaccagctggttcccggaacatgaacgcgcttctgccgttggtttttatacgtctggtcagtttgtcggtctggcgtttctgacgccgctgctgatctggattcaggagatgttgagctggcactgggtgttcattgtcactggtggtatcggcattatctggtcgctgatttggtttaaggtttatcagccgccgcgcctgaccaaaggtatcagcaaagctgaactggattacattcgtgatggcggcggtctggtggatggtgatgcgccgggacagctgccagaacgaatgagcccagctctcctgcccgcagccagccgcgtgtgggtgcaactggcgaccagccactggaatgggaagatgcgcggttttggttttgttcagttcaaaaacctcctagaagcaggtaaagctctcaaaggcatgaacatgaaagagataaaagaccatcgaccctacgtcgttggatttgccgccgatacaaataatgtggaagaatacgcccggcaaaaacgtatccgcaaaaaccttgatctgatctgcgcgaacgatgtttcccagccaactcaaggatttaacagcgacaacaacgcattacaccttttctggcaggacggagataaagtcttaccgcttgagcgcaaagagctccttggccaattattactcgacgagatcgtgacccgttatgatgaaaaaaatcgacaactggctccgggtgacactacgctggttccgaccgggctggcgattcatattgccgatccttcactggcggcaatgatgctgccgcgctccggattgggacataagcacggtatcgtgcttggtaacctggtaggattgatcgattctgactatcagggccagttgatgatttccgtgtggaaccgtggtcaggacagcttcaccattcaacctggcgaacgcatcgcccagatgatttttgttccggtagtacaggctgaatttaatctggtggaagatttcgacgccaccgaccgcggtgaaggcggctttggtcactctggtcgtcaaaaaacaaactgcgaaaaggaaccgtcgcgaggaaatacttcagtctctggcgctgatgctggaatccagcgatggaagccaacgtatcacgacgcacccatcggcacgctttctggtggcaatcagcaaaaagtggtgatcggtcgttgggtctatgctgccagccagattttgttgctcgacgagccaacgcgcggcgtcgatatcgaagccaaacagcagatttaccgtattgtccgtgagctggctgccgaaggaaaaagcgtggtgtttatctccagtgaagtggaggagttgccgctggtgtgtgaccgcatcctgttattacagcacggcacgttctcgcaggagtttcacgctccggtcaatgtggatgagctgatgtccgccattctgtctgtgcactga

SEQ ID NO: 143947 - DNA, 1643 bp, Homo sapiens
agacatagcccggtatcgtgctgggtacctggtaggattgatcgattctgactatcagggccagttgatgatttccgtgtggaaccgtggtcaggacagcttcaccattcaacctggcgaacgcatcgcccagatgatttttgttccggtagtacaggctgaatttaatctggtggaagatttcgacgccaccgaccgcggtgaaggcggctttggtcactctggtcgtcagtaacacatacgcatccgaataacgtcataacatagccgcaaacatttcgtttgcggtcatagcgtgggtgccgcctggcaagtgcttattttcaggggtattttgtaacatggcagaaaaacaaactgcgaaaaggatccgtcgcgaggaaatacttcagtctctggcgctgatgctggaatccagcgatggaagccaacgtatcacgacggcaaaactggccgcctctgtcggcgtttccgaagcggcactgtatcgccacttccccagtaagccccgcatgttcgatagcctgattgagtttatcgaagatagcctgattactcgcatcaacctgattctgaaagatgagaaagacaccacagcgcgcctgcgtctgattgtgttgctgcttctcggttttggtgagcgtaatcctggcctgacccgcatcctcacagaacatgcgataatgtttgaacaggatcgcctgcaagggcggcgcagtaaatccggccagttcagttcacccgcgacgccccagccgttgctgatgcagccacagcgtgctgcctgccgtcgggcgctcctgatgcgccagtcgcaccaccagcttctgctcgccccagcgtccgtgcgccaggttatctgcgccgaggatttccagccgtgtccatcacaatcggttcatcgccggactgccgataaaactcgctacaaacaggctggcgggcttttcgtagacttcaactggtgtgccaatctgttcggcaacaccgccgttcatcaccattactcgctgggcgagcgtcatcgcttcaacctgatcgcgacggtgcaactgttgcagttcaagacgcatctgcacgcgcagcttggcatccaggttagagagcggctcatcaagcgggggaccacaggccttgcctcctgttcaggtcgttctcccactcagtgggacacttcctttacattctctgtgaggacggagtatcgttgtcttcatgtaagagtcagtctattcagaaactgcgccgccaatcagacgccagctaaggccagagaggaacagtacaagcagaccggaaagcgcaacagaggattgatgttcccaggtcaggctgtgcagccaccaacagcgtgggcataaatatcaacaccagcgcgaagccagtggttttcaacgatggcgggcaaacggtgcgggtgattaagcgcgcaaccattcagggtaaccggtattttggcaaattttcgaaggctgaaaaacaaacataacgaagggcaacccagggtgagcaccttttaaaaaagggccgaaaggcattttacggcccccggcccaaaatttcccggtgtttttgggaaaggggggcccacctttttttaacccccgggggggaattgggccctcccccccctggttgacccc

SEQ ID NO: 143948 - DNA, 1893 bp, Homo sapiens
atgtatagccgctttgatattgtggtcgccgagccgatttgcactttaaccactttcggtaaagaaaccgttgttagtgacagccaaacacgcacaacgaccactgatgacccgctacaggtgctccagcaggtgctggatcgcgcagacattcgcccaacgcataacgaagatttgccatttcagggcggcgcactggggttgtttggctacgatctgggccgccgttttgagtcactgccagacattgcggaacaagatatcgttctgccggatatggcagtgggtatctacgattgggcgctcattgtcgaccaccagcgtcatacagtttctttgctgagtcataatgatgtcaatgcccgtcgggcctggctggaaagccagcaattctcgccgcaggaagatttcacgctcacttccgactggcaatccaatatgacccgcgagcagtacggcgaaaaatttcgccaggtacaggaatatctgcacagcggtgattgctatcaggtgaatctcgcccaacgttttcatgcgacctattctggcgatgaatgccaggcattccttcagcttaatcacggcaaccgcgcgccatttagcgcttttttacgtcttgaacagggtgcaattttaaagctttcgccagagcggtttattctttgtgataatagtgaaatccagacccgcccgattaaaggcacgctaccacgcctgcccgatcctcaggaagatagcaaacaagcagtaaaactggcgaactcagcgaaagatcgtgccgaaaatctgatgattgtcgatttaatgcgtaatgatatcggtcgtgttgccgtagcaggttcggtaaaagtaccagagctgttcgtggtggaacccttccctgccgtgcatcatctgcaccataacggcgcaactaccagaacagttacacgccagcgatctgctgcgcgcagcttttcctggtggctcaataaccggggctccgaaagtacgggctatggaaattatcgacgaactggaaccgcagcgacgcaatgcctggtgcggcacattggctatttgagcttttgcggcaacatggataccagtattactatccgcacgctgactgccattaacggacaaattttctgctctgcgggcggtggaattgtcgccgatagccaggaagaagcggaatatcaggaaacttttgataaagttaatcgtatcctgaagcaactggagaactatcgccgcgcgctgcgcgacctgaaagaagaggtcgctatacggctttcgccgtttgagttatcggcgttctgcagcccgtcgatagcgtccatggctaccaggtaccccaatggtcggcatattccgccggatctgcgtctccccaaggaacgcggtattatcatcgtctttaccggcaatggaaaaggcaaaaccaccgcggcatttggtacggcaacacgcgcagttggtcacggaaaaaaagtaggcgtcgtgcagtttattaaaggcacctggcctaatggcgaacgcaatctgctggagccacatggcgttgagtttcaggtgatggcaacgggctttacctgggatacacaaaaccgcgagtctgataccgccgcctgccgcgaagtctggcaacatgcaaagcggatgcttgctgattcctcactggatatggttttgcttgatgaactgacgtatatggtggcgtatgactatttgccactggaagaagtggtgcaggcgttaaatgaacgtccacatcaacagacggtgattatcacgggtcgtggttgtcatcgggatattcttgaactggcagatacggtaagtgaattacgccccgtcaaacatgcgtttgatgccggtgtaaaagcgcagatagggatcgattattaa

SEQ ID NO: 143949 - DNA, 2145 bp, Homo sapiens
ttactcgtcttcatcctcaaaacgcgccacgattcgctcgccggagtggttggcacgcagctcttctgccaccagcgcgattgcctggccgctgctcatcccttgtgccatcagttcctggatccgctcgacagctttttgctgctgttcatgggtgagtgaaggtaaacctgccgtgggcgatgcttttacactccggctatgccgatcatccgtatagccgctttgatattgtggtcgccgagccgatttgcactttaaccaccgatgtcggtgcagccacatcagcttatacgccgccgggataataaacagcgacagcaaaggtgcggtgatcatgccgccaatcataggcgcggcaatccggctcatcacctctgaaccagcccccgttccccacagaatcggcagcagaccggcgataatcaccgccaccgtcatcgctttcgggcgcacgcgcaggaccgcgccgtgatataacgcctcatccagcttctgctcgctgaatgtttgtggattattcaacgacggcacggcctccggaggcgctgcgctgtagtccggaatatcccagccggtccacttagtgccgtcccatttcagcaactgacgcttcggatcccacgggttatttgagacgacttcgagctgagtaccacttggatcctctacagtcctgacgtcatggagcgatttgaagaccgaattctttagtcgttctcgcttttcaatgaatgtcagtttatgaatatcagacatttcttttggtcggagaaaaacctcatccaaccattgacagacgttatccgcgatgtgcttgtagcggtatttcttaagtgagtactgctgatgtagaacctggcctttacgcttagcgcagaccgaagccataggcgctctaaatggcgtaaggatgtggggtaagtcccgtttgggtagtttgcggctgctcttctggctggccttcctgtataggttctgatcaggatcattttgtggggtaactaattgcgcccgcagctgttcttctgtcggcggttgtgattgcgactgaatatctaactgcgcttcacgcgtcaccaccggcgcgttgggcgtatcatcagatggaagcagaaatccgaccgccaatacaatggcggcaataatgatcccccgacgatgcatcggcggcagagggtccatgaagagaaaattgtccggcgcgtgcaagactttctccagggttggttttagttcaaagcgtccgggcatggtttcctctggtaacgctcgtgacgcactcaattcattcattgtgaccacaagtttttcttcgctttttcgtatgaagatagatgagcggaaaaccgccggcgcgtcagggtgacatgacccctgagctccattcgctgcaggtctgttgaccagcacatggatgtacggaatgttgaactgcgcgccaacagctaactcttcaatcaggaactggaagtcaaagtcgccagaaatcgccaccacattgcgtttcggatcagcggcacaaacccctagcgcagccggaatcgtccagcctaacggaccagcctgaccacagttgatccagtggcggtctttaaagacatgcagcatttgtgccgcagcgatttgtgacagaccaatggtggtgacataacaaacatcgcgaccaaaggctttgttcatctcttcatacacgcgctgcggtttcaccggcacgttgtcgaagtgggttttgcgcagcaaagtgcgtttacgctgctggcagtcggcgacccattctttacgacacggcagacgacccgctttttgcatctcctgcgccacttcaaccagcagtgtcagcgccgctttagcatcagagacaataccgagatccggacacagcacgcgaccaatttgcgtcggctcaatatcaatatgaacgattttgcgcccttcggtgtatttctcgtaacgatgcccggtttgcagacccaccatcccggccatcagttcatgatcgtccgggatacagccccagcccattagcgttgggatcaccggaacgctggtcagttcagcaacctgttgtaacagagcagctgcgtcagcattaattaccccgcccccggcaacaatcaccggacgttcggcctggattaacat

SEQ ID NO: 143950 - DNA, 810 bp, Homo sapiens
cttcccctaaggcccacagtggagtcagctgaagctctgcatgacaggggaggtggctagtgtcgaggcatgcatagctgcccgtgtgcttgggaccacttccagggtgcttcccttgcaggtcccccatgggcctgcagcagatgatgcacggcagggaaggttccaccacgaacagctctggtacttttaccgaacctgctacggcaacacgaccgatatcattacgcattaaatcgacaatcatcagattttcggcacgatctttcgctgagttcgccagttttactgcttgtttgctatcttcctgaggatcgggcaggcgtgaggatcccccagattgacgaaccggcgctgcgcgaaggtttaccgctgcgtcgtagcgactgggatgcgtatctccagtggggcgtagaggccttccgtatcaacgccgccgtggcgaaagatgacacacaaatccacactcacatgtgttattgcgagttcaacgacatcatggattcgattgcggcgctggacgcagacgtcatcaccatcgaaacctcgcgttccgacatggagttgctggagtcgtttgaagagtttgattatccaaatgaaatcggtcctggcgtctatgacattcactcgccaaacgtaccgagcgtggaatggattgaagccttgctgaagaaagcggcaaaacgcattccggcagagcgcctgtgggtcaacccggactgtggcctgaaaacgcgcggctggccagaaacccgcgcggcactggcgaacatggtgcaggcggcgcagaacttgcgtcgggggtaa

SEQ ID NO: 143951 - DNA, 2073 bp, Homo sapiens
atggtggccggtgctaatctgggattgataagaccaggcttgcgactccggaaaatcacagtgcatgctggctttcatttgggctcatacctgttgatgtgcgtgacagtgctgattacggaactgatacctgtacgcggctacattctccgagcgagccacctgccgtgggcgatgcttttacactccggctatgccgatcatccgtatagccgctttgatattgtggtcgccgagccgatttgcactttaaccactttcggtaaagaaaccgttgttagtgaaagcgaaaaacgcacaacgaccactgatgacccgctacaggtgctccagcaggtgctggatcgcgcagacattcgcccaacgcataacgaagatttgccatttcagggcggcgcactggggttgtttggctacgatctgggccgccgttttgagtcactgccagaaattgcggaacaagatatcgttctgccggatatggcagtgggtatctacgattgggcgctcattgtcgaccaccagcgtcatacagtttctttgctgagtcataatgatgtcaatgcccgtcgggcctggctggaaagccagcaattctcgccgcaggaagatttcacgctcacttccgactggcaatccaatatgacccgcgagcagtacggcgaaaaatttcgccaggtacaggaatatctgcacagcggtgattgctatcaggtgaatctcgcccaacgttttcatgcgacctattctggcgatgaatgccaggcattccttcagcttaatcacggcaaccgcgcgccatttagcgcttttttacgtcttgaacagggtgcaattttaaagctttcgccagagcggtttattctttgtgataatagtgaaatccagacccgcccgattaaaggcacgctaccacgcctgcccgatcctcaggaagatagcaaacaagcagtaaaactggcgaactcagcgaaagatcgtgccgaaaatctgatgattgtcgatttaatgcgtaatgatatcggtcgtgttgccgtagcaggttcggtaaaagtaccagagctgttcgtggtggaacccttccctgccgtgcatcatctggtcagcaccataacggcgcaactaccagaacagttacacgccagcgatctgctgcgcgcagcttttcctggtggctcaataaccggggctccgaaagtacgggctatggaaattatcgacgaactggaaccgcagcgacgcaatgcctggtgcggcagcattggctatttgagcttttgcggcaacatggataccagtattactatccgcacgctgactgccattaacggacaaattttctgctctgcgggcggtggaattgtcgccgatagccaggaagaagcggaatatcaggaaacttttgataaagttaatcgtatcctgaagcaactggagaacgttcgattcatctgcgtaaacacgctggacaagtggcattccctggaggtgcagtcgatgacacggacgcatcagctatcgccgccgcgctgcgcgaaggacctgcaggcatgcaagttggatctaacatgtaccccgtattaccagggtttttttgacgcactatgccggtttaaggtaaagtttcgagggcatagggaaataccaatccgccctacgtatgtgcgactttcgaccttcgggccggatgtacagcacatccggcccgtgaaatcagacgccgatatttctcaacttctcgcctgccatcagtttgcgttcgatatgttccagcgtgacatttttggtttccggaatgagccagaaagtaatgcccacaaacgcaatgttcagcgcagtgtagagccagaacgtaccggcagcgccaatgctatcaagcagtgtcaggaaggtcgcgccgataatcatattcgacacccagttcgtggtggtcgaacagaacccggtgccgaggtcccaggacccaagacgcccccggcaattccacctggggaagagcgaacccatcctcgaaaaggcggacgaaaatccacgggaacaagcttggaccagatgatgaacagaaaccagtga

SEQ ID NO: 143952 - DNA, 3036 bp, Homo sapiens; identical to SEQ ID NO: 139344

SEQ ID NO: 143953 - DNA, 1014 bp, Homo sapiens
ctagacgatccccctttcaggtccttgctcatagccagcactcagtaaatgcagagctgaattgttacgattgttaattttagggcccattgtagtggggcctgccgggtcaggcctcttgggaggaggctcagactcctcacctttgacatagaggtggatggcggcgctgcctcccagggggtctccaggctcagtgcagcgataggtccccgtgttttggaaggtagcgttgttggtgctgaggatgctgctggagccatcagagtacagggtccagtgaggtgatggggggccatcccattccacgctgccattgcccacacatcgcaaggtcaccgttgctcctggcttcacgaccagctcggggacactgggctctatcactgggattccctgaccgcattgctggcgggctgtgctcacgattcgccctgcgttccggtttatgacgatcagggtcgtctggttcacaccaatacctgtatgaaaggcacgactcaggataactgggaaacggctggggctattgccggcggggcagctgctgttgctatcagtgtggccactgcactgcagccatgtcacgttgggctgggggtacccagaggcagcacacaaaagggtgccagagccgttgatgaatgtccatatgacgcttacctctggggggtatcgaagggtgagctcaaacgtcagagctctccagcctcctgggtttctggccaggaaggagtagcggccagcctcagagggcttcaggcggggcagagagagggtgaaggtgtgcatctcgtcggaggcatgggcaggctgggccatgcggtaaccccgtttgatggcattgtagaactgctcgttcatgggcagctctgggtaaggggtgccaccagagggaacgtacttatcgtaaggggccatgtagttggaggactctatgtctgcatatctgacgtctcctttcatgtccagcatgggcacatagtccaccgactcgtccttgctcatgtacat

SEQ ID NO: 143954 - DNA, 381 bp, Homo sapiens
tcagaagagttccaagatcaaggagtattcaatggcagaacttcgatcttgtctcatcactgaatttctgttccagcttaacctagactcagggacttgtttatagcaatccaagaatggcttactaccgaaaattggtactgaggagtggggcattgctataatgataccgcattgctggcgggctgtgctcacgattcgccctgcgttccggtttatgacgatcagggtcgtctggttcacaccaatactcattgctccttcgcgataaacattgtcatcacatgtcatcgtcactagtgtcgatgacatcgtttttatctgagcagggtccaggccatgacgtctggcgatatcaacatattcatgttgaggaagcat

SEQ ID NO: 143955 - DNA, 1002 bp, Homo sapiens
tcatgggaccactcggtgggccctcctccgtgccaggcctgtcaagacaaccctccggtccaggtggtccccacgcccgctccgctggtgccgcacttccaggtgcttgttctggaccttctcaaagtgctgcagcagctctgcgtagtcgatgctaggggagtcagctttctgggacttgggggctgcctttagactgtcttttattttccggtttatatttgttggaaatggaacggtaacaattttcccagggaaacagcttagcccgtttttgaatttggggctgggccggggattccttaagattgtttccagttccagctgcccttcgaaaatcgcagtattcgggctgtgaccgatagcaacaaacagaccggcaacgtcgagtgactcgatgttatcgctgttttgcgtatcgcgcagacgaacgccagtgacacccatttgatcgccggtcacttcttccagcgtacggttggtgtgcagaatgatgttgccgttctccactttatccatcaggcgcttaatgaggattttttccgcgcggaaaccgtcacggcggtgaatcagatgcacttccgaagcgatgttagacagatacagcgcctctttaacccgcggtattgccgccggccgatgacccgaacttttctggttgcgatagaagaaaccgtcgcaggttgcacaagcagaaacccccacggcctttaaaggcttcttgttgatatgatcaaaaatgatctcagtttcaaacttggtggcatgttcgtgcatgcgctccattaataacggaccggtcagatcgtttggatcgccaggccagttttccacttccgtggtggtggtcagttggccgcctttttccatgccggtaatcagcacaggttgcaggttggcgcgcgccgcgtagacagcagcggtgtatcccgccgggcctgcgcagagaggcaggctgcgtccaccaagggccggggtggaggatgttattagcgctgacat

SEQ ID NO: 143956 - DNA, 327 bp, Homo sapiens
atgaattcttacttttataagttcatgatcaaccttctcaagagattcagcagcgaacggaagctcctggagctccaagaagtagcagaagagtggcccaatgtcaccctcaacctggtgaaagctagagcagggcacaaattcctccagcttctacaccaaagccaggtggaggagatttatagagtagtccgtatggcccctaggtgctgtccaacggtggttttcaacccctgcagtgaggatcagagaccttactcaggggtcagcacggaggcactgacagggcttgagcaggggatcaacgtgactggatttctggcttga

SEQ ID NO: 143957 - DNA, 714 bp, Homo sapiens
atggtccttttgaagagcctgaatcaaggaggtccagatggttcctgtgactccagcttcagtagcggcatcagtgtcttcactgcagccagtctcggtgtagacgagatccccgctaattaccggttatccacatctcgtaaggttcaccagtcgcgtcgatcgcagagtaaccgcacattcactgaattcccgatgtcgcagagtgcccattctgcttggatcccagtaagcccatgcacattccgagctaatcgaactcgatatgtcccattccgctgtaccatctcagcatttccaatgacggatcccgaaatcccaatcacgttttcgtttgccccttaccgtacaacgaacgagattcgcgtcgcgaggcgcgcagtccacacccggattccagtcagggagccgaaacgcgacccgaatgcgtacagcgttcacgatgcggcatcgaagccgagtcgcattgagttgagttccagtatcgattatattcctaggcgatacgatcgccccccattaggccacgagcattccgtgcgatccagacagatcagagatccccctacgttcgcctccggtcgtcgggtcgatcggggaccacccgacgatcggagtggatcccatggaacactttcaaatccaggacagacggttcccccccccgatccatccgagaaagtgccagtcatagattccaatacgatgggatga

SEQ ID NO: 143958 - DNA, 2276 bp, Homo sapiens
ggcacgaggcattaacctgctggattacctgccggagatcctggatggactcttccagatcctgggtgacaatggcaaagagattcgcaaaatgtgtgaggttgttcttggagaattcttaaaagaaattaagaagaacccctccagtgtgaagtttgctgagatggccaacatcctggtgatccactgccagacaacagatgacctcatccagctgacagccatgtgctggatgcgggagttcatccagctggcgggccgcgtcatgctgccttactcctccgggatcctgactgctgtcttgccctgcttggcctacgatgaccgcaagaaaagcatcaaagaagtggccaacgtgtgcaaccagagcctgatgaagctggtcacccccgaggacgacgagctggatgagctgagacctgggcagaggcaggcagagcccacccctgacgatgccctgccaaagcaggagggcacagccagtggaggtccagatggttcctgtgactccagcttcagtagcggcatcagtgtcttcactgcagccagcactgaaagagccccagtgacccttcacctcgacgggatcgtgcaggtcctaaactgccacctcagtgacacggccattgggatgatgaccaggattgcagttctcaagtggctctaccacctctacatcaaaactcctcggaagatgttccggcacacggacagcctctttcccatcctactgcagacgttatcggatgaatcggatgaggtgatcctgaaggacctggaggtgctggcagaaatcgcttcctcccccgcaggccagaacggatgacccaggcccccctcgatggccctgacctccaggccagccactcagagctccaggtgcccacccctggcagagccggcctactgaacacctctggtaccaaaggcttagaatgttctccttcaactcccaccatgaattcttacttttataagttcatgatcaaccttctcaagagattcagcagcgaacggaagctcctggaggtcagaggccctttcatcctcaggcaactgtgcctcctgctgaatgcggagaacatcttccactcaatggcagacatcctgctgcgggaggaggacctcaagttacgcctcgacgatggttccacgccctcaacaccatcctgctgacctccacagagctcttccagctaaggaaccagctgaaggacctgaagaccctggagagccagaacctgttctgctgcctgtaccgattcctggtgccacaacccagtcaccacggtgtccctctgcttcctcacccagaactaccggcacgcctatgacctcatccagaagtttggggacctggaggtcaccgtggacttcctcgcagaggtggacaagctggtgcagctgattgagtgccccatcttcacatatctgcgcctgcagctgctggacgtgaagaacaacccctacctgatcaaggccctctacgggctgctcatgctcctgccgcagagcagcgccttccagctgctctcgcaccggctccagtgcgtgcccaaccctgagctgctgcagaccgaagacagtctaaaggcagcccccaagtcccagaaagctgactcccctagcatcgactacgcagagctgctgcagcactttgagaaggtccagaacaagcacctgggaagtgccgtcccagcggagcgggcgtggggaccacctggaccggaggtctgtcctctgacaggcctggcacggaggaagggcccaccgagtggtcccatgaaacactaaggttcgtcacgctcctcccgaggagctcaaggacctgcctgtcaggaccagggctgggcctgccaacccagggcaagtgttgggggccggaaggctgctgtgtctgccccaagcttcctcttcagagtcccagtcccccaggcctcccagcgctgtcagctgcacccctggcatttcttcacagagcttggcttgcccacccagttggggggatatagcctcacgagaccactcatcctctggaatcaacctctttctaataccctcttggaaaaaagagcttgccccccctccagcacactagagctctggccttgtgtgtactatgtatccatacgtgaacacatgcctgtgtgtgtgtgtgtgtgtgtgtgtacttgtatgcacgtaggcaccagcacaaagatctgaatgatgcaccccacccccaccccaataaagaaataacagaaaaccctcaaaatattaaaaaaaaaaaaaaa

SEQ ID NO: 143959 - DNA, 2139 bp, Homo sapiens; identical to SEQ ID NO: 125288

SEQ ID NO: 143960 - DNA, 1587 bp, Homo sapiens; identical to SEQ ID NO: 116568

SEQ ID NO: 143961 - DNA, 743 bp, Homo sapiens
ctttggtctttgatgatggtgacgtacagatgggcttttggtgtggttgtcctttctgtttgttagttttccttctaacagtcaggagcctcagctgcaggtctgttggagtttgctggaggtccactcgagaccttgtttgcctgggtatcagcagcggaggctgcagaaccgtgaatattgctgaacagcaaatgttgctgcctgattgttcctctggaatctttgtctcagaggggtacctggccgtgtgaggtgtcagtctgcccctactgggtggtgcctcccagttaggcttaggcagtatggccattttcatgatattgattcttcctatccatgagcatggaatgttcttcaatttgtttgtgtcctcttttattttgttgagcagttgtttgtagtcctccttgaagaggtccttcacatcccttgtaatttgggttcctaggtattttattctctttgaagcagttgtgaatgggagttcactcatgatttggatctctgtttgtctcttattgatgtataagaatgcttgtgatttttgtacattgattttgtatcctgagactttgctgaagttgcttatcagcttaaggagattttgggctgagatgatggggttttctaaatatacaatcatgttgtctgcaaacagggccaatttgacttcctcttttcctaattgaatatctttatttctttctcttgcctgattgccctggccagaacttccaaca

SEQ ID NO: 143962 - DNA, 863 bp, Homo sapiens
cggacgcaaagcgtttcgtgaagcgctacaagcagagaactgtgacgcagtttcgacgctcaggggctggtaaaaagcgcggcgctggtgacgcgtctggccatggcgtaaagcatggcatggactggcaaaccgctcgcgaacctttagcagcctgttttacaatcatgcggcacataaataccattgacggcacttccagcatgatgccgatcgtggtttgggaatttcgtaaccgatcatctcctcgacttcacgtccggacgttcaatcaggcggcgtgcttcatcaacttcatcgaggcttgtgacctcggcaacagaatattcagcgcggatattcttgcagcagtaccgggttcgattggtcaagaattaccgggtacgatccacgataagcggcctcgatgcagcccggagcttgaatatcggccatcacgacgacgtgagtgcggtcgtggggcggctacaactctacgggccgcaagaaccaagggtagacgatggcaaggcacggtaactacgggctggcgcgtcattacgatccgtttacgtcaacaccgtggtcggctttattgggccggagtatctctacaacgacgccagattatccgtgctggcttagaagatcactttatgggcaagctgagggcatctctatgggctgtgactgctgttataccaaccacgctgacgctgccagaacctcaacgaaaacctgatgatcctgctcgccaccgcaggctgcactacatcatggggatgccgctgggtgatgacatcatgctcaactaccaaccaccgcattccacgataccgccactgtgcgtcagttactcaacctgccccgtcaccggagtttga

SEQ ID NO: 143963 - DNA, 1146 bp, Homo sapiens
tcacttggccactgtgcaaacagcctctcccaagttcaagcagtcctcaaagagctcaatcgccaagaacacgaagaagaagaacagtggacgcgcgcttatggcatagtacaaaggaatgccatcaaactgggctttcaatccgctcgccaggccttcgtacaaacgggtatagggcaagggcattgcacataccacgttgttgatatccacatgagtcagcaatgctttgttatccatctcgaccagataactgccattgcgcccacggcgttcaatccgtatcgctccgcttgattccagcgttttcaacgcggcctgcgtcaggccaacggatgaacggcattcatttgccagctcatctatggttttcaatcgattaccgcacttttcacccaacaaataacgggccagcgtcgtgatgacgacgccttgttgcaacaacatcgacttgatatggccgatggcgcgcgtcgggttcagccccttcggacatacactgacgcagttcatgatgctgtgacagcggaatacgctgaatgcatcactcaaaccgtcgaggcggctgtcagtctcggtatcacggctatcaatcaggaaacgatatgccgctaacaagcctgccgggccgataaacttatcgggattccaccagaaagacggacaagaggttgaacaacatgcgcagagaatacattcatacagcccgtcgagtttttcgcgctgctctggcatctgtaaatgctcgcgagctggcggattttgtccattattcaacaggtaaggcttaattttctcatattgcgcatagaattgtcccatgtctaccaccaaatcgcggatcaccggtaaacctggcagcgggcgaatcacaatcttcttgcccggctggttgagtgccgaaatcggggtaatacaggccagaccattcttgccgttcatgttcagaccgtcggaaccgcacacaccttcacggcaggagcggcggaacgacaggctgggatctttctcttttagctggataagcgcatccagcagcatcatgtcgcgaacttcatccgcttccagggtgtaacctgcataaccgagctcatcacatccggggatagcgagaatgggaactcgagtcccatatcggcgtcgcat

SEQ ID NO: 143964 - DNA, 834 bp, Homo sapiens
atgccgattgtcagagtcggtgcgcgcttgctgtataactatctggttaaaggcggcgttcaggtttttgagtaccgccgccgcccgctccacggcaaagtggcattgatggacgatcactgggcgacagtagggtccagtaatctcgatccgctcagtttgtcactgaatctcgaagcaaatgtcatcatccacgatcgtcattttaaccagacgctgcgcgataatctgaacggcattattgccgcagattgtcagcaggtggatgaaaccatgctgcccaaacgcacctgcactattcacaatagcaaagagttggaaccaacccaaatgtccatcagtaacagactggataaagaaaatgtggcacataacactggcagttatgttggctacagtaaaagactccttctctctgcaaaaaagcagagaggcagaatgggcagttcaacagaactaagtaggggctttagccttttatgtcctaactttgaaaatcagattcaaggagaagggccaagagtactgggcaaaggaccaacctccccgaatcttgcccaaaacgaaaacaacgtgggtcctcccacctgtgtactggcgcacgtcaccacccagatcgaagcgatccgtcgtggcgcaccgggcgggctgattttccagagtatctgtggcagcgaaaaagggctgaaagagtttggcgtggagctggcgatgctcgacgaagcgcgcgcagtgggcgcggagttcaaccgtatcgccggggaaaactgcctctacttcgaaaccggacaaggctctgcgctatccgctggcgctaacttcggcgcagaccag

SEQ ID NO: 143965 - DNA, 548 bp, Homo sapiens
aggtatcgggcgcgttcggcgtgatgaataccgggcgtgtttaggcaaccaccttacacgacaagggctgtcgatgaaacgggattgttagaatgctgtgaaaaatgccaatcatcgattcttcctgagggaacgacttatgaaactaaagaccacattgttcggcaatgtatatcagtttaaggatgtaaaagaggtgctggctaaagccaacgaactgcgttcgggggatgtgctggcgggcgtcgcagcggcaagctcacaggagcgcgtggcggcaaagcaggtgttgtcggaaatgaccgtagcggacatccgcaataatccggtgattgcctatgaagatgactgcgtgacgcggctgattcaggacgatgttaacgaaacggcctacaaccagattaaaaactggagcatcagcgaactgcgtgagtatgtgctgagcgatgaaaccagcgtggacgacattgcctttacccgcaaagggctgacctcggaagtggtcaagaaggtagcgaagatttgctccaacgcggacctgatcccgg

SEQ ID NO: 143966 - DNA, 2775 bp, Homo sapiens; identical to SEQ ID NO: 132245

SEQ ID NO: 143967 - DNA, 1281 bp, Homo sapiens
atggggctctttgccttcaaactgcatcattactcaagtgagagatcaaagaggagatgtgaccattctactcttcacactggtgttcctggtaataatgtttgtgatagcgataggatgtctagttgtaggaaaacaagtttcagggctcccagtgattctaccatatggtatgatgaatatcatcctgaggaggatctgcagcacacggccagtgactttgtggccaaagtggatgaccccaaattggctaattctgaggactgctttgtctatcgcactattgaagacctcaacgccattgaatcctgcgcccgtcgcagcaaacgcggtgccgttgttggtggcggcctgttaggtctggaagccgcaggcgcgctgaaaaacttaggtattgaaacccacgttatcgaatttgcccctatgctgatggcagaacagcttgatcagatgggcggcgagcagctgcgtcgcaaaatcgaaagtatgggcgtgcgcgttcacaccagcaaaaacacccttgagattgtgcaggaaggtgttgaagcgcgtaaaaccatgcgttttgccgacggcagcgaactggaagtcgactttatcgtcttctctaccggtatccgtccgcgcgataagctggcaacccagtgtggtctggacgttgctccgcgtgggggtattgtcattaatgattcctgccagacttccgatccggatatctacgccatcggtgaatgcgcaagctggaacaaccgtgtatttggtctggtagcacctggctacaaaatggcgcaggtcgccgttgaccatattctcggtagcgaaaacgcctttgaaggtgctgaccttagcgccaagctgaaactgctgggcgtagacaacaataaaccgagaataaagcccaacaagactaacagcggaaaccgcgactggatccagcgagagccacggggcagcaacatttgcaggcccgcaccaaacagtagcgcaaaaagcgagaggaatttcacctggccgacgagatcaagaaatgcccaagtccatgcatcccgcggcgtaatagcaccgtaccaggcgggagagagacaagccgccagcggaaggccaaaggcgcggatgagaaagagcaggaccccgagaacggcgacgccgcgaacaaaatggagcgagacgatgcgctccacggaacctgccatggagccagatgagatgacgcacagcgcgcagaaactcgtggcgcgtaacctgactgggtttgaacgacccaccaagagaggacgttga

SEQ ID NO: 143968 - DNA, 2019 bp, Homo sapiens
atggataaattcctgggcacctacaccctcccaagactaaaccaggaagaacttgaatccctgaatagaccaataacaggctctgaaattgaggcaataattaatagcttaccaaccaaaaaaactccaggaccagatggattcacagctgaattctaccagaggtacaaggaggagctggcttccgaggcaatcgggcagtctcagtcttcagctgctaagccgagaagatctgggaagaagtcagagaaccttgggccagagttccaggggctctgggagtggctgccaggaaaccagcgtagtgagctcagtagccgtggtgtgtcgctatggataaccagccgtagtgactcagtagcgtggtgtgtccgtaggataacacgtcgtagtgactcagtagcgtgggagtgggccggtgattacggcgatggatacatagtgaccctccgtcaattgacatctgggtctgacccaattgtgcgggccacaactgtggacacggcgtctgtgacaagtcatacacctgggtgttggtgggaatatggcgagccacgaactggcagtgccttctcgacacctgctggctggcgattgcagcgacggatgactgacgcgcttaaccagcgcgtcagcgaagccgctgaagctcgtcgcatcttctgtaacgtggtcgatgcgccgaaagccgccagctttattatgccgtcgattattgaccgctcaccgctcatggtagcggtctcctctggcggcacctctccggttctggcacgcctgttgcgcgaaaaacttgaatcactgctgccgttacatctgggccaggtagcgaaatacgccgggcaattacgcgggcgagtgaaacaacagttcgccacgatgggtgagcgtcgccgtttctgggagaaattgttcgttaacgaccgcctggcgcagtcgctggcaaacaacgatcagaaagccattactgaaacgaccgaacagttaatcaacgaaccgctcgaccatcgcggtgaagtggtgctggttggtgcaggtccgggcgatgccgggctgctgacactgaaaggactgcaacaaattcagcaggcagatgtggtggtctacgaccgtctggtttctgacgatattatgaatctggtacgccgcgatgcggaccgtgttttcgtcggcaaacgcgcgggataccactgcgtaccccaggaagagattaaccagatcctgctgcgggaagcgcaaaaaggcaaacgcgtggtgcggctgaaaggtggcgatccgtttatttttggccgtggtggcgaagagctggaaacactgtgcaacgcgggtattccgttctcggtggttccggccgcgtacggcaaatacggttcagcttttcaggccataataccacgtctttaccctgagcttctgacattcacgggtacagccggagacaccgaacttcattttgtgcggcgtacggatgcctttgtagcggttttccagttccacgccgaggccgacgctgtcgccaacgccgtagcggcaccaggtgctacccacgcaggttttcgccatacgcagtgctttcgcataggcatgaccggtttcgaagccggcttcaatcagctgacgccagatctccggcagatcgtctttctgtgcgccaaacatcgccagacgctgggagccagtgatcttggtgtagagattaaattcacgcgcgatacgacctaccgccatcagcccttccggggtgatttcaccgcccggagaacgcgggatcaccgagtaggtgccgtctttctggatgttagcgaggaagttgtcgttagaatcctgcagcggagtatgttccggcttcagaatgtattcgttccagcaggaggccagcagcgaaccgacggttggtttacaaacttcacaaccgtagcctttgccgtgtttcgccagcagttcttcgaaggttttaatgccttcaacgcggatcaaatggaacagttcctgacgcgaataagcaaagtgttcgcacag

SEQ ID NO: 143969 - DNA, 1911 bp, Homo sapiens
tcagatccatctggtgacccggaccggtagcgtaagactgcaggacttaactgcgtcacttggttcaggtcggagatcttgaagagtaacgtgaagcgtctttcgccagacgccggaatattcacgcgtctgagagtggaattgatccgctttgactcccgtaccaggtaactgctggaacgtcgaacgccagttagcgtcaaccgagtcaggatcggttaagaagtcttcatagagctgttctatccagctttcgccgtggatactaccacgcacagtgatgtgcgtgccggggttcacttgcgagctcttgtctacgtagtggctcgcgaaggaacctttaaaaactgtcttagtgtcaggggcagtttttaaagatttcctgcatttctttgttacgcctgatgcgctgcgcttatcaggcctacgggtaatgagttgcaacaacatcgacttgatatggccgatggcgcgcgtcgggttcagccccttcggacatacactgacgcagttcatgatgctgtgacagcggaatacgctgaatgcatcactcaaaccgtcgaggcggctgtcagtctcggtatcacggctatcaatcaggaaacgatatgccgctaacaagcctgccgggccgataaacttatcgggattccaccagaaagacggacaagaggttgaacaacatgcgcagagaatacattcatacagcccgtcgagtttttcgcgctgctctggcatctgtaaatgctcgcgagctggcggattttgtccattattcaacaggtaaggcttaattttctcatattgcgcatagaattgtcccatgtctaccaccaaatcgcggatcaccggtaaacctggcagcgggcgaatcacaatcttcttgcccggctggttgagtgccgaaatcggggtaatacaggccagaccattcttgccgttcatgttcagaccgtcggaaccgcacacaccttcacggcaggagcggcggaacgacaggctgggatctttctcttttagctggataagcgcatccagcagcatcatgtcgcgaccttcatccgcttccagggtgtaatcgcttcggcgcgtcatggattccgactctggcagatacagggagtggcacagccagttttcatcatcacgatccgggaagtcgaagcggctatgcgcgccacggctttcggtacggaagttggcagaaacagccgttgcatacgccgtttccatcaggttatccagttccaggcactcaacgcgctgggtgttgaactcgctggaagtgtcatccagacgggcatttttcagacgctcgcggatcactttcaactgctcaagccctttcgccatcgcatcaccttcacggaagaccgagaagttatgctgcatacattcttgcagcgctttacggatcgccaccggatcttcaccgttacgattattgttccagcggttcaggcgatccagagacgcttcaacatcagactcgctggcatcgcgcagtgcgccctgctcggcgatagactcttgcagatgcagacctgccgcgcgaccaaagaccaccaggtccagcagcgagttgccgcccagacggttagcgccgtgtaccgatacacaagcgatttcaccaacggcaaacagtcccggaacaaccacatcttcgcctttctcattcacagtcagtgcctgaccggtaactttggtcggaataccgcccatcatgtagtgacaggttgggataaccggaatcggctctttcaccggatcgacgtgagcgaaggtacgggaaagctccaggatacccggcagacgggattcgagaacttctttacccaggtgatcgagtttcagtttcgcgtgtggcccccacggaccatcacagccgcgaccttcacggatttcgatcat

SEQ ID NO: 143970 - DNA, 652 bp, Homo sapiens
ttcatttcattcatttgatcttcaatcactgatactctttctcctagttgatcgaatcggctactgaagcttatgcattcatcacgtagttcttgtgtcatgtttttcagctccatcaggtcatttaaggacttctctttagtctttgatgatggtgacgtacagatgggattttggtgtggatgtcctttctgtttgttaagttttcctttctaacagtcaggaccctcagctgcaaggtctgttggagtttgctggaggtccactccagaccctgtttgcctgggtgtcagcagcagaggctgccaaacagtgaatattgctgaacagcaaatgttgctgcctgatcgttcctctggaagttttgtctcagaggggtacccggccgtgtgaggtgtcagtctgccccctactcaggggtgcctcccagttaggctactcggggttcagggacccacttgaggagacagtctgtccattctcagatctcaaactctgtgctgggagaaccactactctcttcaaagctgacagacagggacatttaagtctgcagaggtttcttctgccttttgttcagctaggtcctgcccccagaggtggagtctacagaggcaggcagccctccttgagctgcggtggctccacccag

SEQ ID NO: 143971 - DNA, 1656 bp, Homo sapiens
tgcgacatcgggtttcacgccagtagtaatggcaaacgccgtgccgacgatagtaccgataatcacgttaggcggctgtgcgcccgccagcggggccagccccatccacaccagttccagcgtaccgccggttaaaattccggtatgcagatcgccaagtaccagcccgaccaacgggccgaggaccaccgggcggtgcatatgggttaggccgttaaacatatccaggccagcgataaaggcgataatgcccaacgcaaatgccccagcggttttcaggtcgttaaatgctgcgatatcgcccgcatccacagaaaccgttatggcgatttgttgtttgccattggcgtagtgcatatagccaacgttaatgcgattcaccggaacgccacctttcaccagcgtcaggaaatcggcgggtgttttacaaaccagcaggattttctgtcgatcggcggcgcgatgaatgttgtcgataactttttgcagcgtccagaaacgtacggcgatcccttctgccagtaccatttccatcaggttttgttgtaccggatcttcggcaacctcatcgttggctaccagcaccagatttgcccccgcaaatccgacccattgaacgccgacctgaccgtgaatcaagcgttcatcaatccggcttaaaacaatatttggcatagcgtgttcctctttgttttgcttattggccttcacaggctgtgtggtatgcgccaggatgtcctgaatatggttgataatgagttcccgtggcgttggctgcagctcgccggagcgaactttcacgtactgcagcggcagatactggctgatcagcggcagcggaattggtgaatccgccagattacgtaccagatgagcgaaagcgtcatcaatctggctgtccggccagtaatagcgcacgcgatccgagtagctataaccacgcgccagacgacgcgcgttgccgtcaccgtggtagtggctttgccagtattccgggcggtcgagcatcacgtcttccagcacctgacgcagaccagaacaggctttcgctggcaccagttcttcttcaatcgccgccagagagaacagagcttcacgcagggcgaaggtcagcgctgggccaactttcagaatggcaaagtggtcaatcaccagctggcgcagcgattgcggcgtttgataatcggtagagtgcgcttcgaaaatcagcgtttcgtagttttcgaccatctggggctccagcaatgtcataaaccgctcgtgggcatcgcgacagtgcataaataccggcatgtttaaatctgcgccaatgcgtagctgggcaacaaaagcgcgttcttgctcttccggcgtcgaaaagttgcggttaaagtcgagaccacattcaccaatcgccaccacttctggctgcgcggccagctcaataatcgcttcttcagtcgcagcttgccactggctgctgtcgtgagaatgtacgcccgccgttgaccaacaggacgaatactgacgcgccagcttttgcgcctgctggctttcacgcaggttagtgccggtgatgagtagcccattaactcccgcgtcaaaagcgcacgctacaacatcatcacggtctttcgcaaattgcgaactggtcaaattaacgccgatatcaaacat

SEQ ID NO: 143972 - DNA, 3662 bp, Homo sapiens
ggtcggaatccatgacgcgccgaagcgtcaacatgaacccgaaactgcgcccggcattcccgccgaagattcgtccttactaatgcggagacaggaaaatgagactcgagttttcaatttatcgctataacccggatgttgatgatgctccgcgtatgcaggattacaccctggaagcggatgaaggtcgcgacatgatgctgctggatgcgcttatccagctaaaagagaaagatcccagcctgtcgttccgccgctcctgccgtgaaggtgtgtgcggttccgacggtctgaacatgaacggcaagaatggtctggcctgtattcccccgatttcggcactcaaccagccgggcaagaagattgtgattcgcccgctgccagagcacaagcagagtgacgtcgaagcaggagcagatttgcgcgctgtccggcagtttatcaaccccgatagacggcttgccgctacccgagtgtgctggcaggatcagggaatccgggttttccggcagttcgatagcgttcagcaccagttgcagcaggttaccgtagtcgctggtatcgcccaccagtaccgcaccgagcagggttttgttgtcttcgctgacaatcaggcgtttgtagatctctttactttcgtcgaggtaaacgtagctacgtgcgccaggcgtgcgaccgtgcgcatcaccaataccgcctacgtctacgcccagcagtttcagcttggcgctaaggtcagcaccttcaaaggcgttttcgctaccgagaatatggtcaacggcgacctgcgccattttgtagccaggtgctaccagaccaaatacacggttgttccagcttgcgcattcaccgatggcgtagatatccggatcggaagtctggcaggaatcattaatgacaatacccccacgcggagcaacgtccagaccacactgggttgccagcttatcgcgcggacggataccggtagagaagacgataaagtcgacttccagttcgctgccgtcggcaaaacgcatggttttacgcgcttcaacaccttcctgcacaatctcaagggtgtttttgctgaagggatcgccgtacgtatctggacgctgcaaaaagttatcgacaacattcatcgcgccgccgatcgacagaaaatcctgctggtttgtaaaacacccgccgatttcctgacgctggtgaaaggtggcgttccggtgaatcgcattaacgttggcaatatgcactacgccaatggcaaacaacaaatcgccaaaacggtttctgtggatgcgggcgatatcgcagcatttaacgacctgaaaaccgctgggttcaccgcatgggcagatgcaggcatgttaaccctcgtcgaagggccatttgatgaaagccttctcgacacctgctggctggcgattgcagcgacggatgatgacgcgcttaaccagcgcgtcagcgaagccgctgaagctcgtcgcatcttctgtaacgtggtcgatgcgccgaaagccgccagctttattatgccgtcgattattgaccgctcaccgctcatggtagcggtctcctctggcggcacctctccggttctggcacgcctgttgcgcgaaaaacttgaatcactgctgccgttacatctgggccaggtagcgaaatacgccgggcaatgcgctttagagcgcatctcgagtgaatgtgagcctaactgggaggaaccccccagtaggggcagactgacacctcacatggccgggtacccctctgatttagagtcatcgccaactaacctcgtagccgacccggtaacgcagtatatgcagccgccggaaggcgcgggacagacgattgagcccgcgcgtcaggcgatggtctggacgctgtttcactacggcttaaccggctggtcgatgtatgcgctgatgggcatggcgctcggatactttagctatcgttataatttgccgctcaccatccgctcggcgctgtacccgatcttcggtaaacggattaacgggccgataggtcactcagtggatattgcagcggtgatcggcactatcttcggtattgccactacgctcggtatcggtgtggtgcagcttaactatggcttgagcgtactgtttgatattcccgattcgatggcggcgaaagcggcactgatcgccttgtcggtgataatcgccacgatctctgtcacctccggtgtcgataagggcattcgcgtgttatcggagcttaatgtcgcgctggcgctgggattgatcctgttcgtattgtttatgggcgacacttcgttcctgcttaatgcactggtgctgaatgttggcgactatgtgaatcgctttatgggcatgacgctcaacagttttgccttcgaccgtccggttgagtggatgaataactggacgctcttcttctgggcatggtgggtggcatggtcgccgtttgtcggcttgttcctggcgcgtatctcgccggacatccgcaataatccggtgattgcctatgaagatgactgcgtgacgcggctgattcaggacgatgttaacgaaacggcctacaaccagattaaaaactggagcatcagcgaactgcgtgagtatgtgctgagcgatgaaaccagcgtggacgacattgcctttacccgcaaagggctgacctcggaagtggtcgcggcggtagcgaagatttgctccaacgcggacctgatctacggcgcgaagaaaatgccggtaatcaaaaaggccaataccaccatcggtattccgggcacctttagcgcccgtttgcagccaaatgacacccgtgacgacgtgcaaagtatcgccgcgcaaatctacgaagggctttccttcggggtgggcgatgcggtgatcggcgttaacccggtgactgacgacgtggaaaacttaagccgcgtgttggataccatctatggcgtgatcgacaaattcaacatcccaactcagggctgtgtactggcgcacgtcaccacccagatcgaagcgatccgtcgtggcgcaccgggcgggctgattttccagagtatctgtggcagcgaaaaagggctgaaagagtttggcgtggagctggcgatgctcgacgaagcgcgcgcagtgggcgcggagttcaaccgtatcgccggggaaaactgcctctacttcgaaaccggacaaggctctgcgctatccgctggcgctaacttcggcgcagaccaggtaacgatggaagcacgtaactacgggctggcgcgtcattacgatccgtttatcgtcaacaccgtggtcggctttattgggccggagtatctctacaacgaccgccagattatccgtgctggcttagaagatcactttatgggcaagctgagcggcatctctatgggctgtgactgctgttataccaaccacgctgacgctgaccagaacctcaacgaaaacctgatgatcctgctcgccaccgcaggctgcaactacatcatggggatgccgctgggtgatgacatcatgctcaactaccagaccaccgcattccacgataccgccactgtgcgtcagttactcaacctgcgcccgtcaccggagtttgaacgctggctggaaagcatgggcattatggcaaacggtcgcctgaccaaacgggcgggcgatccgtcactgttcttctga

SEQ ID NO: 143973 - DNA, 1230 bp, Homo sapiens
atggatgcgggctggagcgatgttggctcctggtcttcattatgggagatcagcgcccacaccgccgagggcaacgtttgccacggcgatgtgattaatcacaaaactgaaaacagctatgtgtatgctgaatctggcctggtcaccaccgtcggggtgaaagatctggtagtggtgcagaccaaagatgcggtgctgattgccgaccgtaacgcggtacaggatgtgaaaaaagtggtcgagcagatcaaagccgatggtcgccatgagcatcgggtgcatcgcgaagtgtatcgtccgtggggcaaatatgactctatcgacgcgggcgaccgctaccaggtgaaacgcatcaccgtgaaaccgggcgagggcttgtcggtacagatgcaccatcaccgcgcggaacactgggtggttgtcgcgggaacggcaaaagtcaccattgatggtgatatcaaactgcttggtgaaaacgagtccatttatattccgctgggggcgacgcattgcctggaaaacccggggaaaattccgctcgatttaattgaagtgcgctccggctcttatctcgaagaggatgatgtggtgcgtttcgcggatcgctacggacggggtaacgatatgaaaaaattaacctgctttaaagcctatgatattcgcgggaaattaggcgaagaactgaatgaagatatcgcctggcgcattggtcgcgcctatggcgaatttctcaaaccgaaaaccattgtgttaggcggtgatgtccgcctcaccagcgaaaccttaaaactggcgctggcgaaaggtttacaggatgcgggcgttgacgtgctggatattggtatgtccggcaccgaagagatctatttcgccacgttccatctcggcgtggatggcggcattgaagttaccgccagccataatccgatggattataacggcatgaagctggttcgcgagggggctcgcccgatcagcggagataccggactgcgcgacgtccagcgtctggctgaagccaacgactttcctcccgtcgatgaaaccaaacgcggtcgctatcagcaaatcaacctgcgtgacgcttacgttgatcacctgttcggttatatcaatgtcaaaaacctcacgccgctcaagctggtgatcaactccgggaacggcgcagcgggtccggtggtgacgccattgaagcccgctttaaagccctcggcgcgcccgtggaattaa

SEQ ID NO: 143974 - DNA, 1401 bp, Homo sapiens; identical to SEQ ID NO: 123395

SEQ ID NO: 143975 - DNA, 1862 bp, Homo sapiens
  misc_feature (1)...(1862): n = a,t,c or g
ggggggagcggatggggcgctcggtagcttcaggatggatcagacacgggcctcggtatgcttggagggacaacatgtttcggannnnnnnnnncgcaccgaagttatatacccggcgtgggggcggcgttgtctgggaggggaaaggcaatgaggagtgatgacatctcccgggcgaaacccacgggttgtttggggcgcggaaagagaccgatccaggtgaccccgggggggtggggaaagcgagtcccataattttccccgggggtaatgcagagctggaaaaacccggagaaatttccgctcgatttaatggaagtgcgctccggctcttatctgaaagaggatgatgtggtgcgtttcgcggatcgttacgaacgggtgtaaacgtcgcatcaggcaatgaatgcgaaaccgcggtgtaaataacgacaaaaataaaattggccgcttcggtcagggccaattattgcctgaaaaagggtaacgatatgaaaaaattaacctgctttaaagcctatgatattcgcgggaaattaggcgaagaactgaatgaagatatcgcctggcgcattggtcgcgcctatggcgaatttctcaaaccgaaaaccattgtgttaggcggtgatgtccgcctcaccagcgaaaccttaaaactggcgctggcgaaaggtttacaggatgcgggcgttgacgtgctggatattggtatgtccggcaccgaagagatctatttcgccacgttccatctcggcgtggattgttgcattgaagttaccgccagccataatgcgagggattataacggcatgaagctggttcgcgagggggctcgcccgatcagcggagataccggactgcgcgacgtccagcgtctggctgaagccaacgactttcctcccgtcgatgaaaccaaacgcggtcgctatcagcaaatcaacctgcgtgacgcttacgttgatcccatgttcggttatatcaatgtcagaaacctcgctccgatcaaggtggtgatcaactccgggaacggcacagcgggtccggtggtgcacaccattgaagaccgctttaaagccctcggcgcgcccgtggaattaatcaaagtgcacaacacgccggacgccaatttccccaacggtattcctaacccactactgccggaatgccgcgacgacacccgcaatgcggtcatcaaacacggcgcggatatgggcattgcttttgatggcgattttgaccgctgtttcctgtttgacgaaaaagggcagtttattgagggctactacattgtcggcctgttggcagaagcattcctcgaaaaaaatcccggcgcgaagatcatccacgatccacgtctctcctggaacaccgttgatgtggtgactgccgcaggtggcacgccggtaatgtcgaaaaccggacacgcctttattaaagaacgtatgcgcaaggaagacgccatctatggtggcgaaatgagcgcccaccattacttccgtgatttcgcttactgcgacagcggcatgatcccgtggctgctggtcgccgaactggtgtgcctgaaagataaaacgctgggcgaactggtacgcgaccggatggcggcgtttccggcaagcggtgagatcaacagcaaactggcgcaacccgttgaggcgattaaccgcgtggaacagcattttagccgtgaggcgctggcggtggatcgcaccgatggcatcagcatgacctttgccgactggcgctttaacctgcgcacctccaataccgaaccggtggtgcgcctgaatgtggaatcgcgcggtgatgtgccgctgatggaagcgcgaacgcgaactctgctgacgttgctgaacgagtaa

SEQ ID NO: 143976 - DNA, 1828 bp, Homo sapiens
ttaacctaaatgctcgccgccgcacacgccgtgcacttctgcggtgacgtagctcgactcctgacttgccagataaacatatacaggggccagttccgccggttgccccgcacgtttcatcggcgtttgctgaccaaactgcgggatcttatcctgcgtttgtccgccggaaatttgcagtgctgtccagatcgggcctggcgcgacaatattcacccgaatacctttctccgcgacctgttttgccaagccacggctgtagttcagaatcgccgccttcgtagccgcatagtccagtaaatgcggacttggctggtatgcctggattgacgaagtggtgatgatacttgcacctttcggtagcagggggatcgcttcctgggttagccagaacagcgcgaaaacgttaatggcaaaggtcttttgaaactgttcgctggtgaggtctgcaatatccggaatggcaacctgtttcccggcgaccagcgccataatatccagcccgcctaacgccttgtgcgcttcgtgaaccagcgaacgggcaaatttctcatcgcttaaatcgcctggcagcagaacggtctgggtcgcatcttcaagatcttttccatctgaggggttttcatgctgcaaaccaccatctgccgcctgaacggcgtggagtgcgaaagcccggtggtgatttgcaatgagcagcaccgctttattgtcgcggaacagctgcgtcaactgaacaaacttaccgagaacattattctcgaaccggcagggcgaaacacggcacctgccattgcgctggcggcgtccctctcctccgtccaggtcatccgcgaaacgcaccacatcattttcttcgagataagagccggagcgcacgtcaattaaatcgagcggaattttccccgggttttccaggcaatgcgtcgcccccagcggaatataaatggacgtcgttttcaccaagcagtttgatatcaccatcaatggtgacttttgccgttcccgcgacaaccacccagtgttccgcgcggtgatggtgcatctgtaccgacaagccctcgcccggtttcacggtgatgcgtttcacctggtagcggtcgcccgcgtcgatagagtcatatttgccccacggacgatacacttcgcgatgcacccgatgctcatggcgaccatcggctttgatctgctcgaccacttttttcacatcctgtaccgcgttacggtcggcaatcagcaccgcatctttggtctgcaccactaccagatctttcaccccgacggtggtgaccaggccagattcagcatacacatagctgttttcagttttgtgattaatcacatcgccgtggcaaacgttgccctcggcggtgtgggcgctgatctcccataatgaagaccaggagccaacatcgctccaagcccgcatccatcggcaccacaacagcatctgccgtacgttccatgaccgcgtaatccaccgactcttccgggcaggcgagaaacgcttcttctcacgcgaatacattgagatccggatcgaggggccatcgctttccccgggcagcgtcgcagccagttttgccgcccggcgtttttcttccaccaggcgggatttttgatcgcttaacaggtaatggctggcactgcgcggttccagaacaatatagccgccgagcaaaacgacgggcgcactgtggttgttcagatcgcgacgaatcgtcatctccgaaaccccaagcagggcggcggcgtctttaagatgtaacttatcgctgcgttttaattcttgcagcagctgcccgatacgctcttcgcgacgtgtttccat

SEQ ID NO: 143977 - DNA, 2058 bp, Homo sapiens
atgcctgtgatgcctgaaatggatgttgatgttggtgggctgggactacagtggactgcacgctgtatgaatgcccacatctgttggggagctctggaggcagcggcgatttttagcccggtcatcgcaccgctcgccgccgcttcgataaagctttttggcggcgtttcgctggaacgacagattttcaaatgtgacctgcgaaggctcggttgccgggctaagaatacgtgcaaacaaaatcccgcccagggatcgccatcagcgatgccgctaacaggtagtcaattggtacgcccattccggcataaccaattcatcatcgaaccagcaatggacgccatcccggtaccaaattgcggtaaacaactcgttgcgattcatgcgatcgataaacggtttaacgatcgccgggatctcattttgcccgaggaaaatagtagtaaccgcaacaaaagattcgattttgctgatgttgagggctttctggaaaatgctgccaaggatgcgaatcagcagccccatcacgccaatgtagtacagcagactgatgagcgcagtaacgaaaataatcgccggaagtggggatcctctagaaaagcattaaatatcagcaagatcgagtcattcgtcgcggtcaccaccattttcctcgggcaaaacgaaattccggcaatcgtcaaaccctttatcgatcgtctgaatcgcaatgaattatttacagcgatttgtagtggcatggcctcgattgctggttcgacaatgattggttacgccgcactgggcgtgcctgtggaatatctgctggcggcatcattaatggcgatccctggcgggatcttgtttgcccgcctgttaagcccggcaacggaatcttcgcaggtttcctttaataacctctctttcaccgaaacaccgccaaaaagcattattgaagccgctgcgacaggggcaatgaccgggctgaaaatcgccgcaggtgtggcaacagtggtgatggcatttgttgcaataattgcgttgattaacggtattatcggcggcgttggtggctggtttggttttgaacatgcctcgctggagtccattttaggttacctgctggctccactggcgtgggtgatgggtgtggactggagtgatgcgaatcttgccgggagtttgattggacagaaactggcaataaatgaatttgtcgcttatctcaatttctcaccctatctgcaaacggctggcactctcgatgctaaaactgtggcgattatttccttcgcgttgtgcggtttcgctaactttggttctatcggggtggtggtgggggcgttttctgcggttgcgccacaccgtgcgccggaaatcgcccagcttggtttacgggcgctggcggcggcgacgctttccaacttgatgagtgcgaccattgccggctcggtaccgcatattatggatttaatgcgcaaaggccggattaaaggcaaaggttacattctcaccgagcaggaatactgcgtagtggtggggacaatcaatatggatattcgcgggatggcggatatccgttacccgcaatcggcttctcatcccggtacaattcattgctcagcgggcggcgtgggacgcaacatcgcccacaatctggcgctgttaggccgtgacgtccatttgctttcagtgattggcgatgacttttatggcgaaatgctcctggaagaaacgcgccgtgccggcgtgaatgtctccggctgcgttcgtttgcatggtcaaagcacatcgacgtatctggcaattgccaatcgagacgatcaaaccgtgctggcgattaacgatacccatctgctggaacagttgacaccgcaactactgaacgggtcgcgcgatttacttcgtcatgcgggcgtggtactggctgattgcaacctgacagccgaggcgctggaatgggtctttaccctcgctgatgaaatcccggtgtttgtcgataccgtttcagaattcaaagcgggcaaaatcaaacactggctggcgcattggactctagaggatccctcctccgtatga

SEQ ID NO: 143978 - DNA, 2047 bp, Homo sapiens
atggagttggggaagggatatgattgcagtgtgaggtcgcctctagaggatccccgtcactaccgctttggcgcttccagcctgctggcaagcctgctgaaagcgctgggtcacggcgacgaaattattcgtaaaaaacgtgatggtcatgcgctgagcgatgaagaaattcgtttctttatcaacggtattcgcgacaacactatctccgaagggcagattgccgccctcgcgatgaccattttcttccacgatatgacaatgcctgagcgtgtctcgctgaccatggcgatgcgagattcaggaaccgttctcgactggaaaagcctgcatctgaatggcccgattgttgataaacactccaccggtggcgtcggcgatgtgacttcgctgatgttggggccgatggtcgcagcctgcggcggctatattccgatgatctctggtcgcgggcttagtcatactggcgtcgccattattagccgttccagcgatccgcgtgctgatgtcgattatctgtttgcgcaggtaatcgttcatgagcaacgtgtcgataccacgcctaactgcggcaatatgctgtctggtgttggggcattcgccattgaaaatggtttgattgcagcgacttcgccagttactcgcgtacgtatccgcaacgtcaatacgggtacgttcatcgaagctgatgtgcaaacgccaaatggtgttgtcgagtacgagggtagcgccagaattgacggcgtaccgggtactgccgcaccggttgcgctcactttcctgaatgccgctggaaccaaaaccggaaaagttttcccgactgataatcagattgattattttgacgatgtcccggtgacctgtatcgatatggcgatgccagtcgtcattattccggctgaatatctgggaaaaacaggttatgaattaccggcggaactggatgccgacaaagcattattagcccgcattgaatctatccgtctacaagcgggtaaagcaatgggcttaggtgatgtcagtaatatggttatccctaaacctgtgcttatttctccagcgcagaaaggcggggcaattaatgtgcgttattttatgccgcattcttgccatcgcgcgctggcgataaccggtgctattgctatttccagtagttgtgcattggaaggcaccgtcacccgacaaatcgtcccttctgtaggatacggcaatatcaatattgaacggggatcctctagagtagactctccatgcaaatactcgttgattaaccgtgtatgggtctacatcactggtgtgaccgatcaccatcagaacagccagccccagtcgatgcagcgaattgcaggcactaacgtctggcagtggacgacacaactcaatgccaactggcgcggcagctactgctttattcccaccgaacgcgatgacattttttctgtaccatcccccgatcgcctcgaattgcgcgaaggctggcgaaaactattaccccaggcgatagccgatccgctgaacctacaaagctggaaaggcgggcgagggcacgctgtttctgcactcgaaatgccgcaagcgcctctgcaaccgggatgggattgtccgcaagcgccagaaatacctgccaaagaaattatctggaaaagtgaacggttgaaaaagtcacggcgtgtatggatttttaccaccggcgatgcaacagcagaagaacgcccgctggcagttttgctcgatggcgaattttgggcgcaaagtatgcccgtctggccagtgctgacttcgctgaaccatcgtcagcaactttcttccgccgtgtatgtgttgatcgacgctttcgacaccacgcaccgggcccacgaactgccgtgtaatgcggatttctggctcgcagtacagcaagagttattacccctggtgaaagctattgccccttttagcgatcgtgccgatcgcaccgtggttgccgggcagagttttggtgggctttccgcgctgtatgccggactgcactggcctgaacgctttggctgtgtattaagccagtcaa

SEQ ID NO: 143979 - DNA, 1519 bp, Homo sapiens
atggagcggggcggggcgcagcggggcggggcgggcctggagctgcacctgcttctgggcggacgcaattggcgcgcggcgcgggctgcagacggctgcgaggcgctgggcacagaatgtacagcaccaacggtgaaccctaatgtcaactatgtcaataaaggttcatcagttgcaacaaataggccattttggccacctttagagctttctaaatttggaatacttgatcaagctgaaagtgtcttgatcggctgcattgtaccagatttcttgtatgtcgggtactatgtcgactctagaggatccccttctggaataagtgattatagcaagggtgcaggatgcaagtttaatatacaaaatggctccaccccggtgacaaatctctgctcgggccctgaggtcaaagaaatcctttccatcgaggtggaggcggccgtgctcccacagctcatacagtatgcatacctacagagtcagcaccacatggatgccaccaagatttataacttgcgccctctgagcagtggcccaacctgcacctggtcctgcttgagccacagcttagcgccagaaatacctgccaaagaaattatctggaaaagtgaacggttgaaaaagtcacggcgtgtatggatttttaccaccggcgatgcaacagcagaagaacgcccgctggcagttttgctcgatggcgaattttgggcgcaaagtatgcccgtctggccagtgctgacttcgctgacccatcgtcagcaacttcctcccgccgtgtatgtgttgatcgacgctatcgacaccacgcaccgcgcccacgaactgccgtgtaatgcggatttctggctcgcagtacagcaagagttattacccctggtgaaagctattgccccttttagcgatcgtgccgatcgcaccgtggttgccgggcagagttttggtgggctttccgcgctgtatgccggactgcactggcctgaacgctttggctgtgtattaagccagtcaggatcgtactggtggccgcatcggggcgggcagcaagagggcgtgttacttgaaaagctaaaagctggtgaagttagcgccgaaggtctgcgcattgtgctggaagcgggtattcgcgagccgatgatcatgcgggccaatcaggcgctgtatgcgcaattacaccccataaaagaatccattttctggcgtcaggttgacggcggacatgatgcgctttgttggcgcggtggcttgatgcaggggctaatcgacctctggcaaccacttttccatgacaggagttgaatatggcattcagtaatcccttcgatgatccgcagggagcgttttacatattgcgcaatgcgcaggggcaattcagtctgtggccgcaacaatgcgtcttaccggcaggctgagacattgtgtgtcagccgcagtcacaggcgtactgccagcagtggctggaagcccactggcggactctgacaccgacgaaatttacccagttgcagggaggccaatgagc

SEQ ID NO: 143980 - DNA, 1023 bp, Homo sapiens
atgacccggactccaaattcaaaaatgaaattaggagaagagcatgagttctgccaagaagatcgggctatttgcctgtaccgggtgttggtgccccctccgggcggcaacaacttcgcccttgcgcagtctggcagcggtaacagtgccaaccgcaccgattttaaaccgcaaaaagccaacaccagcgagattggcaccaaatggcaggttctggataaacgtctgttgctcaccgccgcgctgttccgcactgatatcgaaaatgaagttgagcaaaatgatgacggaacttactcgcaatacggtaagaaacgcgtcgaaggctatgagatatccgtggccgggaatatcactcccgcgtggcaggtgattggcggctatacccagcaaaaagcaaccatcaaaaacggcaaagatgttgcccaggatggttcctcatcgctgccgtataccccggagcacgccttcaccttatggagccaatatcaggcaaccgacgatatctctgttggcgcgggcgcacgctatatcggcagtatgcataaaggttcagacggcgcgaacaatgaaacctatggtttccatgtggatggcgcagtacgcagccatccacaaaacggctggatgcgtactgacctttctgccacgctgtttttaagcgatccacaaagctacgacggcggcgaactggtcgttaatgacaccttcggacaacatcgggtaaaactcccggcaggcgatctcgtgttgtatccctccagcagcctgcattgcgtgacacccgtaacccgcggcgtacgagtggcatcatttatgtggatccagtcgatgatccgcgatgataaaaagcgcgccatgctgtttgaactggacaacaatattcagtcgctgaaaagccgctacggcgaaagtgaagagatcctgtcgctgcttaatctttatcataatctgctgcgggaatggtgtaaatgtctgttgagcacatcctgtaataagcagggccagcgcagtagcgagtag

SEQ ID NO: 143981 - DNA, 1425 bp, Homo sapiens
atgagatattttgggtcacagtgtgtctgcctgtccctggggtatagaatacacccagatacacccatctgctgggccaaagttcagcttagcccttccctgttcctgtgtagttacaatctggccctgaagacatccgaggcacttcagacactagtcagggaggacttgggttcgggtggggtgggctggaccctgacatcccagcaagttgtggcccagattgagatggtcgtctattggttccaggccctggccactgcagtcatcccccagtggcagaaggatgaattgcgggagactctcaaatccctaaagaaggtcatggatgacttggaccgagccagcaaagccgatgtccagaaacgaaatgcagccaatcggggcttaaaagccagcgagtgggtgcagcaggtgtcaggcttgatggacggtaaaggtggtggcaaggatgtgtctgcacaggccacaggcaagaacgttggctgcctgcaggaggcgctgcagctggccacttccttcgcccagctgcgcctcggggatctgaaatcacagggcaagggagctggtggggaagacctcattatgctggacatttacgctatcgaagagctccgggcacggggtctggaggtcacagatgattccccaaagtacaattaccatttggactccagtggtagctatgtcaggcaccaaaatcggcgctatacgatggctgctctgccgcatattcgttccatcaccatggaacgtgagcaggacagcatcattatggatgccgcgacgcgtcgtaatctggaaatcacccagaacctggcgggtggtgcggaaaatacgctggcttctgtgctcgactgcaccgtcacgccgatgggcagccgtatgctgaaacgctggctgcatatgccagtgcgcgatacccgcgtgttgcttgagcgccagcaaactattggcgcattgcaggatttcaccgccgggctacagccggtactgcgtcaggtcggcgacctggaacgtattctggcacgtctggctttacgaactgctcgcccacgcgatctggcccgtatgcgccacgctttccagcaactgccggagctgcgtgcgcagttagaaactgtcgatagtgcaccggtacaggcgctacgtgagaagatgggcgagtttgccgagctgcgcgatctgctggagcgagcaatcatcgacacaccgccggtgctggtacgcgacggtggtgttatcgcatcgggctataacgaagagctggatgagtggcgcgcgctggctgacggcgcgaccgattatctggagcgtctggaagtccgcgagcgtgaacgtaccggcctggacacgctgaaagttggctttaatgcggtgcacggctactacattcaaatcagccgtggtgggctcttccgttag

SEQ ID NO: 143982 - DNA, 1701 bp, Homo sapiens; identical to SEQ ID NO: 123309

SEQ ID NO: 143983 - DNA, 424 bp, Homo sapiens
  misc_feature (1)...(424): n = a,t,c or g
gagttcgtcaaggccttttacctgaagaccaatgaccagatggtggtagtgtacttggcctcgctgatccgttccgtggtcgccctnnnnnnnnnnnnnnnnnnnnnnnnnnnnnnnnnnnnnnnnnnnnnnnnnnnnnnnnnnnnnnnnnnnnnnnnnnnnnnnnnnnnnnnnnnnnnnnnnnnnnnnnnnnnnnnnnnnnnnnnnnctatggggatgtagagcatgaatcctggctctcctgtgtgcgtcatgctcatcacccggatcccatttgcatagcccacgctcatctccttgcaaaagaggcttgggaagtggtctggagtcacaggggcataggacaactcagacagcacatccacagctcgagggccaatcagattgagggctgtgtctccagggacgtccgacgcaaggtcga

SEQ ID NO: 143984 - DNA, 1404 bp, Homo sapiens; identical to SEQ ID NO: 143912

SEQ ID NO: 143985 - DNA, 843 bp, Homo sapiens
atggtgagcaggcgaggacgagaggcatttcatgtgtttattcctgcggatgagtgggatgaacgcctggcgaacgggatgtgggcggtggatttaggcgcttgccctggcggctggacctaccaactggtgaagcgcaacatgtgggtttattccgtcgacaacggcccgatggcgcaaagtctgatggataccggacaggtgacgtggctgcgggaagacggtttcaaattccgtccgacgcgcagcaatatctcctggatggtatgcgatatggttgaaaaaccggcgaaagttgcggcattgatggcgcagtggctggttaatggctggtgccgtgaaaccattttcaacctcaaactgccgatgaaaaaacgctacgaagaagtgtcacacaatctggcgtatattcaggcacagcttgatgaacatggcataaatgctcagattcaggcgcggcagttgtatcacgatcgcgaagaagtgacggtgcacgtccgccgcatctgggctgcgcgcccctttgcggctggtggtatcgcggtcgatacgagaaatgggcacgccggggaacaacggcgcgagcgtctgttcaagctgttcggtgcccagccccacggggaccaggtgcgtggaaccgtccgccgttctgtacaacgacaaagtcatcgcgggcttttgcgggcggtactgcggattgctttacgctgtccgaactgtttgaccgttaactggaaatgcttcagggccactctgttcaaagccgccgttgagctggcaaaagactggcttaccgatcgcttgctgcgcaaacttgaagcatctgttggcagtcgcggatga

SEQ ID NO: 143986 - DNA, 666 bp, Homo sapiens
atgaaacctgtaaaaccacctcgtattaatggacgagtgccggtcctgtcggcacaggaagcggtgaattatattcccgacgaagcaacactttgtgtgttaggcgctggcggcggtattctggaagccaccacgttaattactgctcttgctgataaatataaacagactcaaacaccacgtaatttatcgattattagtccaacagggcttggcgatcgcgccgaccgtggtattagtcctctggcgcaagaaggtctggtgaaatgggcattatgtggtcactggggacaatcgccgcgtatttctgaactcgcagaacaaaataaaattattgcttataactacccacaaggtgtacttacacaaaccttacgcgccgccgcagcccaccagcctggtattattagtgatattggcatcgggacatttgtcgatccacgccagcaaggcggcaaactgaatgaagtcactaaagaagacctgattaaactggtcgagtttgataacaaagaatatctctattacaaagcgattgcgccagatattgccttcattcgcgctaccacctgcgacagtgaaggctacgccacttttgaagatgaggtgatgtatctcgacgcattggttattgcccaggcggtgcacaataacggcggtatgtga

SEQ ID NO: 143987 - DNA, 439 bp, Homo sapiens
ggaccatatatatacaagggatgagtgaatgttcggaaaggagctgggtaggcgagacgtgagccaattaggtgcggccgagatcacatatattttaaaagactaaacataggaaagctaggagatcttgtgtggtggcaggtttcttctgccactcaggggtaggacactggggcagggggagtggcccagcctgtactttcactctgactgcagcagccacgcagagcagtgtttgctctatggattcgcagactgggctcctcttgccttcttcagataagccacaaaccagcctgacctgctcaccttctgggcctcggcacctgtgacagccacaatcctccggatacccttggcaatggcttcttccgtcacgatcacaaaagctcctgcatgactcgagttccgcaggtgcctgaatggcagaacacaaagt

SEQ ID NO: 143988 - DNA, 714 bp, Homo sapiens
gggtatcgagtcgacagttcttttgacagctcatcggcggctttgaccagatggccctgatgcatttccagtattacgttcagacagttcgcacagcgtaaaacgatccgcagttccgcccgcaaataccgcgatgactttgtcgttgtacagacggcgaaccttttacacgatgcctttcattacggtattgcccaacgtggcctgaccatcaccagcgatgaccacatgaccgttacggcgtgcgcttactatagttgtcacgagctgtccccttggttacgaatacagagtacaaaagccgtacaaaagtacggggcataatgcaattatagatgggggggattttgagggtttcaaccaccggcggcgaaccgaatgcagtttgtatgaccgaccatcttcaaccgattaagggtgctgtctgcattctctttgccttgcaccggtaccaaagactcacgataccagccattgttggtggtgattttcgaatcaaagacttcaaacgccagctgagcacgtactgacactgcctgttccgcgcctctgaacgatacgcacagaaacgtccagcagctttcgtcttttttctccaccatcaggttttggcgcgcatctggcaccaacaactgcgcagcttctacggctacaactgcgcagtcgtgtcgcaggagtatcagcagtacctctagactccaccccaagcataaa

SEQ ID NO: 143989 - DNA, 527 bp, Homo sapiens
ctgtcatagcattttgtgctcaccacgaaggatggtctctgccttctcttgtcggtgtatgccatctgaacctaggaacacaaagtatattggcctcaaacggagacccagggttgccagttttccgtgggccttcccctcccttgaaatgtctttaattacctccccttcatcgtcaggccacgtgtgacttctgttcttagcactgccagggtcattgacttccatctaagcttgcatcaggaagatgttccttctgtgatcattggtactgaagccagaaaagctctcattcaggaactctgaagagcaaaaagggacaaacactaactgctgagctgggccatttgatctcctttcaccttgcattgctgtcacagcaccttgtatgatggcaggacaggctccagcagagagaactgcacagtgaccactggtatttttcacgctcttccaggggatccctgtcccccgacattgaaggagatctcattcagggccagagacacagagaccacataggccca

SEQ ID NO: 143990 - DNA, 1401 bp, Homo sapiens; identical to SEQ ID NO: 132502

SEQ ID NO: 143991 - DNA, 867 bp, Homo sapiens
atgagacgatcccatattaagcagcagatccgtcggcagcatatgcacaatggcataggcaacactcagaccacccagcaaaacacccaaaaagttgaataccgccgccataaccacggcgagctgagaacgcatcgcgcgggtatagataacggttgccacggcgttggctgtgtcatggaaaccattgatggcttcgtagaacagcacaaaagccagtcaggcagacgccgggttctgctgatcgataatggtaaaaaaccagggcgcaaaatccttagagatcctgtagagtccagcgacgcactgtttggcgttccggcccctgcccaagtggcatccggaaatcgatacgggtattcataccttaatgacgctctcaatggcggcgatgctgagtccgcagggctgacgccgccagaactctggccgcgtcatcatggtcatggcccggcgggtgttaagttagtggaacaactatgccagcgtctgcgcgtgccaaatgaaattcgcgatttagccagactggtggctgagtttcacgatctcatccacaccttcccaatgctgaacccaaaaaccatcgtcaaattatttgattccatcgatgcctggcgtaaaccgcagcgtgtcgagcaactggcgctgaccagcgaggctgacgtgcgcggcagaaccggttttgaatcagcggactacccgcaaggccgctggttgcgcgaagcctgggaagtggcgcagtcagtgccgacaaaagccgtcgttgaagcgggatttaaaggtgtggagattcgcgaggagctgacccgacggcggattgcggcggtagccagctggaaggaacaacgttgcccaaagcctgaatga

SEQ ID NO: 143992 - DNA, 951 bp, Homo sapiens
ttaagtcggtagaacgtggttggtgccggaggcgtaatcacctgccgattccggtgaccagtcaccaagaaataccgaaccggcgctggtgatgctatcgaccagttcacgggcgttgcgggtctgaatgatcaggtgctccgggccgtactggttggagatctccacgcactgcgctaaatctttagtcacgatcaggcggctggcgttcagtgcctggcgggcggtttcggcacgcggcagttctgccagttggcgttcgacggcctcggcaacgcgacgcgccatatcagcagcgggcgtcagtaaaatcacctgtgagtccgggccgtgttcagcctgagagagcaaatcagaagccacgaaatccggcgtagcgccgctgtcagcaatcaccagcacttccgacgggcctgcgggcatatcgatcgccgcaccgtccagacgctggctcacctgacgtttcgcttcggtgacaaaggcgttacccggcccgaagattttgtccacttttggcacagattccgtaccaaaggggatcctctgctcaccttctggccctcggcacctgtgacagccacaatcctccggatacccttggccaatggcttcttccgtcacgatcacaagagctcctgcatgactcgagttccgcaggtgccggaagaccctgtgaaatctcatgccccccagcaattttggatccaccacgggaaatggtttgcctggtatgacgtcgccatcgggattccgggcccctttgcgggaagatcctgatgtgattttgctcggagatgcggtacgcgaggtcaccagggtaagcaacgccgtgccggcaaagcggtacatcggcgggtcgccaaggcggggtttcatcaattcctgtaacatgccgggaataattagccctggcgcgtagcagccgcgtaaattctcgctggggatgagcat

SEQ ID NO: 143993 - DNA, 771 bp, Homo sapiens
  misc_feature (1)...(771): n = a,t,c or g
tcaaacctgctgccagatgtcagcctgcaggagttcgtcaaggccttttacttgaagaccaatgaccagatggtggtagtgtacttggcctcgctgatccgttccgtggtcgccctnnnnnnnnnnnnnnnnnnnnnnnnnnnnnnnnnnnnnnnnnnnnnnnnnnnnnnnnnnnnnnnnnnnnnnnnnnnnnnnnnnnnnnnnnnnnnnnnnnnnnnnnnnnnnnnnnnnnnnnnnnctatggggatgtagagcatgaatcctggctctcctgtgtgcgtcatgctcatcacccggatcccatttgcatagcccacgctcatctccttgcaaaagaggcttgggaagtggtctggagtcataggggcataggacaactcaagacaagcacatccacagctcgagggccaatcagattgagggctgtgtacttccaggtgacgtcctccaggagcaggttgctgtctttcggcatgtgtttcttaagccaggcccaacagtggacctgctggtcggttggagagatcatgaagaaactgcgcttgttcagtcgtgctatgctgcagtcattttcataccctccaccctcgttgagcatgccagtatgcacaatgtggcccacaggcacatccaggtcattggagaagaggtactgtagaacttctaatgcctgatccccagtggttgttatctcaaactctgtgaaagaggacatgtcaatgacacacacagcttccttacagcacttgacttcagactccacgatgtcaa

SEQ ID NO: 143994 - DNA, 4191 bp, Homo sapiens
atgggcccagacgacggaacaagaggaggacagagaggaacgaggaaaaagacgaacgagagaagagagagcaaagaagaaagaaaggagcgacagaaagagaaggagaagaaaatcgcaggctatgacggcggcaccggcgcaagtccgctttcatcggtgaaatacgcaggctgtccgtgggagctggggcttgttgaaacccagcaggcgctggttgctaacggcttgcgtcacaagatccgtttgcaggtcgatggcggcctgaaaacgggtgtcgatatcatcaaggcggcgattctcggcgcagaaagcttcggcttcggcactggcccgatggtggcgctcggctgtaaatatctacgtatttgccatctgaacaactgcgcaacgggtgtagcaactcaggatgacaaactgcgtaagaaccactatcacggcctgccattcaaggtgacgaattactttgagtttatcgcccgtgaaacccgcgagctgatggcacagcttggcgtaacacgtctggtggatctgattggtcgcaccgacctgctgaaagagctggacggtttcaccgccaaacagcagaagctggcgctgtcgaagctgctggagactgccgaaccgcatccaggtaaggcactctactgcaccgaaaacaacccgccgtttgataacggcctgctgaacgcgcagttgctgcaacaggcgaaaccgtttgtcgatgagcgccagagcaaaaccttctggttcgatattcgcaacaccgaccgttctgtcggcgcgtcgctttcaggctatatcgcccaaagcaccgcgatcaagggctgggagccgatcctatcaagaggaagattaggggagggttactgcacaaggatccagagtgagacccacagcgagagttctcagacatctgtgcaaggcaactgcttccatgagtcttaccgcatgacggaagagggcggattccggcgtgaagtgacggctaagacgcagccagatatcactcaacccgtgcgggctgtcatcagcgagctcattttcgtcattattatgggttttaccttcaaacggcacattcagagtgcgacggacaaaacttgctccaccgtcacaggctaccagccactgggctttgactatttcccgctgcccttctgccgttttcaggtgcaaggtcacttcgtcatcttgctgactgaaggcctccagctcgcgggaaaacaagcagcgcacattcggaaaacgcgacaccccttccagcatcaccgcatcgacctgcggctgaataaaggcgttacggcgcggccagccaaattcatcggtcattggctgaatatcagcaaaacagcggcctttcggggtgagaaaacgcatcgcgtgccacggcgtagtgtgcggcagaacatcatcgaccaggccgaccgactgcatggtgcgcagcgcctcgtcatcaataccaatcgcacgcgggtagtcgatcaacttatcgagtttctccaccaccagcacgtcaatgcccatctggccgagatagttcgccatcatcagcccaaccgggccggcaccagcgatcgccacctgaacgctatggttaacagcaggctggatgtcaggcaattccagccagaaaacgaaaccagcgctgcctgggtagtgggtatcgatcaaacgctggtcgatattgaagcgaaagtggatgatgaatttattgagcgttatggattaagcgccgggcattcactggtgattgaggatgatgtagccgaagcgctttatcaggaactaaaacagaaaaacctgattacccatcagtttgcgggtggcaccattggtaacaccatgcacaactactcggtgctcgcggacgaccgttcggtgctgctgggcgtcatgtgcagcaatattgaaattggcagttatgcctatcgttacctgtgtaacacttccagccgtaccgatcttaactatctacaaggcgtggatggcccgattggtcgttgctttacgctgattggcgagtccggggaacgtacctttgctatcagtccaggccacatgaaccagctgcgggctgaaagcattccggaagatgtgattggccggacctccgcactggttctcaactcatatctggtgccttgccagccgggtcaggcaggacgccgggttctgctgatcgataatggtaaaaaaccagggcgcaaaatccttatgtctggcggtgggcgctgcaactttaccaacctttatgtcgaaccaggcgcttatctgagccagaatccgcatttttgtaagtctgcactcgcacgttttacccagtgggatttcattgatctggtcaataaacacggcatcgcctggcacgagaaaacgttagggcaactcttctgcgatgactccgcgcagcagattgtcgacatgctggtggatgagtgcgagaagggcaatgtgaccttcagattgcgtagcgaagtgctgagtgtggcgaaggatgaaacaggcttcacgcttgatctgaacggcatgactgtcggttgcgaaaagctggtcatcgcgactggtgggctgtcaatgccggggctgggcgcgtcgccgtttggttataagattgccgaacaatttggcctcaacgtgctgccgacccgcgcgggtctggtgccattcactctgcataaaccgttgctcgaagagttacaggtgctggcgggcgtggcggtgccttccgtgattaccgctgaaaacggcaccgttttccgtgagaacttactcttcacccaccgcggcttgtctggaccggcggtgttgcagatttcaagctactggccacccgggggatttgtcagctccatctgctccggatgtggactcgaaacttccgaattagcggggctgttccggtacaccgctctcgacggcaacggatgcaatatggcaggatccttcgccgaagatctcgtgaaatgcctgcagaatggcctgaattttagcgggattggtggtcgcacagacaacttggtgcataatcagcattactcagcaaaattaaccgtttcaccagacaaggtatacctagtccgccacggtgaaacgcagtggaacgccgagcgacgtattcagggccagtctgacagcccgctgaccgccaaaggtgagcaacaggcgatgcaggtggcaacccgtgccaaagagcttggcattacgcatatcatcagtagcgatttaggacgcacccggcgtacgcggaaatcatcgcccaggccatgcggctgtgacatcatctctgattctcgcctgcgtgaattaaacatgggtgtgctggaacaacagacattatcggaagttacccttccttggaaccccggacgaacgaacagaaatgggtccgcagcggtcatggaccgtgacgggcgtatcctgaggggtcatggagactcagcgacggtcatgggcctcaacgttatgggcgtccggcatgttcgtaaacgggaaagagtttggtcaggccgcatgacgttgactgaaatcgttgccaaaattgatactggcgcggaaaaacgtgcggcagaagagctgaacaagcgtgatgcttatgacgtattaatcgtcggttccggcccggcgggtgcagcggcagcaatttactccgcacgtaaaggcatccgtaccggtctgatgggcgaacgttttggtggtcagatcctcgataccgttgatatcgaaaactacatttctgtaccgaagactgaagggcagaagctggcaggcgcactgaaagttcacgttgatgaatacgacgttgatgtgatcgacagccagagcgccagcaaactgatcccagcagcagttgaaggtggtctgcatcagattgaaacagcttctggcgcggtactgaaagcacgcagcattatcgtggcgaccggtgcaaaatggcgcaacatgaacgttccgggcgaagatcagtatcgcaccaaaggcgtgacctactgcccgcactgcgacggcccgctgtttaaaggtaaacgcgtagcggttatcggcggcggtaactccggcgtggaagcggcaattgacctggcgggtatcgttgagcacgtaacgctgctggaatttgcgccagaaatgaaagccgaccacgttctgcggggacaaactgcgcaggctgaaaaacgtccaccttatttctga

SEQ ID NO: 143995 - DNA, 669 bp, Homo sapiens
tttttttttttttttttcttctggacattgagaacaatccaatttgaaggcctcaatgcccaaatctacactcttgttttattctatatccttggtttcttttttttttttgagatggagtctcattctgtcgcccagtagttagggctacctccagtaatcctatttgtccctttactgtttagtgcgtctcgcttgactagaagctccatgaaagcaagagaccctacctgcctccttcgccactagacccccagggcctgggtatgtggtgatcgctcagggcccaattttcttcctttcctcctcctccaagggtgggggaaagagcatcagaaggtctaggtggccccaggcccaaacaatgctcctttaaaaggaaactagattgttacaaaggtcagaggctgaaaagttatttccgccttttatccctctaaattcttcacttcctgaaaaaacaaacaaacaaaaaagccactgagggcccttggactaaatccaggcctgagttgctgggcagaggtcagtcttgtccagacatgggaaaaaaataactcgagtcagacaggtgggtcaccacagaactaatccagcctgcaaatggcctgtgcaatcttcagctctgtacagacaagcctccctctggggatgcctttaaaggtgatg

SEQ ID NO: 143996 - DNA, 1257 bp, Homo sapiens
atgaagtgtgaccccccagccaagggctgccagggcctctttcactatggactttgtgttctgccattcaggcacctgcggaactcgagtcatgcaggagcttttgtgatcgtgacggaagaagccattgccaagggtatccggaggattgtggctgtcacaggtgccgaggcccagaaggtgagcagaccagtggatcgcaaggcgttgggcgaagggttcgcacgccagaaccgccatgcctgggatcaccgccgcatcccgggccctgaagaatcgcagccgcccaagctgtacgcgtccgacgaggaggaggcgcccggcacccgcgacccaacgcggctacggcccgtgtacgcgcgcgccgggctgctgagccaggccaagggctcggcctacctggaggcgggaggcaccaaggtgctgtgtgccgtgtcgggcccgcgacaggccgagggcggcgagcgcggcggcggcccggccggagcaggcggcgaggccccggccgcgctgcgcggtcgcctgctctgcgacttccgccgcgcacccttcgcgggccgccggcgccgcgctcccccgggcggctgcgaggagcgtgagctggcgctggcgctgcaggaggcgctggagccggctgtgcgcctgggccgctacccgcgcgcgcagctcgaggtgtcggcgctgctgctggaggacggtggctcggccctggccgccgcgctcaccgccgccgcgctcgccctggccgacgcgggcgtggagatgtacgacctggtggtgggctgcggcctcagcctcgcgccggggcccgcgcccacctggctcctggaccccacgcggctcgaggaagagcgcgccgccgccggcctcaccgtggcgctcatgcctgtgctgaatcaggtggccgggctgctgggcagcggcgagggcggcctgacagagagctgggcggaggccgtacgcctgggcctcgagggctgccagcgcctctaccccgtgctgcagcagagcctgagaagacactcgccttgtcctcattgtgcctgctaccctcgactaacacaaggacctggcaaagaggaatattttgtgcttgtcaaggactttcctccactctctaccatcagcttggctaaaactcctgagatggagataagtgtgggctatgcaaatgggatccgggtgatgagcatgacgcacacaggagagccaggattcatgctctacatccccatagagaatcatcgagaaacgtaa

SEQ ID NO: 143997 - DNA, 926 bp, Homo sapiens
atgattgaggcagccaaggccgtctatacccaggattgccccctggcagcagcgaaaccatccagggcctacggcatgtgtttgatgagacctatcctgaccctgtgcgagtcgtctccattggggtcccggtgtccgagttgctggatgacccctctgggcctgctggctccctgacttctgttgagttctgtgggggaacgcacctgcggaactcgagtcatgcaggagcttttgtgatcgtgacggaagaagccattgccaagggtatccggaggattcgtggctgtcacaggtgccgaggcccagaaggccctcaaggaaagcagagagcttgaagaaatgtctctctgtcatggaagccaaagtgaaggctcagactgctccaaacaaggaatgtgcagagggaagatcgctgaccttggagaggccctggccactgcagtcatcccccagtggcagaaggatgaattgcgggagactctcaaatccctaaagaaggtcatggatgacttggaccgagccagcaaagccgatgtccagaaacgagtgttagagaagacgaagcagttcatcgacagcaaccccaaccagcctcttgtcatcctggagatggagagcggcgcctcagccaaggccctgaatgaagccttgaagctcttcaagatgcactcccctcagacttctgccatgctcttcacggtggacaatgaggctggcaagatcacgtgcctgtgtcaagtcccccagaatgcagccaatcggggcttaaaagccagcgagtgggtgcagcaggtgtcaggcttgatggacggtaaaggtggtggcaaggatgtgtctgcacaggccacaggcaagaacgttggctgcctgcaggaggcgctgcaactggccacttccttcggccagctgcgcctcggggatgt

SEQ ID NO: 143998 - DNA, 2316 bp, Homo sapiens; identical to SEQ ID NO: 123056

SEQ ID NO: 143999 - DNA, 2689 bp, Homo sapiens
gctgtcttttctggcgcccttgtggttaaccccggcgccgcgcgtcatcacgctttctcccgccaacattgaacttgcctttgccgccgggatcacgccggttggggtcagcagctattccgactatcctccacaagcgcaaaagattgagcaggtttccacctggcaggggatgaatctggaacgcattgtcgcgctgaaacccgatctggtgattgcctggcgtggagggcttatactagggtacgagcaaggtgtatcattaccgctgctgaaaaagatcattcccgatcttaaattcactgccgcttttgggcgtgggcgctacgtttgtcagcgtaatctgacggcgctcgccagtactgaacccacgcaacaggatctgctggcgtttcttgaagacgaactgacgccgaacaatcaggaagagcaaaaacgttgtgcgaagctgaagggcgatctcgatacttataaatgggatggtctgcgcgatcatactgatatcgctatagatgacgatctctggcgtcgtttaagtaccgacaaagccagctgcctcaaccgcaattgttactactatcgtgaatgcccgttttttgtcgctcgtcgggagattcaggaagcggaagtggtggtggcaaaccatgcgctggtgatggcggcgatggaaagcgaagcggtattgcctgacccgaaaaatttactgctggtgctggacgaaggccatcacctgccggatgtggcgcgggatgcgcttgagatgagcgccgaaatcaccgcgccgtggtatcggctacagctggacttgttcacgaaactggtcgctacatgcatggagcagtttcgcccgaagaccatcccaccgctggcgatacctgaacgtttgaatgcgcattgtgaagagttgtatgagcttatcgcctcgttatccaacaatagaaacctgcaggccgctatctcgcaagaggaggtgttggtcggctgggcgttcgtctggccgcatttagcctggcagatagcgagcagggccgtcgatccgcttagccgggaaatttacaacttaaaaaccgatgcagtattagcgggaatgtgggtaggcgtaatgggcgtaaacgtgctgccttccaccgcgatgttgatgattatgtgtctgaatttgatgggggcaggcggcccccgtctgtttgtcgcgggtctggtgttgatggtggtttcctgccttgtcaccctcgagctgacgggcattaccgtgtcgttcaatagtgcgccgctggaatggtggctctcccttcccattattgtcatttatcctctgctgtttggctgggtcagctaccagacggcaaccaaactggcggaacataaacgcaggttgcaggtcatgagtacccgcgacggcatgacgggcgtgtataaccgacgtcattgggaaactatgttacgcaatgaatttgataactgtcggcggcataatcgcgatgcaacgttactgattatcgatatcgaccatttcaagagcatcaacgatacctggggccatgatgtgggcgatgaagcgattgtggcgcttacccgacagttacaaattaccctgcgcggtagcgatgtgattggtcggtttggcggcgatgagtttgcagtaatcatgtccggtacgccagctgagagcgccattaccgccatgttacgggtgcatgaagggctaaatacattacgtttgccgaatacgccacaggtaactttacggattagtgtgggggttgcgccgctgaacccacaaatgagtcactatcgtgagtggttgaaatcggcagatttggcgctttacaaagcaaagaaagccagacggtcatgctcggtacctatgacaggcgaagaactgcctgccacgctcacgcccggacaacagggattttatacttttgacgatttcaccatgtcggtaacgccggaactgacgctggcgaatatccgtgcgctgtttaatccggcgaattacgacatcattctccgcacgctgactatggctgtggcagtcactatcgccagcgccattctggcttttccaatggcgtggtatatggcgcgctataccagcgggaaaatgaaagcgtttttttatattgcggtaatgttgccgatgtgggcgagctacattgttaaagcctatgcctggacgttattgctggcaaaagatggcgtggctcagtggtttttacaacatcttgggctggaaccactgctgactgcgttccttacattacctgcggtgggcggaaatacgctgtcaacttccgggctggggcgctttctggtgtttctctatatctggttgccgttcatgatcctgcccgttcaggcggcgcttgagcgtttgccgccgtcattgttgcaggcgtcggctgatctcggcgcacgtccacgacaaacctttcgctatgtggtgctgccgctggcaatcccgggtattgccgctggctctatctttaccttctcactcacactgggcgattttatcgtcccgcagctggttggtcctccaggatattttatcggcaatatggtttattcccagcagggggcgattggcaatatgccgatggcggcggcattcaccctggtgccgattattctcatcgcactgtacctggcgttcgtgaaacgtctgggagcgttcgatgcactctga

SEQ ID NO: 144000 - DNA, 939 bp, Homo sapiens
atgacgatcgatggtattaactcaaacgatatttacatgcttggttatgtatcaaactctttaaccggcccttacaagccgctgaacaaaacagggcttgtgctgcaaatgggtcttgatccaaacgatgtgacattcacttactctcacttcgcagtgccgcaagccaaaggcaacaatgtggttatcacaagctacatgacaaacagaggcttcttcgaggataaaaaggcaacatttgcgccaagcttcttaatgaacatcaaaggcaataaaacatccgttgtcaaaaacagcatcctggagcaaggacagctgacatggctccaagtagcgaagcgagcaggactgggcggcggccaaagcggtcggacagtgctccgagaacgggtgcgcatagaaattgcatcaacgcatatagcgctagcagcacgccatagtgactggcgatgctgtcggaatggacgatatcccgggtgtgacaatctaaaaacttgtcacacttcacatggatctgtcatggcggaaacagcggttatcaatcacaagaaacgtaaaaatagcccgcgaatcgtccagtcaaacgacctcactgaggcggcatatagtctctcccgggatcaaaaacgtatgctgtatctgttcgttgaccagatcagaaaatctgatggcaccctacaggaacatgacggtatctgcgagatccatgttgctaaatatgctgaaatattcggattgacctctgcggaagccagtaaggatattcggcaggcaccccagagtttcgcggggaaggaagtggttttttatcgccctgaagaggatgccgggggtatcctctaccccaaaaccgggattcatgccccttacggcagaggaaaccagtactctaaaattttcccagctagggtgtatttgaaaaagatgatgcccaattag

SEQ ID NO: 144001 - DNA, 969 bp, Homo sapiens
atgcacttgtttttccccctgcccctgcggatctggttactgacgggcctgaacgccggaggtttctcagcagccacagaagaaactcattgggcgctgagctcctgggtcttgagctacagggtttttaccttcactgcttcccagctggaattcaccaagtgctgccggaagggcccaaaacctgaaaccaaacatgcccagtctagaggatcccccgaaacagcggttatcaatcacaagaaacgtaaaaatagcccgcgaatcgtccagtcaaacgacctcactgaggcggcatatagtctctcccgggatcaaaaacgtatgctgtatctgttcgttgaccagatcagaaaatctgatggcaccctacaggaacatgacggtatctgcgagatccatgttgctaaatatgctgaaatattcggattgacctctgcggaagccagtaaggatatacggcaggcattgaagagtttcgcggggaaggaagtggttttttatcgccctgaagaggatgccggcgatgaaaaaggctatgaatcttttccttggtttatcaaacgtgcgcacagtccatccagagggctttacagtgtacatatcaacccatatctcattcccttctttatcgggttacagaaccggtttacgcagtttcggcttagtgaaacaaaagaaatcaccaatccgtatgccatgcgtttatacgaatccctgtgtcagtatcgtaagccggatggctcaggcatcgtctctctgaaaatcgactggatcatagagcgttaccagctgcctcaaagttaccagcgtatgcctgacttccgccgccgcttcctgcaggtctgtgttaatgagatcaacagcagaactccaatgcgcctctcatacattgagaaaaagaaaggccgccagacgactcatatcgtattttccttccgcgatatcacttccatgacgacgaactag

SEQ ID NO: 144002 - DNA, 678 bp, Homo sapiens; identical to SEQ ID NO: 131381

SEQ ID NO: 144003 - DNA, 795 bp, Homo sapiens
atggcggaaacagcggttatcaatcacaagaaacgtaaaaatagcccgcgaatcgtccagtcaaacgacctcactgaggcggcatatagtctctcccgggatcaaaaacgtatgctgtatctgttcgttgaccagatcagaaaatctgatggcaccctacaggaacatgacggtatctgcgagatccatgttgctaaatatgctcccatattcggattgacctctgcggaagccagtaaggatatacggcaggcattgaagagtttcgcggggaaggaagtggttttttatcgccctgaagaggatgccggcgatgaaaaaggctatgaatcttttccttggtttatcaaaccgcgcctaaccttgggtatcggcccgattaatgtcgtatgtgctgctgatgtgctgattgttcccacgcctgttgagttgtttgactacccctccgcactgcagtttttcgatatgcttcgtgatctgctcaagaacgttgatcttaaagggttcgagcctgatgtacgtattttgcttaccaaatacagcaatagtaatggctctcagtccccgtggatggaggagcaaattcgggatgcctggggaagcatggttctaaaaaatgttgtacgtgaaacggatgaagttggtaaaggtcagatccggatgagaactgtttttgaacaggccattgatcaacgctcttcaactggtgcctggagaaatgctctttctatttgggaacctgtctgcaatgaaattttcgatcgtctgattaaaccacgctgggagattagataa

SEQ ID NO: 144004 - DNA, 929 bp, Homo sapiens; identical to SEQ ID NO: 129887

SEQ ID NO: 144005 - DNA, 969 bp, Homo sapiens
  misc_feature (1)...(969): n = a,t,c or g
tgtgacaatctaaaaacttgtcacacttcacatggatctgtcatggcggaaacagcggttatcaatcacaagaaacgtaaaaatagcccgcgaatcgtccagtcaaacgacctcactgaggcggcatatagtctctcccgggatcaaaaacgtatgctgtatctgttcgttgaccagatcagaaaatctgatggcaccctacaggaacatgacggtatctgcgagatccatgttgctaaatatgctgaaatattcggattgacctctgcggaagccagtaaggatatacggcaggcattgaagagtttcgcggngaaggaaagtgttttttatcgccctgaagaggatgccggcgatgaaaaaagctatgaatcttttccttggtttatcaaacgtgcgcacagtccatccagagggctttacagtgtacatatcaacccatatctcattcccttctttatcgggttacaagacccggttacgcagtttcggcttagtgaaacaaaagaaatcaccaatcctgttggaagttctggccagggaaatcaggcaggagaagaaataaagggcattcaatttggaaaagaggaagtcaaattgtccctgtttgcagatgacatgattgtatatctagaaaaccccattgtctcagcccaaaatctccttaagctgataagcaacttcagcaaagtctcaggatacaaaatcaatgtgcaaaaatcacaagcattcttatacaccaataacagacaaacagagagccaaatcatgagtgaactcccattcacaattgcttcaaagagaataaaatacctaggaatccaacttacaagggatgtgaaggacctcttcaaggagaactacaaaccactgctcaatgagataaaagaggatacaaacaaatggaagaacattccatgctcatgggtaggaagaatcaatattgtgaaaatggccatactgcccaag

SEQ ID NO: 144006 - DNA, 423 bp, Homo sapiens
atggcggaaacagcggttatcaatcacaagaaacgtaaaaatagcccgcgaatcgtccagtcaaacgacctcactgaggcggcatatagtctctcccgggatcaaaaacgtatgctgtatctgttcgttgaccagatcagaaaatctgatggcaccctacaggaacatgacggtatctgcgagatccatgttgctaaatatgctgaaatattcggattgacctctgcggaagccagtaaggatatacggcaggcattgaagagtttcgcggggaaggaagtggttttttatcgccctgaagaggatgccggcgatgaaaaaggctatgaatcttttccttggtttatcaaactcccgcaagccaaaggcaacaaagttggttatcccaagctacatgccaaccagaggctctttcgggaataa

SEQ ID NO: 144007 - DNA, 552 bp, Homo sapiens
atggcggaaacagcggttatcaatcacaagaaacgtaaaaatagcccgcgaatcgtccagtcaaacgacctcactgaggcggcatatagtctctcccgggatcaaaaacgtatgctgtatctgttcgttgaccagatcagaaaatctgatggcaccctacaggaacatgacggtatctgcgagatccatgttgctaaatatgctgaaatattcggattgacctctgcggaagccagtaaggatatacggcaggcattgaagagtttcgcggggaaggaagtggttttttatcgccctgaagaggatgccggcgatgaaaaaggctatgaatcttttccttggtttatcaaactcgggaaacctgtcgtgccagctgcattaatgaatcggccaacgcgcggggagaggcggtttgcgtattgggcgccagggtggtttttcttttcaccagtgagacgggcaacagctgattgcccttcaccgcctggccctgagagagttgcagcaagcggtccacgctggtttgccccagcaggcgaaaatcctgtttga

SEQ ID NO: 144008 - DNA, 453 bp, Homo sapiens
atggcggaaacagcggttatcaatcacaagaaacgtaaaaatagcccgcgaatcgtccagtcaaacgacctcactgaggcggcatatagtctctcccgggatcaaaaacgtatgctgtatctgttcgttgaccagatcagaaaatctgatggcaccctacaggaacatgacggtatctgcgagatccatgttgctaaatatgctgaaatattcggattgacctctgcggaagccagtaaggatatacggcaggcattgaagagtttcgcggggaaggaagtggttttttatcgccctgaagaggatgccggcgatgaaaaaggctatgaatcttttccttggtttatcaaacagttgcagcaagcggtccacgctggtttgccccagcaggcgaaaatcctgtttgatggtggttccgaaatcggcaaaatcccttataaatcaaaagaatag

SEQ ID NO: 144009 - DNA, 609 bp, Homo sapiens
atggcggaaacagcggttatcaatcacaagaaacgtaaaaatagcccgcgaatcgtccagtcaaacgacctcactgaggcggcatatagtctctcccgggatcaaaaacgtatgctgtatctgttcgttgaccagatcagaaaatctgatggcaccctacaggaacatgacggtatctgcgagatccatgttgctaaatatgctgaaatattcggattgacctctgcggaagccagtaaggatatacggcaggcattgaagagtttcgcggggaaggaagtggttttttatcgccctgaagaggatgccggcgatgaaaaaggctatgaatcttttccttggtttatcaaacgtgcgcacagtccatccagagggctttacagtgtacatatcaacccatatctcattcccttctttatcgggttacagaaccggtttacgcagtttcggcttagtgaaacaaaagaaatcaccaatccgtctgggttaatgagatcacagcagaactccatgcgcctctcatacttggagaaaaaaaaggcccgcgaagactcatatcggatttccttccggataaacttacatgagaaagaccctcgagggatatga

SEQ ID NO: 144010 - DNA, 726 bp, Homo sapiens
atggctcgcggtaatgccattactttgcctgtatgtggtcgggatgtgaagtttactcttgaagtgctccggggtgatagtgttgagaagacctctcgggtatggtcaggtaatgaacgtgaccaggagctgcttactgaggacgcactggatgatctcatcccttcttttctactgactggtcaacagacaccggcgttcggtcgaagagtatctggtgtcatagaatgtgacaatctaaaaacttgtcacacttcacatggatctgtcatggcggaaacagcggttatcaatcacaagaaacgtaaaaatagcccgcgaatcgtccagtcaaacgacctcactgaggcggcatatagtctctcccgggatcaaaaacgtatgctgtatctgttcgttgaccagatcagaaaatctgatggcaccctacaggaacatgacggtatctgcgagatccatgttgctaaatatgctgaaatattcggattgacctctgcggaagccagtaaggatatacggcaggcattgaagagtttcgcggggaaggaagtggttttttatcgccctgaagaggatgccggcgatgaaaaaggctatgaatcttttcccttggtttatcaaacgtgcgcacagtccatccagagggctttacagtgtacatatcaacccatatctcattcccttctttatcgggttacagaaccggtttacgcagtttcggcttag

SEQ ID NO: 144011 - DNA, 774 bp, Homo sapiens
atggcggaaacagcggttatcaatcacaagaaacgtaaaaatagcccgcgaatcgtccagtcaaacgacctcactgaggcggcatatagtctctcccgggatcaaaaacgtatgctgtatctgttcgttgaccagatcagaaaatctgatggcaccctacaggaacatgacggtatctgcgagatccatgttgctaaatatgctgaaatattcggattgacctctgcggaagccagtaaggatatacggcaggcattgaagagtttcgcggggaaggaagtggttttttatcgccctgaagaggatgccggcgatgaaaaaggctatgaatcttttccttggtttatcaaacgtgcgcacagtccatccagagggctttacagtgtacatatcaacccatatctcattcccttctttatcggggtacagaaccggtttacgcagtttcggcttagtgaaacaaaagaaatcaccaatccgtatgccatgcggttatacgaatccctgtgcataggcttggttatgccggtactgccgggcctcttgcgggatatcgtccattccgacagcatcgccagtcactatggcgtgctgctagcgctatatgcgttgatgcaatttctatgcgcacccgttctcggagcactgtccgaccgctttggccgccgcccagtcctgctcgcttcgctacttggagccactatcgactacgcgatcatggcgaccacacccgtcctgtggatctacccactagtcaattcaccatcttgttga

SEQ ID NO: 144012 - DNA, 1494 bp, Homo sapiens; identical to SEQ ID NO: 127562

SEQ ID NO: 144013 - DNA, 1932 bp, Homo sapiens; identical to SEQ ID NO: 119300
  misc_feature (1)...(1932): n = a,t,c or g

SEQ ID NO: 144014 - DNA, 1734 bp, Homo sapiens; identical to SEQ ID NO: 119302

SEQ ID NO: 144015 - DNA, 3345 bp, Homo sapiens; identical to SEQ ID NO: 119304
  misc_feature (1)...(3345): n = a,t,c or g

SEQ ID NO: 144016 - DNA, 1962 bp, Homo sapiens; identical to SEQ ID NO: 119305

SEQ ID NO: 144017 - DNA, 1302 bp, Homo sapiens; identical to SEQ ID NO: 119308

SEQ ID NO: 144018 - DNA, 1560 bp, Homo sapiens; identical to SEQ ID NO: 119311

SEQ ID NO: 144019 - DNA, 2262 bp, Homo sapiens; identical to SEQ ID NO: 119030

SEQ ID NO: 144020 - DNA, 1962 bp, Homo sapiens; identical to SEQ ID NO: 118114

SEQ ID NO: 144021 - DNA, 2280 bp, Homo sapiens; identical to SEQ ID NO: 140054

SEQ ID NO: 144022 - DNA, 2421 bp, Homo sapiens; identical to SEQ ID NO: 119313

SEQ ID NO: 144023 - DNA, 2031 bp, Homo sapiens; identical to SEQ ID NO: 119315

SEQ ID NO: 144024 - DNA, 1653 bp, Homo sapiens; identical to SEQ ID NO: 119316

SEQ ID NO: 144025 - DNA, 1173 bp, Homo sapiens
atggcggaaacagcggttatcaatcacaagaaacgtagaggggggccgcgaatcgaacagtcaaacgacctcactgaggcggcatatagtctctcccgggatcaaaaacgtatgctgtatctgttcgttgaccagatcagaaaatctgatggcaccctacaggaacatgacggtatctgcgagatccatgttgctaaatgtgctgaaatattcggattgacctctgcggaagccagtaaggatatacggcaggcattgaagagtttcgcggggaaggaagtggttttttatcgccctgaagaggatgccggcgatgaaaaaggctatgaatcttttccttggtttatcaaacgtgcgcacagtccatccagagggctttacagtgtacatatcaacccatatctcattcccttctttatcgggttacagaaccggtttacgcagtttcggcttagtgaaacaaaagaaatcaccaatccgtatgccatgcgtttatacgaatccctgtgtcagtatcgtaagccggatggctcaggcatcgtctctctgaaaatcgactggatcatagagcgttaccagctgcctcaaagttaccagcgtatgcctgacttccgccgccgcttcctgcaggtctgtgttaatgagatcaacagcagaactccaatgcgcctctcatacattgagaaaaagaaaggccgccagacgactcatatctttttcgatatgcttcgtgatctgctcaagaacgttgatcttaaagggttcgagcctgatgtacgtattttgcttaccaaatacagcaatagtaatggctctcagtccccgtggatggaggagcaaattcgggatgcctggggaagcatggttctaaaaaatgttgtacgtgaaacggatgaagttggtaaagctgccccgatggtggattcgttaattgcgcgcgtaggagtaatggctcgcggtaatgccattactttgcctgtatgtggtcgggatgtgaagtttactcttgaagtgctccggggtgatagtgttgagaagacctctcgggtatggtcaggtaatgaacgtgaccaggagctgcttactgaggacgcactggatgatctcatcccttcttttctactgactggtcaacagacaccggcgttcggtcgaagatatctggtgtcatag

SEQ ID NO: 144026 - DNA, 1449 bp, Homo sapiens; identical to SEQ ID NO: 119317

SEQ ID NO: 144027 - DNA, 1194 bp, Homo sapiens
atggcggaaacagcggttatcaatcacaagaaacgtaaaaatagcccgcgaatcgtccagtcaaacgacctcactgaggcggcatatagtctctcccgggatcaaaaacgtatgctgtatctgttcgctgaccacatcagaaaatctgatggcaccctacacgaacatgacggtatctgcgagatccatgttgctaaatatgctgaaatattcggattgacctctgcggaagccagtaaggatatacggcaggcattgaagagtttcgcggggaaagaagtggttttttatcgccctgaagaggatgccggcgatgaaaaaggctatgaatcttttccttggtttatcaaacaataccactgtggccagctggatctcttgcttgcttacgacgtacgcacaaccatgcaaagtatcctcacagttgtaccaactgagtgtggaagaatcagggctttgtccactaactccaatgtgctgtttaatgatgacagcccggaagcgaggaaaataacccggcgctggagaataggtgaagcagcggatttagttggggtttcttctcatgctatcatagatgccgagaaagcagggcgactaccgcacccggatatggaaattcgaggacgggttgagcaacgtgttggttatacaattgaacaaattaatcatatgcgtgatgtgtttggtacgcgattgcgacgtgctgaagacgtatttccaccggtgatcggggttgctgcccataaaggtggcgtttacaaaacctcagtttctgttcatcttgctcatgatctggctctgaaggggctacgtgttttgctcgtggaagatccccagcattttacccgctgtatcaacaccgccaaattgcctaaatcagttgttgctcttttttctcaccccggtgaactatctgcccggtcaggtgatgcacttcaaaaagcctttacagatgaagaggagttacttaagcagcaggcatctaaccttcatgagcagaaaaaagctggggtgatatttgaagctgaagaagatatcactcttttaacttctgtgcttaaaacgtcatctgcatcaagaactagtttaagctcacgacatcagtttgctcctggagcgacagtattgtgtaagggcgataaaatggtgcttaacctggacaggtctcgtgttccaactgagtgtgtatag

SEQ ID NO: 144028 - DNA, 1896 bp, Homo sapiens; identical to SEQ ID NO: 119319
  misc_feature (1)...(1896): n = a,t,c or g

SEQ ID NO: 144029 - DNA, 1827 bp, Homo sapiens; identical to SEQ ID NO: 119323

SEQ ID NO: 144030 - DNA, 2823 bp, Homo sapiens; identical to SEQ ID NO: 119325
  misc_feature (1)...(2823): n = a,t,c or g

SEQ ID NO: 144031 - DNA, 1332 bp, Homo sapiens; identical to SEQ ID NO: 119326
  misc_feature (1)...(1332): n = a,t,c or g

SEQ ID NO: 144032 - DNA, 339 bp, Homo sapiens
  misc_feature (1)...(339): n = a,t,c or g
gaggatctaaaaactataaaaaaaataattataaaaatatccccgtggataagtggataaccccaagggaagttttttcaggcatcgtgtgtaagcagaatatataagtgctgttccctggtnnnnnnnnnnnnnnnnnnnnnnnnnnnnnnnnnnnnnnnnnnnnnnnnnnnnnnnnngctgtaaaagggcagaccacatcatggttctgtgttcaatagggtgttctgtccactgctgacataatccgttccgcttcaaggtaacaccgcacgaaggtttctattgttcgtgaaggcatattcaaatcgttttcgttaccgcctgcaggcctcatct

SEQ ID NO: 144033 - DNA, 647 bp, Homo sapiens
  misc_feature (1)...(647): n = a,t,c or g
tgtctgaccnnnnnnnnnnnnnnnnnnnnnnnnnnnnnnnnnnnttaatctcaggagcctgtgtagcgtttataggaagtagtgttctgtcatgatgcctggaagcggtaacgaaaacgatttgaatatgccttcaggaacaatagaaatcttcgtgcggtgttacgttgaagtggagcggattatgtcagcaatggacagaacaacctaatgaacacagaaccatgatgtggtctgtccttttacagcnnnnnnnnnnnnnnnnnnnnnnnnnnnnnnnnnnnnnnnnnnnnnnnnnnnnnnnnnaccagggaacagcacttatatattctgcttacacacgatgcctgaaaaaacttcccttggggttatccacttatccacggggatatttttataaatattttttttataggttttaaaaccttcttttttagagcgccttgtaggcctttatccatgctgggtttagagaaggtgttgtgacaaattgcctttcagtgtgacaaatcaccctcaaatgacagtcctgtctgtgacaaattgcccttaaccctgtgacaaatngccctcagaagaggcatgtttttcacacagatattcctgcttattgactcttttttatttagngngacaatctacaaact

SEQ ID NO: 144034 - DNA, 651 bp, Homo sapiens
atggcggaaacagcggttatcaatcacaagaaacgtaaaaatagcccgcgaatcgtccagtcaaacgacctcactgaggcggcatatagtctctcccgggatcaaaaacgtatgctgtatctgttcgttgaccagatcagaaaatctgatggcaccctacaggaacatgacggtatctgcgagatccatgttgctaaatatgctgaaatattcggattgacctctgcggaagccagtaaggatatacggcaggcattgaagagtttcgcggggaaggaagtggttttttatcgccctgaagaggatgccggcgatgaaaaggctatgaatcttttccttggtttatcaaacgtatttattcgcgataagctcatggagcggcgtaaccgtcgcacaggaaggacagagaaagcgcggatctgggaagtgacggacagaacggtcaggacctggattggggaggcgggtgccgccgctgctgctgacggtgtgacgttctctggtgcggtcacaccaaatacgttccgccgattctatgcaaggcacatgctgggatgccgattaagaagtgattttcatctgcttcacattctcaaggatgaaggtactcaagtcaaccattttgtccaggagcctctgaatggatcttga

SEQ ID NO: 144035 - DNA, 891 bp, Homo sapiens
atggcggaaacagcggttatcaatcacaagaaacgtaaaaatagcccgcgaatcgtccagtcaaacgacctcactgaggcggcatatagtctctcccgggatcaaaaacgtatgctgtatctgttcgttgaccagatcagaaaatctgatggcaccctacaggaacatgacggtatctgcgagatccatgttgctaaatatgctgaaatattcggattgacctctgcggaagccagtaaggatatacggcaggcattgaagagtttcgcggggaaggaagtggttttttatcgccctgaaaaggatgccggcgatgaaaaaggctatgaatcttttcccttggtttatcaaacattccacaaacatcacatcactctctttgtggtttttctcatcctgtacacattaactgtggctggcaatgccatcatcatgaccatcatctgcattgaccgtcacctccacactcccatgtacttcttcctgagcatgctggctagctcaaagacagtgtacacactgttcatcattccacagatgctctccagcttcgtaacccagacccagccaatctccctagccggttgtaccacccaaacgttcttctttgttaccttggccatcaacaattgcttcttgctcacagtgatgggctatgaccactatatggccatctgcaatcccttgagatacagggtcattacgagcaagaagtcatatacctttgacctccctacttgtctgagcaatggcttccacgaggctagtgaggacagaaacccaaacagtagcttgtccatgttcttagcttgggctcttacagcagcagcagtgaccgggatgagggtatcagatagcacaatggttgtgcccacccagcttctaacttag

SEQ ID NO: 144036 - DNA, 814 bp, Homo sapiens; identical to SEQ ID NO: 123052

SEQ ID NO: 144037 - DNA, 1164 bp, Homo sapiens
  misc_feature (1)...(1164): n = a,t,c or g
atggatctgtcatggcggaaacagcggttatcaatgcacaagaaacgtaaaaatagcccgcgaatcgtccagtcaaacgacctcactgaggcggcatatagtctctcccgggatcaaaaacgtatgctgtatctgttcgttgaccagatcagaaaatctgatggcaccctacaggaacatgacggtatctgcgagatccatgttgctaaatatgctgaaatattcggattgacctctgcggaagccagtaaggatatacggcaggcattgaagagtttcgcggggaaggaagtggttttttatcgccctgaagaggatgccggcgatgaaaaaggctatgaatcttttccttggtttatcaaacgtgcgcacagtccatccagagggctttacagtgtacatatcaacccatatctcattcccttctttatcgggttacagaaccggtttacgcagtttcggcttagtgaaacaaaagaaatcaccaatccgtatgccatgcgtttatacgaatccctgtgtcagtatcggtacagcttccctcctgactacttccatgggctggcattgaatgtctgtggcttttccaggtacacggttcaagatgttggtggatctattattcttgggtctggaggacagtggctctcttctcacagctccagcaggcagtgccccanagatccccttcctcatgactatgatgtcatagttattgacagcgcgcctaacctgggtatcggcacgattaatgtcgtatgtgctgctgatgtgctgattgttcccacgcctgctgagttgtttgactacacctccgcactgcagtttttcgatatgcttcgtgatctgctcaagaacgttgatcttaaagggttcgagcctgatgtacgtattttgcttaccaaatacagcaatagtaatggctctcagtccccgtggatggaggagcaaattcgggatgcctggggaagcatggttctaaaaaatgttgtacgtgaaacggatgaagttggtaaaggtcagatccggatgagaactgtttttgaacaggccattgatcaacgctcttcaactggtgcctggagaaatgctctttctatttgggaacctgtctgcaatgaaattttcgatcgtctgattaaaccacgctgggagattagataa

SEQ ID NO: 144038 - DNA, 660 bp, Homo sapiens
gaaacctgacctacaacaactcgatagccattgtgacaatctaaaaacttgtcacacttcacatggatctgtcatggcggaaacagcggttatcaatcacaagaaacgtaaaaatagcccgcgaatcgtccagtcaaacgacctcactgaggcggcatatagtctctcccgggatcaaaaacgtatgctgtatctgttcgttgaccagatcagaaaatctgatggcaccctacaggaacatgacggtatctgcgagatccatgttgctaaatatgctgaaatattcggattgacctctgcggaagccagtatggatatacggcaggcattgaagagtttcgcggggaaggaagtggttttttatcgccctgaagaagatgccggcgatgaaaaaagctatgaatcttttccttggtttatcaaaccttgtttttcttttaacagtcaggcccctcttctgcagggttgctgcggtttgctggggatccactccagagcctattcacctgggtcccttccacccctggaggtgttaccagtgtatgctgcagaacagcaaagatcggttgcctgctcgttcctctgggatgtctatctcatgaggagcactgacctgatgacagctggaatgctcctgtataaggtgtctggtgacccctg

SEQ ID NO: 144039 - DNA, 345 bp, Homo sapiens
aattatcctgagaataaatgccttggcctttatatggaaatgtggaactgagtggatatgctgtttttgtctgttaaacagagaagctggctgttatccactgagaagcgaacgaaacagtcgggaaaatctcccattatcgtagagatccaaaacaagcctggagcctccaaactgaatgggacaggggagaaacccacagaccagaagaacctatggctgtcagttccggatggttaagtgacatgggattgaaatgaaatgtgaagagttaatactataacttatttcttacttgtgaaattatagagttaggctacaagtttttggaggtttttgatatct

SEQ ID NO: 144040 - DNA, 643 bp, Homo sapiens
atggcggaaacagcggttatcaatcacaagaaacgtaaaaatagcccgcgaatcgtccagtcaaacgacctcactgaggcggcatatagtctctcccgggatcaaaaacgtatgctgtatctgttcgttgaccagatcagaaaatctgatggcaccctacaggaacatgacggtatctgcgagatccatgttgctaaatatgctgaaatattcggattgacctctgcggaagccagtaaggatatacggcaggcattgaagagtttcgcggggaaggaagtggttttttatcgccctgaagaggatgccggcgatgaaaaaggctatgaatcttttccttggtttatcaaacggccccgatgtagtgcttcacggcaccccgaccccaaaaaacttgacggagttatggttcccggagtggaccatcgccgtgacagtcggtgctccgccataggacgacatagagcgcgttcgccaatagcggactctagccccaaaaggaaccgacactcaagccgcgaatgtaggatgcagcgaaagacaggatcgcattatcatttttggcagaatagtactccatgtcgagtaagtacgacattttcgtttgccgttcgtactgatgatcggcacttaggctgcacag

SEQ ID NO: 144041 - DNA, 1075 bp, Homo sapiens
agatactggaaacaatgagtggaagcagcaggagggactcagtcacaacaattggcttggtcttggatgcctctttggtcctgagacacccattttctacccagcaacactgggtcatacaagcagtatttattatgaaagaaaaaaggaagataagaatggcatgaaggaagagcatgatacaagtgtcgcaatgttctttaccttattcaatttccaaatttctgttgagaacattagaaaaggccccatggtggtaggagagtcaattgctcagagttacctaaatgttgtacaagaaatattcaggtccagaaaccaccagcttctccaggacttaacaagggacttgtgtgacaatctaaaaacttgtcacacttcacatggatctgtcatggcggaaacagcggttatcaatcacaagaaacgtaaaaatagcccgcgaatcgtccagtcaaacgacctcactgaggcggcatatagtctctcccgggatcaaaaacgtatgctgtatctgttcgttgaccagatcagaaaatctgatggcaccctacaggaacatgacggtatctgcgagatccatgttgctaaatatgctgaaatattcggattgacctctgcggaagccagtaaggatatacggcaggcattgaagagtttcgcggggaaggaagtggttttttatcgccctgaagaggatgccggcgatgaaaaaggctatgaatcttttccttggtttatcaaacaacggagtaacctcggtgtgcggttgtatgcctgctgtggattgctgctgtgtcctgcttatccacaacattttgcgcacggttatgtggacaaaatacctggttacccaggccgtgccggcacgttaaccgggctgcatccgatgcaagtgtgtcgctgtcgacgtcaggcaccgtgtatgaaatctaacaatgcgctcatcgtcatcctcggcaccgtcaccctggatgctgtaggcataggcttggttatgccggtactgccgggcctcttgcgggatatcgtccatttccgacagcatcgccagtcactatggcgtgcctgttag

SEQ ID NO: 144042 - DNA, 1170 bp, Homo sapiens; identical to SEQ ID NO: 119321
  misc_feature (1)...(1170): n = a,t,c or g

SEQ ID NO: 144043 - DNA, 1695 bp, Homo sapiens
atggaatacgcgctccgcccacccagagagaaaaatgggggccacgcgggcagcatcccccctcacacgccccccaagccaaagcttcagccaggccggcaagcaccgcggccggtagtcccaagccccccggcagggcgaggcaggcacaaccccccgaaccccgcaaggggcaagttccaattccgcacaggcgagcgaaaggagcggacgaaaagcggagagccggcgaaacggaaaaacacgggggagagggggccaacaccggacggggaaccccccaaaaacgcgcaagaagaaacaaggcccgcgaggccaggcgggggggcagccggccccggaaggatctgtcaggcggaaacagcggttatcaatcacaagaaacgtaaaaatagcccgcgaatcgtccagtcaaacgacctcactgaggcggcatatagtctctcccgggatcaaaaacgtatgctgtatctgttcgttgcccagatcagaaaatctgatggcaccctacaggaacatgacggtatctgcgagatccatgttgctaaatatgctgaaatattcggattgacctctgcggaagccagtaaggatatacggcaggcattgaagagtttcgcggggaaggaagtggttttttatcgccctgaagaggatgccggcgatgaaaaaggctatgaatcttttccttggtttatcaaacgtgcgcacagtccatccagagggctttacagtgtacatatcaacccatatctcattcccttctttatcgggttacagaaccggtttacgcagtttcggcttagtgaaacaaaagaaatcaccaatccgtatgccatgcgtttatacgaatccctgtgtcagtatcgtaagccggatggctcaggcatcgtctctctgaaaatcgactggatcatagagcgttaccagctgcctcaaagttaccagcgtatgcctgacttccgccgccgcttcctgcagcgcttggtcttcttggcagcatttgttgtgtatttggaaacagaaacactagtgactcgagaagcagttacagaaattcttggcaaaattgccgatgggagtcgccgtcgtaaagctgctgcacttaccgaaagtgattatcgtgttctggttggcgagctggatgatgagcagatggctgcattatccagattgggtaacgattatcgcccaacaagtgcttatgaacgtggtcagcgttatgcaagccgattgcagaatgaatttgctggaaatatttctgcgctggctgatgcggaaaatatttcacgtaagattattacccgctgtatcaacaccgccaaattgcctaaatcagttgttgctcttttttctcaccccggtgaactatctgcccggtcaggtgatgcacttcaaaaagcctttacagataaagaggaattacttaagcagcaggcatctaaccttcatgagcagaaaaaagctggggtgatatttgaagctgaagaagttatcactcttttaacttctgtgcttaaaacgtcatctgcatcaagaactagtttaagctcacgacatcagtttgctcctggagcgacagtattgtataagggcgataaaatggtgcttaacctggacaggtctcgtgttccaactgagtgtatagagaaaattgaggccattcttaaggaacttgaaaagccagcaccctga

SEQ ID NO: 144044 - DNA, 1791 bp, Homo sapiens; identical to SEQ ID NO: 119318

SEQ ID NO: 144045 - DNA, 963 bp, Homo sapiens
atgaaactcatggaaacacttaaccagtgcataaacgctggtcatgaaatgacgaaggctatcgccattgcacagtttaatgatgacagcccggaagcgaggaaaataacccggcgctggagaataggtgaagcagcggatttagttggggtttcttctcaggctatcagagatgccgagaaagcagggcgactaccgcacccgtgtgacaatctaaaagcttggcacacttcacatggatctgtcatggcggaaacagcggttatcaatcacaagaaacgtaaaaatagcccgcgaatcgtccagtcaaacgacctcactgaggcggcatatagtctctcccgggatcaaaaacgtatgctgtatctgttcgttgaccagatcagaaaatctgatggcaccctacaggaacatgacggtatctgcgagatccatgttgctaaatatgctgaaatattcggattgacctctgcggaagccagtaaggatatacggcaggcattgaagagtttcgcggggaaggaagtggttttttatcgccctgaagaggatgccggcgatgaaaaaggctatgaatcttttccttggtttatcaaacgtgcgcacagtccatccagagggctttacagtgtacatatcaacccatatctcattcccttctttatcgggttacagaaccggtttacgcagtttcggcttagtgaaacaaaagaaatcaccaatccgtatgccatgcgtttatacgaatccctgtgtcagtatctcgggaaacctgtcgtgccagctgcattaatgaatcggccaacgcgcggggagaggcggtttgcgtattgggcgccagggtggtttttcttttcaccagtgagacgggcaacagctgattgcccttcaccgcctggccctgagagagttgcagcaagcggtccacgctggtttgccccagcaggcgaaaatcctgtttga

SEQ ID NO: 144046 - DNA, 1385 bp, Homo sapiens
atgaatcagcaaaacagccagcactttaacttgcaacctgagcatcccacaggggtcccagccatcgtagtgccagctacatttgctgaagtggtcaccgtcgacagcgacacacttgcatcggatgcagcccggttaacgtgccggcacggcctgggtaaccaggaccagggcttatatcagagagagaaagataatggtaaatgttccatttattctaggagggccaattatgaattggcagagacaattagaacccaatcattagacaatattgttgtcaccaagagtggtcttcgcaacctgcagaccaagagaatccctatggtgctatgccaccaggatcctgagtttcaagcacacagctggatggccatttgggcagacaccaaactagctgcaggagtttttttcataccccagtggcacctggaatgccagagagacagaaccattgactcccctggaaaggggactgaagccagggagccaagtgctgtagcccagcagatctcaccctcatggagtccagcaagaaaggagctactcattttgggtctcctgaaagctgtcctgtcacttaatgaagcttctctccaccttgctcacacacaagttgtcctgtacctcattcttcctggacatgagacaagaacttggacctaccaaatggcaggactgaaagagtgtgacaatctaaaaacttgtcacacttcacatggatctgtcatggcggaaacagcggttatcaatcacaagaaacgtaaaaatagcccgcgaatcgtccagtcaaacgacctcactgaggcggcatatagtctctcccgggatcaaaaacgtatgctgtatctgttcgttgaccagatcagaaaatctgatggcaccctacaggaacatgacggtatctgcgagatccatgttgctaaatatgctgaaatattcggattgacctctgcggaagccagtaaggatatacggcaggcattgaagagtttcgcggggaaggaagtggttttttatcgccctgaagaggatgccggcgatgaaaaaggctatgaatcttttccttggtttatcaaacgtgcgcacagtccatccagagggctttacagtgtacatatcaacccatatctcattcccttctttatcgggttacagaaccggtttacgcagtttcggcttagtgaaacaaaagaaatcaccaatccgtatgccatgcgtttatacgaatccctgtgtcagtatcgtacccaagattgtgttccttcctgtgacgtcagtttgctacctacacctccaagccatcatgaaggcgtttcgatccacaactcttccgaacacctgcatccgttagaaagtctgcatcatgatacgctggcattcag

SEQ ID NO: 144047 - DNA, 1489 bp, Homo sapiens
atgtggctagtgactactgaactggaaagcacagatacagaacatttctatcatcacagtaagtgctattggcccagagctcatctaggtgaatgcatcctgtccatagaggcagcctgccaagcagctggaggggaagctggaaatggaggcagtgcagtaacgaaagcaacattaggctccaggcagggggcccaacactggaaagccctagccagaacaatcagacaagagaaggaaataaagggcatccaaatcggtaaacaggaagtcaaactgttgccatttgctgatgatatgatcatatacctagaaaactctacagattcctccaaaaagctctcagaactgtgtgacaatctaaaaacttgtcacacttcacatggatctgtcatggcggaaacagcggttatcaatcacaagaaacgtaaaaatagcccgcgaatcgtccagtcaaacgacctcactgaggcggcatatagtctctcccgggatcaaaaacgtatgctgtatctgttcgttgaccagatcagaaaatctgatggcaccctacaggaacatgacggtatctgcgagatccatgttgctaaatatgctgaaatattcggattgacctctgcggaagccagtaaggatatacggcaggcattgaagagtttcgcggggaaggaagtggttttttatcgccctgaagaggatgccggcgatgaaaaaggctatgaatcttttccttggtttatcaaacgtgcgcacaggtccattccagagggcgctttacagttgtaccatatgcaacccataaatcctcattcccttctcttttaatcgggttacagaaccggtttacgcagtttcgggcttagtgaaacaaaagaaatcaccaatcccgtatgcccttgcgtttataccaatccctgtgtcagtatcgaatttaagggctaaggagacaaaggtcatttctggctgggatgacacagtaagacgtcatggagaagatgaggatttggcctggactttgtggactatattaatttcaatagcaaagtttggtggtggggaggtgcaggaagaagaaaatggggagggtgcccccaaacacagaatcagcctgattgacatcggcctggtgatcgagtacctgatgggcggggcttatcgctgcaactacacgcgcaagcgcttccggaccctctaccacaacctcttcggccccaagagggtaattctgggaattctacttcctccttcaattctcagcttggagttcaagaacaaagacgacatgccctatatgtctcaggcccaggaaatccacctccaagagaaggaggcagaagaaccagagaagcccacaaaggaaaaagaggaagaggacatggagctcacaagtgggtaccgagctcgaattcgtaatcatggtcatagctgtttcctgtgtgaaattggtatgcgcggacaattccacacaacatacgagccggaagcataa

SEQ ID NO: 144048 - DNA, 1644 bp, Homo sapiens
atgggaagaagattgtcagtactgggagctaccaccagccaagacgccacagccaccaggatggggtatctctacaccagctgggtgtcattcactagctgtttatttaatttaaataactttatctaccccaagaaatctaaacgaggaacagtgcccagcaagtgtgacaatctaaaaacttgtcacacttcacatggatctgtcatggcggaaacagcggttatcaatcacaagaaacgtaaaaatagcccgcgaatcgtccagtcaaacgacctcactgaggcggcatatagtctctcccgggatcaaaaacgtatgctgtatctgttcgttgaccagatcagaaaatctgatggcaccctacaggaacatgacggtatctgcgagatccatgttgctaaatatgctgaaatattcggattgacctctgcggaagccagtaaggatatacggcaggcattgaagagtttcgcggggaaggaagtggttttttatcgccctgaagaggatgccggcgatgaaaaaggctatgaatcttttccttggtttatcaaacgtgcgcacagtccatccagagggctttacagtgtacatatcaacccatatctcattcccttctttatcgggttacagaaccggtttacgcagtttcggcttagtgaaacaaaagaaatcaccaatccgtatgccatgcgtttatacgaatccctgtgtcagtatcgtaagccggatggctcaggcatcgtctctctgaaaatcgactggatcatagagcgttaccagctgcctcaaagttaccagcgtatgcctgacttccgccgccgcttcctgcaggtctgtgttaatgagatcaacagcagaactccaatgcgcgggggatctcacaccccaaccggattcagcacgcaaggcataattaattatttttctttcttcgcggtggcggccgccagagggggagaggcccaaaacgcgcgaaaaacacaatcgcttcgtggaaacaacaacagggcttatgagaggcaaaaatcagagaaacctaggacaaaaatagtgggtatcctctacagtcggctggattcagccagtaggcctttttcttcggtttgcctatttagcgtgctcaccacgaaatgcccagacccccggcgcacaccgtgtgcctggcacactggacaccaactcggacccgccaccacccacaccgccggcaagggcgcgcccacgcggcccccgctggtccagaccgcccgcaacaaacccaatggacaaccccgaagcaccccacacccccaccgcgtacagaaaggcggcgcgcacacgaaccgcacccgcccccgcaagcgcgggccaacgcgccgaacaccgcgaaggaaccgcgacgccaccagagccaccacgcagcccacgccaccaccgggcgcggcagccaggagccgaacgcccccacacacaccaccccgccaacgcaaccgccgcaacgccggcgcaaccgacgccacgaccagcgacggcagccccggagagcccgggcgagcaagggcccacaccaacgcccccccgagagcggccacaccccggcccggccccaaacgaccgcgagagcgaagaaaaaggaaagaaacacgaaacgtggcttga

SEQ ID NO: 144049 - DNA, 1554 bp, Homo sapiens
atggcggaaacagcggttatcaatcacaagaaacgtaaaaatagcccgcgaatcgtccagtcaaacgacctcactgaggcggcatatagtctctcccgggatcaaaaacgtatgctgtatctgttcgttgaccagatcagaaaatctgatggcaccctacaggaacatgacggtatctgcgagatccatgttgctaaatatgctgaaatattcggattgacctctgcggaagccagtaaggatatacggcaggcattgaagagtttcgcggggaaggaagtggttttttatcgccctgaagaggatgccggcgatgaaaaaggctatgaatcttttccttggtttatcaaacggtttattgagaatatgtttttcgtctcagccaatccctgggtgagtttcaccagttttgatttaaacgtggccaatatggacaacttcttcgcccccgtgtggaccatgggcaaatattatacgcaaggcgacaaggtgctgatgccgctggcgattcaggttcatcatgccgtttgtgatggcttccatgtcggcagaatgcttaatgaattacaacagtactgcgatgagtggcagggcggggcagatgtcacttatgcaggagcgcccacttgctggccagagcttgacattattccttcctgtctggctctgcaccgtattgaaactgagttaatgggcaaatttgatgaaggtaaactgcccaccgatccacacttgatgctcctactggccattgaaactgttgctcatgactatggtggggtagttattgacagcgcgcctaacctgggtatcggcacgatgagggtagtatgtgctgctgatgtactaattgttcccacgcctgctgagttgtttgactacacctccgcactgcagtttttcgatatgcttcgtgatctgctcaagaacgttgatcttaaagggttcgagcctgatgtacgtattttgcttaccaaatacagcaatagtgatggctctcagcccccgtggatagaggagcaaattccggatgcgctgggaagcatggttcttaaaaatgttcaaaatacgtacatcaggctcgaaccctttaagatcaacgttcttgagcagatcacgaagcatatcgaaaaactgcagtgcggaggtgtagtcaaacaactcagcaggcgtgggaacaatcagcacatcagcagcacatacgacattaatcgtgccgatacccacaaccggtttacgcagtttcggcttagtgaaacaaaagaaatcaccaatccgtatgccatgcgtttatacgaatccctgtgtcagtatcgtaagccggatggctcaggcatcgtctctctgaaaatcgactggagcatagagcgttaccagctgcctcaaagttaccagcgtatgcctgacttccgccgccgcttcctgcaggtctgtgttaatgagatcaacagcagaactccaatgcgcctctcatacattgagaaaaagaaaggccgccagacgactcatatcgtattttccttccgcgatatcacttccatgacgacaggatag

SEQ ID NO: 144050 - DNA, 1515 bp, Homo sapiens
tcacccgtcaccctcacggtcacctactacgccagacacacgtcactgtcacggtcacccgtcaccctcacggtcacctactacgccagacacacgtcactgtcacggtcacccgtcaccctcacggtcacctactacgccagacacacgtcactgtcacggtcacccgtcaccctcacggtcacctactacgccagacacacgtcactgtcacggtcacccgtcaccctcacggtcacctactacgccagacacacgtcactgtcacggtcacccgtcaccctcacggtcacctactacgccagacacacgtcactgtcacggtcacccgtcaccctcacggtcacctactacgccagacacacgtcactgtcacggtcacccgtcaccctcacggtcacctactacgccagacacacgtcactgtcacggtcacccgtcaccctcacggtcacctactacgccagacacacaattgcaaatatatttgggtgccaatatgcacaaaactctaaccacttccggaataacatctccagcttttctaatagagatagtatctcctactctaacatccttaccccatgccaggatgttccaggcatcgtcgcctcgccaccacctccattcacgcggggatcctctagagtcaactgcggggtcatgcacctagggaagaagtcatacatgctgggtattgacagtgtggggattggagcagttaaaacagacacagtcggcacagttcccccgactagagattcaaaaggaagcaaatgtgaggcagggagaatttggataaacagggattttgccgatttcggaaccaccatcaaacaggattttcgcctgctggggcaaaccagcgtggaccgcttgctgcaactctctcagggccaggcggtgaagggcaatcagctgttgcccgtctcactgtgtgacaatctaaaaacttgtcacacttcacatggatctgtcatggcggaaacagcggttatcaatcacaagaaacgtaaaaatagcccgcgaatcgtccagtcaaacgacctcactgaggcggcatatagtctctcccgggatcaaaaacgtatgctgtatctgttcgttgaccagatcagaaaatctgatggcaccctacaggaacatgacggtatctgcgagatccatgttgctaaatatgctgaaatattcggattgacctctgcggaagccagtaaggatatacggcaggcattgaagagtttcgcggggaaggaagtggttttttatcgccctgaagaggatgccggcgatgaaaaaggctatgaatcttttccttggttatcaaacgaacttggagtggaggtggattctgtggagaatgaagacagaactagctgcaaatgtgagctcctggcccctctgagcagccatattaaagatcaaagggacaaagcctgtgcattccagatggaatcaggcagcaaagcacagctacgaaagcattcttggctgtcataccctcgagtgccatga

SEQ ID NO: 144051 - DNA, 1525 bp, Homo sapiens
ttaaatacacaaccctcgttttatagcgcgctggagcggctcggctttctttctggagaagataattgcgccgccgccgtaaggcttgtttaaaaaaaaaaatttcccccggggagcggtttcttttccccccgtggggtcggataaaagagaatttatggccgttttttctaacaaaggaggggcgctcctcggaatgttgtcgccgggaggaatattgccttcatcgaaaaaatgctgaacggtccgataagatttttcggccccgcccaaaaacagtttgtggtgttccactccgctgattttgagtggggcatcagaatatgacacacataactgcgccgctgtcaggccttgtttggcgccatgtatatcggcagagacagcgtagaaataaacgaatgttccgtcagaagtaataggtgcggagacagaccaatcctgcgtctgatcttcacgagcggaacgatggcggcgaacatatcgctgtctaggaaggacagagaaagcgcggatctgggaagtgacggacagaacggtcaggacctggattggggaggcggttgccgccgctgctgctgacggtgtgacgttctctgttccggtcacaccacatacgttccggcattcctatgcgatgcacatgctgtatgccggtataccgctgaaagttctgcaaagcctgatgggacataagtccatcagttcaacggaagtctacacgaagtgtgacaatctaaaaacttgtcacacttcacatggatctgtcatggcggaaacagcggttatcaatcacaagaaacgtaaaaatagcccgcgaatcgtccagtcaaacgacctcactgaggcggcatatagtctctcccgggatcaaaaacgtatgctgtatctgttcgttgaccagatcagaaaatctgatggcaccctacaggaacatgacggtatctgcgagatccatgttgctaaatatgctgaaatattcggattgacctctgcggaagccagtaaggatatacggcaggcattgaagagtttcgcggggaaggaagtggttttttatcgccctgaagaggatgccggcgatgaaaaaggctatgaatcttttccttggtttatcaaacgtgcgcacagtccatccagagggctttacagtgtacatatcaacccatatctcattcccttctttatcgggttacagattctttttacgcagtttcggcttagtgaaacaaaagaaatcaccaatccgtatgccatgcgtttatacgaatccctgtgtcagtatcgtaagccggatggctcaggcatcgtctctctgaaaatcgactggatcatagagcgttaccagctgcctcaaagttaccagcgtatgcctgacttccgccgccgcttcctgcaggtctgtgttaatgagatcaacagcagaactccaatgcgcctctcatacattgagaaaaagaaaggccgccagacgactcatatcgtattttccttccgcgatatcacttccatgacgacaggatag

SEQ ID NO: 144052 - DNA, 2021 bp, Homo sapiens
  misc_feature (1)...(2021): n = a,t,c or g
ctgccccgatggtggattcgttaattgcgcgcgtaggagtaatggctcgcggtaatgccattactttgcctgtatgtggtcgggatgtgaagtttactcttgaagtgctccggggtgatagtgttgagaagacctctcgggtatggtcaggtaatgaacgtgaccaggagctgcttactgaggacgcactggatgatctcatcccttcttttctactgactggtcaacagacaccggcgttcggtcaaagagtatctggtgtcatagaaattgccgattgggaagtcgccgtcgttaagctgctgcactttaccgaagtgattatcgngacatttcgtagaactcccccttgtcacacttcacatggatctgtcatggcggaaacagcggttatcaatcacaagaaacgtaaaaatagcccgcgaatcgtccagtcaaacgacctcactgaggcggcatatagtctctcccgggatcaaaaacgtatgctgtatctgttcgttgaccagatcagaaaatctgatggcaccctacaggaacatgacggtatctgcgagatccatgttgctaaatatgctgaaatattcggattgacctctgcggaagccagtaaggatatacggcaggcattgaagagtttcgcggggaaggaagtggttttttatcgccctgaagaggatgccggcgatgaaaaaggctatgaatcttttccttggtttatcaaacgtgcgcacagtccatccagagggctttacagtgtacatatcaacccatatctcattcccttctttatcgggttacagaaccggtttacgcagtttcggcttagtgaaacaaaagaaatcaccaatccgtatgccatgcgtttatacgaatccctgtgtcagtatcctgccccgatggtggattcgttaattgcgcgcgtaggagtaatggctcgcggtaatgccattactttgcctgtatgtggtcgggatgtgaagtttactcttgaagtgctccggggtgatagtgttgagaagacctctcggtgtgacaatctaaaaacttgtcacacttcacatggatctgtcatggcggaaacagcggttatcaatcacaagaaacgtaaaaatagcccgcgaatcgtccagtcaaacgacctcactgaggcggcatatagtctctcccgggatcaaaaacgtatgctgtatctgttcgttgaccagatcagaaaatctgatggcaccctacaggaacatgacggtatctgcgagatccatgttgctaaatatgctgaaatattcggattgacctctgcggaagccagtaaggatatacggcaggcattgaagagtttcgcggggaaggaagtggttttttatcgccctgaagaggatgccggcgatgaaaaaggctatgaatcttttccttggtttatcaaacgtgcgcacagtccatccagagggctttacagtgtacatatcaacccatatctcattcccttctttatcgggttacagaaccggtttacgcagtttcggcttagtgaaacaaaagaaatcaccaatccgtatgccatgcgtttatacgaatccctgtgtcagtatcacccccttaccattgaaaaagtaatgaagccgctgatcacttcaaacacggtaactgatgaaatcgagcgcgcgaatgttttcaaaatgaacggcaaatggtacttgttcactgattcacgcggttcaaaaatgacgatcgatggtattaactcaaacgatatttacatgcttggttatgtatcaaactctttaaccggcccttacaagccgctgaacaaaacagggcttgtgctgcaaatgggtcttgatccaaacgatgtgacattcacttactctcacttcgcagtgccgcaagccaaaggcaacaatgtggttatcacaagctacatgacaaacagaggcttcttcgaggataaaaaggcaacatttgcgccaagcttcttaatgaacatcaaaggcaataaaacatccgataaactaccgcattaa

SEQ ID NO: 144053 - DNA, 1584 bp, Homo sapiens
  misc_feature (1)...(1584): n = a,t,c or g
atgggcaaagacttcatgactgaaacaccaaaaacaatggcaacaaaagccaaaattgacaaatgggatctaattaaactcaagagcttctgcacagcaaaagaaactaccatcagagtgaacaggcaacctacagaatgggagaaaattttcacaacctactcatctgacaaagggctaatatccacaatctacaatgaactcaaacaaatttacaagaaaaaaatgaacaaccccatcaaaaagtgggcaaaggatatgaacagacacttctcaaaagaagacatttatgcaaccaacaaacatgaaaaaaagtgtgacaatctaaaaacttgtcacacttcacatggatctgtcatggcggaaacagcggttatcaatcacaagaaacgtaaaaatagcccgcgaatcgtccagtcaaacgacctcactgaggcggcatatagtctctcccgggatcaaaaacgtatgctgtatctgttcgttgaccagatcagaaaatctgatggcaccctacaggaacatgacggtatctgcgagatccatgttgctaaatatgctgaaatattcggattgacctctgcggaagccagtaaggatatacggcaggcattgaagagtttcgcggggaaggaagtggttttttatcgccctgaagaggatgccggcgatgaaaaaggctatgaatcttttccttggtttatcaaacgtgcgcacagtccatccagagggctttacagtgtacatatcaacccatatctcattcccttctttatcgggttacagaaccggtttacgcagtttcggcttagtgaagggtacccaaacccttggaaaatccccccgtttaatatatccccaagggcaatgggaaagaacaattttgagccattccagtccagttgcccaatggaccctaaaacaagccggtccaagtgggatattccggcttttttaaaagnccaattcaatgcattaatggaaagtgaaaaaggacagagccagaacttgtggaaatttgccgtttactcaggacttcgtcacggggaactggcagctctggcgtgggagaatgtggatctcgaaaagggaatagtgaatgtcagaagaaacctgacgatacttgatatgttcggtcccccaaaaacaaatgccgggatccgaacagtaacactactgcagcctgctcttgaagcactgaaggagcaatacaaactgaccgggcatcatcgcaaaagcgaaatcaccttttatcatcgggagtacggcagaaccgaaaagcaaaaactgcattttgttttcatgcccagggtgtgtaacggaaaacaaaaaccttattactcggtaagcagtttgggggcaaggtggaatgcagcagtaaaacgtgctggtattcgccgccgtaatccgtaccatacgcggcatacttttgcctgctggctgttgacggcaggagcgaacccggcatttatagccagccaaatggggcatgaaactgcgcagatggtgtatgaaatttacggtatgtggattgatgacatgaacgccgagcagataaccatgttgaatgcgcggttatcgtag

SEQ ID NO: 144054 - DNA, 867 bp, Homo sapiens
atgatcaaggcctggcttctgcttggccagctggttggggacgattctgttgctcggagtcagtgtcagggaatgcagaggagcacactggtttgggggatgacgatgagctctattggatgcctgtgggtgtctagaagcagtcagatagatgggctcacggcagagaagtctggcccggagaagcctcatggcacgtgtgacaatctaaaaacttgtcacacttcacatggatctgtcatggcggaaacagcggttatcaatcacaagaaacgtaaaaatagcccgcgaatcgtccagtcaaacgacctcactgaggcggcatatagtctctcccgggatcaaaaacgtatgctgtatctgttcgttgaccagatcagaaaatctgatggcaccctacaggaacatgacggtatctgcgagatccatgttgctaaatatgctgaaatattcggattgacctctgcggaagccagtaaggatatacggcaggcattgaagagtttcgcggggaaggaagtggttttttatcgccctgaagaggatgccggcgatgaaaaaggctatgaatcttttccttggtttatcaaacgcagccaatcgcctcgttgcgaagggaccagcgcagccaatcaggcgtcgttgctacctactttccccttttcccagtccgagtttgacgtcggtctcctggataccaggcagccaatcgcctcgttgcgaagggaccagcgcagccaatcaggcgtcgttgctacctactcgagctacgagcacgactcgagtcaactacacatcgactcacatccgcgcaagtctcggtaccacgagagtaggagttggcaaagtgtgacacttccctattag

SEQ ID NO: 144055 - DNA, 917 bp, Homo sapiens
cttcctatttagccctttagaaatgcaaatacaacgctttacctccccctcaccagacattccctacagggcaagttcatctaactgtgctccaagagggatctctcctcaagagttgacagtagatttgcagaccaaatgtgacaatctaaaaacttgtcacacttcacatggatctgtcatggcggaaacagcggttatcaatcacaagaaacgtaaaaatagcccgcgaatcgtccagtcaaacgacctcactgaggcggcatatagtctctcccgggatcaaaaacgtatgctgtatctgttcgttgaccagatcagaaaatctgatggcaccctacaggaacatgacggtatctgcgagatccatgttgctaaatatgctgaaatattcggattgacctctgcggaagccagtaaggatatacggcaggcattgaagagtttcgcggggaaggaagtggttttttatcgccctgaagaggatgccggcgatgaaaaaggctatgaatctttttccttggtttatcaaacgtgcgcacagtccaatccagagggcttttacagtgtacatatcaacccatatcttaattcccttttttatggggtacagaaccggtttacgcagtttcggctgaacttcgtgcagaaatctcgcctagtggatctggctctgaaggggctacgtgttttgctcgtggaaggtaacgacccccagggaacagcctcaatgtatcacggatgggtaccagatcttcatattcatgcagaagacactctcctgcctttctatcttggggaaaaggacgatgtcacttatgcaataaagcccacttgctggccggggcttgacattattccttcctgtctggctctgcaccgtattgaaactgagttaatgggcaaatttgatgaag

SEQ ID NO: 144056 - DNA, 1756 bp, Homo sapiens
atgcctgcaagcggtaacgaaaacgatttgaatatgccttcaggaacaatagaaatcttcgtgcggtgttacgttgaagtggagcggattatggattttgccgatttcggaaccaccatcaaacaggattttcgcctgctggggcaaaccagcgtggaccgcttgctgcaactctctcagggccaggcggtgaagggcaatcagctgttgcccgtctcactggtgaaaagaaaaaccaccctggcgcccaatacgcaaaccgcctctccccgcgcgttggccgattcattaatgcagctggcacgacaggtttcccgactggaaagcgggcatcaggcaccgtgtatgaaatctaacaatgcgctcatcgtcatcctcggcaccgtcaccctggatgctgtaggcataggcttggttatgccggtactgccgggcctcttgcgggatatcgtccattccgacagcatcgccagtcactatggcgtgctgctagcgctatatgcgttgatgcaatttctatgcgcacccgttctcggagcactgtccgaccgctttggccgccgcccagtcctgctcgcttcgctacttggagccactatcgactacgcgatcatggcgaccacacccgtcctgtggatctacccactatgtgacaatctaaaaacttgtcacacttcacatggatctgtcatggcggaaacagcggttatcaatcacaagaaacgtaaaaatagcccgcgaatcgtccagtcaaacgacctcactgaggcggcatatagtctctcccgggatcaaaaacgtatgctgtatctgttcgttgaccagatcagaaaatctgatggcaccctacaggaacatgacggtatctgcgagatccatgttgctaaatatgctgaaatattcggattgacctctgcggaagccagtaaggatatacggcaggcattgaagagtttcgcggggaaggaagtggttttttatcgccctgaagaggatgccggcgatgaaaaaggctatgaatcttttccttggtttatcaaacgtgcgcacagtccatccagagggctttacagtgtacatatcaacccatatctcattcccttctttatcgggttacagaaccggtttacgcagtttcggcttagtgaaacaaaagaaatcaccaatccgtatgccatgcaatccccctacactgactattccggtaaacattacggcaaacaaagcctgacaacagcgcaggtaaatgtgtcaaaatctgatgacacactcaaaatcaacggagtggaagatcacaaaacgatttttgacggagacggaaaaacatatcagaacgttcagcagtttatcgatgaaggcaattatacatccggcgacaaccatacgctgagagaccctcactacgttgaagacaaaggccataaataccttgtattcgaagccaacacgggaacagaaaacggataccaaggcgaagaatctttatttaacaaagcgtactacggcggcggcacgaacttcttccgtaaagaaagccagaagcttcagcagagcgctaaaaaacgcgatgctgagttagcgaacggcgccctcggtatcatagagttaaataatgattacacattgaaaaaagtaatgaagccgctgatcacttcaaacacggtaactgatgaaatcgagcgcgcgaatgttttcaaaatgaacggcaaatggtacttgttcactgattcacgcggttcaaaaatgacgatcgatg

SEQ ID NO: 144057 - DNA, 1656 bp, Homo sapiens
atggctggaacagcggttatcaatcacaagaaacgtaaaaatagcccgcgaatcgtccagtcaaacgacctcactgaggcggcatatagtctctcccgggatcaaaaacgtatgctgtatctgttcgttgaccagatcagaaaatctgatggcaccctacaggaacatgacggtatctgcgagatccatgttgctaaatatgctgaaatattcggattgacctctgcggaagccagtaaggatatacggcaggcattgaagagtttcgcggggaaggaagtggttttttatcgccctgaagaggatgccggcgatgaaaaaggctatgaatcttttccttggtttatcaaacgtgcgcacagtccatccagagggctttacagtgtacatatcaacccatatctcattcccttctttatcgggttacagaaccggtttacgcagtttcggcttagtgaaacaaaagagatcaccaatccgtatgccatgcgtttatacgaatccctgtgtcagtatcttattaggtccctcgactatagggtcaccgtcgacagcgacacacttgcatcggatgcagcccggttaacgtgccggcacggcctgtgtaaccagtgtgacaatctaaaaacttgtcacacttcacatggatctgtcatggcggaaacagcggttatcaatcacaagaaacgtaaaaatagcccgcgaatcgtccagtcaaacgacctcactgaggcggcatatagtctctcccgggatcaaaaacgtatgctgtatctgttcgttgaccagatcagaaaatctgatggcaccctacaggaacatgacggtatctgcgagatccatgttgctaaatatgctgaaatattcggattgacctctgcggaagccagtaaggatatacggcaggcattgaagagtttcgcggggaaggaagtggttttttatcgccctgaagaggatgccggcgatgaaaaaggctatgaatcttttccttggtttatcaaacgtgcgcacagtccatccagagggctttacagtgtacatatcaacccatatctcattcccttctttatcgggttacagaaccggtttacgcagtttcggcttagtgaaacaaaagaaatcaccaatccgtatgccatgcgtttatacgaatccctgtgtcagtatcgtaagccggatggctcaggcatcgtctctctgaaaatcgactggatcatagagcgttaccagctgcctcaaagttaccagcgtatgcctgacttccgccgccgcttcctgcagccttgggacttggtgccctgcattccacctgctctagccatggcaaaaaggggtcaaggtacagctcagactgttgcttcagagggtgcaagcctcaagccttggcaacttccacatggtgttgggcctgtgggtgcacagaaaacaagaattgaggtttggagacctctgcctagatttcagagggtgtatgccttgaataaacatcagcagcagccacatggtggtggccatgggccttgggtgacccccggtggaagctgcactgatctggaaggcctcaggctttcatggtgttctaatgcagtcaactgtgccgaccacaggactgcaggtatcacccctcccccaactcaaggcagccaagcataa

SEQ ID NO: 144058 - DNA, 2111 bp, Homo sapiens
ccatggatatccgcgcctgttccggtggacgtggtggagggtgcaatggactctgtgacggttcttagctttggtggtttaatgctctatttttgtgctggttggcctcctgccaggaggtggtgctttccagaaagcatcagctgtggtagtatggagagggaccagtggtgggggctccaagtagcgaagcgagcaggactggccggcggccaaagcggtcggacagtgctccgagaacgggtgcgcatagaaattgcatcaacgcatatagcgctagcagcacgccatagtgactggcgatgctgtcggaatggacgatatcccgcaagaggcccggcagctttgcagaactttcagcggtataccggcatacagcatgtgcatcgcataggaatggcggaacgtatgtggtgtgaccggaacagagaacgtcacaccgtcagcagcagcggcggcaaccgcctccccaatccaggtcctgaccgttcttgtgacaatctaaaaacttgtcacacttcacatggatctgtcatggcggaaacagcggttatcaatcacaagaaacgtaaaaatagcccgcgaatcgtccagtcaaacgacctcactgaggcggcatatagtctctcccgggatcaaaaacgtatgctgtatctgttcgttgaccagatcagaaaatctgatggcaccctacaggaacatgacggtatctgcgagatccatgttgctaaatatgctgaaatattcggattgacctctgcggaagccagtaaggatatacggcaggcattgaagagtttcgcggggaaggaagtggttttttatcgccctgaagaggatgccggcgatgaaaaaggctatgaatcttttccttggtttatcaaacgtgcgcacagtccatccagagggctttacagtgtacatatcaacccatatctcattcccttctttatcgggttacagaaccggtttacgcagtttcggcttagtgaaacaaaagaaatcaccgatccgtatgccatgcgtttatacaaataccctgtgtcagtatcgggctttcgtaaatggggggggagaagaaaaggctcgcggaaagcccatactttgccggtatggggtcgggatgtgaagttaactctgaaagtgctccggggtgatagtgttgagaagacttttcgggtagggtcaggtaatgaacgtgcccagaagctgcttactgaggacgcactggatgatctcatcccttcttttctactgactggtcaacagacaccggcgttcggtcgaagagtatctggtgtcatagaaattgccgatgggagtcgccgtcgtaaagctgctgcacttaccgaaagtgattatcgtgttctggttggcgagctggatgatgagcagatggctgcattatccagattgggtaacgattatcgcccaacaagtgcttatgaacgtggtcagcgttatgcaagccgattgcagaatgaatttgctggaaatactctctgcgctggctgatgcggagtgtgacaatctaaaaacttgtcacacttcacatggatctgtcatggcggaaacagcggttatcaatcacaagaaacgttaaaaatagcccgcgaatcgtccagtcaaacgacctcactgaggcggcatatagtctctcccgggatcaaaaacgtatgctgtatctgttcgttgaccagatcagaaaatctgatggcaccctacaggaacatgacggtatctgcgagatccatgttgctaaatatgctgaaatattcggattgacctctgcggaagccagtaaggatatacggcaggcattgaagagtttcgcggggaaggaagtggttttttatcgccctgaagaggatgccggcgatgaaaaaggctatgaatcttttccttggtttatcaaacgtttgaatctattcaggggaacaggggaccaacctgtgaaagcaggacccgtggtggttgtcctttattccctacggtctgggggcttctcgtgggcctgctgtccctccacatcaagcctgaagccaagaggctccagtgtctactgccaggagccatctcagctccactactggtccaagtacccgatgtga

SEQ ID NO: 144059 - DNA, 3883 bp, Homo sapiens
  misc_feature (1)...(3883): n = a,t,c or g
atggcggaaacagcggttatcaatcacaagaaacgtaaaaatagcccgcgaatcgtccagtcaaacgacctcactgaggcggcatatagtctctcccgggatcaaaaacgtatgctgtatctgttcgttgaccagatcagaaaatctgatggcaccctacaggaacatgacggtatctgcgagatccatgttgctaaatatgctgaaatattcggattgacctctgcggaagccagtaaggatatacggcaggcattgaagagtttcgcggggaaggaagtggttttttatcgccctgaagaggatgccggcgatgaaaaaggctatgaatcttttccttggtttatcaaacgtgcgcacagtccatccagagggctttacagtgtacatatcaacccatatctcattcccttctttatcgggttacagaaccggtttacgcagtttcggcttagtgaaacaaaagaaatcaccaatccgtatgccatgcgtttatacgaatccctgtgtcagtatcatccccttaaaaatatatcaatcacaatttcctggggtgggggtgggcagttgaggcagtggatgaagagctattggtcaaaggatacgaaatttcagttagaccggagacataagttcaagagccacacgggaacagaaaacggataccaaggcgaagaatctttatttaacaaagcgtactacggcggcggcacgaacttcttccgtaaagaaagccagaagcttcagcagagcgctaaaaaacgcgatgctgagttagcgaacggcgccctcggtatcatagagttaaataatgattacacattgaaaaaagtaatgaagccgctgatcacttcaaacacggtaactgatgaaatcgagcgcgcgaatgttttcaaaatgaacggcaaatggtacttgttcactgattcacgcggttcaaaaatgacgatcgatggtgttaactcaaacgatatttacatgcttggttatgtatcaaactctttaaccggcccttacaagccgctgaacaaaacagggcttgtgctgcaaatgggtcttgatccaaacgatgtgacattcacttactctcacttcgcagtgccgcaagccaaaggcaacaatgtggttatcacaagctacatgacaaacagaggcttcttcgaggataaaaaggcaacatttgcgccaagcttcttaatgaacatcaaaggcaataaaacatccgttgtcaaaaacagcatcctggagcaaggacagctgacatggctccaagtagcgaagcgagcaggactgggcggcggccaaagcggtcggacagtgctccgagaacgggtgcgcatagaaattgcatcaacgcatatagcgctagcagcacgccatagtgactggcgatgctgtcggaatggacgatatcccgcaagaggcccggcagcctccagacctgtgatgggaggggctgctgtgctgtggtgtgagggacttgtgatgagaggggccgcacaggtgattaacattccgtccgcattacttatgcaaatttctgcagctgatttttcacgctccacggcagaccgtcgcgcacggcgtacaccagccgcagaactcacgggcgaaaaactcttccagtttacgcaccagcgacaccatgttgatctcatgtncaaccgccatcgccagcgccgtacccagacggctgcccgctttaccgatactttcgaattccatcggcagatcaaggtgcgcttcgaccatcacgcataccaccggcgtaatcttcgaggatctcgcgtgcggtggtccgaacggcagttcccacagtcccggatttttcacccgaccggagaagcccatcagcttggtgccagcatctttacttttcgagatgttctgataccactccacgccgttagcgaggatcgccggaacgttacacagggtttcgacgttgttgacacagatgtagcgccctgccccggtatggacgaacagttcgaaatcgaaacctgttcccataatgtttttgccaagcagacccgcttcggtggcttcggcaatggcacggcgcagattaactgccgcttcgatatattcgccacgcaggaagatgtagccacgtgtgacaatctaaaaacttgtcacacttcacatggatctgtcatggcggaaacagcggttatcaatcacaagaaacgtaaaaatagcccgcgaatcgtccagtcaaacgacctcactgaggcggcatatagtctctcccgggatcaaaaacgtatgctgtatctgttcgttgaccagatcagaaaatctgatggcaccctacaggaacatgacggtatctgcgagatccatgttgctaaatatgctgaaatattcggattgacctctgcggaagccagtaaggatatacggcaggcattgaagagtttcgcggggaaggaagtggttttttatcgccctgaagaggatgccggcgatgaaaaaggctatgaatcttttccttggtttatcaaacgtgcgcacagtccatccagagggctttacagtgtacatatcaacccatatctcattcccttctttatcgggttacagaaccggtttacgcagtttcggcttagtgaaacaaaagaaatcaccaatccgtaggggatctctagagtcagcgcggttatgcacggattttgccgatttcggaaccaccatcaaacaggattttcgcctgctggggcaaaccagcgtggaccgcttgctgcaactctctcagggccaggcggtgaagggcaatcagctgttgcccgtctcactggtgaaaagaaaaaccaccctggcgcccaatacgcaaaccgcctctccccgcgcgttggccgattcattaatgcagctggcacgacaggtttcccgactggaaagcgggcaggacataagaaggagcccatccctcagtcatttattaccagagcggctcgccgcagccggtaaccgagcaaagcgagcgaactggggagaaagcaaagaagacctgttctgtcagatagctcttacgctcagcgcaagaagaaatatccgccgtgggaaaaactccagggttctgtcaggggggaaacaccggttatcaatcacaaagaacgtaaaaaatagcccgcgaatcgtccagtcaaacgacttccctgaggcggcatatagtctctcccgggatcaaaaacgtatgctgtatctgttcgttgcccagatcagaaaatctgatggcaccctacaggaacatgacggtatctgcgagatccatgttgctaaatatgctgaaatattcggattgacctctgcggaagccagtaaggatatacggcaggcattgaagagtttcgcggggaaggaagtggttttttatcgccctgaagaggatgccggcgatgaaaaaggctatgaatcttttccttggtttatcaaacgtgcgcacagtccatccagagggctttacagtgtacatatcaacccatatctcattcccttctttatcgggttacagaaccggtttacgcagtttcggcttagtgaaacaaaagaaatcaccaatccgtatgccatgcgtttatacgaatccctgtgtcagtatcgtaagccggatggctcaggcatcgtctctctgaaaatcgactggatcatagagcgttaccagctgcctcaaagttaccagcgtatgcctgacttccgccgccgcttcctgcaggtctgtgttaatgagatcaacagcagaactccaatgcgcctctcatacattgagaaaaagaaaggccgccagacgactcatatcgtattttccttccgcgatatcacttccatggggttctttctagagtccccaacgcaggggcttgcaagccctgagtngtag

SEQ ID NO: 144060 - DNA, 1540 bp, Homo sapiens
atggtggaaagttggaacctcttacgtgccgatcaacgtctcattttcgccaaaagttggcccagggcttcccggtatcaacagggacaccaggatttatttattctgcgaagtgatcttccgtcacaggtatttattcgcgataagctcatggagcggcgtaaccgtcgcacaggaaggacagagaaagcgcggatctgggaagtgacggacagaacgtgtgacaatctaaaaacttgtcacacttcacatggatctgtcatggcaggaaacagcggttatcaatcacaagaaacgtaaaagtagcccgcgaatcgtccagtcaaacgacctcactgaggcggcatatagtctctcccgggatcaaaaacgtatgctgtatctgttcgttgaccagatcagaaaatctgatggcaccctacaggaacatgacggtatctgcgagatccatgttgctaaatatgctgaaatattcggattgacctctgcggaagccagtaaggatatacggcaggcattgaagagtttcgcggggaaggaagtggttttttatcgccctgaagaggatgccggcgatgaaaaaggctatgaatcttttccttggtttatcaaacgtgcgcacagtccatccagagggctttacagtgtacatatcaacccatatctcattcccttctttatcgggttacagaaccggtttacgcagtttcggcttagtgaaacaaaagaaatcaccattccgtatgccatgcgtttatacgaatccctgtgtcagtatcgtaagccggatggctcaagcatcgtctctctgaaaatcgactggatcatagagcgttaccagctgcctcaaagttaccagcgtatgcctgactttcgccgccgctttctgcagacaaaggccataaataccttgtattcgaagccaacacgggaacagaaaacggataccaaggcgaagaatcctttatttaacaaagcgtactacggcggcggcacgaacttcttccgtaaagaaagccagaagcttcagcagagcgctaaaaaacgcgatgctgagttagcgaacggcgccctcggtatcatagagttaaataatgattacacattgaaaaaagtaatgaagccgctgatcacttcaaacacggtaactgatgaaatcgagcgcgcgaatgttttcaaaatgaacggcaaatggtacttgttcactgattcacgcggttcaaaaatgacgatcgatggtattaactcaaacgatatttacatgcttggttatgtatcaaactctttaaccggcccttacaagccgctgaacaaaacagggcttgtgctgcaaatgggtcttgatccaaacgatgtgacattcacttactctcacttcgccatgccgcaagccaaaggcaacaatgtgggtatcacaagctacatgacaaacaaaagcttctttcaagataaaaaggcaacatttgcgcccagccttctatggacatcaaaggcattaaacctccgtgtcaaaaacagcatccgggagcaggaccgttga

SEQ ID NO: 144061 - DNA, 3653 bp, Homo sapiens
atggaccgagaaagtaccaaggctgtgccaacacataataagaacatctgggtgaaaagtgaaaaagtcaaacacgatgatgcttcagtggttgatactgagtacaaatactcctcaagttacaatgggggttaccttcagataaacccattttcattcatttttaatgttgcatattactctaatgtgtggctgtaccataagtgtgttcattctgctattgatgagcatttagattgtcttggtgttgccaatttttggctctccacaaatagtgcctctatgaaatgtgacaatctaaaaacttgtcacacttcacatggatctgtcatggcggaaacagcggttatcaatcacaagaaacgtaaaaatagcccgcgaatcgtccagtcaaacgacctcactgaggcggcatatagtctctcccgggatcaaaaacgtatgctgtatctgttcgttgaccagatcagaaaatctgatggcaccctacaggaacatgacggtatctgcgagatccatgttgctaaatatgctgaaatattcggattgacctctgcggaagccagtaaggatatacggcaggcattgaagagtttcgcggggaaggaagtggttttttatcgccctgaagaggatgccggcgatgaaaaaggctatgaatcttttccttggtttatcaaacgtgcgcacagtccatccagagggctttacagtgtacatatcaacccatatctcattcccttctttatcgggttacagaaccggtttacgcagtttcggcttagtgaaacaaaagaaatcaccaatccgtatgccatgcgtttatacgaatccctgtgtcagtatcgtaagccggatggctcaggcatcgtctctctgaaaatcgactggatcatagagcgttaccagctgcctcaaagttaccagcattacagtgatgacaactgtaacgatgatggttatgacgggaatatctctaacatcatcatcttcaattttagcatgtggtccttatgttccaggcactgtcctaacaactttgcatatactaacaatccactgagaggcactaggaatgttccccagtgttcgcatgcagatgtcagtagctggcccaaggttatcaaattccctctagggggaatttacagcagggacttagaagttctagttggtttctgtgggatgcctttcgcgagaaagtcttcgaagcctgggctgcggaaccctgtgcctgattctttttggggggaggaagaaaatgtggtggatcgtgcaatgtgtgcggagaggaagaatgctcatcctgggagttgcctttatagctggaggagggcccttgctcggagcttgaagggcggcgtccttctcttagtatcctctgccggtctggcgacgggttgctggcaggctcggacgggtgtggtcgccctgatcgcgtggtcgatagtggcttctagtttcgaagcgagcaggactgtgcggcggccaaagcggtccgacagtgctcccaggacgggtgcgcatagaaattgcatcaacgcatatagcgctagcagcacgccatagtgactggcgatgctgtcggaatggacgatatcccgcaagaggcccggcagtaccggcataaccaagcctatgcctacagcatccagggtgacggtgccgaggatgacgatgagcgcattgttagatttcatacacggtgcctgacatttgccgttcattttgaaaacattcgcgcgctcgatttcatcagttaccgtgtttgaagtgatcagcggcttcattacttttttcaatgtgtaatcattatttaactctatgataccgagggcgccgttcgctaactcagcatcgcgttttttagcgctctgctgaagcttctggctttctttacggaagaagttcgtgccgccgccgtagtacgctttgttaaataaagattcttcgccttggtatccgttttctgttcccgtgttggcttcgaatacaaggtatttatggcctttgtcttcaacgtagtgagggtctctcagcgtatggttgtcgccggatgtataattccgcggatcctctccagcaccgaagtaaggagcttggtggacaacccctgtgccttcttcttccttcacatagttgtcaacaagcacagtgaaagcgccattctctttacactggacttgacagccctgtttggggactctagaagaccccctgctgttgatctcattaacacagacctgcaggaagcggcggcggaagtcaggcatacgctggtaactttgaggcagctggtaacgctctatgatccagtcgattttcagagagacgatgcctgagccatccggcttacgatactgacacagggattcgtataaacgcatggcatacggattggtgatttcttttgtttcactaagccgaaactgcgtaaaccggttctgtaacccgataaagaagggaatgagatatgggttgatatgtacactgtaaagccctctggatggactgtgcgcacgtttgataaaccaaggaaaagattcatagcctttttcatcgccggcatcctcttcagggcgataaaaaaccacttccttccccgcgaaactcttcaatgcctgccgtatatccttactggcttccgcagaggtcaatccgaatatttcagcatatttagcaacatggatctcgcagataccgtcatgttcctgtagggtgccatcagattttctgatctggtcaacgaacagatacagcatacgtttttgatcccgggagagactatatgccgcctcagtgaggtcgtttgactggacgattcgcgggctatttttacgtttcttgtgattgataaccgctgtttccgccatgacagatccatgtgaagtgtgacaagtttttagattgtcacacttggcttcgaatacaaggtatttatggcctttgtcttcaacgtagtgagggtctctcagcgtatggttgtcgccggatgtataattgccttcatcgataaactgctgaacgttctgatatgtttttccgtctccgtcaaaaatcgttttgtgatcttccactccgttgattttgagtgtgtcatcagattttgacacatttacctgcgctgttgtcaggctttgtttgccgtaatgtttaccggaatagtcagtgtagaataaacggatttttccgtcagatgtaaaggttgcagaaccggaccattcttgcgtctgatctttcaggatcggatcgttggcgtcgaacttatcgctgtctttaaagacacggcccgcgtttttccagctgtcgattgagttgtcgccgaccttttgataaaacatgtagattgatgtgtcatcagcgtctttcgggcttcccgcaagagcaaacacaacgtgatagccgttgtattcagctactgttccgtcagcgttttgcagcggccagctgtcccacacatcaagtccttttgcagactcaatatttttaatcgttgattgatcgaattgaggcacttggtatttttcgttttgctgctgtttaaggatctgcagcatatcatggcgtgtaatatgagagacgccgtacgtttctttggatgctttttgggtattttctttcgcgaagcttgagtcgctccttctgccaacgaa

SEQ ID NO: 144062 - DNA, 1860 bp, Homo sapiens
atgcccctgcgcttttcgagctctagtaggatcccctattacgttaacttacttcataaagcagcaacagggtttgagaggattgactacaattttgaaacacattcttctctggaaattgctacagatgctctaaccatcagtgaccaccacccttgtgagtcagcagccatcaacgctgagacaagaccttccacggtactggaagaactagccagagcaatcagacaagagaaagagataaaaggaatccaaattggtaaagaggaagtcaaactgtcactgtttgctgatgatatgattatgtaccttgaaaaccctaaagactcctccagaaagctcctagaatggataaaagaatccaacaaagtttctggatacaagactcatgtacacaaatcagtagctcttctatacacgaatagtgaccaagtggagaatcaaatcagaactcaacccttttacaatagctgcgaaaataaaataaaatacttagcaatatacctaaccaaggagtcaaaagacctctacaagagaaactacaaaacactgctgaaagaaatcacagatgacacaaacaaatggaaacacatcccatgctcatggatagttaaggtggcaggagtggaatcttggattcaccacacccaagttgaagtttggacaccccctgaggaaactgcgggatctacagctcatgggtcccaagatcagccagaccagcctcgatacacctgtgaaccattggaggacttgcatctcctatttcagaaagagacatcccacactataaaggcttctaccactgatcctgaggagaaaccccttccaccttataaaagatattgtgacaatctaaaaacttgtcacacttcacatggatctgtcatggcggaaacagcggttatcaatcacaagaaacgtaaaaatagcccgcgaatcgtccagtcaaacgacctcactgaggcggcatatagtctctcccgggatctaaaacgtatgctgtatctgttcgttgaccacatcagaaaatctgatggcaccctacagagaacatgacggtatctgcgagatccatgttgctaaatatgctgaaatattcggattgacctctgcggaagccagtaaggatatacggcaggcattgaagagtttcgcggggaaggaagtggttttttatcgccctgaagaggatgccggcgatgaaaaaggctatgaatcttttccttggtttatcaaacgtgcgcacagtccatccagagggctttacagtgtacatatcaacccatatctcatttcccttttttatcgggttacagaaaccggtttacgcagtttcggcttagtgaaacaaaaatacctgtcatcattcaggaggcaggcctcagtcaaagtgagaaacaggcagccgatgggatccagggggtggcccacccagccttccaggtttgtgatggttgtggttcctctctgcagcacttctttcttctgatgcttgtagattttcagttgccaccgctgctgaacctcagagtattaataatggccactctgttcaccattgcctgctacgtggagctccggggctacatgctccacgccttccagctggtctcattggccatgagccatcttcacctggctcataaccaggatacccacccagccatcagtgatgtgctctgggtttgtgccctcagccactctctggaattccaccgagcgagtgatgtcagagcagatctgagtaatgcttattccgaagaagtcagaaagtttggcttcctgctgtggggtcttgattgtgcctctttacacaggtctgacttcattacctcatctgaaactaagtaccactaa

SEQ ID NO: 144063 - DNA, 2849 bp, Homo sapiens
atgctgtatctgttcgttgaccagatcagaaaatctgatggcaccctacaggaacatgacggtatctgcgagatccacggtgctaaatatgccgaaatattcggattgacctctacatgcagcgtgccagtcttctacacagcctcacacgcttttgcggcggggacagtccatccggaggactctgcggtggttcatattcaacccatatactcatttcccttcttctatcgggctaaagagcgggcgttgttcgacctccgggcttcgttgaaaccagaagagaacaacacattcgctatgccatgggtgttcatcggatgccctgcttgtgacaatctaaaaacttgtcacacttcacatggatctgtcatggcggaaacagcggttatcaatcacaagaaacgtaaaaatagcccgcgaatcgtccagtcaaacgacctcactgaggcggcatatagtctctcccgggatcaaaaacgtatgctgtatctgttcgttgaccagatcagaaaatctgatggcaccctacaggaacatgacggtatctgcgagatccatgttgctaaatatgctgaaatattcggattgacctctgcggaacgcagtaaggatatacggcaggcattgaagagtttcgcggggaaggaagtggttttttatcgccctgaagaggatgccggcgatgaaaaaggctatgaatcttttccttggtttatcaaacgtgcgcacagtccatccagagggctttacagtgtacatatcaacccatatctcattcccttctttatcgggttacagaaccggtttacgcagtttcggcttagtaaacaaaagagggtatcctctagactcaactgggaaagcgataagtttgacgcccaccgatccgatcctgaaagatcagaggcaagaatggtccggttctgcaacctttacatctgacggaaaaatccgtttattctacactgactattccggtaaacattacggcaaacaaagcctgacaacagcgcaggtaaatgtgtcaaaatctgatgacacactcaaaatcaacggagtggaagatcacaaaacgatttttgacggagacggaaaaacatatcagaacgttcagcagtttatcgatgaaggcaattatacatccggcgacaaccatacgctgagagaccctcactacgttgaagacaaaggccataaataccttgtattcgaagccaacacgggaacagaaaacggataccaaggcgaagaatctttatttaacaaagcgtactacggcggcggcacgaacttcttccgtaaagaaagccagaagcttcagcagagcgctaaaaaacgcgatgctgagttagcgaacggcgccctcggtatcatagagttaaataatgattacacattgaaaaaagtaatgaagccgctgatcactctcaaacacggtaactgatgaaatcgagcgcgcgaatgttttcaaaatgaacggcaaatggcaggcaccgtgtatgaaatctaacaatgcgctcatcgtcatcctcggcaccgtcaccctggatgctgtaggcataggcttggttatgccggtactgccgggcctcttgcgggatatcgtccattccgacagcatcgccagtcactatggcgtgctgctagcgctatatgcgttgatgcaatttctatgcgcacccgttctcggagcactgtccgaccgctttggccgccgcccagtcctgctcgcttcgctacttggagccactatcgactacgcgatcatggcgaccacacccgtcctgtggatctacccactatgtgacaatctaaaaacttgtcacacttcacatggatctgtcatggcggaaacagcggttatcaatcacaagaaacgtaaaaatagcccgcgaatcgtccagtcaaacgacctcactgaggcggcatatagtctctcccgggatcaaaaacgtatgctgtatctgttcgttgaccagatcagaaaatctgatggcaccctacaggaacatgacggtatctgcgagatccatgttgctaaatatgctgaaatattcggattgacctctgcggaagccagtaaggatatacggcaggcattgaagagtttcgcggggaaggaagtggttttttatcgccctgaagaggatgccggcgatgaaaaaggctatgaatcttttccttggtttatcaaacatcagcaggcaagaaaaggagccaccatcttggcaggagattgttcttcatggtcaggaagcaggactgctactacacaggaaggaaggaaagaatacctttcacaatacattcttctacctccttacccaattttgactgtaaatgtgtcaaaatctgatgacacactcaaaatcaacggagtggaagatcacaaaacgatttttgacggagacggaaaaacatatcagaacgttcagcagtttatcgatgaaggcaattatacatccggcgacaaccatacgctgagagaccctcactacgttgaagacaaaggccataaataccttgtattcgaagccaacacgggaacagaaaacggataccaaggcgaagaatctttatttaacaaagcgtactacggcggcggcacgaacttcttccgtaaagaaagccagaagcttcagcagagcgctaaaaaacgcgatgctgagttagcgaacggcgccctcggtatcatagagttaaataatgattacacattgaaaaaagtaatgaagccgctgatcacttcaaacacgaatcctgagccagggtcgtcgtccaccacccatgcagagtgggccgatcggctaacaggttcatgtgtgtatttgcactttccagattga

SEQ ID NO: 144064 - DNA, 3352 bp, Homo sapiens
  misc_feature (1)...(3352): n = a,t,c or g
ttatctaatctcccagcgtggtttaatcagacgatcgaaaatttcattgcagacaggttcccaaatagaaagagcatttctccaggcaccagttgaagagcgttgatcaatggcctgttcaaaaacagttctcatccggatctgacctttaccaacttcatccgtttcacgtacaacattttttagaaccatgcttccccaggcatcccgaatttgctcctccatccacggggactgagagccattactattgctgtatttggtaagcaaaatacgtacatcaggctcgaaccctttaagatcaacgttcttgagcagatcacgaagcatatcgaaaaactgcagtgcggaggtgtagtcaaacaactcagcaggcgtgggaacaatcagcacatcagcagcacatacgacattaatcgtgccgatacccaggttaggcgcgctgtcaataactatgacatcatagtcatgagcaacagtttcaatggccagtcggagcatcaggtgtggatcggtgggcagtttaccttcatcaaatttgcccattaactcagtttcaatacggtgcagagccagacaggaaggaataatgtcaagccccggccagcaagtgggctttattgcataagtgacatcgtccttttccccaagatagaaaggcaggagagtgtcttctgcatgaatatgaagatctggtacccatccgtgatacattgaggctgttccctgggggtcgttaccttccacgagcaaaacacgtagccccttcagagccagatccccctcaggcatacgctggtaactttgaggcagctggtaacgctctatgatccagtcgattttcagagagacgaggcttgagccatccgggcttacgatactgacacagggattcgtataaacgcatggcatacggattggtgatttcttttgtttcactaagccgaaactgcgtaaaccggttctgtaacccgataaagaagggaatgagatatgggttgatatgtacactgtaaagccctctggatggactgtgcgcacgtttgataaaccaaggaaaagattcatagcctttttcatcgccggcatcctcttcagggcgataaaaaaccacttccttccccgcgaaactcttcaatgcctgccgtatatccttactggcttccgcagaggtcaatccgaatatttcagcatatttagcaacatggatctcgcagataccgtcatgttcctgtagggtgccatcagattttctgatctggtcaacgaacagatacagcatacgtttttgatcccgggagagactatatgccgcctcagtgaggtcgtttgactggacgattcgcgggctatttttacgtttcttgtgattgataaccgctgtttccgccatgacagatccatgtgaagtgtgacaagtttttagattgtcacacagcccaccagcaccaacttttacattctcaggaatccttcgagctgaccatacccgagaggtcttctcaacactatcaccccggagcacttcaagagtaaacttcacatcccgaccacatacaggcaaagtaatggcattaccgcgagccattactcctacgcgcgcaattaacgaatccaccatcggggcagctttaccaacttcatccgtttcacgtacaacattttttagaaccatgcttccccaggcatcccgaatttgctcctccatccacggggactgagagccattactattgctgtatttggtaagcaaaatacgtacatcaggctcgaaccctttaagatcaacgttcttgagcagatcacgaagcatatcgaaaaactgcagtgcggaggtgtagtcaaacaactcagcaggcgtgggaacaatcagcacatcagcagcacatacgacattaatcgtgccggggatctngggaagttttaatggctttgatgttccataagaagcctggcgcaaatgtggctttttatcctcgaagaagcttctgtttgtcatgtagcttgtgatacccacattgttgcttttggcttgcggcacatcgatcgtcatttttgaaccgcgtgaatcagtgaacaagtaccatttgccgttcattttgaaaacattcgcgcgctcgatttcatcagttaccgtgtttgaagtgatcagcggcttcattacttttttcaatgtgtaatcattatttaactctatgataccgagggcgccgttcgctaactcagcatcgcgttttttagcgctctgctgaagcttctggctttctttacggaagaagttcgtgccgccgccgtagtacgctttgttaaataaagattcttcgccttggtatccgttttctgttcccgtgttggcttcgaatacaaggtatttatggcctttgtcttcaacgtagtgagggtctctcagcgtatggttgtcgccggatgtataattgccttcatcgataaactgctgaacgttgctggccttgggccaggggaccctcagcgacggggtcaccccaatgttctggaggctgcggttctgcttcctcctggggctgagctgagcaagctctagctctcgggccgagcgcaaggagggcaggagtgatgtctccaactgtgctgaggtctgccctgggtgcaagggccctgtgttttcagcgctgccgtgtggcccatggatgccccaggcccctggacagttgatgcctggggtccacactcctggacagggctctggacagttgatgcctggggtccacactcgctggtaactttgaggcagctggtaacgctctatgatccagtcgattttcagagagacgatgcctgagccatccggcttacgatactgacacagggattcgtataaacgcatggcatacggattggtgatttcttttgtttcactaagccgaaactgcgtaaaccggttctgtaacccgataaagaagggaatgagatatgggttgatatgtacactgtaaagccctctggatggactgtgcgcacgtttgataaaccaaggaaaagattcatagcctttttcatcgccggcatcctcttcagggcgataaaaaaccacttccttccccgcgaaactcttcaatgcctgccgtatatccttactggcttccgcagaggtcaatccgaatatttcagcatatttagcaacatggatctcgcagataccgtcatgttcctgtagggtgccatcagattttctgatctggtcaacgaacagatacagcatacgtttttgatcccgggagagactatatgccgcctcagtgaggtcgtttgactggacgattcgcgggctatttttacgtttcttgtgattgataaccgctgtttccgccat

SEQ ID NO: 144065 - DNA, 6012 bp, Homo sapiens
tcagccacagatacctaagcaggaatggaagtcactttgtttcttctcacatgggtttttctcctcctcctccccttcttctcttctccttctccttcttcttcttcttcttcttccttcttcttcttcttcttgtacttccttcttcttgttcttctccttcttcttcctcttcttctcttctccttcttcctcttcctcctcttcttcttttctccttcttcctattcctccttcttcttcctcctcttttccttcttcctcttcctgttctctgtcttctcttctccttcttcctcttcctcctctttttcttcttcttcttgttcctcttcctctccctttccctattcttctccttctctttctccctctacctctccctctccctctgcctctcctgctccttcttcttattaattgcgttgcgctcactgcccgctttccagtcgggaaacctgtcgtgccagctgcattaatgaatcggccaacgcgcggggagaggcggtttgcgtattgggcgccagggtggtttttcttttcaccagtgagacgggcaacagctgattgcccttcaccgcctggccgctggtaactttgaggcagctggtaacgctctatgatccagtcgattttcagagagacgatgcctgagccatccggcttacgatactgacacagggattcgtataaacgcatggcatacggattggtgatttcttttgtttcactaagccgaaactgcgtaaaccggttctgtaacccgataaagaagggaatgagatatgggttgatatgtacactgtaaagccctctggatggactgtgcgcacgtttgataaaccaaggaaaagattcatagcctttttcatcgccggcatcctcttcagggcgataaaaaaccacttccttccccgcgaaactcttcaatgcctgccgtatatccttactggcttccgcagaggtcaatccgaatatttcagcatatttagcaacatggatctcgcagataccgtcatgttcctgtagggtgccatcagattttctgatctggtcaacgaacagatacagcatacgtttttgatcccgggagagactatatgccgcctcagtgaggtcgtttgactggacgattcgcgggctatttttacgtttcttgtgattgataaccgctgtttccgccatgacagatccatgtgaagtgtgacaagtttttagattgtcacaaagatctatcttgttttcttgacttgcagttacttccactatgaagggctttggggtaccgagctcgaattcgtaatcatggtcataactgtttccatcgcgttttttagcgctctgctgaagcttctggctttctatacggaagaagttcgtgccgccgcccgtagtacgctttgttaaataaagattcttcgccttggtatccgttatctgttcccgtgttggcttcgaacacaaggtatttatggcctgtgtcttcaacgtagtgagggtctctcagcgtatggttgtcgccggatgtataattgccttcatcgataaactgctgaacgttctgatatgtttttccgtctccgtcaaaaatcgttttgtgatcttccactccgttgattttgagtgtgtcatcagattttgacacatttacctgcgctgttgtcaggctttgtttgccgtaatgtttaccggaatagtcagtgtagaataaacggatttttccgtcagatgtaaaggttgcagaaccggaccattcttgcgtctgatctttcaggatcggatcgttggcgtcgaacttatcgctgtctttaaagacacggcccgcgtttttccagctgtcgattgagttgtcgccgaccttttgataaaacatgtagattgatgtgtcatcagcgtctttcgggcttcccgcaagagcaaacacaacgtgatagccgttgtattcagctactgttccgtcagcgttttggcagcggccagctgtcccacacatcaagtccttttgcagactcaatatttttaatcgttgattgatcgaattgaggcagatactgacacagggatttgtataaacgcatggcatacggattggtgatttcttttgtttcaataagccgaaattgtgtaaaccggttctgtaacccgataaagaagggaatgagatatgggttgatatgtacactgtaaagccctctggatggactgtgcgcacgtttgataaaccaaggaaaagattcatagcctttttcatcgccggcatcctcttcagggcgataaaaaaccacttctttccccgcgaaacttttcaatgcctgccgtatatccttactggcttccgcagaggtcaatccgaatatttcagcatatttagcaacatggatctcgcagataccgtcatgttcctgtagggtgccatcagattttctgatctggtcaacgaacagatacagcatacgtttttgatcccgggagagactatatgccgcctcagtgaggtcgtttgactggacgattcgcgggctatttttacgtttcttgtgattgataaccgctgtttccgccatgacagatccatgtgaagtgtgacaagtttttagattgtcacagatatgagtcgtctggcggcctttctttttctcaatgtatgagaggcgcattggagttctgctgttgatctcattaacacagacctgcaggaagcggcggcggaagtcaggcatacgctggtaactttggggcggctggtaacgctctatgatccaggcgattttaatagagacgatgcctgagccatccggctttcgaatactgacacaagggattcctataaccgccccgttgatctcattaacacagacctgcaggaagcggcggcggaagtcaggcgtacgctggtaactttgaggcagctggtaacgctctatgatccagtcgattttcagagagacgatgcctgagccatccggcttacgatactgacacagggattcgtataaacgcatggcatacggattggtgatttcttttgtttcactaagccgaaactgcgtaaaccggttctgtaacccgataaagaagggaatgagatatgggttgatatgtacactgtaaagccctctggatggactgtgcgcacgtttgataaaccaaggaaaagattcatagcctttttcatcgccggcatcctcttcagggcgataaaaaaccacttccttccccgcgaaactcttcaatgcctgccgtatatccttactggcttccgcagaggtcaatccgaatatttcagcatatttagcaacatggatctcgcagataccgtcatgttcctgtagggtgccatcagattttctgatctggtcaacgaacagatacagcatacgtttttgatcccgggagagactatatgccgcctcagtgaggtcgtttgactggacgattcgcgggctatttttacgtttcttgtgattgataaccgctgtttccgcctctagaggatcccccgtataattgccttcatcgataaactgctgaacgttctgatatgtttttccgtctccgtcaaaaatagttttgtgatcttccactccgttgattttgagtgtgtcatcagattttgacacatttacctgcgctgttgtcaggctttgtttgccgtaatgtttaccggaatagtcagtgtagaataaacggatttttccgtcagatgtgaaggttgcagaaccggaccattcttgcgtctgatctttcaggatcggatcgttggcgtcgaacttatcgctgtctttaaagacacggcccgcgtttttccagctgtcgattgagttgtcgccgaccttttgataaaacatgtagattgatgtgtcatcagcgtctttcgggcttcccgcaagagcaaacacaacgtgatagccgttgtattcagctactgttccgtcagcgttttgcagcggccagctgtcccacacatcaagtccttttgcagactcaatatttttaatcgttgattgatcgaattgaggcacttggtatttttcgttttgctgctgtttagggatctgcagcatatcatggcgtgtaatatgagagacgccgtacgtttctttgtatgctttttggttattttctttcgcgaaggcttgagtcgctcctcctgccagaatgcagtcgtaaaagtcagaactgtggcttgttttacaatttttttgatgttcatgttcatgtctccttccagccacttccacagtgggtgtcagagtggctgagggcaccagacctccggtggctgcccccacctgggactctccccctgctccacttgtctctgtgctggacagcttcagcagcagaagcaggtagttcttcagggaatctatgaggccagggtcacagctccggggacctggggtccgcccctccacatctggtgcctgggcgcaggccccctcactgctggtggccatggtttctggtgggtgactctgagtgggggtccccagccccaggtgcagtgttggggcagaactcatcaggacctgatcctcagagggcaggaaggtggctgtgctcccgtgctgagaagtcggggtgctacacggccccgcctttgggctagctgtcagcccagttccaggaagagaaggcatcgtgggtacctcctggctcaggccagctagaggacagccaccctgatccatacacggcactccccctggccgctcctccttggggcactggaacgggctggcctcctgcttggcctcgactgggcctggtgactgtggccctcggcatgtttctccttccgcctggtccacacttcccctctgggggcggctgtgcttgggagcatgaggcgtcctgggtgtctggatggcctccttggcatcaaggctggtggggtctgggatgtcaaaggcagccagaaggtcatcaaaatctggggttttcatatcccccatggctggatgctggcaagggtgcccgctttccagtcgggaaacctgtcgtgccagctgcattaatgaatcggccaacgcgcggggagaggcggtttgcgtattgggcgccagggtggtttttcttttcaccagtgagacgggcaacagctgattgcccttcaccgcctggccctgagagagttgcagcaagcggtccacgctggtttgccccagcaggcgaaaatcctgtttgatggtggttccgaaatcggcaaaatccttgactttctccccaagcagacagtgatttacttgaaaacaggtctgcttttttatctctgtatctttattactcagcagatactgacacagggatttgtataaacgcatggcatacggattggtgatttcttttgtttcactaagccgaaactgcgtagaccggttctgtaacccgataaagaagaggaatgagatatgggttgatatgtacactgtaaagccctctggatggactgtgcgcacgtttgataaaccaaggaaaagattcatagcctttttcatcgccggcatcctcttcagggcgataaaaaaccacttccttccccgcgaaactcttcaatgcctgccgtatatccttactggcttccgcagaggtcaatccgaatatttcagcatatttagcaacatggatctcgcagataccgtcatgttcctgtagggtgccatcagattttctgatctggtcaacgaacagatacagcatacgtttttgatcccgggagagactatatgccgcctcagtgaggtcgtttgactggacgattcgcgggctatttttacgtttcttgtgattgataaccgctgtttccgccatgacagatccatgtgaagtgtgacaagtttttagattgtcacactcttttgatttttcctccttggtaaatcttccaaatttttcaatcatttctgccacaaatataacatccattttgtcagaaaagttggctgcttccacagtgtaagccagtaactgtcgagctgttgccacggcattggtaagattgaggggcat

SEQ ID NO: 144066 - DNA, 6555 bp, Homo sapiens
atggcggaaacagcggttatcaatcacaagaaacgtaaaaatagcccgcgaatcgtccagtcaaacgacctcactgaggcggcatatagtctctcccgggatcaaaaacgtatgctgtatctgttcgttgaccagatcagaaaatctgatggcaccctacaggaacatgacggtatctgcgagatccatgttgctaaatatgctgaaatattcggattgacctctgcggaagccagtaaggatatacggcaggcattgaagagtttcgcggggaaggaagtggttttttatcgccctgaagaggatgccggcgatgaaaaaggctatgaatcttttccttggtttatcaaacgtgcgcacagtccatccagagggctttacagtgtacatatcaacccatatctcattcccttctttatcgggttacagaaccggtttacgcagtttcggcttagtgaaacaaaagaaatcaccaatccgtatgccatgcgtttatacgaatccctgtgtcagtatcgtaagccggatggctcaggcatcgtctctctgaaaatcgactggatcatagagcgttaccagctgcctcaaatcaggctgggagacccaggaagctccagacttagcatggagcacggactcaggagcatcccagcctggacgctggacaagttcatagaggattacctccttcccgacaccacctttggtgctgatgtcaaatcagccgtcaatgtcgtgtgtgatttcctgaaggagagatgcttccaaggtgctgcccacccagtgagggtctccaaggtggtgaaggttgtccgttgcccgaaagtgaaaataagcagccctgaggaccagaagcccacatgcccatgggtgttagaagaagcatatcccatgaactcagagccctttacactgcctggtgctctatctgagccttcgggggacatgggaatgctgctctatgattccagccttgcccatttgaaacaccaccagaaacatgccccttcagcactcacactggacactagcttcccattggaccagaccctgctcttcttgggcctggttctcaccttccggtctgccatgcagtggctccctcatgctgccccgatggtggattcgttaattgcgcgcgtaggagtaatggctcgcggtaatgccattactttgcctgtatgtggtcgggatgtgaagtttactcttgaagtgctccggggtgatagtgttgagaagacctctcgggtatggtcaggtaatgaacgtgaccaggagctgcttactgaggacgcactggatgatctcatcccttcttttctactgactggtcaacagacaccggcgttcggtcgaagagtatctggtgtcatagaaattgccgatgggagtcgccgtcgtaaagctgctgcacttaccgaaagtgattatcgtgttctggttggcgagctggatgatgagcgagcgccttgtaggcctttatccatgctggttctagagaagtgtgacaatctaaaaacttgtcacacttcacatggatctgtcatggcggaaacagcggttatcaatcacaagaaacgtaaaaatagcccgcgaatcgtccagtcaaacgacctcactgaggcggcatatagtctctcccgggatcaaaaacgtatgctgtatctgttcgttgaccagatcagaaaatctgatggcaccctacaggaacatgacggtatctgcgagatccatgttgctaaatatgctgaaatattcggattgacctctgcggaagccacgaattttctggaagccctgccgaggctacccccaccccatgaacgcatccaatgcttttgggaacctgtgctaatctgtcgggtttctgcatatctctttgcccaaccaaagggaccccagaccctgccacctttgtccggaagagctggcctcggagggacagagactctgagcctgcgtcccaggaagaaagtcacaggaggagcgactcaagccttcgcgaaagaaaataaccaaaaagcatacaaagaaacgtacggcgtctctcatattacacgccatgatatgctgcagatccctaaacagcagcaaaacgaaaaataccaagtgcctcaattcgatcaatcaacgattaaaaatattgagtctgcaaaaggacttgatgtgtgggacagctggccgctgcaaaacgctgacggaacagtagctgaatacaacggctatcacgttgtgtttgctcttgcgggaagcccgaaagacgctgatgacacatcaatctacatgttttatcaaaaggtcggcgacaactcaatcgacagctggaaaaacgcgggccgtgtctttaaagacagcgataagttcgacgccaacgatccgatcctgaaagatcagacgcaagaatggtccggttctgcaacctttacatctgacggaaaaatccgtttattctacactgactattccggtaaacattacggcaaacaaagcctgacaacagcgcaggtaaatgtgtcaaaatctgatgacacactcaaaatcaacggagtggaagatcacaaaacgatttttgacggagacggaaaaacatatcagaacgttcagcagtttatcgatgaaggcaattatacatccggcgacaaccatacgctgagagaccctcactacgttgaagacaaaggccataaataccttgtattcgaagccaacacgggaacagaaaacggataccaaggcgaagaatctttatttaacaaagcgtactacggcggcggcacgaacttcttccgtaaagaaagccagaagcttcagcagagcgctaaaaaacgcgatgctgagttagcgaacggcgccctcggtatcatagagttaaataatgattacacattgaaaaaagtaatgaagccgctgatcacttcaaacacggtaactgatgaaatcgagcgcgcgaatgttttcaaaatgaacggcaaatggtacttgttcactgattcacgcggttcaaaaatgacgatcgatgggcattcttatgttaatgatgaagtaaaatatgcaaaagcaaatgtcgacagctatccattctttaagatgggagttgtggaaagagagcatgttaaagggtgggttgtaggggtgagatcagctagtaagtgccctcccttttcggccgcggcgcgtgactggtgtgacaatctaaaaacttgtcacacttcacatggatctgtcatggcggaaacagcgggttatcaatcacaagaaacgtaaaaatagcccgcgaatcgtccagtcaaacgacctcactgaggcggcatatagtctctcccgggatcaaaaacgtatgctgtatctgttcgttgaccagatcagaaaatctgatggcaccctacaggaacatgacggtatctgcgagatccatgttgctaaatatgctgaaatattcggattgaccttcgcggaaagcaataaagaatatccgccaggcattgaagagtttcgcggggaaggaagtggttttttatcgccctgaagaggatgccggcgatgaaaaaggctatgaatcttttccttggtttatcaaacgtgcgcacagtccatccagagggctttacagtgtacatatcaacccatatctcattcccttctttatcgggttacagaaccggtttacgcagtttcggcttagtgaaacaaaagaaatcaccaatccgtatgccatgcgtttatacgaatccctgtgtcagtatcgtaagccggatggctcaggcatcgtctctctgaaaatcgactggatcatagagcgttaccagctggctctaaggtaacaacggatggctggacttccgccgccgcttcttgcgggcttgtgttaatgaaatcaacagcagaacttcaatgcgcctctcatacattgagaaaaagaaaggccgccagacgactcatatcgctatcagagatgccgagaaagcagggcgactaccgcacccggatatggaaattcgaggacgggttgagcaacgtgttggttatacaattgaacaaattaatcatatgcgtgatgtgtttggtacgcgattgcgacgtgctgaagacgtatttccaccggtgatcggggttgctgcccataaaggtggcgtttacaaaacctcagtttctgttcatcttgctcaggatctggctctgaaggggctacgtgttttgctcgtggaaggtaacgacccccagggaacagcctcaatgtatcacggatgggtaccagatcttcatattcatgcagaagacactctcctgcctttctatcttggggaaaaggacgatgtcacttatgcaataaagcccacttgctggccggggcttgacattattccttcctgtctggctctgcaccgtattgaaactgagttaatgggcaaatttgatgaaggtaaactgcccaccgatccacacctgatgctccgactggccattgaaactgttgctcatgactatgatgtcatagttattgacagcgcgcctaacctgggtatcggcacgattaatgtcgtatgtgctgctgatgtgctgattgttcccacgcctgctgagttgtttgactacacctccgcactgcagtttttcgatatgcttcgtgatctgctcaagaacgttgatcttaaagggttcgagcctgatgtttgcaaatttcatttcatcggcgacagcgaatgcaacttgcctttggggcattggggaattgcaattggtattggtattggcattggcattggctggcaaagtgtggtgttgtgtggccaacaaacgacggacaagcaaccaacatcgtcatcttgctccatttgcaaagtgctgtgcccctcaaacaaaatggattggctgtccaccagtgccgagcatatgaactcccacgccatgcactttccctgtctcaaggccaacgctgtaaccaacaacaacaataataacaataataccaataacaacaataataacaacaacaacgaacttaacagcaatcgcgtgctggcctgcaaggactgcaaggattacttggccagccagtgggagaccatggatgcagaacgagttcccctagagcacagaagatacaacattccctcgcccatgctgacctccagttcaccaaacggatctcgccacggcgccatgagtatcaacactccgccctccacaccatccatatcgtcctcgacgcctgccagcacatcaatctactgctatctttgcggcctgcactcggacctaacgttagccagagtgctctatgccagtaaagagggttcgcgtccttatttcccactgttgctcaaacacaattcacttcgcaatgcagagcagttaagaacaattcagccgttagtttgcaccttttgttaccattccatgttgaatcagtggcgaaagtatgaggcccaaagtcccagcgtcaacccagcggatcgtaaatacaattggcacgattacaactgtcacctgtgcggcattacgacttatcggaaaagagttcgggcgttacccgtcaacgagtttccctttgtaaagcaccagaagagcgatgacggcctgctgctggaaaacggagaatacgcggtcgtctgtctggactgctacgagagcttaagtgcccctcctcgacgccgttccctctttcactgcatcttcatcgcctccttctctttacggcagtgtttacatgaagttggcagcgcctacttgccagagtttggccacggtcacttttcccaacacgaacccgatgaacttggaatgatatggccccccgccagttcgtccccactattgattccggatgtgccttctccgtataccccatgtttatcggaaagctgccaacgtatggttatcgtcgggtatgggcgttgcttcgcagacaggcagaacttgatgggtatgcctgcgatcaatgccaaacgtgtttaccggatcatgcgccagaatgcgctgttgcttgagcgaaaacctgctgtaccgccatcgaaacgggcacatacaggcagagtggccgtgaaagaaagcaatcagcgatggtgctctgacgggttcgagttctgctgtgataacggagagagactgcgtgtcacgttcgcgctggactgctgtgatcgtgaggcactgcactgggcggtcactaccggcggcttcaacagtgaaacagtacaggacgtcatgctgggagcggtggaacgccgcttcggcaacgatcttccgtcgtctccagtggagtggctgacggataatggttcatgctaccgggctaatgaaacacgccagttcgcccggatgttgggacttgaaccgaagaacacggcggtgcggagtccggagagtaacggaatagcagagagcttcgtgaaaacgataaagcgtgactacatcagtatcatgcccaaaccagacgggttaacggcagcaaagaaccttgcagaggcgttcgagcattataacgaatggcatccgcatagtgcgctgggttatcgctcgccacgggaatatctgcggcacgggcttgtaatgggttaa

SEQ ID NO: 144067 - DNA, 3096 bp, Homo sapiens
atggcggaaacagcggttatcaatcacaagaaacgtaaaaatagcccgcgaatcgtccagtcaaacgacctcactgaggcggcatatagtctctcccgggatcaaaaacgtatgctgtatctgttcgttgaccagatcagaaaatctgatggcaccctacaggaacatgacggtatctgcgagatccatgttgctaaatatgctgaaatattcggattgacctctgcggaagccagtaaggatatacggcaggcattgaagagtttcgcggggaaggaagtggttttttatcgccctgaagaggatgccggcgatgaaaaaggctatgaatcttttccttggtttatcaaacgtgcgcacagtccatccagagggctttacagtgtacatatcaacccatatctcattcccttctttatcgggttacagaacccggttacgcagtttcgggttagtgaaacaaaggaaatcaccattcccgttgccatgcgtttatacgaatccctgtgtcagtatcggactcaggctcagggagatctgaattctgtcctggctggagttattggagatcctggtaggaagccccgcccaataaggaaagatgggtcagaattagacctgaagagccaccctggctgcagaacgccaaagccggatccccctcttgaagtgctccggggtgatagtgttgagaagacctctcgggtatggggaggtaatgaacgagaccaggagctgcttactgaggacgcactggatgatctcatcccttcttttctactgactggtcaacagacaccggcgttcggtcgaagagtatctggtgtcatagaaattgccgatgggagtcgccgtagtaaagctgctgcacttaccgaaagtgattatcgtgttctggttggcgagctggatgatgagcagatggctgcattatccagattgggtaacgattatcgcccaacaagtgcttatgaacgtggtcagcgttatgcaagccgattgcagaatgaatttgctggaaatatttctgcgctggctgatgcggaaaatatttcacgtaagattattacccgctgtatcaacaccgccaaattgcctaaatcagttgttgctcttttttctcaccccggtgaactatctgcccggtcaggtgatgcacttcaaaaagcctttacagataaagaggaattacttaagcagcaggcatctaaccttcatgagcagaaaaaagctggggtgatatttgaagctgaagaagttatcactcttttaacttctgtgcttaaaacgtcatctgcatcaagaactagtttaagctcacgacatcagtttgctcctggagcgacagtattgtataagggcgataaaatgatccctaaacagcagcaaaacgaaaaataccaagtgcctcaattcgatcaatcaacgattaaaaatattgagtctgcaaaaggacttgatgtgtgggacagctggccgctgcaaaacgctgacggaacagtagctgaatacaacggctatcacgttgtgtttgctcttgcgggaagcccgaaagacgctgatgacacatcaatctacatgttttatcaaaaggtcggcgacaactcaatcgacagctggaaaaacgcgggccgtgtctttaaagacagcgataagttcgacgccaacgatccgatcctgaaagatcagacgcaagaatggtccggtttctgcaacctttacatctgacggaaaaaatccggttatttctacacttgactatttccggttaaacattacggccaaacaaagcctgacaacagcgcagtgtgacaatctaaaaacttgtcacactacacatggatctgtcatggcggaaacagcggttatcaatcacaagaaacgtaaaaatagcccgcgaatcgtccagtcaaacgacctcactgaggcggcatatagtctctcccgggatcaaaaacgtatgctgtatctgttcgttgaccagatcagaaaatctgatggcaccctacaggaacatgacggtatctgcgagatccatgttgctaaatatgctgaaatattcgggattgacctctgcggaagccagtaaggatatacggcaggcattgaagagtttcgcggggaaggaagtggttttttatcgccctgaagaggatgccggcgatgaaaaaggctatgaatcttttccttggtttatcaaacgtgcgcacagtccatccagagggctttacagtgtacatatcaacccatatctcattcccttctttatcgggttacagaaccggtttacgcagtttcggcttagtgaaacaaaagaaatcaccaatccgtatgccatgcgtttatacgaatccctgtgtcagtatcgtaagccggatggctcaggcatcgtctctctgaaaatcgactggatcatagagcgttaccagctgcctaaagttcccagcccggaagcgaggaaaataacccggcgctggagaataggtgaagcagcggatttagttggggtttcttctcaggctatcagagatgccgagaaagcagggcgactaccgcacccggatatggaaattcgaggacgggttgagcaacgtgttggttatacaattgaacaaattaatcatatgcgtgatgtgtttggtacgcgattgcgacgtgctgaagacgtatttccaccggtgatcggggttgctgcccataaaggtggcgtttacaaaacctcagtttctgttcatcttgctcaggatctggctctgaaggggctacgtgttttgctcgtggaaggtaacgacccccagggaacagcctcaatgtatcacggatgggtaccagatcttcatattcatgcagaagacactctcctgcctttctatcttggggaaaaggacgatgtcacttatgcaataaagcccacttgctggccggggcttgacattattccttcctgtctggctctgcaccgtattgaaactgagttaatgggcaaatttgatgaaagtaaactgcccaccgatccacacctgatgctccgactggccattgaaactgttgctcatgactatgatgtcatagttattgacagcgcgcctaacctgg

SEQ ID NO: 144068 - DNA, 5800 bp, Homo sapiens
  misc_feature (1)...(5800): n = a,t,c or g
atggcggaaacagcggttatcaatcacaagaaacgtaaaaatagcccgcgaatcgtccagtcaaacgacctcactgaggcggcatatagtctctcccgggatcaaaaacgtatgctgtatctgttcgttgaccagatcagaaaatctgatggcaccctacaggaacatgacggtatctgcgagatccatgttgctaaatatgctgaaatattcggattgacctctgcggaagccagtaaggatatacggcaggcattgaagagtttcgcggggaaggaagtggttttttatcgccctgaagaggatgccggcgatgaaaaaggctatgaatcttttccttggtttatcaaacatagaaaggcaggagagtgtcttctgcatgaatatgaagatctggtacccatccgtgatacattgaggctgttccctgggggtcgttaccttccacgagcaaaacacgtagccccttcagagccagatcctgagcaagatgaacagaaactgagcccgcgaatcgtccagtcaaacgacctcactgaggcggcatatagtctctcccgggatcaaaaacgtatgctgtatctgttcgttgaccagatcagaaaatctgatggcaccctacaggaacatgacggtatctgcgagatccatgttgctaaatatgctgaaatattcggattgacctctgcggaagccagtaaggatatacggcaggcattgaagagtttcgcggggaaggaagtggttttttatcgccctgaagaggatgccggcgatgaaaaaggctatgaatcttttccttggtttatcaaacgtgcgcacagtccatccagagggctttacagtgtacatatcaacccatatctcattcccttctttatcgggttacagaaccggtttacgcagtttcggcttagtgaaacaaaagaaatcaccaatccgtatgccatgcgtttatacgaatccctgtgtcagtatcgtaagccggatggctcaggcatcgtctctctgaaaatcgactggatcatagagcgttaccagctgcctcaaagttaccagcgtatgcctgacttccgccggcgcttcctgcaggtctgtgttaatgagatcaacagcagaacttccatgcgcctctcatacattgagaaaaagaaaggccgccagacgactcatatcgatctggctctgaaggggctacgtgttttgctcgtggaaggtaacgacccccagggaacagcctcaatgtatcacggatgggtaccagatcttcatattcatgcagaagacactctcctgcctttctatcttggggaaaaggacgatgtcacttatgcaataaagcccacttgctggccggggcttgacattattccttcctgtctggctctgcaccgtattgaaactgagttaatgggcaaatttgatgaaggtaaactgcccaccgatccacacctgatgctccgactggccattgaaactgttgctcatgactatgatgtcatagttattgacagcgcgcctaacctgggtatcggcacgattaatgtcgtatgtgctgctgatgtgctgattgttcccacgcctgctgagttgtttgactacacctccgcactgcagtttttcgatatgcttcgtgatctgctcaagaacgttgatcttaaagggttcgagcctgatgtacgtattttgcttaccaaatacagcaatagtaatggctctcagtccccgtggatggaggagcaaattcgggatgcctggggaagcatggttctaaaaaatgttgtacgtgaaacggatgaagttggtaaagctgccccgatggtggattcgttaattgcgcgcgtaggagtaatggctcgcggtaatgccattactttgcctgtatgtggtcgggatgtgaagtttactcttgaagtgctccggggtgatagtgttgagaagacctctcgggtatggtcaggtaatgaacgtgaccaggagctgcttactgaggacgcactggatgatctcatcccttcttttctactgactggtcaacagacaccggcgttcggtcgaagagtatctggtgtcatagaaattgccgatgggagtcgccgtcgtaaagctgctgcacttaccgaaagtgattatcgtgttctggttggcgagctggatgatgagcagatggctgcattatccagattgggtaacgattatcgcccaacaagtgcttatgaacgtggtcagcgttatgcaagccgattgcagaatgaatttgctggaaatatttctgcgctggctgatgcggaaaatatttcacgtaagattattacccgctgtatcaacaccgccaaattgcctaaatcagttgttgctcttttttctcaccccggtgaactatctgcccggtcaggtgatgcacttcaaaaagcctttacagataaagaggaattacttaagcagcaggcatctaaccttcatgagcagaaaaaagctggggtgatatttgaagctgaagaagttatcactcttttaacttctgtgcttaaaacgtcatctgcatcaagaactagtttaagctcacgacatcagtttgctcctggagcgacagtattgtataagggcgataaaatggtgcttaacctggacaggtctnggtgtgacaatctaaaaacttgtcacacttcacatggatctgtcatggcggaaacagcggttatcaatcacaagaaacgtaaaaatagcccgcgaatcgtccagtcaaacgacctcactgaggcggcatatagtctctcccgggatcaaaaacgtatgctgtatctgttcgttgaccagatcagaaaatctgatggcaccctacaggaacatgacggtatctgcgagatccatgttgctaaatatgctgaaatattcggattgacctctgcggaagccagtaaggatatacggcaggcattgaagagtttcgcggggaaggaagtggttttttatcgccctgaagaggatgccggcgatgaaaaaggctatgaatcttttccttggtttatcaaacgtgcgcacagtccatccagagggctttacagtgtacatattaacccatatctcattcccttctttatcgggttacagaaccggtttacgcagtttcggcttagtgaaacacaagagatcaccaatcccctgacttcagcgcaggtaaatgtgtcaaaatctgatgacacactcaaaaatcaacggagtggaggatcacaaaccgatcttggacggaggcggaaaaacatatcagaacgttcagcagtttatcgagaaaggcaattatacatccggcgacaaccatacgctgagagaccctcactacgttgaagacaaaggccataaatacctggtattcgaagccaacacgggaacagaaaacggataccaaggcgaagaatctttatttaacaaagcgtactacggcggcggcacgaacttcttccgtaaagaaagccagaagcttcagcagagcgctaaaaaacgcgatgctgagttagcgaacggcgccctcggtatcatagagttaaataatgattacacattgaaaaaagtaatgaagccgctgatcacttcaaacacggtaactgatgaaatcgagcgcgcgaatgttttcaaaatgaacggcaaatggtacttgttcactgattcacgcggttcaaaaatgacgatcgatggtattaactcaaacgatatttacatgcttggttatgtatcaaactctttaaccggcccttacaagccgctgaacaaaacagggcttgtgctgcaaatgggtcttgatccaaccgatgtgacattcacttactctcacttcgcagtgccgcaagccaaaggggggtcctttagagtccccaaacagggatttagtctgacgtgttttctttttaatatgctgtttcgtacccgttgtcttctaaccaacataggagagacctccattcagattccgattcacacggcaacgcttttgtccaggaccccatgcttggttgtcaggaggcttacttctgaacagatggcagattctgcgtcccaagggcgcttccccccattcggcaaatataaggctggaaaccccatgcgcgtttgttccatcaaaaattggccaccagatgccatagcgcatccccattattttctcatatttgaaatacgcaatagtaaggttctcagtcccgtgggaggaggagcaaattcggaaggccgggacaagcatggttctaaaaattgttgtcgtgaaacggatgaagttgatacttcgttatcgacaccagctgccccgatggtggattcgttaattgcgcgcgtaggagtaatggctcgcggtaatgccattactttgcctgtatgtggtcgggatgtgaagtttactcttgaagtgctccggggtgatagtgttgagaagacctctcgggtatggtcaggtaatgaacgtgaccaggagctgcttactgaggacgcactggatgatctcatcccttcttttctactgactggtcaacagacaccggcgttcggtcgaagagtatctggtgtcatagaaattgccgatgggagtcgccgtcgtaaagctgctgcacttaccgaaagtgattatcgtgttctggttggcgagctggatgatgagcagatggctgcattatccagattgggtaacgattatcgcccaacaagtgcttatgaacgtggtcagcgttatgcaagccgattgcagaatgaatttgctggaaatattctgcgctggctgatgcggaaaatatttcacagctcgtgcagcacgggcctgcgtcagaattatccacgccctctccttgtccacctaccgggcggcggcctggtgcagcccacaggcccagctgcggactccttgcgcgcgttagttgctacacatacggaacactcgcgcccatcgttccgcggcgggggaacggggtgtgacaatctaaaaacttgtcacacttcacatggatctgtcatggcggaaacagcggttatcaatcacaagaaacgtaaaaatagcccgcgaatcgtccagtcaaacgacctcactgaggcggcatatagtctctcccgggatcaaaaacgtatgctgtatctgttcgttgaccagatcagaaaatctgatggcaccctacaggaacatgacggtatctgcgagatccatgttgctaaatatgctgaaatattcggattgacctctgcggaagccagtaaggatatacggcaggcattgaagagtttcgcggggaaggaagtggttttttatcgccctgaagaggatgccggcgatgaaaaaggctatgaatcttttccttggtttatcaaacgtgcgcacagtccatccagagggcttttacagtggacatatcaacccctattctcattcccttctttatcgggttacagaaccggtttacgcatttttcgctttatggaacaaaagaaatcaccatccaaccggtttacgcaggttcggcttagtgaaacaaaagaaatcaccaatccgtatgccatgcgtttatacgaatccctgtgtcagtatcgtaagccggatggctcaagcatcgtctctctgaaaatcgactggatcatagagcgttaccagctgcctcaaagttaccagcgtatgcctgacttccgccgccgcttcctgcaggtctgtgttaatgagatcaacagcagaactccaatgcgcctctcatacattgagaaaaagaaaggccgccagacgactcatatcgtattttccttccgcgatatcacttccatgacgacaggatag

SEQ ID NO: 144069 - DNA, 7215 bp, Homo sapiens
  misc_feature (1)...(7215): n = a,t,c or g
ttatctaatctcccagcgtggtttaatcagacgatcgaaaatttcattgcagacaggttcccaaatagaaagagcatttctccaggcaccagttgaagagcgttgatcaatggcctgttcaaaaacagttctcatccggatctgacctttaccaacttcatccgtttcacgtacaacattttttagaaccatgcttccccaggcatcccgaatttgctcctccatccacggggactgagagccattactattgctgtatttggtaagcaaaatacgtacatcaggctcgaaccctttaagatcaacgttcttgagcagatcacgaagcatatcgaaaaactgcagtgcggaggtgtagtcaaacaactcagcaggcgtgggaacaatcagcacatcagcagcacatacgacattaatcgtgccgatacccaggttaggcgcgctgtcaataactatgacatcatagtcatgagcaacagtttcaatggccagtcggagcatcaggtgtggatcggtgggcagtttaccttcatcaaatttgcccattaagctggtactttgaggcagctggaacgctctagatccagtcgatttcagagagacgatgcctgagccatccggcttacgatactgacacagggattcgtataaacgcatggcatacggattggtgatttcttttgtttcactaagccgaaactgcgtaaaccggttctgtaacccgataaagaagggaatgagatatgggttgatatgtacactgtaaagccctctggatggactgtgcgcacgtttgataaaccaaggaaaagattcatagcctttttcatcgccggcatcctcttcagggcgataaaaaaccacttccttccccgcgaaactcttcaatgcctgccgtatatccttactggcttccgcagaggtcaatccgaatatttcagcatatttagcaacatggatctcgcagataccgtcatgttcctgtagggtgccatcagattttctgatctggtcaacgaacagatacagcatacgtttttgatcccgggagagactatatgccgcctcagtgaggtcgtttgactggacgattcgcgggctatttttacgtttcttgtgattgataaccgctgtttccgccatgacagatccatgtgaagtgtgacaagtttttagattgtcacattgttcaattagcccaacttctgtgctagtctgtaaattccgaacactttttcgtagaatggctgtaaacatgctccatatttctgcttgacatgttacatcacagtgctccaaaagctctgtcatacatgttatactctcagcatcctggataataaagttcatctccaagtcaaattctccaccaaccagcacaatacagtaaagaactgccatttgctcacttggattctgaattttcactgtagaatctggctctggatgtggtttgtgtacgacctgagtacatacttgttctgtcaagatctgaagcattagagcatgtggggaatgcacaaaaattgatgcattctcttttggtgatgattccaggcagagctgagcatcagtggccttagcattatatgtaaaggcaatgctacttgcaagtttcccatcatataacacctgtttatgatgttctgccaaatgaatatcactctcagatttaaacttgaaggtactcttgtagctccattgttttcctttctgtggatttctgtgttgctggncttgccagcgccctagcgcccgctcctttcgctttcttcccttcctttctcgcaacgttcgccggctttccccgtcaagctctaaatcgggggctcctttagggttccgatttagtgctttacggcacctcgaccccaaaaaacttgatttgggtgatggttcacgtagtgggccatcgccctgatagacggtttttcgccctttgacgttggagtccacgtttagtgggtagatccacaggacgggtgtggtcgccatgatcgcgtagtcgatagtggctccaagtagcgaagcgagcaggactgggcggcggccaaagcggtcggacagtgctccgagaacgggtgcgcatagaaattgcatcaacgcatatagcgctagcagcacgccatagtgactggcgatgctgtcggaatggacgatatcccgcaagaggcccggcagtaccggcataaccaagcctatgcctacagcatccagggtgacggtgccgaggatgacgatgagcgcattgttagatttcatacacggtgcctgactgttgtttcctgactttttaatgatcgccattctaactggtgtgagatggtatctcattgtggttttgatttgcatttctttgatgattagtgatgatgagcattttttcatgtgtcttttggctgcaaaaatgtcttcttttgagaagtgtctgttcatgtcctttgcccactttttgatggggttgtttgtttttttcttgtaaatttgtttgagttcattgtagattctggatactagccctttgtcagatgggtagattgcaaaaattttctcccattctgtaggttgcctgttcactctgatggtagtttcttttgctgtgcagaagctctttagtttaattagatcccatttgtcaattttggcttttgttgccattgcttttggtgttttaggcttgaagtccttgcccatgcctatgtcctgaatggtattgcctaggttttcttctagggtttttatggttttaggtctaacatttaagtctttaatccatcttgaattagtttttgtatgaggtgtaaggaagggatccagtttcagcttgctacatatggctagccagttttcccagcaccatttattaaatagggaatcctttccccattgcttgtttttctcaggtttgtcaaagatcagatggttgtagatatgcggcattatttctgaggcctctgttctgttccattggtctatatctctgttttggtaccagtaccatgctgttttggttactgtagccttgtagtacagtttgaagtcaggtagcgtgatgcctccagctttgttcttttggcttagaattgacttggcaatgcaggctcttttttggttccatatgaacttcaaagtagttttttccaattctgtgaagaaagtcattggtagcttgatggggatggcattgaatctataaattaccttgggcagtatggccattttcacgatattgattcttcctacccatgagcatggaatgttcttccatttgtttgtatcctcttttattttgttgagcagtggtttgtagttctccttgaagaggtccttcatgtcccttgtaagttggattcctaggtgttttattctctttgaagcaattgtgaatgggagttcactcgtgatttggctctctgtttgtctgttattggtgtataagaatgcttgtgatttttgcacattgattttgtattctgagactttgctgaagttacctatcagcttaaggagattttgggctgagacaatggggttttctagatatacaatcatgtcatctgcaaacagggacaatttgacttcctcttttcctaactgaataccctttatttccttctcctgcctgattgccctggccagaacttctaacactttgttgaataggagtggtgaaagagggcatccctgtcttgtgccagttttcaaagggaatgcttccagtttttgcccattcagtatgatattggctgtgggtttgtcatagatagctcttattattttgagatacgtcccatcaatacctaatttattgagagtttttagcatgaagcactgttgaattttgtcaaaggccttttccgcatctattgagataatcatatggtttttgtctttggttctgtttatatgctgaagaacagaagatctctggagcaccttctcctgcgctgatgggtacaaaactagtttctccagcagttctttgtgaagtgggtcggactcgagggcttcgtagaatgaaatgtcatgctggctaagaaggctgaacttagactttcggtagaaagtggccaggccttcgtgctgcttgattcgaaacaccccctcgagcccgaaggcctctagggcgggtaccaagctcctgaaacagatgacatcggcgttgtagccggtgagttccttctggataaggttctggcggtagtcgagctccagggcgtagggggcacagtatgggtacagaaccgttcgcgagaactcagtctgcgcgtacgtgtctgccaggatgttgtaagagacagtgcggatgagagcgtcctcagtcaccttcttcgtgtagagatgccggtggtcaaaagtgcaggtgccaggcccagcctctaccacacacacactttccaactcccggctgtgcccaaagcgctgcccatcgcctggggtgcagtgaagcttgagccttagcccgatgtcggcattggacggggtgtagacacgctcctccacatcagtctcagtccaagaagaagaaggtgaggagggagacaatgacgaggggacaccgacctcgggctccgccgctccgggcttggcttccttataccagcggaaaagggagctggcgggatccccaaattcgaggctgagtttggggcacacagggaacccggccatgatgtagcgcggcaactgcagttcggtgaaggcgggcgggttgcgctccaccttgtacttaacatcgccgatctgcagcaccgcgccgtcttgccaggcatccacgttgagcacgtcctcagccactgcctcttcccggtagtacagcttcaccacgggctcgcagaacacagccggctcaggccccggccctgaacaggccgcaccgccgctagcattcggccggctcttcctgctcttcttggcggcggccgccttagcgtgaccctttagggcattggtagcgatgcggctgaggactcgacccagcggctcgctctggtcgcgctgcatgttcttgtggctaccatcagccaaagcgaatgacaggctcagcttgggttccgaaggtacgcagcgcactacagcgcgctccatcgctcccgccgctgtctggctccccgcttcagcccggctcagcttctccaccgccgtccggatcacccgaagcgcggcgcgggcgcctgggagcctccacatgaacctggtggcgtgttccgcttcgttggaggaggtggacacctgtcttggaatcttggctgaccagctctcctccctgcgcccgggactggactgcgctaggacgtggaggcctccacccggattgcgagctttactcgcagtgtggaaggtgttgcccatttcatctccacagctttgccgaccctgatcgctcgtttcggtggcatcaggctcgaaccctttaagatcaacgttcttgagcagatcacgaagcatatcgaaaaactgcagtgcggaggtgtagtcaaacaactcagcaggcgtgggaacaatcagcacatcagcagcacatacgacattaatcgtgccgatacccaggttaggcgcgctgtcaataactatgacatcatagtcatgagcaacagtttcaatggccagtcggagcatcaggtgtggatcggtgggcagtttaccttcatcaaatttgcccattaactcagtttcaatacggtgcagagccagacaggaaggaataatgtcaagccccggccagcaagtgggctttattgcataagtgacatcgtccttttccccaagatagaaaggcaggagagtgtcttctgcatgaatatgaagatctggtacccatccgtgatacattgaggctgttccctgggggtcgttaccttccacgagcaaaacacgtagccccttcagagccagatcctgagcaagatgaacagaaactgaggttttgtaaacgccacctttatgggcagcaaccccgatcaccggtggaaatacgtcttcagcacgtcgcaatcgcgtaccaaacacatcacgcatatgattaatttgttcaattgtataaccaacacgttgctcaacccgtcctcgaatttccatatccgggtgcggtagtcgccctgctttctcggcatctctgatagcctgagaagaaaccccaactaaatccgctgcttcacctattctccagcgccgggttattttcctcgcttccgggctgtcatcattaaactgtgcaatggcgatagccttcgtcatttcatgaccagcgtttatgcactggttaagtgtttccatgagtttcattctgaacatcctgcaggaagcggcggcggaagtcagggcatacgctggtaactttgaggcagctggtaccgctctatgatccagtcgattttccagagagacgatgcttaagccatccggctttcgatactgacacagggattcgtataaacgcatggcatacggattggtgatttcttttgtttcactaagccgaaactgcgtaaaccggttctgtaacccgataaagaagggaatgagatatgggttgatatgtacactgtaaagccctctggatggactgtgcgcacgtttgataaaccaaggaaaagattcatagcctttttcatcgccggcatcctcttcagggcgataaaaaaccacttccttccccgcgaaactcttcaatgcctgccgtatatccttactggcttccgcagaggtcaatccgaatatttcagcatatttagcaacatggatctcgcagataccgtcatgttcctgtagggtgccatcagattttctgatctggtcaacgaacagatacagcatacgtttttgatcccgggagagactatatgccgcctcagtgaggtcgtttgactggacgattcgcgggctatttttacgtttcttgtgattgataaccgctgtttccgccatgacagatccatgtgaagtgtgacaagtttttagattgtcacaaagtatatcttcattttcatttgggtattttagttttagattgccagcagccactaaaacggcttttactgctcgcattccatagtcgtaatgaaattgcgatgagagctgctctgagcaaagcctataggtcattactattttcacagacagaggtcttgcattcaaaaatccgtaagagtagagggagatttctgctataagcgcatagtttggaaccatcatagccactgttctaaaaagaac

SEQ ID NO: 144070 - DNA, 6337 bp, Homo sapiens
atggcggaaacagcggttatcaatcacaagaaacgtaaaaatagcccgcgaatcgtccagtcaaacgacctcactgaggcggcatatagtctctcccgggatcaaaaacgtatgctgtatctgttcgttgaccagatcagaaaatctgatggcaccctacaggaacatgacggtatctgcgagatccatgttgctaaatatgctgaaatattcggattgacctctgcggaagccagtaaggatatacggcaggcattgaagagtttcgcggggaaggaagtggttttttatcgccctgaagaggatgccggcgatgaaaaaggctatgaatcttttccttggtttatcaaacgtgcgcacagtccatccagagggctttacagtgtacatatcaacccatatctcattcccttctttatcgggttacagaaccggtttacgcagtttcggcttagtgaaacaaaagaaatcaccaatccgtatgccatgcgtttatacgaatccctgtgtcagtatcttgtgtttgctcttgcgggaagcccgaaagacgctgatgacacatcaatctacatgttttatcaaaaggtcggcgacaactcaatcgacagctggaaaaacgcgggccgtgtctttaaagacagcgataagttcgacgccaacgatccgatcctgaaagatcagacgcaagaatggtccggttctgcaacctttacatctgacggaaaaatccgtttattctacactgactattccggtaaacattacggcaaacaaagcctgacaacagcgcaggtaaatgtgtcaaaatctgatgacacactcaaaatcaacggagtggaagatcacaaaacgatttttgacggagacggaaaaacatatcagaacgttcagcagtttatcgatgaaggcaattatacatccggcgacaaccatacgctgagagaccctcactacgttgaagacaaaggccataaataccttgtattcgaagccaacacgggaacagaaaacggataccaaggcgaagaatctttatttaacaaagcgtactacggcggcggcacgaacttcttccgtaaagaaagccagaagcttcagcagagcgctaaaaaacgcgatgctgagttagcgaacggcgccctcggtatcatagagttaaataatgattacacattgaaaaaagtaatgaagccgctgatcacttcaaacacgtgtgacaatctaaaaacttgtcacacttcacatggatctgtcatggcggaaacagcggttatcaatcacaagaaacgtaaaaatagcccgcgaatcgtccagtcaaacgacctcactgaggcggcatatagtctctcccgggatcaaaaacgtatgctgtatctgttcgttgaccagatcagaaaatctgatggcaccctacaggaacatgacggtatctgcgagatccatgttgctaaatatgctgaaatattcggattgacctctgcggaagccagtaaggatatacggcaggcattgaagagtttcgcggggaaggaagtggttttttatcgccctgaagaggatgccggcgatgaaaaaggctatgaatcttttccttggtttatcaaacgtgcgcacagtccatccagagggctttacagtgtacatatcaacccatatctcattccccttctttatcgggttacagaaccggtttacgcagtttcggcttagtgaaacaaaagaaatcaccaatccgtatgccatgcgtttatacgaatccctgtgtcagtatcgtaagccggatggctcaagcatcgtctctctgaaaatcgactgggatcatatgagcgttttcgtatcccctttgcggccatggtggaaaggacctcagaccgtcatcctgaccacccccacggctggctggttcaacatacgcaaatcagtaaacgtaatccagcatataaacagaaccaaagataaaaaccgcatgattatctcaccagatgcagaaaaggcctttgacaaaattcaacagcacttcatgctaaaaactctcagtaagctagatattgatgggaactacatgccgccgcctgctgcctactgcgtgattaggtatgcgctcatcgaggagcattactgctttatacctgggtcagcggtctgtgttaatgagatcaacagcagaactccaatgcgcctctcatacattgagaaaaagaaaggccgccagacgactcatatcgtatttattcgcgataagctcatggagcggcgtaaccgtcgcacaggaaggacagagaaagcgcggatctgggaagtgacggacagaacggtcaggacctggattggggaggcggttgccgccgctgctgctgacggtgtgacgttctctgttccggtcacaccacatacgttccgccattcctatgcgatgcacatgctgtatgccggtataccgctgaaagttctgcaaagcctgatgggacataagtccatcagttcaacggaagtctacacgaaggtttttgcgctggatgtggctgcccggcaccggcctgtgtaccaatctgcctttgtactggagttggttattagcattacccttaccatcaacagtactatgccagctgctgaacaaccattctgctatcctatggtcacagtgggctggtggggcaagacatattatcctattttaccaacgaagaatttgaggcttaggaagaaacccaagaggtaccgagaggttcagaaacttgcccacagtgacacaactggcaagttatggagctgggagttgaacccagcagtctggttccagggtccacctctggcaatacacagaaaggatgctaccactccatcaacccctatttcccaaggggtcacaagcccaaaccctaagaaaaagaacttcccactccagcctaaagaggtgcccccaggtttctctggtctgtggtttcccttgctgcagcaagttaataaggccaactttgatagtttcaggaaacccacacttcacatggatctgtcatggtcggaaacagcggttatcaatcacaagaaacgtaaaaatagcccgcgaatcgtccagtcaaacgacctcactgaggcggcatatagtctctcccgggatcaaaaacgtatgctgtatctgttcgttgaccagatcagaaaatctgatggcaccctacaggaacatgacggtatctgcgagatccatgttgctaaatatgctgaaatattcggattgacctctgcggaagccagtaaggatatacggcaggcattgaagagtttcgcggggaaggaagtggttttttatcgccctgaagaggatgccggcgatgaaaaaggctatgaatcttttccttggtttatcaaacgtgcgcacagtccatccagagggctttacagtgtacatatcaacccatatctcattcccttctttatcgggttacagaaccggtttacgcagtttcggcttagtgaaacaaaagagatcaccaatccgtatgccatgcgtttatacgaatccctgtgtcaatatcgtaagccggatggctcaggcatcgtctttctgaaaattgactggatcatagagcgttaccagctgcctgaaagttaccagcgtatgcctgactttcggcggcggttcctgcaggtctgtgttaatgagatcaacagcagaactccaatgcgcctctcatacattgagaaaaagaaaggccgccagacgactcatatcgatgttcagattgaaactgatggaaaactcaaccagtgcataaacgctggtcatgaaatgacgaaggctatcgccattgcacagtttaatgatgacagcccggaagcgaggaaaataacccggcgctggagaataggtgaagcagcggatttagttggggtttcttctcaggctatcagagatgccgagaaagcagggcgactaccgcacccggatatggaaattcgaggacgggttgagcaacgtgttggttatacaattgaacaaattaatcatatgcgtgatgtgtttggtacgcgattgcgacgtgctgaagacgtatttccaccggtgatcggggttgctgcccataaaggtggcgtttacaaaacctcagtttctgttcatcttgctcaggatctggctctgaaggggctacgtgttttgctcgtggaaggtaacgacccccagggaacagcctcaatgtatcacggatgggtaccagatcttcatattcatgcagaagacactctcctgcctttctatcttggggaaaaggacgatgtcacttatgcaataaagcccacttgctggccggggcttgacattattccttcctgtctggctctgcaccgtattgaaactgagttaatgggcaaatttgatgaaggtaaactgcccaccgatccacacctgatgctccgactggccattgaaactgttgctcatgactatgatgtcatagttattgacagcgcgcctaacctgggtatcggcacgattaatgtcgtatgtgctgctgatgtgctgattgttcccacgcctgctgagttgtttgactacacctccgcactgcagtttttcgatatgcttcgtgatctgctcaagaacgttgatcttaaagggttcgagcctgatgtatttattcgcgataagctcatggagcggcgtaaccgtcgcacaggaaggacagagaaagcgcggatctgggaagtgacggacagaacggtcaggacctggattggggaggcggttgccgccgctgctgctgacggtgtgacgttctctgttccggtcacaccacatacgttccgccattcctatgcgatgcacatgctgtatgccggtataccgctgaaagttctgcaaagcctgatgggacataagtccatcagttcaacggaagtctacacgaaggtttttgcgctggatgtggctgcccggcaccggatcagaaaatctgatggcaccctacaggaacatgacggtatctgcgagatccatgttgctaaatatgctgaaatattcggattgacctctgcggaagccagtaaggatatacggcaggcattgaagagtttcgcggggaaggaagtggttttttatcgccctgaagaggatgccggcgatgaaaaaggctatgaatcttttccttggtttatcaaacgtgcgcacagtccatccagagggctttacagtgtacatatcaacccatatctcattcccttctttatcgggttacagaaccggtttacgcagtttcggcttagtgaaacaaaagaaatcaccaatccgtatgccatgcgtttatacgaatccctgtgtcagtatcgtaagccggatggctcaggcatcgtctctctgaaaatcgactggatcatagagcgttaccagctgcctcaaagttaccagcgtatgcctgacttccgccgccgcttcctgcagtgctgctttgcagaccaagatgcctctgcgggaagcccgaaagacgttgatgacacatcaatctacatgttttatcaaaaggtcggcgacaactcaatcgacagctggaaaaacgcgggccgtgtctttaaagacagcgataagttcgacgccaacgatccgatcctgaaagatcagacgcaagaatggtccggttctgcaacctttacatctgacggaaaaatccgtttattctacactgactattccggtaaacattacggcaaacaaagcctgacaacagcgcagatccctaaacagcagcaaacggaaaaataccaagtgcctcaattcgatcaatcaacgattaaaaatattgagtctgcaaaaggacttgatgtgtgggacagctggccgctgcaaaacgctgacggaacagtagctgaatacaacggctatcacgttgtgtttgctcttgcgggaagcccgaaagacgctgatgacacatcaatctacatgttttatcaaaaggtcggcgacaactcaatcgacagctggaaaaacgcgggccgtgtctttaaagacagcgataagttcgacgccaacgatccgatcctgaaagatcagacgcaagaatggtccggttctgcaacctttacatctgacggaaaaatccgtttattctacactgactattccggtaaacattacggcaaacaaagcctgacaacagcgcaggtaaatgtgtcaaaatctgatgacacactcacaatcaacggagtggaagatcacaaaacgatttttgacggagacggaaaaacatatcagaacgttcagcagtttatcgatgaaggcaattatacatccggcgacaaccatacgctgagagaccctcactacgttgaagacattgttccataa

SEQ ID NO: 144071 - DNA, 4228 bp, Homo sapiens
atggcggaatcagcggttatcaatcacaagaaacgtaaaaatagcccgcgaatcgtccagtcaaacgacctcactgaggcggcatatagtctctcccgggatcaaaaacgtatgctgtatctgttcgttgaccagatcagaaaatctgatggcaccctacaggaacatgacggtatctgcgagatccatgttgctaaatatgctgaaatattcggattgacctctgcggaagccagtaaggatatacggcaggcattgaagagtttcgcggggaaggaagtggttttttatcgccctgaagaggatgccggcgatgaaaaaggctatgaatcttttccttggtttatcaaacggccaggcggtgaagggcaatcagctgttgcccgtctcactggtgaaaagaaaaaccaccctggcgcccaatacgcaaaccgcctctccccgcgcgttggccgattcattaatgcagctggcacgacaggtttcccgactggaaagcgggcaacaaaaacagcatatccactcagttccacatttccatataaaggccaaggcatttattctcaggataattgtttcagcatcgcaaccgcatcagactccggcatcgcaaactgcacccggtgccgggcagccacatccagcgcaaaaacttcgtggggatcctctagagtcaaaccgcgggggggaaaagtatatgggaatgtggcaagatgatgtgtgtcaagggaatggtgtggtggttacccagtttggattatactacgagggcaactttcaccttaataaaatgatgggaaatggggttttgctttccgaagatgatactatctatgaaggagaattttcagatgactggactcttagtggaaaggatctgaagccagtcccagaacgatgcaaccagtgcagccagctcttgattactatgactgacaaagaagaccatgtgattatatcagacagtcattgttgcccattaggtgtgacactgacagaatctcaggcagaaaaccatgccagcactgctctcagcccctccactgaaacccttgacaggcaggaagaagtatttgagaacactcttgtagcaaatgatcagtctgttgctactgaactgaatgcagtaagtgctcagatcacaagcagcgatgccatgtcctctcaacaaaatgtcatgggaacaactgaaatttcctctgccagaaacataccatcataccctgacacccaagcagtcaatgaatacctacggaaactgtcagatcattcagtaagagaggactcagagcatggtgaaaagccagtgccatctcagaaaaatggaataaaaggaataaaagagggaagggagttaaggaaaaagggaaataagtcaaagggcaaaggaagaaatgaaaacaaggttaagaagcaaggagataatgacactccaacaggtgacaataaaaatggaataaaaggaataaaagagggaagggagttaaggaaaaagggaaataagtcaaagggcaaaggaagaaatgaaaacaaggttaagaagcaaggagataatgacactccaacaggtgacaatgttttgccaaccacgaaagatgcttgttttgcctcagcagtagaatgtctgcagcagatcaggtggccctcctccagccgagcccccgagtcagtcctcatggtgctctccccgcggggctgccccggcgcaaccgccggcggcccgagcccagctccccgcgacgcagcggcctccgggacctgtgggacgccggggcttcgtggcgcctggcgaggcagccgccccctgagccagtgtgacaatctaaaaacttgtcacacttcacatggatctgtcatgccggaaaccgagcgggttatcaattcccaagaaaaggtaaaattagcccgcgaatcgtccagtcaaacgacctcattgagcgggcatatagtctctcccgggatcataaaacgtatgctgtatctgttcgctgaccagatcagaaaatctgatggcacccttacaggaacatgacggtatctgcgagatccatgttgcttaaatatgttgaaatatttcggattggccctctggcgggaagccagtaaggatatacggcaggcattgaagagtttcgcggggaaggaagtggttttttatcgccctgaagaggatgccggcgatgaaaaaggctatgaatcttttcccttggtttatcaaacgtgcgcacagtccatccagagggctttacagtgtacatatcaacccatatctcattcccttctttatcgggttacaaaacccggtttacgccagtttcggcttattggaaacaaagaaaattacccaatccgtatggccatgccgttaatacgaaatccctgggtcaatattcgaaggccggatggctcaggcatgcgtttctctgaaaatcgactggatcataaaagcgttaccagctggctcaaagtacccacagtatgcctgacttccgccgccgcttcctgcaggtctgtgttaatgagatcaacagcagaactccaatgcgcctctcatacattgagaaaaagaaaggccgccagacgactcatatcgtattttccttccgcgaatcccttcctgcaaaggatatctgagtcaattcgggaggatcgaaacggcagatcgcaaaaaacagtacatacagaaggagacatgaacatgaacatcaaaaaaattgtaaaacaagccacagttctgacttttacgactgcacttctggcaggaggagcgactcaagccttcgcgaaagaaaataaccaaaaagcatacaaagaaacgtacggcgtctctcatattacacgccatgatatgctgcagatccctaaacagcagcaaaacgaaaaataccaagtgcctcaattcgatcaatcaacgattaaaaatattgagtctgcaaaaggacttgatgtgtgggacagctggccgctgcaaaacgctgacggaacagtagctgaatacaacggctatcacgttgtgtttgctcttgcgggaagcccgaaagacgctgatgacacatcaatctacatgttttatcaaaaggtcggcgacaactcaatcgacagctgggaaaacgcgggccgtgtctttaaagacagcgataagttcgacgccaacgatccggatcctgaagatcagacgcaagaatggtccggttctgcaacctttacatctgacgggaaaatccgtttatgccttggcgttgctgacctcgcagttgactctagaggatccccctgcccttctttcctctctcccccaaatccccagctccccagtcctcagggtgtagacacaggaaggaggcatctgtgcccagctagcacttctgagctggatgctgcatcctgggggaccacagcgctcaggctcgggtgtgacaatctaaaaacttgtcacacttcacatggatctgtcatggcggaaacagcggttatcaatcacaagaaacgtaaaaatagcccgcgaatcgtccagtcaaacgacctcactgaggcggcatatagtctctcccgggatcaaaaacgtatgctgtatctgttcgttgaccagatcagaaaatctgatggcaccctacaggaacatgacggtatctgcgagatccatgttgctaaatatgctgaaatattcggattgacctctgcggaagccagtaaggatatacggcaggcattgaagagtttcgcggggaaggaagtggttttttatcgccctgaagaggatgccggcgatgaaaaaggctatgaatcttttccttggtttatcaaacgtgcgcacagtccatccagagggctttacagtgtacatatcaacccatatctcattcccttctttatcgggttacagaaccggtttacgcagtttcggcttagtgaaacaaaagaaatcaccaatccgtatgccatgcgtttatacgaatccctgtgtcagtatcatagaaaggcaggagagtgtcttctgcatgaatatgaagatctggtacccatccgtgatacattgaggctgttccctgggggtcgttaccttccacgagcaaaacacgtagccccttcagagccagatcctgagcaagatgaacagaaactgaggttttgtaaacgccacctttatgggcagcaaccccgatcaccggtggaaatacgtcttcagcacgtcgcaatcgcgtaccaaacacatcacgcatatgattaa

SEQ ID NO: 144072 - DNA, 5690 bp, Homo sapiens
atggcccactacgtgaaccatcaccaaaatcaattttttggggtcgaggtgcccaggcagaagaaaattcgtgaagatcataaatcctactatgcgattaacactgtttatgtatatggacaagagaaatacttgttgaggcagaagaaaattcgtgaagatcataaatcctactatgcgattaacactgtttatgtatatggacaagagaaatacttgttgtgccagctgtggaagctgcttgtgatgcgcctggtccagttgcagcctcgcagggagatggtgcccaagctggcatctggagctgcccaccccacagcagcagccggcgtgcctggctgtgcacagaggatagaacacctgggactcaatgtggtgctgcagctgctggtgggggtgcccctggagatggtgcatggagccacccgaattgggcttgtctacgtggccggtgttgtggcaggtaggcagtgtgacaatctaaaaacttgtcacacttcacatggatctgtcatggcggaaacagcggttatcaatcacaagaaacgtaaaaatagcccgcgaatcgtccagtcaaacgacctcactgaggcggcatatagtctctcccgggatcaaaaacgtatgctgtatctgttcgttgaccagatcagaaaatctgatggcaccctacaggaacatgacggtatctgcgagatccatgttgctaaatatgctgaaatattcggattgacctctgcggaagccagtaaggatatacggcaggcattgaatagtttcgcggggaaagaagtggttttttatcgccctgaagaggatgccggcgatgaaaaaggctatgaatcttttccttggtttatcaaactgctgtgctgggcacagtccatgaccatggtcccaggcctcatggagcttacaagtggagacagaagtgtaaaaacagtaaaaaagggtgccatcatagttattttggcacccgtattattccgacattacaaatatggggactggagctttggagaggctgccccgatggtggattcgttaattgcgcgcgtaggagtaatggctcgcggtaatgccattactttgcctgtatgtggtcgggatgtgaagtttactcttgaagtgctccggggtgatagtgttgagaagacctctcgggtatggtcagacaccggcgttcggtcgaagagtatctggtgtcatagaaatttgccgatgggagttccccgtgtaaagcctgcggaccttaccgatagtgattattcgggttcttgtttggcgagctggatgatgagccaaatggatggcattattccgatttggggtaacgattatcgcccaaacaatgtgcttaaggaacgtggttcagcgtttatgcaaagccggattgcagaaatgaattttgcttggaaaaaattttctgctccgggcttgatgttggataatattttccacttgaggacggggcaatcagctgatattgtccttctcacggccttggctattgagagtggtttgcagaggatccccatcgccattgcacagtttaatgatgacagcccggaagcgaggaaaataacccggcgctggagaataggtgaagcagcggatttagttggggtttcttctcaggctatcagagatgccgagaaagcagggcgactaccgcacccggatatggaaattcgaggacgggttgagcaacgtgttggttatacaattgaacaaattaatcatatgcgtgatgtgtttggtacgcgattgcgacgtgctgaagacgtatttccaccggtgatcggggttgctgcccataaaggtggcgtttacaaaacctcagtttctgttcatcttgctcaggatctggctctgaaggggctacgtgttttgctcgtggaaggtaacgacccccagggaacagcctcaatgtatcacggatgggtaccagatcttcatattcatgcagaagacactctcctgcctttctatcttggggaaaaggacgatgtcacttatgcaataaagcccacttgctggccggggcttgacattattccttcctgtctggctctgcaccgtattgaaactgagttaatgggcaaatttgatgaaggtaaactgcccaccgatgcacacctgatgctccgactggccattgaaactgttgctcatgactatgatgtcatagttattgacagcgcgcctaacctgggtatcggcacgattaatgtctggctccaagtagcgaagcgagcaggactgggcggaggacaaagcggtcggacagtgctccgagaacgggtgcgcatagaaattgcatcaacacatatagcgctagcagcacgccatagtgactggcgatgctgtcggaatggacgatatcccgcaagaggcccggcaccaaaggagtctctcctcatggccaccactgccccaggcccatggcgagtactgtctggctaccaccgatattcactcaaggcccaagggctcttcagccagctcatgatgaatgctgccaggcttgaatctctttcttcagggcaacaggttcccctctggctcagggaacagaaaagcacgtttaagagagaagcgtgtgaccaaatgacactcattgatgagtatgaatctaccatatcaagagaagcttttcatcaagacaatggaacaatgaggatgaaggaattttggagattatcagggcttctggcctatcacagaatgattttgaaggaggagttatgggcccctgcagaacctcagtgctctctgtgtgacaccatagcaagaatatgctcatcacattacaatgctgggctcctcagctgccacagtaaatgggtacgaatagagtggggcagtgctgaaaagatacccaaaaatatggaagcgactttggaactgggtaacatacagaggttggaacagtttggaggactcagaagaacacaggaaaattgtgacaatctaaaaaacttgtcacacttcacatggatctgtcatggcggaaacagcggttatcaatcaacaagaaacgtatttatagccctcgaatgcgaacagtaaaaagacggctatcagcaggcatatagcctcccccgggatctaatacttatgctgtatctgttggcgtgaccagatcagaaaatctgatggcaccctacaggaacatgaccggcatcctgccagatccatgttgctaaatatgctgaaatattcggattgacctctggcggaagccagtaaggatatacggcaggcattgaagagtttcgcggggaagggaagtggttttttatcgccctgaagaggatgccggcgatgaaaaaggctatgaatcttttccttggtttatcaaacgtgcgcacagtccatccagagggctttacagtgtacatatcaaccccatatctcattcccttcttttattcggttaccagaacccggttaacgcagtttctgcttatttgaaacaaaagaaatcccccatccgtctgccctggcgttattacaaatccctgttgtcagtatccgtaagcccgggatgggctcaaggcattcgcctctctgaaaatggaatggatccgagaagcggcgccagcggccccagagctaccagcgtatgcctgacttccgccgccgcttcctgcaggtctgtgttaatgagatcaacagcagaactccaatgcgcctctcatacatgagaaaagggatctctagaccgaaccgcagtttgcaacttagcttgaatgtgtctgctctgctcggactggctccagaattgcagccccacccctgtagtgtatacacagcatccacagcgccgggttattttcctcgcttccgggctgtcatcattaaactgtgcaatggcgatagccttcgtcatttcatgaccagcgtttatgcactggttcaccggcagtcccggagcgcaatgaaagacggtgagctggtgatatgggatagtgttcacccttgttacaccgttttccatgagcaaactgaaacgttttcatcgctctggagtgaacaccacgacgatttccggcagtttctacacatatattcgcaagatgtggcgtgttacggtgaaaacctggcctatttccctaaagggtttattgagaatatgtttttcgtctcagccaatccctgggtgagtttcaccagttttgatttaaacgtggccaatatggacaacttcttcgcccccgttttcaccatgggcaaatattatacgcaaggcgacaaggtgctgatgccgctggcgattcaggttcatcatgccgtttgtgatggcttccatgtcggcagaatgcttaatgaattacaacagtactgcgatgagtggcagggcggggcggtcaccgtcgacagcgacacacttgcatcggatgcagcccggttaacgtgccggcacggcctgtgtaaccagtgtgacaatctaaaaacttgtcacacttcacatggatctgtcatggcggaaacagcggttatcaatcacaagaaacgtaaaaatagcccgcgaatcgtccagtcaaacgacctcactgaggcggcatatagtctctcccgggatcaaaaacgtatgctgtatctgttcgttgaccagatcagaaaatctgatggcaccctacaggaacatgacggtatctgcgagatccatgttgctaaatatgctgaaatattcggattgacctctgcggaagccagtaaggatatacggcaggcattgaagagtttcgcggggaaggaagtggttttttatcgccctgaagaggatgccggcgatgaaaaaggctatgaatcttttccttggtttatcaaaccgccgggttattttcctcgcttccgggctgtcatcattaaactgtgcaatggcgatagccttcgtcatttcatgaccagcgtttatgcactgatccccgatgtgctgattgttcccacgcctgctgagttgtttgactacacctccgcactgcagtttttcgatatgcttcgtgatctgctcaagaacgttgatcttaaagggttcgagcctgatgtacgtattttgcttaccaaatacagcaatagtaatggctctcagtccccgtggatggaggagcaaattcgggatgcctggggaagcatggttctaaaaaatgttgtacgtgaaacggatgaagttggtaaaggtcagatccggatgagaactgtttttgaacaggccattgatcaacgctcttcaactggtgcctggagaaatgctctttctatttgggaacctgtctgcaatgaaattttcgatcgtctgattaaagggtaccgagctcgaattcgtaatcatggaaggacagagaaagcgcggatctgggaagtgacggacagaacggtcaggacctggattggggaggcggttgccgccgctgctgctgacggtgtgacgttctctgttccggtcacaccacatacgttccgccattcctatgcgatgcacatgctgtatgccggtataccgctgaaagttctgcaaagcctgatgggacataagtccatcatgttcaacggaagtctacacgaaggtttttgcgctggatgtggctgcccggcaccgggtgcagtttgcgatgccggagtctgatgcggttgcgatgcttaaacaattattctgaaaataaatgccttggcctttatatggg

SEQ ID NO: 144073 - DNA, 6876 bp, Homo sapiens
ctaaaaaccctggttcttcctggaaacagagacaacttggcttgcatacccgcttttcgactctagagatccccgaccaagcaggcgtccctgcatggtctgaccccttgaacgtgggtgtataatcagagaggcatccctgcaatgattaaacaccaagggaaggctgccttcccagtccgtgaccggcgccggagtttggggtccacagataaaacgtgtctcttttgtctttgctccttccccagaaaagcgggacttgccgctaagggtgaaggaccaaggcaggcgtccctgcatggtctgacacccttgaaacgtgggtgtataatcagagaggcatcccggatttgaaattggtgagatgtttcttgggctggtaggtctgaggacctgaggtcgtaggtggatctttctcacggagccaagagcaagaggacgggggattgatctcccagggaagtcccccgatcctgtcacagcaccaatttcatgcacgttcctgtgaaagaccaccaacagtcgcttttcgactctagaggatcccccgtataaacgcatggcatacggattggtgatttcttttgtttcactaagccgaaactgcgtaaaccggttctgtaacccgataaagaagggaatgagatatgggttgatatgtacactgtaaagccctctggatggactgtgcgcacgtttgataaaccaaggaaaagattcatagcctttttcatcgccggcatcctcttcagggcgataaaaaaccacttccttccccgcgaaactcttcaatgcctgccgtatatccttactggcttccgcagaggtcaatccgaatatttcagcatatttagcaacatggatctcgcagataccgtcatgttcctgtagggtgccatcagattttctgatctggtcaacgaacagatacagcatacgtttttgatcccgggagagactatatgccgcctcagtgaggtcgtttgactggacgattcgcgggctatttttacgtttcttgtgattgataaccgctgtttccgccatgacagatccatgtgaagtgtgacaagtttttagattgtcacactcaatcaccatgaagctggatcttctaatatcttttactgactgatatgggtttgggttcttgggcctcaccccaatctcatcttgaattggacttcccttattcccatgggggaaggacccagtgggaaaatattgattctggggccggttcccgcgtactggtattaattgcgttgcgctcactgcccgctttccagtcgggaaacctgtcgtgccagctgcattaatgaatcggccaacgcgcggggagaggcggtttgcgtattgggcgccagggtggtttttcttttcaccagtgagacgggcaacagctgattgcccttcaccgcctggccctgagaaagttgcagcaagcggtccacgctggtttgccccagcaggcgaaaatcctgtttgatgggtggttccgaaatcggcaaaatcccatgagacggcacagctgattgccttcccgcctgccctgagaagtgcacaagcgtccagctggttgcccacagcgaaatctgttgagggggtccgaatcgcaaaatccgcggccaccaccttagttgcctcgtagggggcgtctttcattgccatactgaactccggatgagcattcatcaggcgggcaagaatgtgaataaaggccggataaaacttgtgcttatttttctttacggtctttaaaaaggccgtaatatccagctgaacggtctggttatatgtacattgagcaactgactgaaatgcctcaaaatgttgtttgataaaccaaggaaaagattcatagcctttttcatcgccggcatcctcttcagggcgataaaaaaccacttccttccccgagaatctcttcaatggctcacgtatatccttagtggcttccgcagaggtctatccgaatatttcagcatatttagcaacatggatctcgcagataccgtcatgttcctgtagggtgccatcagattttatgatttggtcaacgagcagatacagcatacgtttttgatcccgggagaggctatatgccgcctcagtgaggtcgtttggctggacgattcgcgggctattattacgtttcttgtgattgataaccgctgtttccgccatgacagatccatgtgaagtgtggcaagtttttagattgtcgctctaaataaaaaagagtcaataagcagggataactttgtgaaaaaacagcttcttgtgagggcaatttgtcacagggttaagggcaatttgtcacagacaggactgtcatttgagggtgatttgtcacactgaaagggcaatttgtcacagctccttctctagaaccagcatggataaaggcctacaaggcgctctaaaaaagaagatctaaaaactataaaaaaaataattataaaaatatccccgtggataagtggataaccccaagggaagttttttcaggcatcgtgtgtaagcagaatatataagtgctgttcctgggtgctccctcgctcactcgagggcttcgccctgtcgctggactgcggcgagcactactggctgtaaaaggacagaccacatcatggttctgtgttcattaggttgttctgtccattgctgacataatccgctccacttcaacgtaacaccgcacgaagatttctattgttcctgaaggcatattcaaatcgttttcgttaccgcttgcaggcatcatgacagaccgcaacttcatatagtcggtacacggcctcgtagtatctagtaatgcggatctctacgataatggcaaattttccccgactgtttcggtcgcttctcaaggggataacagcccagcttctctgtttaacagacaaaaacagcatatccactcagttccacatttccatataaagggccaaggcatttattctcaaggataattgtttcagcatcgcagccgcatcagacttcggccattgccaacctgccccccgggtgcccgggcaagccccattccaggcccaaaaacctttggggtagccttcccgttgacctgatgcacttatgtcccatcaagctttgcaaaaactttcagcgggtataccgggctacagccatgggccttgcataagaaagggccgaacctagggggggggacccggaacaagaaaagggccacccggttagcagcagcgcgcggcaaccgcctccccaatccaggtcctgaccgttctgtccgtcacttccccaaatccgcgctttctctgtccttcctgtgcgacggttacgccgctccatgagcttatcgcgaataaatacctgtgacggaagatcacttcgcagaataaataaatcctggtgtccctgttgataccgggaagccctgggccaacttttggcgaaaatgagacgttgatcggcacgtaagaggttccaactttcaccataatgaaataagatcacttcagggcatggtaaccgattagattttggagatgaaggagagacactaccaaaggactctctcagatgacaagtatggataacggggtcatgagctaagattgtgtcaacaggaggtaaaacttttttaatggagaagatgataaatttcattctaaacgtgaagttctgggtgcctttgggacagccagcatgagccagaaaatgctgcaggaagcggcggcggaagtcaggcatacgctggtaactttgaggcagctggtaacgctctatgatccagtcgattttcagagagacgatgcctgagccatccggcttacgatactgacacagggattcgtataaacgcatggcatacggattggtgatttcttttgtttcactaagccgaaactgcgtaaaccggttctgtaacccgataaagaagggaatgagatatgggttgatatgtacactgtaaagccctctggatggactgtgcgcacgtttgataaaccaaggaaaagattcatagcctttttcatcgccggcatcctcttcagggcgataaaaaaccacttccttccccgcgaaactcttcaatgcctgccgtatatccttactggcttccgcagaggtcaatccgaatatttcagcatatttagcaacatggatctcgcagataccgtcatgttcctgtagggtgccatcagattttctgatctggtcaacgaacagatacagcatacgtttttgatcccgggagagactatatgccgcctcagtgaggtcgtttgactggacgattcgcgggctatttttacgtttcttgtgattgataaccgctgtttccgccatgacagatccatgtgactgcaggaagcggcggcggaagtcaggcatacgctggtaactttgaggcagctggtaacgctctatgatccagtcgattttcagagagacgatgcctgagccatccggcttacgatactgacacagggattcgtataaacgcatggcatacggattggtgatttcttttgtttcactaagccgaaactgcgtaaaccggttctgtaacccgataaagaagggaatgagatatgggttgatatgtacactgtaaagccctctggatggactgtgcgcacgtttgataaaccaaggaaaagattcatagcctttttcatcgccggcatcctcttcagggcgataaaaaaccacttccttccccgcgaaactcttcaatgcctgccgtatatccttactggcttccgcagaggtcaatccgaatatttcagcatatttagcaacatggatctcgcagataccgtcatgttcctgtagggtgccatcagattttctgatctggtcaacgaacagatacagcatacgtttttgatcccgggagagactatttgccgcctcagtgagggcgtttgactggacgattcgcgggctatttttacgtttcttgtgattgataaccggtggttccgccctgacggatccttgtgaaagtaggacaagctgagttgctgaatccggtttggcagagtcacacttgggcagccaaggagtgtggcaacagaatttggggagcagagccagtaatgtgaggttgtactgggcagtggtgcccccattctgtcctccacgcccttgtattatgcatttgtgatgggaagggtagccccaaatgatctccaaaatgcctttggggctattttccatttcttgcacagtaagtcctggcttctctgtttgaattcggctgtgaatccgtccagtcctggactttttttggttggtaattattgcctcaatttcagagcctattattggtctattcagggattcaacttcttcctggtttagtattgggatggtgtatgtgtccaggaatttatccttttcttctagattttctagtttatttgcatagaggtgtttatagtattctctgatggtagtttgtattccacgttcataagcacttgttgggcgataatcgttacccaatctggataatgcagccatctgctcatcatccagctcgccaaccagaacacgataatcactttcggtaagtgcagcagctttacgacggcgactcccatcggcaatttctatgacaccagatactcttcgaccgaacgccggtgtctgttgaccagtcagtagaaaagaagggatgagatcatccagtgcgtcctcagtaagcagctcctggtcacgttcattacctgaccatacccgagaggtcttctcaacactatcaccccggagcacttcaagagtaaacttcacatcccgaccacatacaggcaaagtaatggcattaccgcgagccattactcctacgcgcgcaattaacgaatccaccatcggggcagctggtgtcgataacgaagtatcttcaaccggttgagtattgagagtatgttttggaataacaggcgcacgcttcattatccggtgccgggcagccacatccagcgcaaaaaccttcgtgtagacttccgttgaactgatggacttatgtcccatcaggctttgcagaactttcagcggtataccggcatacagcatgtgcatcgcataggaatggcggaacgtatgtggtgtgaccggaacagagaacgtcacaccgtcagcagcagcggcggcaaccgcctccccaatccaggtcctgaccgttctgtccgtcacttcccagatccgcgctttctctgtccttcctgtgcgacggttacgccgctccatgagcttatcgcgaataaatacctggagtttttcccacggtggatatttcttcttgcgctgagcgtaagagctatctgacagaacagttcttctttgcttcctcgccagttcgctcggatactgacacagggattcgtataaacgcatggcatacggattggtgatttcttttgtttcactaagccgaaactgcgtaaaccggttctgtaacccgataaagaagggaatgagatatgggttgatatgtacactgtaaagccctctggatggactgtgcgcacgtttgataaaccaaggaaaagattcatagcctttttcatcgccggcatcctcttcagggcgataaaaaaccacttccttccccgcgaaactcttcaatgcctgccgtatatccttactggcttccgcagaggtcaatccgaatatttcagcatatttagcaacatggatctcgcagataccgtcatgttcctgtagggtgccatcagattttctgatctggtcaacgaacagatacagcatacgtttttgatcccgggagagactatatgccgcctcagtgaggtcgtttgactggacgattcgcgggctatttttacgtttcttgtgattgataaccgctgtttccgccat

SEQ ID NO: 144074 - DNA, 542 bp, Homo sapiens
agtcatttcattctcctggcttgtcgccaataaaattcaccttgcgagtttgttagtattctaacatctactccgcaacacacttcgatacacatcacaattaaggaaatctacttacaagtttgcatcactgtaatgcgatctggttcaaataattcactttcaaatgaatgcgtcagtggtggcaaacgcatcaggatcaaagtgaacatcacgaaacttcttacaatggcgcatcaccttcggcataaaaggaaaagaagatgcccacttctcatgaaaatgcactgcaacaacgttgccagcaaattgtcaccagcccagtgcttatcccggagcagaagcgccattttctggcactggaagcagaaaacaatctgccttacccacagcttcctgccgaagcccgccgcgcgctggatgaaggtgtaatctgcgatatgtttgaaggtcatgcgccgtacaaaccgcgctatgtcttacccgattacgcccgttttctggcgaacggttccgaatggctggagctggaaggcgcgaaa

SEQ ID NO: 144075 - DNA, 1889 bp, Homo sapiens
cacggtcgtgataaaagcctggcagcagatgcagctctttcagagggctacgtaatctctgataaaaatcaatctgcggttggcgatgcaccacatagtcatcgcctgatatcagaagttgcgtggggagcgtaatcgccgccgcatctctaataatacgttcagacgttttgtagagatcgagcaagatattaacggcaatcgcccgtgtgatcagcggatcattattgaaactcgccccccgttgccgatcgtgggtcaaatagcgtcctttcacataggaattaataaaaaacagaccacgcagacgatgccataacgccagcgcaggacgtgccagcggcacatacaatttaaccttaaaggccggagaagccagcaccagcccgcgaattgcaggtgcataatcatgaatccatgtggcaaccagcactgcgccgacgctttgcgcgatcactaccacctcttccagtccaacctggctgtcgctggcagcaaaacggacaaattcatcgacatcccgcactgaacgcgcaagagatgggctataaccacgcgggcccgaactttttccatgccctcgggcatcccaggcataaaaagcagtatctggcatcgccagttcatcaacgagatgttgtaaacgaccaaaaatgtcatgcccgcgatgaaataagacgatgaccttttcgcccgggtctttttccagcacggcattgaccacatcggtacgcatcatatcgcgaccggtaaatccagtttcaggttgccagccatcaataccaataaatgctttgctgaaatgcacctgttggatgcactggcgtgtcaaagggccaaccatactttcgctttttttctgatacacgccaccgagcaaaataacttcacaaggcgcgtctttcagcaaatgcgcgatgtagctgctgaccgtgatgatagtgacatttttcttctgctcgcccagagtccgggcgagtagggcattgctgctgccattttcgataaagatggtttcgcccggttgaaccagcgacgcggcaaactcggcgagttcacgcttcagcgtatagttgctcatcatacgggtttcgacgtcatcactatcaagcgaaacagcaaagccatgtgcccgggcggaggtaactcagtttttcgagtgtgttgagatcctggcgaatggtaacttcagaaactccagtggcttttgccagatcggttacgctaacctgaccctggtcaatgaccatcgctttatgcagtggacgggttgcgattttcagcaagaacgcgccgaccaggaaatagggcaccagaatcatttctgaggcgatggtcagcaacgtgttgtaatcggaaccggtcagccagatgagtaccagacaaatttgcacgcagatgttggtcaaccacagtgaggcggatggcgcagcttgtgcgttctggcgcgcaaaaatgcgcgggaatgctttatgagtggcggccaggaacggtacttctgctgccatgatggtccagcttaagtacgcgccgcaaacggaaacgatcaaaccggcagcgatgatgatttcgccccatggtcccatcatttccaccatcagaccggccattgacgggttacgaatttcagccagttcaggacgtgccaccacacccagcgaaagcagcgttaccagcaagtaaacgcccagagcggagagaaccgccagcagtgtcgctttgccaacatcacgtttattacgcgcacgcgcagaaacaaccacggtaccttccacaccaatgaaaacccacagggtgatcagcatggtgtttttcacctgttcccaaacgggtacgccaagtgcaagtcctgtgaagtcgagcttgaaggtatccagtttgaacatcat

SEQ ID NO: 144076 - DNA, 1888 bp, Homo sapiens
ctaacacgtcgccattattttgctgcatcgcccatccaatccagcgggccataaaggcttcgcgctgacgattgagcgcatcgccgaaggcgtcgccccgcagttgggcaaaatagtgcgccagcgcagagggtaatgcagtttgctggctttatcttcgaacaagtgatcccacagggtatcgctgttatccatgcgggtggcacgcagcagtaaggcctggctttcatcttgcgtatcaggcgaatcgtcctcttcttcactctgcgcccagcaaggcaaatcgatgaagtaagtttgtgcctgaatgcgacgtgcggcttgtagcgcctgccactccggcgaaaattcagcaaatggcgtccaggcaccacgcccgggggctgcaccgtcctgatactggcaataactgtaaatagctaccggaagctggtgggctaaaaacagttcgtctacccggtcattaaaatcagccgggccttcaatcaacacgtatcgtggccgctggctttcgattaacgatttcaccagccgggcgcaggccggactatgatgccggatgccgacaattaacggctcgctcatgcatctttcctcacggcaggcggtggcgggcttagcagtgtgcagaaaccgtcccagcgtgagcacttgttcggcatcgacatgcagccctgggtgtttcatcatcgctgcaggcgcgtcggcattcgccggatccaagcccatatgcacgttatagatgccaaaaccgagcttatcgcgcagtacgcgggccgcacaaatgttagcggcaatcatcgcttcttcgacgatacggttggccaatgcgacaagggctcggcgacgattatccagcacttcacctttttcaccgagaataaagcggtaatccgggcgatctttaaacaccagtgcgtggttatgacgccactcgccgcggcgttggcaaatttgcgctagcaaacggacttgttcggcaattgcttcactttcaggctgccagtcgaccggtattttccagccagtcagaaacctggtcatacaccagctttgctttggattcgatggtggcggcaaagaattcgatattatcttcaatggtgccatcagcggagagcgtcatgcggcatgccagtaccgggcggacttcattggcgcgcagtgagcagagatcgtcagaaagctcgcgaggcagcatagggatgttgaagccaggcagatagttggtgaatgcgcgaattttcgcggctttgtccagcttgctgccttcagcaatccacgcggtgcgactctgctcatcttgcggttcacttttggcaaccacacttaatcgggtcactgcggatggcgtttcgcctttcgcttctaatgccagttgacgcaaggcctggcagatataataaaagctggcggcatccggctcttgcgactgtttataagcgtcgagctgttcttgcatgatgtcctctctggcttcatcgagcaggttttccatcagatgcgtggtttcctgcaaaacgctgaagccaaaagttcctgcccctcctttgatcgagtgggcagcccgaaagatggcattcaattgttcggcatctggcacttccggctgcaaaaccagcaaatgctgctccatgtcagccaacagttcgtccgcttcatcaaaaaatgtctgataaaaatcgcttatatccatgctcacgctgtcacctcggttcggctgtggtgcaacctcaggtttttccagggcgcttactggctcattctggctttcggcgttttcatgcaaaatggcctgttcggcttgtttgttcagtaccagcaggctgatgcgacggttgacggcatcatcaggtccgcgatcgcttaagcgcatcgttgccgccat

SEQ ID NO: 144077 - DNA, 1793 bp, Homo sapiens
gtcggccacattattttttacgtcgactaatcctcttcccgctgtttcgccccatatttcgttatccgcatagtatcaggggcgctccccctgcctcacgtatatacttttgctctttcgatatcattcatatcaatatcatgcaaaagaaatcaatttacgttgcctacacgggcgggaccatcgggatgcagcgttccgagcagggttatataccggtgtcaggtcatctacaacgccaactggcgctgatgccggaattccatcgcccggagatgccagatttcaccattcatgaatatacgccgctgatggattcttcagatatgacgccggaagactggcagcatattgctgaagatattaaagcgcactatgacgactatgatggttttgtcattctgcacggcaccgacacgatggcgtataccgcctctgcgctgtcgttcatgctcgagaatctcggtaaaccggtcattgtgacagggtcacaaatcccgctggctgagttacgctctgacggacaaattaatctgctgaatgcgttgtacgttgcggcgaattatccgatcaacgaagtaacgctctttttcaataaccgattgtatcgcggcaaccgcactaccaaagcccatcaacgctgccagcgcgtcggcattcgccggatcaaagcccatatgcacgttatagatgccaaaaccgagcttatcgcgcagtacgcgggccgcacaaatgttagcggcaatcatcgcttcttcgacgatacggttggcaatgcgacgaggctcggcgacgatatccagcacttcacctttttcaccgagaataaagcggtaatccgggcgatctttaaacaccagctgccagtcaccggtattttccagccagtcagaaacctggtcatacaccagctttgctttggattcgatggtggcggcaaagaattcgatattatcttcaatggtgccatcagcggagagcgtcatgcggcatgccagtaccgggcggacttcattggcgcgcatgatgacgtcgaaacccgtatgatgagcaactatacgctgaagcgtgaactcgccgagtttgccgcgtcgctggttcaaccgggcgaaaccatctttatcgaaaatggcagcagcaatgccctactcgccttagagcacattgattctcgtggcctaaaggaaaagaagatgcccacttctcatgaaaatgcactgcaacaacgttgccagcaaattgtcaccagcccagtgcttagcccggagcagaagcgccattttctggcactggaagcagaaaacaatctgccttacccacagcttcctgccgaagcccgccgcgcgctggatgaaggtgtaatctgcgatatgtttgaaggtcatgcgccgtacaaaccgcgctatgtcttacccgattacgcccgttttctggcgaacggttccgaatggctggagctggaaggcgcgaaagatcttgatgacgcactctctctgctgaccattctttaccaccacgtaccgtcggtcacatcgatgccggtctacctggggccaattaacgagcgccgtatctttcaattaattcgggctgacagaacagccgatatggtccagttacgtcgattacttactcacgccgaacccgtacttgactggccattaatggccaggatgttgggcctggtggggaaagcgcgaacgccagcaacttctggaagattttgtattgaccacaaacaaaaatgcgtaaggaaacctttgtatgtctaactttatcaatattcatgttct

SEQ ID NO: 144078 - DNA, 2299 bp, Homo sapiens
atgaacaaatttattaaagttgcactggtaggtgcagtactggctacgttaactgcatgtactggtcatattgaaaaccgtgataagaactgctcttacgactacctgctgcacccggcaatttctatttctaaaatcattggcggttgcggtcctactgcacacgcttccaccaaaccgcgcaagattgacggtctgggcatcaagcatgttcagttaagcggtgaaggctgggatgcggatcgctgctgggcattctggcaaggttacaaagccccgaaaggcacgcgtaaagtggtgtggccggatctggacgatgcccagcgccaggaactggataaccgcctgatgatcatcgactgggtgcgtgacaccatcaacgcaccggcagaagaattgggaccatcgcaactggcacagcgtgctgttgatctgatcagcaacgtcgcgggcgatcgtgtgacttatcggatcaccaaaggcgaagatctgcgtgacaaggttatatggggctgcacacagtcggacgcggttcagaacgttctccggtattgctggcgctggattacaacccaactggcgataaagaagcgccagtgtacgcgtgcctgcatcaaacagactgcgtttatggactcgatgaagtcggacatgggcggcgcggcaacggttaccggggcgctggcatttgccattacgcgcggactgaacaagcgcgtgaagctgttcctctgcttccgcccggtactggcatgccgcatgacgctctccgctgatggcaccattgaagataatatcgaattctttgccgccaccatcgaatccaaaagcaaaggtggggtaagaccaggtttctgacgggttggaaaattccggtgactggcagcctaaaagtaaagcaatttccgaacaagtccgtttgatagcgcaaatttgccaaccccgcgcagagtggcgtcatacccacgcactggtgtttaaagatcgcccggattcacgctttattttcggtgaaaaaggtgaagtgctggatatcgtcgccgagcctcgtcgcattgccaaccgtatcgtcgaagaagcgatgattgccgttaacatttgtgcggcccgcgtactgcgcgataagctcggtttgggcatctataacgagcatatgggctttgatccggcgaataccgacgcgctggcagcgttgctgaaaacgcacggtctgcatgtcgatgccgaagaagtgctcacgctggacggtttctgcaaactgcgtcgtgaactggacgcgcaaccaactggtttcctcgacagcagcattcgtcgcttccagtcatttgctgaaattagcactgaacccggtcctcactttggcctcgcctcgtaccctatctggatcgagaacgtcgcctgggccgacaccattcgcgttcaaccgaactacccgcaactctcccgccgcaatttgcacgcgctgtcgttaaatattttcaaagatgaaggccgcgaagcgtttctgaaattaatggaaaccaccgatatcttcatcgaagccagtaaaggtccggcctttgcccgtcgtggcattaccgatgaagtactgtggcagcacaacccgaaactggttatcgctcacctgtccggttttggtcagtacggcaccgaggagtacaccaatcttccggcctataacactatcgcccaggcctttagtggttacctgattcagaacggtgatgttgaccagccaatgcctgccttcccgtataccgccgattacttttctggcctgaccgccaccacggcggcgctggcagcactgcataaagtgcgtgaaaccggtaaaggcgaaagtatcgacatcgccatgtatgaagtgatgctgcgtatgggccagtacttcatgatggattacttcaacggcggcgaaatgtgcccgcgcatgagcaaaggtaaagatccctactacgccggttgcggtctgtataaatgtgccgacggctacatcgtgatggaactgcaaagggagcaagtaatgaacaactttaatctgcacaccccaacccgcattctgtttggtaaaggcgcaatcgctggtttacgcgaacaaattcctcacgatgctcgcgtattgattacctacggggggcggcagcgtgaaaaaaaccggcgttctcgatcaagttctggatgccctgaaggcatggacgtgctggaatttggcggtattgagccaaacccggcttcagtaaatgttgtgaaaatagaagcaatgagggaagaaatgagggacactagttctattgggtaa

SEQ ID NO: 144079 - DNA, 490 bp, Homo sapiens; identical to SEQ ID NO: 143202

SEQ ID NO: 144080 - DNA, 730 bp, Homo sapiens
aaagctggaaaggcctgtggcttgggccctccgtttcctgccgttctttctctcgcttccccgctggatctccccagctcctcctggctttctccttgctgctgctccaatgcaccaagtgcactttagagcactgtagcaggccgtcgaagactgcctctgacagattggtctggcttccacgaaccgaactgtcgcttgatgatccgaaatggtgctccaccctggcccggatgctggcttccatgtattcgatgttgatggccgttttgttcttgcgtggatgctgtttcaaggttcttaccttgccggggcgctcggcgatcagccagtccacatccacctcggccagctcctcgcgctgtggcgccccttggtagccggcatcggctgagacaaattgctcctctccatgcagcagattacccagctgattgaggtcatgctcgttggccgcggtggtgaccaggctgtgggtcaggccactcttggcatcgacaccaatgtgggccttcatgccaaagtgccactgattgcctttcttggtctgatgcatctccggatcgcgttgctgctctttgttcttggtcgagctgggtgcctcaatgatggtggcatcgaccaaggtgccttgagtcatcatgacgcctgcttcggccagccagcgattgatggtcttgaacaattggcgggccagttgatgctgctccagcaggtggcggaaattcat

SEQ ID NO: 144081 - DNA, 812 bp, Homo sapiens; identical to SEQ ID NO: 143205

SEQ ID NO: 144082 - DNA, 1833 bp, Homo sapiens; identical to SEQ ID NO: 143206

SEQ ID NO: 144083 - DNA, 836 bp, Homo sapiens; identical to SEQ ID NO: 143208

SEQ ID NO: 144084 - DNA, 1822 bp, Homo sapiens; identical to SEQ ID NO: 143210

SEQ ID NO: 144085 - DNA, 2574 bp, Homo sapiens; identical to SEQ ID NO: 143212

SEQ ID NO: 144086 - DNA, 501 bp, Homo sapiens; identical to SEQ ID NO: 143215

SEQ ID NO: 144087 - DNA, 2352 bp, Homo sapiens; identical to SEQ ID NO: 143218

SEQ ID NO: 144088 - DNA, 1596 bp, Homo sapiens; identical to SEQ ID NO: 143222

SEQ ID NO: 144089 - DNA, 2243 bp, Homo sapiens
tcagccttccaagtagctgggactataggtgcacaccaccatgcccaggactctagaggatccccgaataactctccggcgcgtattcgccagttgcagaatatgaatatggcacagctccaggcggaaatcgcgaagcatttcccgtcgcgtctgggttacgttacaccgcttgccgctggtgcgtttccgctgacgcgtcgccatgcgttgcagtacgtgcagccagggcttgcgctggtgggcgatgccgcgcataccatccatccgctggcggggcagggagtgaatcttggttatcgtgatgtcgatgccctgattgatgttctggtcaacgcccgcagccgcttcatcaaccactttctcgccatcttccttggagaatgcgcctttttgcgcatctggcagaatttccagcaccacttctgaagggcggcacaggcgagttcccagcggcgtcaccacaatcgggcgattaatcagaatcgggtgggccagcgcagccagcgtcacaaacagcacaggcaggtcatggaccaaacaaaagacctgcaggcatggaagctcgcacctgcgaatttgcccgtcggcaccaatcaccacgttcgcgcgaatcacttcaccgcctttcagctccagctcctgaagatcatcatggcgatgcagcgcaatcagcgagctgtccagcgcctgccacaacgcctgttgcaggacagtgttttccaccatatagccaagcagcggtagcttaagttcagcggcgtcaaacaccacatgcgccgtttcccactcccacgtttccagtctgcggtaaggatggcaacgcatagcctgtactgcatcccagacccctaaccctttaagcaatgataccgaagccgcgctgatcgccgagatccgcacgtccggttggctatcagcgacaaacggcgctggttctgcgtgctcgatcaccgttaccgcaaatccgtgccctggcccaaatggctgctttgatttgaataacatcgccagttggttatcgtttttcagcaaccccttgtatctggctttcacgaagccgaactgtcgcttgatgatgcgaaatgggtgctccaccctggcccggatgctggctttcatgtattcgatgttgatggccgttttgttcttgcgtggatgctgtttcaaggttcttaccttgccggggcgctcggcgatcagccagtccacatccacctcggccagctcctcgcgctgtggcgccccttggtagccggcatcggctgagacaaattgcttctctccatgcagcagattacccagctgattgaggtcatgctcgttggccgcggtggtgaccaggctgtgggtcaggccactcttggcatcgacaccaatgtgggccttcatgccaaagtgccactgattgcctttcttggtctgatgcatctccggatcgcgttgctgctctttgttcttggtagagctgggtgcctcaatgatggtggcatccaccaaggtgccttgggtcatcatgacgcctgcttcggccagccagcgattgatggtcttgaacaattggcgggccagttgatgctgctccagcaggtggcggaaattcatgatggtggtgcggtccggcaaggcgctatccagggataaccgggcaaacagacgcatggaggcgatttcgtacagggcatcttccatggcaccgtcgctcaggttgtaccaatgctgcatgcagtgaatacgcagcatggtctccagcggatagggccgtcggccattgcccgccttgggataaaacggctcgatgacttccaccatgttttgccatggcagaatctgctccatgcgggacaagaaaatctcttttctggtctgacggcgcttactgctgaattcactgtcggcgaaggtaagttgatgactcatgatgaacccttccttagtgaagtcatttttgtcaagcaggttgattttgtaatcaacgaaagtagacatatttttgttgaagtaataggttgcacctacatcaacatatttgactaagtcctgatcgccccatactccaagatccttacctttagattgcaggtaagcaacggacggacgcagaccgaaatcgaactgatattgtgcaacagcttcgaagttttgggctttattagcaacgaagtgatcagcaaatacagtcatattctgggtttcagaataggtagtggccaggtaaatgttgttagcgtcatatttcagac

SEQ ID NO: 144090 - DNA, 1935 bp, Homo sapiens
ttaaccatgacgccggtgcaggcctgcgcgcttccggcgatccttgccggaagaagatgttcgcgtgcaggcgaaaaccggcagcggcaaaacggcggcttttggcctcggcttgttacagcaaattgatgcgaaaacgtggcgtgccccgagagacacccgggacagggcctcgcgcttatggcgcgcgctcacggtcgccccgatagtccgcccacccgagagccttcgccggggaccaccacctgtgtcgttattacagctattcgaaattacccgtcgtgcacataggttggcgtggtgttctgccacgctgacaataatctcatcgcccggttgcagacgcggatgaatacccagaatctcttttgtttcccgatggaacaaaattttcagcgtgcccacgttcatgccgacgatttgtgcgcgtgccagatgtttaaactgggcgcggcccacttcatatggcactttcattgcggtcagctgctgttcggttttgcccacagagcagcgcctgcgcggaatgcgctgtcgcttgatgatgcgaaatgggtgctccaccctggcccggatgctggctttcatgtattcgatgttgatggccgttttgttcttgcgtggatgctgtttcaaggttcttaccttgccggggcgctcggcgatcagccagtccacatccacctcggccagctcctcgcgctgtggcgccccttggtagccggcatcggtgagacaaattgctcctctccacgccattgcactctgctgcccggtttgaataacatgcggtaactggtgggttttcccttcgcgaatcaaattccccaccgcgggtgtgttaatcagcaattcaaatagcgccacgcgtccttcctgtttatccacttccagcttttgtgacagcactgcccgtaaactacagtgcaaaccaatttcccgctgctggatcaaacatcgctggctggcatagagatattcaacaggatcttccagcgtcagaatatgcgcatcggcatgttgattgagatagccaaccatcgccgccagcgtggtagatttgccactccccgtcgcccccgtcaccagaatcaggccattctcgctcttgagtaattccggcaataccgttggtgcgccaagctgttcgagctgcgggcagtgcgaaggtaacagccgtaacgccagcgaaatgccatgccgttgcgcgaatgcgctgccacgcaatcgctggttttccgccagcgacacggcaaaatccagctgaccattctccagcaatattgcccgctgatcgtcatccagccactcccgcagtagctcttcgacgtccggcgtatcaaacggcgcagcttccattctgccgcgaatgcgccatcgtgcgggccaggcgctgcacaggtgtagatccgagacgttatgctttacactaagggccacaatttcttccatattcatactaagatcctcggaaaatgaacgatattgcgcataaccttccagttctgccgcagcaaccgccgccgccagcgccagtgaaatcggttcagtacatcccagcgccggtgttacttcctcctgaacggcgaggatgtaacgctgccataacggatttaaagtcgaatcaaacatattaaaaaccatgccgaaaatcgggctacagatagaggtgaagctcaacaccggtgcgttcagtacgatggcgctccaggccagcaaaatggcgaaaatcatgatgccgcgctgaacgagattttcgttaatcttctcggcaggcatcttgcgacgcaggatgttcattacgatcccttgcgttgcttcgcgaaagcctaaatagacgccaaagaatgcagtcatgacagcaaagatattgagaatgacgctgaccactttcacccacgctgcgccgtcaccgctaataaactgtgcggccat

SEQ ID NO: 144091 - DNA, 1359 bp, Homo sapiens; identical to SEQ ID NO: 143163

SEQ ID NO: 144092 - DNA, 2112 bp, Homo sapiens; identical to SEQ ID NO: 143227

SEQ ID NO: 144093 - DNA, 1090 bp, Homo sapiens
ttctcccgcatggagcagattctgccatggcagaatatgaccgctgtcatcgagccgttttatcccaaggcgggcaatggccgacggccctatccgctggagaccatgctgcgtattcactgcatgcagcattggtacaacctgagcgacggtgccatggaagatgccctgtacgaaatcgcctccatgcgcctgtttgcccgattatccctggatagcgccctgccggatcgcaccaccatcatgaatttccgccacctgctcgagcagcatcaactggcccgtcaattgttcaagaccatcaatcgctggctggccgaagcaggcgtcatgatgacccaaggcactttggtggatgccaccatcattgaggcacccagctctaccaagaacaaagagcagcaacgcgatccggagatgcatcagaccaagaaaggcaatcagtggcactttggcatgaaggcccacattggtgtcgatgccaagagtggcctgacccacagcctggtcaccaccgcggccaacgagcatgacctcaatcagctgggtaatctgcttcatggagagaagcaatttgtctcagccgatgccggctaccaaggagcgccacagcgcgaggagctggccgaggtggatgtggactggctgatcgccgagcgtcccggcaaggtaaaaaccttgaagcagaatccgcgcaagaacaaaacggccatcaacatcgaatacatgaaagccagcatccgtgccagggtggagcacccgtttcgcatcatcaagcggcagttcggcttcgtgaaagccagatacaaggggctgctgaaaaacgatagtgtgtgtcttactggctctaaggataatgtactgctggtgatccatcactacggtgatagtagtgtcgtcatcgtgcgaactgaccatcttgtcatcggcaaggtatttttctttggtatacgggtccgtcacctcctggtattccagtttgatgttatcggcaatacacagcgcattcatcaggggctggacggttttttcctgcatatccacgaggtagtagtaactgccatcctcgcagccatcgggcgactggcgg

SEQ ID NO: 144094 - DNA, 1384 bp, Homo sapiens; identical to SEQ ID NO: 143230

SEQ ID NO: 144095 - DNA, 1380 bp, Homo sapiens; identical to SEQ ID NO: 143225

SEQ ID NO: 144096 - DNA, 2802 bp, Homo sapiens; identical to SEQ ID NO: 143231

SEQ ID NO: 144097 - DNA, 4228 bp, Homo sapiens
gaaggggctggcgcgcttggccaccgagttttccggcaatgtaccggtagtgaatgccggtgatggctccaaccaacatccgacgcaaaccttgctggacttattcactattcaggaaacccaggggcgtctggacaatctccacgtcgcaatggttggtgacctgaaatatggccgcaccgttcactccctgactcaggcgttagcgaagttcgacggcaaccgtttttacttcatcgcgccggacgcgctggcaatgccgcaatacattctggatatgctcgatgaaaaagggatcgcatggagtctgcacagctctattgaagaagtgatggcggaagtagagagcctgtacatgacacgcgtgcaaaaagagcgtctggacgttttccgcctcatcatcgcgcgttaatttcttttcataatcacgctttacaatatccagcgcgcgcagcacggtactggcagggatctgattttcctccagcagcacaatcaaatcgacagccagtttgacatcgtcaggggcattttccagtgacatattctctccattgctgttttcgattttttccagcgcatggcggcagcgtgccaggcgcgcttcataggcttccacttcacgatgcagcgtttgctgttccacgagatcggtcacccgcgccagacgggctctgcgttcggcaaccatctcacgtagccgccgctcaaaatcctgatgctgaatacgtttacgctgccagcgggcaattttcggtggtgcactgtcccactcgcgcaatgaccaggcggaggcttcacgcgcgatggcttccagttgtgccgccagatgttccgccagccaggccacttgcggcagctgttgctgctcaactgcatgacgaagcgcagccagattatcgcccgcctcgtcgagacaagcctgtagggttcttgcacgaggagctaaaaaataggcagtatccgtgtaccgaacaccgttgctgttttccaggcatcgaagggtcaccgcattacgctctggtctggcggaaggtgaaaaggtggtttccagcggcctgttcctgattgattccgaagccaatatttctggcgcactggagcggatgcgctctgaaagtgagtttgacgtctggataaacagaatcgacgtcagggtaaacggcagcgtaataatggcgtttttcaccagcagccccagcggcggtagcgaaccgacgttatacagatgccacattcccaccatcgacacgcccagcgccgcgaccaccagcagcttggtcagcaccatgccggtcgaaattttgaataacaatttctcgccgcgtgaggagatcgccaccagaatgcaaatcagtaccagaccataaaagggactgtctgacagcaacccttccgtcacgccgaaggtatgcaggtaggaagcactatcgttggtgatggcggtggaatagacgaacatccaaatcaccagcattacgaaatagagcgcacctaacaggatgccccagtttttacctaaataaccgctaatgacgctcgggtaatctttacattctggtgattgtatcatttggtccgcccgaaacaggttggccagcgtgaataacatcgccagttggttatcgtttttcagcaaccccttgtatctggctttcacgaagccgaactgtcgcttgatgatgcgaaatgggtgctccaccctggcccggatgctggctttcatgtattcgatgttgatggccgttttgttcttgcgtggatgctgtttcaaggttcttaccttgccggggcgctcggcgatcagccagtccacatccacctcggccagctcctcgcgctgtggcgccccttggtagccggcataggcgccgacaacagcgttgatgttctcggcataacgcgcagatttatctttaaactgcgtcatgcgactcagttcgccgaagtaggtatagcagttcagtgcccagcctaactgtgcatgttccggcacgtgggactgaacaaaaatggtgcttttctcaggatcgataccacaagccagatacaaggccagcgtatccagcgtcgctttacgcagcttctgtgcatcctggcgcacggtgatcgcgtgttggtcaacgatacagtaaatgcaatggtagtcatcctgcatgtttacccactgacgcagcgcacccatgtagttaccaatggtcaattcacctgagggctgtgcgccactaaaaacgatgggcttagtcatttttcgattcctgattgtcgctatgcggaagcccgtgatggcccgatattcaagctccgggctgcatcgaggccgcttatcgtggatcgtaccgcggtaattcttgaccaatcgaacccggtactgctgcaagaatatccgcgtcttcgtacgctggatgtcggagcagataagcagctgccttacatgccgatcagcgaagagaatccatgcctgggttggcgtgggattcgcattacgctcgatcagccggagatcttcttgatccaggtgcgggcgatgctgcgtgctaactgccggggcaacctgaatattctgttgccgatggtcacaagcctcgatgaagttgatgaagcacgccgcctgattgaacgtgccggacgtgaagtcgaggagatgatcggttacgaaattcccaaaccacgtatcggcatcatgtgcgaaggcgtcagctttcagagaagcaccaccaaccagcgcgccgtcgatatccggctgagcaaacagttctgcagcgttagacgcgtttacagagccgccgtactgaatgatcacttgttcagcgatgttagcgtcaactttagcgatgtggtcacggatgaatttgtgaacagcctgtgcctgagccggagttgcagatttgccagtaccgattgcccatacaggttcgtaagcgataaccgcaccttcgaatgccgcagcaccctgagttttcagtaccgcgtcgatctgacgtgcgcaaacttcttcagttttgcccgcttcattttcagcttcggtttcaccgatgcacagatccggaacagaccctgtcgtattgccgttaaggcggaaaccaacgccgatgatgccaatcaccagacccatgtgaagaactggctgcaatttcagccagtcaccaaaggtaaacggacgttgttcaacatcagcctgcttttcacgaaagaagcggtcggactcatgcacgcgtgacagaagaggattctttttcactcgtgaggcgtacaccatggtaaagatcaggccaatcagagtggcgataacccacaccacgatgcgcaacccggagccagaaagcaccggaacgccggcaatcccctgagcaacgaccacacaaaacgggttcatccacgaactggcaaaaccgatttgcgtggcaatataggtcaccaggacggtggtaatactgtcatagcccagccggaccattagcggtgcgatgataatggcaaaggcgacggcctcttctcccataccaaataccgcgccgccaagtgaaaacagaataaacagcgcaggaataaagagaatttcattcccgcgggtatggtgaataaacggcaggatacccttatcaatggttcctgtacgcatcacagaccccatgacctcttcatgagatcttctgagcaagtggattttctttccagagtccagggattccaggttgaatacaaagacttccccaaaaccaacaagaatgaatttgtatctcttatccattgctcctctcagccgcctctgatcagaacacgccataaggaaaaaggcagtataaaaacagcagtaatacccgttaatttccttgctgatatcttctggtgtgatcccgttctgctgaatgtttttgatctgcaggggaacagccagcagaccaccggcgagagcggtggtcagaataaatttcacagagtcaaaggtgtgagcctccagcgcgatatgtttaccatcaagtccccacatgaagctgatgatcattccggcaatcgtcagaaatacgcctgccagccagcgaatatggaacaaccgggttatgcgttcggtgatatagccagccagtaaggccgggccgaacagacacagcaatatgagccctgccagcgcagaagccgtgctgattaatgctctgaacaaaaggcgaagaatggcaaatcctgcgatcagcaggatcagcgcgccgactatctgtaacatggtcat

SEQ ID NO: 144098 - DNA, 1266 bp, Homo sapiens
atgcaaccggtgtatgaagaatataaacagtcggtgcatttccagaacgcctccggcgtgcgagctgaatgccatgactgtcatatcccgccggatattccaggcatggtgaagcgcaaactggaagcgagcaatgatatctaccagacctttattgctcactccattgatacacctgaaaaattcgaagccaaacgcgcggaacttgccgagcgtgaatgggcgcgaatgaaagaatactactcggcaacctgccgctcctgccataactacgatgcgatggatcatgcgaagcagcatcctgaagcagcacgtcagatgaaggtggcagcgaaagataatcaatcctgcatcgactgtcataaaggtattgcccaccagttaccggatatgagtagcggcttccgtaagcagttcgatgagctgcgcgccagtgctaatgacagtggtgacacgctgtactctattgatattaagccaatttatgcggcgaaaggcgataaagaagcctctggttctctgctgcctgcttcggaagtgaaagtccttaaacgtgacggcgactacagtgaattcagcagtaagcgccgtcagaccagaaaagagattttcttgtcccgcatggagcagattctgccatggcaaaacatggtggaagtcatcgagccgttttaccccaaggctggtaatggccggcgaccttatccgctggaaaccatgctacgcattcactgcatgcagcattggtacaacctgagcgatggcgcgatggaagatgctctgtacgaaatcgcctccatgcgtctgtttgcccggttatccctggatagcgccttgccggaccgcaccaccatcatgaatttccgccacctgctggagcagcatcaactggcccgccaattgtcaagaccatcaatcgctggctggccgaagcaggccatggtcaccaccgcggccaacgagcatgacctcaatcagctgggtaatctgctgcatggagaggagcaatttgtctcagccgatgccggctaccaaggggcgccacagcgcgaggagctggccgaggtggatgtggactggctgatcgccgagcgccccggcaaggtaagaaccttgaaacagcatccacgcaagaacaaaacggccatcaacatcgaatacatgaaagccagcatccgggccagggtggagcacccatttcgcatcatcaagcgacagttcggcttcgtgaaagccagatacaaggggttgctgaaaaacagataa

SEQ ID NO: 144099 - DNA, 2145 bp, Homo sapiens; identical to SEQ ID NO: 143232

SEQ ID NO: 144100 - DNA, 2466 bp, Homo sapiens; identical to SEQ ID NO: 143233

SEQ ID NO: 144101 - DNA, 1066 bp, Homo sapiens
atgtgtagcttcaggtcgcagacgttttgcagcagcagtcgcttcacgttcgctcgcgtatcggtgattcattctgctaaccaccgggtcctcaacgacaggagcacgatcatgcgcacccgtggccaggacccaacgctgcccgagatgcgccgcgtgcggctgctggagatggcggacgcgatggatatgttctgccaagggttgcggtacggcccgttgccagcgcctgtgcgccaacaagctgctatcataataccctgtcatcgggtggtccgtggtgatggcacactttccggttaccgctggggcgtgtcgcgtaaagcgcaactcgtgcgccgcgaagctgaaaatgaggagaggccaatcaatcgctggctggccgaagcaggcgtcatgatgacccaaggcactttggtggatgccaccatcattgaggcacccagctctaccaagaacaaagagcagcaacgcgatccggagatgcatcagaccaagaaaggcaatcagtggcactttggcatgaaggcccacattggtgtcgatgccaagagtggcctgacccacagcctggtcaccaccgcggccaacgagcatgacctcaatcagctgggtaatctgcttcatggagagaagcaatttgtctcagccgatgccggctaccaaggagcgcctcagcgcgaggagctggccgaggtggatgtggactggctgatcgccgagcgtcccggcaaggtaaaaaccttgaagcagaatccgcgcaagaacaaaacggccatcaacatcgaatacatgaaagccagcatccgtgccagggtggagcacccgtttcgcatcatcaagcggcagttcggcttcgtgaaagccagatacaaggggctgctgaaaaacgataaccaactggcgatgttattcaccctggccaacctgtttcgggtggaccaaatgatacccgtctataccgacctgcttgttaactacacgtaccgcatcgcttttgaagccgccgggggtcaggacttcggtctgctggcagcaattgccacgctgatcttcctgctggtgg

SEQ ID NO: 144102 - DNA, 1280 bp, Homo sapiens
ctgtagcacaccattattgagcgtagtctggtttgccgcgccacccatttgaacaatttgataaccgtcatttaatactgagtattctgcggcgccattcatttcaatgtactgataccctccgttaatttcagtattattacttacaccaaattcttttatatgctgttctccgccaggattgattttcgtattattggcggtcccataaaccagctggatatctttttccaggacaacaccatcaactgtctcaccatactcaacagttgatgccaatggtatcatttggtccgcccgaaacaggttggccagcgtgaataacatcgccagttggttatcgtttttcagcaaccccttgtatctggctatcacgaagccgaactgtcgcttgatgatgcgaaatgggtgctccacccctggcccgggatgctggctttcatgtattcgatgttgatgggcggtttgttcttgcgtggatgctgcttcaaggttcttaccttgccggggcgctcggcgatcagccagtccacatccacctcggcaagctcctcggcgctgtggcgccctttggtagccggcatcggctgagacaaattgcttctctccatgaagcagattacccagctgattgaggtcatgctcgttggccgcggtggtgaccaggctgtgggtcaggccactcttggcatcgacaccaatgtgggccttcatgccaaagtgccactgattgcctttcttggtctgatgcatctccggatcgcgttgctgctctttgttcttggtcgagctgggtgcctcaatgatggtggcatcgaccaaggttgccttgagtcatcatgacgcctgtcttcggccagccagcgattgatggtcttgaacaattggcgggccagttgatgctgctccagcaggtggcggaaattcatgatggtggtgcggtccggcaaggcgctatccagggataaccgggcaaacagacgcatggaggcgatttcgtacagagcatcttccatcgcgccatcgctcaggttgtaccaatgctgcatgcagtgaatgcgtagcatggtttccagcggataaggtcgccggccattaccagccttggggtaaaacggctcgatgacttccaccatgttttgccatggcagaatctgctccatgcgggacaagaaaatctcttttctggtctgacggcgcttactgctgaattcacccccggccacggtaagttgatgactcatgatgaaccctgttctatggctccagatgacaaacat

SEQ ID NO: 144103 - DNA, 1846 bp, Homo sapiens; identical to SEQ ID NO: 143234

SEQ ID NO: 144104 - DNA, 2257 bp, Homo sapiens
  misc_feature (1)...(2257): n = a,t,c or g
ctaacttcctgagcggtcacagatgggaataggtggtgtagagcgtggtcgaaccgttgatatgcgccttactggtaaagcgattaccgttgatttcagtctgcaccggcaggagtttatgcacctgatattccgattcgccggaggtcagcagatcccaggtggcgcgcactttgccaaaggtgactttcaggccatcacgggtggcgctgattttgcgctgatagtcagggtattcgccagcaatggttttatcggaaagcggtttcccttctttcgcttccagtttttccagcagttcgccgtcccacaccagatccagcggtttattgctggtgattttggtttccagtagtgacgtgcgcggcgtggcgaagcgcagagtcatttcgacttgcacatcttttgctgtcagtttttgcaccagcgcaccgggaatactgtatgcctccagcgtaaagtcgactttcttgccgtcctgccagacggtcaggcggtcgaaattgctggccataaagttgatgtactcttccgtcagcagcgcaacgcccggaaagccgcccatggtgttagggccgtctggcaacagatgaccatgccaggctccgagatcgaaaaacggattaaaacgctggtgatcgtcgtaatcgtaatccttcatgtactgcggcgcgccagtacggttaatcacgtttttataattgtcggcgttagcggcatgggcggaaaaacttatcagcagagcgcaacgggcttccagaatatcgaaactgtaatccggatcatcggccatcagtgtttttagcggctggacgatgttttgctccgaccatgtgtcatgacgccagcgaataaacgtcccgccgccgcgtcgactgagcagcacgccttcactcaccagttttgccacgccggtgacgccaccggtggtattggcggcaaccagcaacagatcagagacgccaatttgttgtgctgcggtggctgaacgaagatgaccacttgccttggtgatcaatgtgttactgagctcagccaatttctgcaggacccgctcgtctgaccccaaagtcaaagctgcctcctcctccttctccatccccaacgatgactgttnatcgccagttggtaatcgtttttcagcaacccctttgtatctggctttcacgaagccgaactgtcgcttgatgatgcgaaatgggtgctccaccctggcccggatgctggctttcatgtattcgatgttgatggccgttttgttcttgcgtggatgctgtttcaaggttcttaccttgccggggcgctcggcgatcagccagtccacatccacctcggccagctcctcgcgctgtggcgccccttggtagccggcatcggctgagacaaattgctcctctccatgcagcagattacccagctgattgaggtcatgctcgttggccgcggtggtgaccaggctgtgggtcaggccactcttggcatcgacaccaatgtgggccttcatgccaaagtgccactgattgcctttcttggtctgatgcatctccggatcgcgttgctgctctttgttcttggtcgagctgggtgcctcaatgatggtggcatcgaccaaggtgccttgagtcatcatgacgcctgcttcggccagccagcgattgatggtcttgaacaattggcgggccagttgatgctgctccagcaggtggcggaaattcatgatggtggtgcggtccggcaaggcgctatccagggataaccgggcaaacagacgcatggaggcgatttcgtacagagcatcttccatcgcgccatcgctcaggttgtaccaatgctgcatgcagtgaatgcgtagcatggtttccagcggataaggtcgttctctgtgagcagccttggggtaaaacggctcgatgacttccaccatgttttgccatggcagaatctgctccatgcgggacaagaaaatctcttttctggtctgacggcgcttactgctgaattcacctttaagatcaacgttcttgagcagatcacgaagcatatcgaaaaactgcagtgcggaggtgtagtcaaacaactcagcaggcgtgggaacaatcagcacatcagcagcacatacgacattaatcgtgccgatacccaggttaggcgcgctgtcaataactatgacatcatagtcatgagcaacagtttcaatggccagtcggagcatcaggtgtggatcggtgggcagtttaccttcatcaaatttgcccat

SEQ ID NO: 144105 - DNA, 3973 bp, Homo sapiens; identical to SEQ ID NO: 143238

SEQ ID NO: 144106 - DNA, 3177 bp, Homo sapiens; identical to SEQ ID NO: 143240

SEQ ID NO: 144107 - DNA, 763 bp, Homo sapiens
ctaacagcgcatctgcaccgtcaaacaattgccattgccgataatttcgcgtagtgaacccagcacgaacatggcgcagttgcgcccataccaattgaaaagccgtccagtgccgaaagcgccggacttttttggcggcgaaggcttcagcgcggcccacaacgatacagttagtgcaatcagcggaataaaaatccctaatgattgatacaggccaaaggcgtagcgttgatcagcatctgtacagcgctgaccaccgaggcgatgatcatcagtaaatgggaatgcggatctcggctccatgggttcttgggagtgaaactggcatgcgattgcctgacctgggagttgctggatgccacgatgaagacgaactgccttgggaggcgacaccaggcctaaaatttgacggtgatgccttgtggcaagtttgtggatgttgtggaagatgaaaaaggcgatgttgcgatgatgttgaagatgaggaagatgggctgatgaaggctgtgttgcaatgaaaagatgatgatggggatgatgatgttgagatgatgttgagctgagatctggggacgtgatgattggtgatggaagatggaacactaatgctgatgccccgaaatctgcgagggttgacgtttcgaagccggcattacgccttccgttgttaccgaggccgatgacgtgggagccaaaatttaataagccgggacgaatcagccaaatatgattcatcgccaataggacggtgcacggatggtct

SEQ ID NO: 144108 - DNA, 1989 bp, Homo sapiens
atgctggccaggaaatggttgaggtaccctaagtctgggcacatggtgctgccagccgaacgctataacaatgcgctggcacagagttgctatctggtaactgcgccagagttaggtaaaggtgagcatcgggtttacatcgccaaacaggatgacaaaccggtagccgccgttctggaagcaaccgcgccagatggctattccggtgcgattcagctgctggtgggagccgattttaacggcacggtacttggcacgcgcgtgacagagcaccacgaaacgccagggcttggcgataaaatcgaactgcgcctttctgactggatcacccattttgcgggtaaaaaaatcagtggtgcagatgatgcgcactgggcggtgaagaaagatggtggtgatttcgaccagttcaccggcgcgacgattactccccgcgcggtggttaatgcggggttgtggaaaaacaactctgcgctggtccagttgctcggcctttgtcctctgttggcggtcacgtccactgccactaacgctctgggtttaggacttgcgactacgctggtactgacgctgaccaacctgaccatttcgacgctgcgtcactggacgccagccgagatccgcattcccatttacgtgatgatcatcgcctcggtggtcagcgctgtacagatgctgatcaacgcctacgcctttggcctgtatcaatcattagggatttttattccgctgattgtcactaactgtatcgttgtgggccgcgctgaagccttcgccgccaaaaaaggtccggcgctttcggcactggacggcttttcaattggtatgggcgcaacctgcgccatgttcgtgctgggttcactacgcgaaattatcggcaatggcacattgtttgacggtgcagatgcgctgttaggtagctgggcaaaagtattacgcgtggagattttccacaccgactcccctttcctgctggcgatgctgccaccaggtgcatttattggcctgggactgatacgcgcccatgctgccggagggatcgcattaggtgccacgcgtattatttatcccgctgatgctaaacagactgcggtatggattagaaatagccataccaatgagcgctttctggtcaattcgtggattgaaaacagcagcggtgtaaaagaaaagtcattcatcattacaccgccactgtttgttagtgaacccaaaagcgaaaatactttgcgtattatttacaccggtccaccgctggcagcagatcgtgagtctctgttctggatgaatgttaagacgatcccttcggtagataaaaatgcattgaacggcaggaatgttttgcaactggcgattttatcgcgcatgaaattatttctccgtccaattcaattacaagaattacccgcagaagcgccggacacactcaagttttcgcgatccggtaactatatcaatgttcataatccatcacctttttatgtcaccctggttaacttacaagtgggcagccaaaagttggggaatgctatggctgcacccagagttaattcacaaattcccttaccctcaggagtgcagggaaagctgaaatttcagaccgttaatgattatggttcagtaactccgaggtatacctggtgtctggccggaatttgttattcatctcttgccattttaccctcctttttaagctatgcggaaagttatttcaacccggcatttttattagagaatggcacatccgttgctgatttatcgcgctttgagagaggtaatcatcaacctgcgggcgtgtatcgggtggatctctggcgtaatgatgagttcattggttcgcaggatatcgtatttgaatcgacaacagaaaatacaggtgataaatcaggagagggtatggcgatagccacaactaaacgtcaagtggaaaatctccatagacagttttcgggatatcttcatcgttgtggatctggtgttggagactga

SEQ ID NO: 144109 - DNA, 837 bp, Homo sapiens
atggaaagcgcagaacatccgcacaatgagaatgctgggagcgatgcgcatcgcgattggagtgatgaaactggcgaagtcgcagatcccgtaatcgtagaagacatggagccaggtatttattacggaatttcgaatgagaattaccacgcgggtcccggtatcagggagtctcagctaaatgacattgctgatactccggcactatatttgtggcgtaaaaatgcccccgtggacaccacaaagacaaaaacgctcgatttaggaactgctttccactgccgggtacttgaaccggaagaattcagtaaccgctttatcgtagcacctgaatttaaccgccgtacaaacgccggaaaagaagaagagaaagcgtttctgatggaatgcgcaacacaggaaaaacgcgccggacacgctgaatcatcaatttactgggaagatcctgaaacaggaattttgtgtcggtgccgtccggacaaaattatccctgaatttcactggatcatggacgtgaaaactacggcggatattcaacgattcaaaaccgcttattacgactaccgctatcacgttcaggatgcattctacagtgacggttatgaagcacagtttggagtgcagccaactttcgtttttctggttgccagcacaactattgaatgcggacgttatccggttgaaattttcatgatgggcgaagaagcaaaactggcaggtcaacaggaatatcaccgcaatctgcgaaccctgtctgactgcctgaataccgatgaatggccagctattaagacattatcactgccccgcatggctaaggaatatgcaaatgactaa

SEQ ID NO: 144110 - DNA, 924 bp, Homo sapiens
cttggcatcttaatgagtggcactctggtggtctgaccgacctccgtaaagcagaaactgctgccaagcatggtaaagatctggaggcgctcttggaatgaagaaatagttccccagattaaggaggggaaatgggtactgattacagcccatggcaacagcttccccggcattgtcaagcatctggagggtctctctgcagagcagaacctgctgactgctattctcgttgtctatgaattggacaagaacttgaagcacatcaggcgcatgcagaccacatctgtaggcatctgaagttgtagctacagatgagtaccagtggctcccatttttcatttcagccatttttctcctgcacccactgtcttcacacaatctagacaagatagcaagcagtgcattttgagacaacattgtcatttaatccttataagtagatcttcttctttggtccccgcaggcctcaggggagcaatggcatttgcgttggccatccgtgacacggcatcctatgctcgccagatgatgttcacgaccacccttctcatttgcccagagctcctggctctcctgttgtccctgtcacactcacgttcccttcttctgcatggctaccatgggccaagctaatacgctctgtttttctctttgtctttctccctggtgactggggttggtgccaaacctggaagatatcagtctctcatttttgttgttgttgttggttgcacttttcagaaccaagagccactgagagaggaagactctgatttcatcctgaccgaaggcgacctgacattgacctacggggacagcacagtgactgcaaatggctcctcaagttcgcacaccgcctccacgagtctggagggcagccggagaacgaagagcagctcggaggaagtgctggagcgagacctg

SEQ ID NO: 144111 - DNA, 665 bp, Homo sapiens
gctccactaaatgaagaatcctttgggatccagcttgttgaaaatacggagttgaatcctggtccttatggtggaaccacccaggaagctatatgagaaaaagcttttgaaactgagggaacaaggaacagaatcaagatcttctactcctctgccaacaatttcttcttcagcagaaaatacaaggcagaatggaagtagtgattctgacagatacagtgacaatgaagaagactctaaaatagagctcaagcttgagaagagagaaccactaaagggcagagcaaagactccagtaacactcaagcaaagaagagttgagcacaatcagagctattctcaagctggaataactgagactgaatggacaagtggatcttcaaaaggcggacctctgcaggcattaactagggaatctacaagagggtcaagaagaactccaaggaaaagggtggaaacttcagaacattttcgtatagatggtccagtaatttcagagagtactcccatagctgaaactataatggcttcaagcaacgaatccttagttgtcaatagggtgactggaaatttcaagcatgcatctcctattctgccaatcactgaattctcagacatacccagaagagcaccaaagaaaccattgacaagagctgaagtgggag

SEQ ID NO: 144112 - DNA, 4794 bp, Homo sapiens
ttcccagtaaattgatgattcagcgtgtccggcgctttcaacaagccattgccccagcggcaaagccataacgctttgatacatgagttcaattttccggccttcttccgcagtgataaccgtttttcctgtgcttgcgcattccatcagaaacgctttctcttcttcttttccggcgtttgtacggcggttaaattcaggtgctacgataaagcggttactgaattcttccggttcaagtacccggcagtggaaagcagttcctaaatcgagcgtttttgtctttgtggtgtccacgggggcatttttacgccacaaatatagtgccggagtatcagcaatgtcatcgagctgagacttactgataccgggacccgcgtggtaattctcattcgaaattccgtaataaatacctggctctatgtcttctacgattacgggatctgcgacttcgccagtttcatcactgcaatcgcgatgcggatcgctgccagcattctcattgtgcggatgttcagcgccttccatttcctccggatcattttccttagcttcaacctgattctcttcatcgaatgtttcctggtatgttgcgtcgcccatcaccgcaccacagtcagggcagttatccccgccagtctggccgcaggcattgcaggctatttccggttcctgttgcactactggctcaggttgattcatatctgggctggttttttccgtttctggctggttctggtacacacaatcgcgagtctggatcccctttacccatttcggatcgttcgggtcgctaattccgtcaacaaattcaccacgtgatgcagcaagcaatttatcgtcatcgacaggattttttgatggaatgtttttccgggcttcatggagttctgcccgcagttcctgatatttcgcatcaacagaatttacctgtgactgagcatccagcggctgcgtgtcctgatgatgttcagttgcgtccggttccattgtttcagcctctccctgttcaactgccgttgttccagatggttgcggtttttcttcatcatcctgttttccttcttctgttactcgctgcggcatcggggcagaggagcgaccgcaggcaatatccacgatttccggatcagggttggcatgatcggtttcagtcagtactttgttcagatattcagtgacgtgcgcggggatgacctcgatcccaattggtgcttcttttacggacgcaaccacgatggcgcgggaataatccagcccgccaggcatggtgatgaatttgtcgcggaaaacagaaaagggcggtttattttcagcgataatttcctcaatgcgtttagcgtgtgccggatgaaggttatagatgtccagatccattgaacgggccagtacgccagtggcttttaagaatgaagctgccggaattatctcagcacctggatactcttcagagaatcgcgcaggtcggcggtgctgctggtccccgggcagaggaggcgtgggcggctccgggaccacggagcctggtgacgcggcgctcccctgcccgggtcgggttgcccaggcgccgccgcggcggctgctgctgctgctgccgctgctgctgggtaggggacttcgagtaacggccgaggcctcggcctcctcctctggggcggcggtcgagaacagcagcgccatggaggagctcgtcactgagaaggaggcggaagagagccaccggccagacagtgtgagcctgctcaccttcatcctgctgctcacgctggccatcctcaccatatggctcttcaagtactgccgggtgcactttctgcatgagaccgggctggccatgatctggggggctcattcgttggggtgatcctgaggtatggtacccctggcaccaggggccgtgacaaattactcaattgcactcaagaagatcaggccttcagcactttagtagtggatgtcagcggtaaattcttcgaatacaccctgaaaagagaaatcagccctggcaagatcaacagcgtaaagcagaatgacatgctagggaagtcagttggcatttttctaggtatatttagtggctgttttaccatgggagctgtgactggtgttgtgactgctttagtgaccaagtttaccaaactggactgctttcccctgctggagacggcgctcttcttcctcatgtcctggagcacgtttctcttggcagaagcttgcggatttacaggcgttgtagctgtccttttctgtggaatcacacaagctcattacaccttcaacaatctgtcggtggaatcaagaagtcgaagcaagcagctctttgaggtgttacatttcctggcagagaacttcatcttctcctacatgggcctggcactggttaccttccagaagcacgttttcagccccattttcatcatcggagcttttgttgccatcttcctgggcagagccgcgcacatctacccgctctccttcttcctcaacttgggcagaaggcataagattggctggaattttcaacacatgatgatgttttcaggcctcaggggagcaatggcatttgcgttggccatccgtgacacggcatcctatgctcgccagatgacgttccccaccacgcctttcatcgtgttcttcaccatctggatcattggaggaggcacgacacccatgttgtcatggcttaatatcagagttagcatcaaggagccctccaaagaggaccacaacgaacaccaccgacagtacttcagagttggtgttgaccctgatcaagatccaccacccaacaatgacagctttcaagtcttacaaggggacagcccagattctgccagaggaaactggacaaaacaggagagcacatggatattcaggcggtgtccccaggtgtacgataaccaagagccactgagagagggaaactctgattttattctgactgaaggcgacctcacattgacctatggggacagcacagtgactgcaaatggcttctcaggttcccacactgcctccacgagtctggagggcagctggagaatgaagagcagctcagaggaagtgctggagcaggacgtgggaatgggaaaccagaaggtttcgagccagggaacaaccaggaagctatatgagaaaaagcttttgaaactgagggaacaaggaacagaatcaagatcttctactcctctgccaacaatttcttcttcagcagaaaatacaaggcagaatggaagtaatgattctgacagatacagtgacaatgaagaaggaaagaagaaagaacacaagaaagtgaagtccactagggatattgttcctttttctgaacttggaactactccctctggtggtggattttttcagggtatttcttttcctgaaatctccacccgtcctcctttgggcagtaccgaactacaggcagctaagaaagtacatacttctaagggagacctacctagggagcctcttgttgccacaaacttgcctggcaggggacagttgcagaagttagcctctgaaaggaatttgtttatttcatgcaagtctagccatgataggtgtttagagaaaagttcttcgtcatcttctcagcctgaacacagtgccatgttggtctctactgcagcttctccttcactgattaaagaaaccaccactggttactataaagacatagtagaaaatatttgcggtagagagaaaagtggaattcaaccattatgtcctgagaggtcccatatttcagatcaatcgcctctctccagtaaaaggaaagcactagaagagtctgagagctcacaactaatttctccgccacttgcccaggcaatcagagattatgtcaattctctgttggtccagggtggggtaggtagtttgcctggaacttctaactctatgcccccactggatgtagaaaacatacagaagagaattgatcagtctaagtttcaagaaactgaattcctgtctcctccaagaaaagtccctagactgagtgagaagtcagtggaggaaagggattcaggttcctttgtggcatttcagaacatacctggatccgaactgatgtcttcttttgccaaaactgttgtctctcattcactcactaccttaggtctagaagtggctaagcaatcacagcatgataaaatagatgcctcagaactatcttttcccttccatgaatctattttaaaagtaattgaagaagaatggcagcaagttgacaggcagctgccttcactggcatgcaaatatccagtttcttccagggaggcaacacagatattatcagttccaaaagtagatgatgaaatcctagggtttatttctgaagccactccactaggaggtattcaagcagcctccactgagtcttgcaatcagcagttggacttagcactctgtagagcatatgaagctgcagcatcagcattgcagattgcaactcacactgcctttgtagctaaggctatgcaggcagacattagtcaagctgcacagattcttagctcagatcctagtcgtacccaccaagcgcttgggattctgagcaaaacatatgatgcagcctcatatatttgtgaagctgcatttgatgaagtgaagatggctgcccataccatgggaaatgccactgtaggtcgtcgatacctctggctgaaggattgcaaaattaatttagcttctaagaataagctggcttccactccctttaaaggtggaacattatttggaggagaagtatgcaaagtaattaaaaagcgtggaaataaacactag

SEQ ID NO: 144113 - DNA, 1278 bp, Homo sapiens
atggacgaaaaagatagatcctcgcctgggcatgatgaccaccgtttccggtgtcgaaatgtctcgcgacctggcgtatgccaaagtatatgtgacgttcctcaacgacaaagatgaagacgcgggtaaagcgggcatcaaagcgttgcaagaagcttctggtttcatccgcagcctgctggggaaagcgatgcgcctgcgtatcgtgccggaactgaccttcttctacgacaactctctggttgaagggatgcgcatgtcaaacctggtgaccagcggggtcaaacatgacgaagaacgtcgcgttaacccggacgacagcaaggaggactaatgagtcgtcctcgtcgtcgcggtcgcgacattaacggcgttttgttgctggataaacctcagggtatgtccagcaacgatgcgctgcaaaaagtgaaacgtatatataacgccaaccgtgccgggcataccggtgcgctggacccgctggcgaccggcatgttgccgatttgcctcggggaagcgacgaagttttcccagtatctgctggactccgacaaacgctatcgggtcattgcgcgtcttggacagcgtaccgatacttctgatgccgacggacagatcgttgaagaacgtccggtaacctttagcgcagagcagctggcagcggcactggatactttccgtggcgatatcgaacagatcccttcgatgtattcagcactgaaatatcagggcaaaaaactgtacgaatatgcgcgtcagggcattgaagttccgcgtgaagcgcgtccgattaccgtttatgaattgctgtttattcgccatgaaggcaatgagctggagctggaaattcactgctcaaaaggcacttatatccgcaccatcattgatgacctgggtgaaaaactcggctgtggcgcgcatgttatttacctgcgccgtctggcggtaagtaaatatccggttgaacggatggtgaccctggagcacctgcgtgaacttgttgagcaagctgaacagcaggatattccagccgcggagttacttgatccattactgatgccaatggacagtccagcttcggactatccggtggtgaatcttccgttaacgtcttctgtttacttcaaaaatggtaacccggttcgtacatctggtgcgccactggaaggactggttcgcgtcacggaaggtgagaacggcaaatttatcggtatgggcgaaattgacgatgaaggccgcgttgcgcctcgtcgcctggtggttgaatacccggcgtaa

SEQ ID NO: 144114 - DNA, 669 bp, Homo sapiens
atagaaacatatggggaaactctacaataatacccccctgaagtgtattgatttgctaaatttagccacctgaatagggggcactccaactatagggcaggatcgtctaccgggggggcagtccacaaaatgggggatgatgtccatcgtttcggtaacctcttcctgatctcaccaagcagcaactcgatacttagtaattattcgccagcagacaagaaaaaattctacgtcgaaacagaacgagcagagagcccaaaacaagccatcatgatgagctataaggagtggggtccggatgggcaaggcatcaacaatatagaaagccatgaacacgcgatgttgacattgctcaaagagcatcgagatatgaccctaccaaccaggaaataatgcgtgcaactgtgttttataatatcaagtgtgattacaatcgctggcggtgccatagtgccatagtgccatagtgccatagtgccatagtgccatagtgcggttggcggtctcagctctgaactatttgaaaaccaaaaccttgattaaggctgtgcctaccttacgttagttggggcagtatgttatataaccaaattagacgtcagggttacaatatttgtggaatcctgaaaagcttgatacctgcgaccgagaatggctgtgaagtattta

SEQ ID NO: 144115 - DNA, 1533 bp, Homo sapiens
ggcattcgtcgcgcataccaaccgcacattcacctgcaatggttggctgccgccaacgcgctccagttcaccgtactcaatcacgcgcaataatttctcctgcaccatcatcggtgccgtagcgagttcatcaagaaatagcgtaccgccgtcggcacgttcaaatctccctggatgacgtttttgcgcaccggtaaacgcccccgcttcgtgaccaaacagttcggaatccagcagattttcatttaacgccgcgcagttaagggaaataaacggcccttgccaacgggaggagagataatgcaggcggctggcaatcagctctttaccggtgccgcgttcgccgatgatgagcaccggtttgtccagcggtgcgagatgcgaaacctgttccagcacttcgagaaagctgttcgcctcaccaaaaatcaagaggacaacattatgggtattttttctcgctttgccgacatcgtgaatgccaacatcaacgctctgttagagaaagcggaagatccacagaaactggttcgtctgatgatccaggagatggaagatacactggttgaagtacgttctacttcggcgcgcgcgttggcagaaaagaaacagctgactcgccgtattgaacaagcgtcggcgcgtgaggttgaatggcaggaaaaagccgaactggcgctgctgaaagagagagaggatctggcacgtgcagcgttaattgaaaaacagaaactgaccgatctgattaagtccctggaacatgaagtgacgctggtggacgatacgctggcacgcatgaagaaagagattggcgagctggaaaacaaattgagcgaaacacgcgctcgccagcaggcattgatgttacgtcatcaggcggcaaactcgtcgcgcgatgtgcgtcgtcagctggacagtggcaaactggatgaagcaatggctcgtttcgaatctttcgaacgtcgtattgaccagatggaagcggaagcagaaagccaagccttgagctttccccggctgtggataagggtcttgtccaacaataataatcggacctaccttatattatatcatctatgcaactatgaactctggccaagcagcttcttgtcccctgtgaacacctggattggtttttgcccgtatggtaaacatccgggatttgacctgttccgaacccggtttaaggaattgacacatcggaccaatgataaactgccggatagtcgtccacttgctaaagcataccgagatgcttggcgaggagggggacaacaaaaggctctgggtttcaggacgtggacaagaagtataagagcacctgtttggatcattcgtgtcacgctcaacatgaagaatgttatagtaaccatattagagtccacgggcaacggtatgttcgcaccgaacactcacaatattcagccaccagaccagcaagcaccaatctccattcacatgtggcatgcctctcttgtgtgcaacgtcggccacgcaacccataggactcagcgaccaacagttggagactag

SEQ ID NO: 144116 - DNA, 1644 bp, Homo sapiens
atgtttggcaaaagaagcgcgtacgctgttcgccagtgcattaatgtaatcgtggttatcggcgtaatcacgtataaacgatatccccggaatgctacgtttgcgcgccagaatgcgtgccagttcatcccataccgcaccgaccgtagaacaggagaattgcggataaagcggcagcaccacaatatgatctacatgctctgccaggagttcatctacggcgctttccacggcgagccaccttccatccagacagaggcatacagcttcgccacacgcggcgagcgcagcggcaaaatcacgccgcgcagcaatggccaccataacaaccgtgagagtctctgcaatgtgatcggcgacatcgtagacgcgcagtacaaagcgaaaactctgactcgcctcgcgcaggagtatgaaatcccgctggcgcagaccgtggcgattggcgatggagccaatgacctgccgatgatcaaagcggcagggctggggattgcctaccatgccaagccaaaagtgaatgaaaaggcggaagtcaccatccgtcacgctgacctgatgggggtattctgcatcctctcaggcagcctgaatcagaagggcagtgcagtgcctgtcatgcctggaacgctggcgcgcgcggcggcacgtaaagaactggatgttgaggtcattgaagctgaactggcaaagctcgctgaacaaccgattgagaaagactggcgtagcgccccgctggcagaaatcatcgaccatatcatcgtgcgctaccacgatcgtcaccgcgagcaactgccggagctgattctgcaagcgactaaagtcgagcgcgttcacgccgacaaaccgagcgtgccaaaagggctgacaaaatacctgaccatgctgcatgaagagctttccagccacatgatgaaagaagagcagatcctcttcccgatgatcaaacaaggcatgggcagccaggcaatggggccaatcagcgtaatggaaagcgagcacgatgaagcgggcgaactgctggaagtgattaaacacaccaccaataacgtcacaccgccgccagaagcctgcaccacctggaaagcgatgtataacggcattaatgaactgattgatgacctgatggatcacatcagtctggaaaacaatgtactgttcccacgcgcgctggcgggacgctgtttgcgatacacaaggtacgagcaaaggataatcgtccagacgaacataaacagaatcgcggaaacggttgtaatcatcgcgatgcatagccaggacagcgatctggcgaagcgcgtcatcgaaggcgacaagaacgtcaacatgatggaagtggcgatcgatgaagcctgcgtgcgcattatcgccaaacattattccaccgtggcacgctataacggcaaacctgctgccgggatcgccatcaaactggctgccggagcaaacgccctggatacctcgcgggcagtcaaagaggaactgaaccgcttatcagcctatttcccggcaagtctgaagacggtttatccttacgacaccacgccgtttatcgaaatttctattcctttttctgcatctccactatttcaggccacatcatcttacctcaaaaattggcaacaccttcttattggtctctag

SEQ ID NO: 144117 - DNA, 1140 bp, Homo sapiens
ttaacgccgctgatattccgccattcccgctttgcagtccacgctgacctggtaatgaatatcggcacttttaccacgcacggttagcggtactgaccatttatcatctttaccctgaatgtcctgcaaactgacccaagccacgggatcggcctgaccgacaattttttgatcatctgcccaacgcgccacgcgattttgttgataatcacgttttacgctcgcggcaattccggcagcatccagatcttcacactccataagagctctgtagaccttgctgttttcatcaccaatctcttctagaagtgccttcttcaaactcctgaaactatcaaatttcccatccacgctctcccccggcatcacctcaaagcttattgagactgggggaactccatagcggcgatcgtgtcccggacgatcagcaacataagtgatttgctcacgataagatttctctttcggtacaatctcatccagcaaatcacaaatagtgagcactacatcgatgtttttcttttcgttgtgcccaccaatgttataagtttcacccgctttaccttcggttacgacggtatataacgcacgcgcatgatcttcaacatacaaccagtcgcggatctgatctcctttgccataaataggtaatgccttaccttccagtgcattaagaataaccagtggaataagcttttccgggaaatgataaggaccatagttgttcgagcaattagtcacaattgtcggtaaaccatatgtacgtttccacgcgcggactaaatgatcgctggatgctttggatgcggaataagggctgcttggcgcgtaagctgtcgtctcagtaaataagggtaattcttctgtattatttacttcatctggatgaggcaaatcaccatagacttcgtcagtagaaatatgatgaaaacggaagctatttttcttgtcggaaaattctgcaatgtattgaatttgcacgattttgtaggccggataaggcgttaacgccgcatccggcataaacaaagcgcactttgtcaacaatctgtatacccggtggcgctgtgcctctgcgtgcagcgccatccggcagcaatacttcattccagttgcaagccggaagatgtctgggcggcg

SEQ ID NO: 144118 - DNA, 1218 bp, Homo sapiens
ttagtacaacagtttgcgggcatcgaaggcaccggccaaaatgttgcgggctctcaaggtgtcgaacggggtttcgaccagactttggcgacggtaagccgctgcgtggaacaggaactgttcatcgggtttaatttcataggttttgcgcagcagataataaaccgttaagcctttcaggaaggatgccgcagcttgctcaaaagaaattgccgcaggcagaatcgccgccgcagaaacttcccgcgctttgtcgagagtaaacacggtgatgacgtcggtgccctgttcaacggcgtcagcaacctgatgacaagggatttgtaccagatgcccctgatgcgccacaggcaaaccagcgcggcgcatgactcgcgcctctttgtaatccaccgccacaatgccgctgtagcctaatgccagcaatttttccgccagccacggattacgaccaaactgcttggtcatcagatacagttcaatgccgtaaaccaactggcacaagggggcgcccaaggttgcaagtgggggacgcgcgcggaacgggaaagaagcagcgtgctcggcaagttccgcgcgtttggcttcgaatttttcaggtgtatcaatggagtgagcaataaaggtctggtagatatcattgctcgcttccagtttgcgcttcaccatgcctggaatatccggcgggatatgacagtcatggcattcagctcgcacgccggaggcgttctggaaatgcaccgactgtttatattcttcatacaccggttgcatactgtggcaactgacacaaaattcggttgtgctggtgactttgatcccaacgtgtggcaatacaatcagcgcaatgccaatcacaatcccaattgcgaccagcgccagtaccgaccaacgagcactgggtcggcgtagcgcgttccagagtttccgcataataaccccggacgcagcgatcggattgaccgtattgttgggctggaaatgggcgcagacgattacgtcaccaaaccgctggaactgcgcgaactggtagtacgggtgaaaaatctgctctggcgaatcgacctcgcgcgacaagctcaaccgcacactcaggacaactgctatcgctttgccggttattgccgttcggatactcagcaaggaccgacgccgcgtaaagtgaccgatgttctgcaaacgggtcagcaaatctggttcgtcaggttggcgatgcat

SEQ ID NO: 144119 - DNA, 1231 bp, Homo sapiens
ttaacgtctggctgcataaagaaaccgccagtatcgctcttgatctgaggggggatggtttacatctgcgtggctatcgcgatcgtgctggtattgcgccgatcaaagaaaccctggcagccgctattgtgatgcgatccggctggcagccaggaacaccgctgctcgatccgatgtgtggttccggtacgttgctgattgaagcagcgatgctggcgaccgatcgcgcaccaggcttgcaccgtgggcgttggggctttagcggctgggcgcagcatgatgaagctatctggcaggaagtgaaagcggaagcgcaaacaatataggggttaatccagacgcagattttcagtcctttcgctttcaggcggcggatcatcccttccgggtcagggaaagtcagcgggtcccactcaaaatcgcaccactggaaggctttcatccagaaacagtcaaagtggaaaacatgcagcggcagattgcgttccgccataccatcgataaagctgtttaccgtcgcagtaaagcgggtataacgatcaagtaccgctttcggcgtcgggccgtcgataacaaagtattcgagatattcactctcaacgctgaactgcactttggagactttctccgatcccacttcaaaagagacacactggggatgattgaccagtaccccataaccacggttagtcatgtagaacgggatatttttatacgcctgttcagtacttgtgccgccgtcccggttccaggtctctaccgtctggccattgcgcaccagggcagtaaagcgctctcccagaccgtaaactgtttcgccaacgccaagatcaagccgctcaaacatataattgcgttgattattcgtgtcctgcacgtagccattatttttcacctgactaccggtaatacgttcgcagttgcgcagaaaatccagtgaccagaactcacctttgctgacacgcgcgcttaagttgccacttttaaactcagcataacgttctgtgttttcgattgtgaccttcacgtcctgcaaaatattgagcggataatgaggaccgttattcagcgccccctgaaaatgctcaatccgcacaccgacaataccttcctgtggggagaaaaagcgcaacgtaaataaaggcgtatcaagctgccaggtacgttcacgcacatcacggggggcagcatagaccaccatttcattatcctgctgttcaacctcgaacac

SEQ ID NO: 144120 - DNA, 2917 bp, Homo sapiens
tcaacactgtgccgtacggcctttcggcagcggattggtcagttgcgcgacatctttcacctcaaaggtgatcagttcaccaatccccgcaagacgggcgttagtgcgtgcacgttgaatcacccgtgcgtcgctgtccgaaccgtaaaaatgagagctatactcagccaggcctttacgggcgcgagtttgcgcttccgctttcacttcctgccagatagcttcatcatgctgcgcccagccgctaaagccccaacgcccacggtgcaagcctggtgcgcgatcggtcgccagcatcgctgcttcaatcagcaacgtaccggaaccacacatcggatcgagcagcggtgttcctggcagcacgatcgcgataccacgcagatgtaaaccatcaccactcagatcaagagcgatactggcggtttctttatgcagccagacgttaacgcggatatccggcgcatcgcgatcaacatttggacgcggcagatttttccgcgtgaaagcatcgacgatcgcgtctttcactttcatcgcgccgtactgactgttgcggatggtgtcattcaaaccactgaaagtggacagcgaaggtcgcgccaggattaaacatctctgtccagttgattcgctgaacaccgagatagaggtctaaatcgctgtaaacgttacactcgctttcaatggtggtaaacaactccgttgaagtacttccctgctgtgctgccaggaaggcctcgcgttcgcggttaatctccgccagcacttccgggtccagaccattagcttctttttcctgccagttttgcgtttctggcggccaggtatccagcaagccaagaaatgccaccctgcgccacgtaccgccaagggaataccccagcaggtaataagggccatgcggttgttgttcaagtaacgttgccagatgcgcttcgcagacttcatccaggtttgccgccgtctgcatggggccattggggcgcggtgactgaatgccgataatcgaccattgtggatcgagataacgcgagagcacgctgaactgccaggcaaaaccggacgcaggatggaaacaaaacagcgtcgggccattaccttcacgcaacggcagaatggtttcgaatcccatacgccgggtgctgtcttcttcagcatcaataatcgttgccagtttggcgacagttgacgcgaccatcacttgccccggcgtcacctggcgggcaacctgccgacttaactgcgctgccagtttcattgccagtagcgaatgaccgccaagcgcgaagaaatcagcatcggcatcctgcacgtcacaccccagcaacgacgagaatgccgcggcgataatcgtttcactgcccgctttcggcgcacgccctggcgcttgtgccttcagttcaggcaacggtaaggctttgcgatccagcttgccgttggcgctaagtggtaactgtggaagttgcagcagaaccaccggtaccatatgtggtggcaatgtttcacgaagctgcgcctgcaatgcgctggtatccaacggcaggcccgattgcgacaccagatagcccaccaattgacgcgcatcaccaccggtggcagccgcctggttaatcacacaggcgtgggtaacggcttgttcgacatccggcagcgcctgcatcacgcgatcgatttcgcccagttcgatacgctgcccgcgaatttttagctgatcatcactgcgcccgaggtactccaccgcgccgttatccagccagcgggcaacgtctggggcaaaaggatcggcaataaagcggctggcggtcagatcggggcgtccgagatagccctgcgccagttgaatgccagtgagatagagatcacccgccacacccggcggcaccggatgcatcatcgcatcaagaatacgcagacccgtattccataccggataaccaatcggcacactgctgccgcgcacctgtgccagttcctcgccaaaagccggataccagctgacatctaccgccgcttccgtcgggccatatagattatgcaacggcgcgccagttaagaggcaacaatgctgcacatcgacgcacaagtcgtggtcgtacgcatattcgcataatgctgcatacgacggtccggtccttccgtcagcatacagtttgcctcgataacgcagaaaatcacacggaatcaactgaggttttgggccattttttatagcaaagattgaataaggcgcatttttcttcaaagctttattgtacgatctgactaagttatcttttaataattggtattcctgtttattgattatgaagagcagcatattacagccgtatgggtctacttgacagtaaaatttgaagagcattggaagcctgttgaagtcacaatgaccgccgtcgctaccacgaagttgctgccggagcatcggtttaaacgcaggcaccatttctgcaatcagcacaggtgtcgctaccgcggcccctgcggaactggaagcggcaattccggcagtgccatcgccaccgccaatcaatttatcggcgataatcaacggaataccggtcacgataattactgccacacccaacaggatccccagcaaaccagtctgggcaatcacagtcaaatcaatggtattgcccagcgcgaaggcaaagaatggaatcagcgtttgcaccgctttgctgaaaaattctcgcaattcagggtcaaggttccccagggcaaagcccaccaggaacggtaatactgcgccgacgaaaacatgcggttcaaacgaggcaatcccggcagtgcccagaataatcatcgtcatgagcggcccggactccaacgacatcaacacaaatgccccagcttcttcttttgtgccgtactgctgcatgatggaagcgtaaagtccgccattggtcatatccat

SEQ ID NO: 144121 - DNA, 2202 bp, Homo sapiens
atgaaagtgaaagacgcgatcgtcgatgctttcacgcggaaaaatctggcgcgtccaaatgttgatcgcgatgcgccggatatccgcgttaacgtctggctgcataaagaaaccgccagtatcgctcttgatctgagtggtgatggtttacatctgcgtggctatcgcgatcgtgctggtattgcgccgatcaaagaaaccctggcagccgctattgtgatgcgatccggctggcagccaggaacaccgctgctcgatccgatgtgtggttccgccattgagctgaaaggtcacaaaatgcagcagttagacagtattatctccgcgaaaggccagacggcgtactcttccgttattctgggtaacgtgggtaatcaactgctgaccatgcaaattacgctgcccgctgacgatcagcaaaaagcgcagaccaccgcagaaaacatcattaatacgctggttattcacgtcgtgcggtccgctcgccgtgtacggccagtgggcggtcccactattcaccccactagcacgttcccacgccggcccggcctcacctcgctgttgcctcagttcccggttgtgctatcccggttctaccgtcaagaggggtataccgtttccgttacggcgagcggtgctgggctacgggaaattatgcagaatcagtcggtagatttaattctgctggatatcaacttacccgatgaaaatggcctgatgttaacccgcgccctgcgagaacgctcaacggtggggattattctggttaccggacgcagcgatcggattgaccgtattgttgggctggaaatgggcgcagacgattacgtcaccaaaccgctggaactgcgcgaactggtagtacgggtgaaaaatctgctctggcgaatcgacctcgcgcgacaagctcaaccgcacactcaggacaactgctatcgctttgccggccgtgaacgtctgctacgtatgctttctgcgcgtcgggtggaaaaccctgacctgcgccccgtcgatgtgttaattcgtcgtttacgtcataaactcagcgcggatttactggtgacgcaacatggggcggatcctactaccacgctcgaccctcgcagcgcatgcaacgcctggcacctcggcccggctcgccctctccaccacacccgctccgccggacctcgggcgacaaaccacctgagcgtcacccaactcaatcgcctcgcagccacactcccccgaatttctgagtctcggtacccgagatttatgacaaacgcaaaactgcctgatgcgctacgcttatcaggcctacgtggatcgatcaatttattgaatttacacaattttgtaggccggataaggcgttcacgccgcatccggcataaactaagcgcactttgtcaacagtctagcccgatgataaatccatcgggctatttttattgtgccccgcgttgttgcaggaacagaatggtggccgccacgcgtccacttgtactccttataacatatggcccttataacatcccatcctccaaaaatcggcgctatacgatggcagtagtcgtgcagttattatttggttatatgatgtggaagaagtgggggagtttggggcagcttggctcactcaccgttctggcaagccactttagcttcacgttagtcatcccgcgtcctatcatcaccgacaaggttattacgcccgtcttttgcaactcctcttataagccgcccagcgttaaattccatggaggaacgtatggtcgtaacgaagtgaccaggggtagcgtggttgcggctgcctggcggaaactggaaatctctagatgttgtaccaccgagcttcccctctcacccactatacgtaaggccgtgggcacctgggtaagcaccgcgtatgcggcataccgttacatgcagcaaggcgtaggcgggtttacagctaatcctatgacgggcggtacccacgggtatgggcaggtccgggggcgcacatactgtggggattcctcggtccgctatctctccctcattctatacatccctcctttattcaatgcccgggtaagacaacaacacagtggcactacgggtagctgccaaataagcataagtaatattcgagccaaatcggcgctatacgaccacacttgggtactccgcccactggtgaatcggcgctacgtgccccggcgctacgccggctaa

SEQ ID NO: 144122 - DNA, 2232 bp, Homo sapiens
atgaaccattatccgtcagccactccactggagacgacggaagatcgttgccgaagcggcgttctcggtcgccttatacagatcactgtagtgatgcgctggcgagcaatcctgcgttcatttgaacacgataattcggaagataaacccggcccggttctgggtggtataaacaacaaagtgctggttggtccgcgagcgccgattccacctgacggtacacggcgacccattctggtcaacggtgcggaagttggcgcggtgatcgcctcccccgttgagcggttaacgcgcaatactgatatcaatttcgataaacaacagcggcaaaccagctggttgattgtcgccctggcaacgttactcgcggcacttgccacttttctgctggcgcgcggtttactggcaccggtaaaacgacttgtcgatggcacgcacaaactggcggcgggcgatttcactacccgcgtaacgcccaccagtgaagatgaactgggcaaactggcgcaagacttcaaccagcttgccagcacactggagaaaaaccagcaaatgcggcgcgattttatggccgatatttctcacgaactgcgtacgccattagcggtgctgcgcggtgaactggaagccattcaggatggcgtgcgtaaattcacgccggagacggtggcgtctttacaggcggaggtcggtacactgaccaaactggttgacgatctccatcagttgtcgatgtctgatgaaggcgctctcgcctatcaaaaagcaccggtagatttgatcccactgctggaagtggcgggcggcgcatttcgcgaacgattcgccagtcgtggcctgaaactgcaattttccctgccagacagtattaccgtatttggcgatcgcgaccgtttaatgcagttattcaataacttactggaaaacagcctgcgctacactgacagcggcggcagcctgcaaatctctgccgggcagcgcgacaaaacggtgcgcctgacctttgccgacagtgcgccaggtgtcagtgacgatcagctacaaaaattgtttgaacgtttttatcgcaccgaaggttcccgcattgcttgctgcgtaagcccgatgatcgttggtaaacaaatgcagttcttcggtgcgcgtgcaaacctggcgaaaaccatgctgtacgcaatcaacggcggcgttgacgaaaaactgaaaatgcaggttggtccgaagtctgaaccgatcaaaggcgatgtcctgaactatgatgaagtgatggagcgcatggatcacttcatggactggctggctaaacagtacatctcggaccttacgtggattgcatcatgcaagccatacttcatcggcaaacgccatcacaccgtcgttggtcgaaaaatcagcctgaatacactgcgcacctgcattaatcagtccatcaatggctggataagtcgactacagcaggaacaactgggggataagacacgggtaacgctgttgggcgattatgcccatactcatggttatgatgttgttgcctatggtaataccggaacgcaagcgcagacagataacgatggttttttaagtaaaacgctttatggcgcgctggagcataactttactgatgcctggagcggctttgtgcgcggctatggctatgataaccgtaccaattatgacgcgtattattctcccggttcaccgttgctcgatacccgtaaactctatagccaaagttgggacgccgggctgcgctataacggcgaactgattaacgctaaatatacaggagtagtgatgaataattctgaaggtttgaagtcgtttcagcaatcgcttgctgatctgccgcaatgggtatcagagcggcttctgcagcaaattaaccagttaactaactacgagccagtgatcggcattatgggtaaaaccggtgttgggaagagcagtctgtgcaatgccctgtttgccggagatatatcaccggtcagcgatgtggcggcctgtacacgtgagccactgcgctttcgcctgcaagtcggcgaccgctatataacgctgatggatctgcccggcgtgggcgaaagtggcgctcgcgataccgagtatgctgcgctgtaccgcgaacagcttcctcgcctcgacctggtactgtggctgattaaggccgatgaccgggcgctgacggtggatgaacatttttatcatcaggtgacttggagaggtataccggcataa

SEQ ID NO: 144123 - DNA, 888 bp, Homo sapiens
tcattctttttctctaatcttgtctttacactttatttcattaatttgatcttcaatctctgatatccttttttccgcttgattgatttggctattgatacttgtatatgcttcacaaagttctcgtgctgtgtttttcagctccatcaggtcatttatgttcttctctaaagtggttattctagttagcaattcatctaacattttttcaaggttcttagcttccttgccttgggttagaacatgctcctttagctcagaggagtttgttattacccaccttctgaagcctacttctgtcaatttgtcaaactcattctctgtacagttttgttcccttgctggtgaggagttgtgatccttcagatggagtttctgagtggatatcctttttgttgatgttgatactattccttcctgtttgttagttttccttctaacagtcagggccctctggtggagctctgctggagtttgctggcagttccctcccgaaccctgtttgcctccggttctcccccggggggtccaaaccggcaaaatgggggcaatctcccccgggaaaattcccccgccagccacattggatgcccaggcaatccgggtaaccgtaatcggcaatatggctaaccgcgcgacatgctcaatctcttgctgggtggcattcgggcaacccagcgcgatgttattcgccacagtgtcagaaaaaaggaatggcgtctggctaactaccgccaggcggctacgccagctatcgagttgtaacttcgtcagaggaatatcatgaaagcgaatatccccctcgctgacgtcggcttgatagttggggcgattccgattgcgcaactgaatttcaacctgcctattgctggaagttaacactgccat

SEQ ID NO: 144124 - DNA, 1209 bp, Homo sapiens
atgaacgccaacaacagcagtgcggcgaacgtggtgaaatcgctgcgtaatccgtatctacaggtgagcgactggggctggggaattgatccactcggtctgcgtatcaccatgaatatgatgtacgatcgttatcagaagccgctgtttctggtggaaaacggcctgggcgcaaaaaatgaatttgctgccaatggcgagattaacgacgactatcgcattagctacttacgcgaacatatccgcgcaatgggcgaagcgattgcagacggcatttcgctgatgggctacaccacatggggctgtattgatttaatttcccgctttacgggtgaaatgagcaaacgctacggctttgtctttgttgaccgtgaccacgcaagcgacgggacgcttacgcgcacgccaacgaaagactgcgactccccggactatcaggccgggagagtccacttccagctcacctcggagctccgggagcctttcagcacctgcttgctcggtcccctggatgtaaatattcaccagttcacgtatccgcagactgaccatcctgcgctggaaaacgtcaatttcgccctgaaacccggtcagatgctgggtatctgcgggccgactggttccggcaaaagtaccctgttgtcgctcattcagcgtcatttcgacgtcagcgagggggatattcgctttcatgatattcctctgacgaagttacaactcgatagctggcgtagccgcctggcggtagttagccagacgccattccttttttctgacactgtggcgaataacatcgcgctgggttgcccgaatgccacccagcaagagattgagcatgtcgcgcggttagccagcgtacatgacgatattttgcgtctaccgcaaggttacgatacagagtcaacgcggaaatcctcatccttgatgatgcgcttttcggcggtggacggacgcactgagcaccagatcctgcataacctgcgtcagtgggggcaggaaagaacggtaatcatcagtgcccatcgcctttctgcactgacggaagccagtgaaattattgtgatgcagcacggacatatcgcccagcgtggcaatcatgatgtgctggcacaacaaagcggctggtatcgcgatatgtatcgctatcaacaactggaggcggcgctcgacgacgctccggaaaatcgcgaggaggccgtcgatgcgtag

SEQ ID NO: 144125 - DNA, 1158 bp, Homo sapiens
atggccaacaatgaaatgacaccagcttcgaaaactgcattaagtgcaccgtctgcaccaccgcctgcccggccaaaacaagccgggccggatggcgagcgtctgcgtttgaaagatggcgcactgtatgacgaggcgctgaaatattgcatcaactgcaaacgttgtgaagtcgcctgcccgtccgatgtgaagattggcgatattatccagcgcgcgcgggcgaaatatgacaccacgcgcccgtcgctgcgtaattttgtgttgagtcataccgacctgatgggtagcgtttccacgccgttcgcaccaatcgtcaacaccgctacctcgctgaaaccggtgcggcagctgcttgatgcggcgttaaaaatcgatcatcgccgcacgctaccgaaatactccttcggcacgttccgtcgctggtatcgcagcgtggcggctcagcaagcacaatataaagaccaggtcgctttctttcacggctgcttcgttaaaaacaaccatccgcagttagcggaacaggagctgccggcgaagcaaatcttcatgcagtacgtactgccgaacaaactgctgtggtatatcgccatcgccaacgtgttcgtttatctgttgcgttacggcatcctcgactggtcaccgacttatctgaaagaggttaagcatttcgcgctagataaatcctcatgggcctacttcctttatgaatatgcaggtattccgggcactctgctgtgcggctggatgtcggataaagtcttccgtggcaaccgtggggcaaccggcgttttctttatgacactggtgaccatcgcgactatcgtttactggatgaacccggcaggtaacccaaccgtcgatatgatttgtatgattgttatcggcttcctgatatacggtcctgtgatgctgatcggtctgcatgcgctggaactggcaccgaaaaaagcggcaggtacggcagcgggctttaccggactgtttggttacctgggcggttcggtggcggcgagcgcgattgttgggtacaccgtggacttcttcggctgggatgtcggctttatgctatcacatgaattatgggagtctgagttcactaaactaaaatacgaatataataattcttgtcctgccagcgtctcaggatggttgtga

SEQ ID NO: 144126 - DNA, 1271 bp, Homo sapiens
agctacttgaaaagaaggacagcataatgattaccctgaaaaatgtttcaaaatggtatggtcactttcaggtgctgaccgactgctcaaccgaagtgaaaaaaggcgaagtggtggtggtttgcggcccgtctggttccggcaaatcaacgctgattaaaaccgtcaacggcctcgaaccggtgcagcaaggtgaaatcaccgtcgatggtatcgtggttaacgacaagaaaaccgatctggcaaagctgcgttcccgcgtcgggatggtattccagcatttcgagctgttccctcatctgtcgattatcgaaaacctgaccctggcgcaggtgaaagtgcttaaacgcgataaagcgccggctcgtgaaaaagccctgaaactgctggaacggggtcgggcttttttgctcacgccaataagttttccggcgcagctttccggcggtcagcagcagcgtgtggcaatcgctcgcgcgttgtgtatggatcctattgcgatgctgtttgacgaaccgacatcggcgctggatccggagatgatcaacgaagtactggacgtgatggtggaactggcgaacgaaggaatgaccatgatggtggtgacccacgaaatgggctttgcccgtaaagtggcgaaatcgggtgatctttattggacgagggtaaaattgtcgaaagacttcgccgaaaagacgcttttctttcgatgatccgaaatcggaccgcgcaaaagacttcctcgcgaaaatcctgcattaatcactctggcgcgcatacccaattgcgcgccatctcacgctttatcgtttcgcccctcgtatctgttacatcctggcgttacccttgtcgcaaagaagcacacaacaaggagcaacaatggcactgccaattctgttagattgcgacccaggtcatgacgacgctatcgcaatagttctcgccctcgcctcaccagagcttgatgtcaaagcaattacgtcttccgccggaaaccagacaccagaaaaaaccttacgcaatgttctgcgtatgctgaccttgcttaatcgcaccgatattccggtagcaggcgggcgcggtaaaaccgttaatgcgtgagttgattatcgcggacaatgtgcacggcgaaagcggtctcgacggcccggcattaccggaaccgacattcgcaccgcaaaactgtaccgcggtagagctgatggcgaaaacgctgcgtgaaagtgcggaacctgtcaccattgtgtctaccggaccgcaaacctacgttg

SEQ ID NO: 144127 - DNA, 2113 bp, Homo sapiens
tcagacgaggtgccgataaacgcacccgccaccgaacgtgacgctatcaacatacagcgccttattcatattggggaatttaccgttaccatctattaagcccgctttatcagttacaccaattaatgttcctgatgaatcaaataggttgatcagcataaaggagaaaatgataccggcgagttcaagtgttaacgcgccgctcaaatctacttcaccaatgacgccgctaatatcaggcggaatggaatagacgccgctaaaatgaacatcaccgaaaaataatccacagcaagacgtcaccacaatagaaaccagcaccgcggcatgaaaatgacgtgatgacaacacggttataataaaaaaccctaaaatacctaacaacacgccgtgagaacttaaatcgccaatcatcaccagcgtgtctttattggcgacaataacgccagtattttttaatcccattaaggcgataaataatccaattccgctggtgataccaatacgtaaacttaagggaatgttggagatcatccagtaccggatacgaaacagcgtgagcaaaaatagtccaactgcgccccagaatattgcgcccatcccggtctgccaggagatgcccatcggccccacgatcacgaaggcaaagaaggcgttcaggcccattgccggagccagcgccacgggtaagttagcaaatattcccatcgcaatactggcgataccggcaatcaactgaaaatcaaaagcaaaggcttgatccgcggggacaaattgtgaacgtcccggcgcgtcgaataatccggcaaaaacggaagtgctgcaaagtagcaggatcagcgtaaagatgcgttgagccatgagaggtaatctgtgtctccgtgtgtaacaggtaaaaccagaagttccggggtttgatatggatgatgagacttcaggcattccagcagtgccttcccagtaatagagagaggtagcgccggggatcaaggtcgcgcaggccgccacggttttccgccagcactttggcggctaaatcctgggctgtcgcttcatctggtgccgtacatagcaccacgacagacgcggtattcgaacttttttcatcaagcataaacacccgggatgaagaacggatggttgaagacgaatttaccgatacgggtagtacccgtgtcatccatctgtaccgcagcaaccagcgtcgggtaggtcggcagaatgaacagaacagacaacgcagagaaagaagcaaagcgggcagcggggaaacgtcagtgccgggtacgatgcgaatggcccgatggcaaaggggttcccgaatctgtccgcgacaccagagttgcagacgtgaatgttcacgcacagcctgctggagcagcatcaactggcccgccaattgttcaagaccatcaatcgctggctggccgaagcaggcgtcatgatgactcaaggcaccttggtcgatgccaccatcattgaggcagcactcgagttcagtaccatcccagctgtcggcattaaagtaggccgtgacattctgtccttgctgaagagaagtcgcttcatttaccggcactgtggcgcacagtgtttgcccgtcgggtagcgccattaatacttcgcactgctctgcgccgcgctcaatatgactaataatacccggtaattggttgtcagcgttttgcgcgaccgcctcgtcctgagtaatacctacccacggcgcttttagcaatatcaacacttctttgccttcatccagccccagacgcgcgccgctttgtgcggtaattgcgactttcaggcgtgtttttccgtcagccagtaagacatcaacatgctgttgaacgtcatcatgatcgcgggcggtgatggtaccgaaccactggttacgggcgctggtttgcagtgaaaaacgtgagatcgcggccagcaggctgttcagcggcagggcgtcatcgtcacttaacacatcaaaggctttttgctggatttgcgccagtaagtcatagagctgaatcagtcgctgaccatagcgggtcagtactgcgccgacgacacctttaccgcctgttgcgcgctcgaccagaatatgctcacttaactgattcat

SEQ ID NO: 144128 - DNA, 5303 bp, Homo sapiens
atggcctggctgttgattatttacattctgccgttagtcggaattattgcctatcttgccgttggcgagctccatttaggcaaacgccgcgctgaggcccatttgcgattgtggccttccaccgcaaaatggcttaacgaccttaaagcctgtaagcatatcttcgccgaagaaaatagcagtgtcgctgcgccattattcaagctttgcattgcgtcgtcaggggattcgctggaggtcaaagggaatcagctacaactgatgaccgagtcagatgatgtgatgcaggcgttaatccgcgacatccagctcgcgcgccataatattgagatggtgttttatatctggcagcccggcggcatgggcggaccagttcgaataccgcgtctgtcgtggtgctatgtacggcaccagatgaagcgacagccaggatttagccgccaaagtgctggcggaaaaactggcggcctgcgcgaccttgatccccggcgctacctctctctattactgggaagtctcatcatccatatcaaaccccggaacttctggttttacctgttacacacggagacacagattacctctcatggctcaacgcatctttacgctgatcctgctactttgcagcacttccgtttttgccggattattcgacgcgccgggacgttcacaatttgtccccgcgatcaagcctttgcttttgattttcagcaaaaccaacatgaccttaatctgacctggcagatcaaagacggttactacctctaccgtaaacagatccgcattacgccggaacacgcgaaaattgccgacgtgcagctgccgcaacgtcctggcatgaagatgagttttacgcaaaagcaagatttacccgcatcggctgacgcttcccgtcaccatcaaccaggcaatgccggagcacgttttttaagtaaaacgctttatggcgcgctggagcataactttactgatgcctggagcggctttgtgcgcggctatggctatgataaccgtaccaattatgacgcgtattattctcccggttcaccgttgctcgatacccgtaaactctatagccaaagttgggacgccgggctgcgctataacggcgaactgattaaatcacaactcattaccagctatagccatagcaaagattacaactacgatccccattatggtcgttatgattcgtcggcgacgctcgatgagatgaagcaatacaccgtccagtgggcaaacaatgtcatcgttggtcacggtagtattggtgcgggtgtcgactggcagaaacagactacgacgccgggtacaggttatgttgaggatggatatgatcaacgtaataccggcatctatctgaccgggctgcaacaagtcggcgattttacctttgaatgcgcagcacgcagtgacgataactcacagtttggtcgtcatggaacctggcaaaccagcgccggttgggaattcatcgaaggttatcgcttcattgcttcctacgggacatcttataaggcaccaaatctggggcaactgtatggcttctacggaaatccgaatctggacccggagaaaagcaaacagttggaaggcgcgtttgaatgcttaaccgctggggtgaactggcgtatttccggatatcgtaacgatgtcagtgacttgatcgattatgatgatcacaccctggaatatttacaactaagaactcaccccggaagggtttctacggtcaaggttttttactgtcggaactttgaaaaaaactgcgcggaccttacgaacatcatccgaaaaggaggaactatgaaggctgcagttgttacgaaggatcatcatgttgacgttacgtataaaacactgcgctcactgaaacatggcgaagccctgctgaaaatgcagtgttgtggtgtatgtcataccgatcttcatgttaagaatggcgattttggtgacaaaaccggcgtaattctgggccatgaaggcataggtgtggtggcagaagtgggtccaggtgtcacctcattaaaaccaggcgatcgtgccagcgtggcgtggttctacgaaggatgcggtcattgcgaatactgtaacagtggtaacgaaacgctctgccgttcagttaaaaatgccggatacagcgttgatggcgggatggcggaagagtgcatcgtggtcgccgattacgcggtaaaagtgccagatggtctggactcggcggcggccagcagcattacctgtgcgggagtcaccacctacaaagccgttaagctgtcaaaaattcgtccagggcagtggattgctatctacggtcttggcggtctgggtaacctcgccctgcaatacgcgaagaatgtctttaacgccaaagtgatcgccattgatgtcaatgatgagcagttaaaactggcaaccgaaatgggcgcagatttagcgattaactcacacaccgaaagacgccgccaaaaatgtgcaggagaaaaacttgtggcgctcacgctgcggtggtaacagcgttgatgctgtccgtgcaggcggtcgtgttgtggctgtcggtcaccgccggagtctatgagcctggatatccacgtcttgtgctggactgtattgaagtcgtcggtctaattctatgcaatatgatgtctatacccagacggaggtctgtaatggcaaaccatcgaggcggttccggcaattttgcagaagaccgcgaaagagcatcagaagcaggtaaaaaaggtggacagcacagcgtgggtaatttcaagaatgacccgcagcgcgcatctgaagcagctcgtcaaaaagccatcaccgccggttacccggtggttgatactgatgacaaatgtgtcaggcgttacgccacaaaccggaaacacctttccaaacatcacttcaatcccgcccttttcggtcctatgcttccgtatccgggattcttaaattcccattttcagcttacatgcctgcagtacaaaaatgattatccggacgactataacgaaaaagcggaacaggagctgacggcgaacgaaatcttcatgcagtacgtactgccgaacaaactgctgtggtatatcgccatcgccaacgtgttcgtttatctgctgcgttacggcatcctcgactggtcaccgacttatctgaaagaggttaagcatttcgcgctagataaatcctcctgggcctacttcctttatgaatatgcaggtattccgggcactctgcttcttccgtggcaaccgtggggcaaccggcgttttctttatgacactggtgaccatcgcgactatcgtttactggatgaacccggcagtaacccaaccgtcgatatgatttgtatgattgttatcggcttcctgatcaacggtcctgtgatgctgatcggtctgcatgcgctggaactggcaccgaaaaaagcggcaggtacggcagccggctttaccgggctgtttggttacctgggccgttcggtggcgccagcccgatttgttggctacacgtggacttcttcggccgggatggccgctttatggtccatttacaacgtgccgctggttaccatcatcattatgggctttttcttcccgcgcatcccggcgctggcggcaaaagtagcgatggggattggcataatcagctacatcaccatcaactatctggtgaagttcgacttccatttcctctatgtgctggcctgtacgttctgcatcaacgtggtcgtgatgctggtgatcggttttatcaaaccgcgcgccacgccgttcaccttcaaagatgcgtttgcggtggacatgaaaccgtggaaaaacgtcaagatcgcgtcaattggcatcctgttcgcgatgattggcgtctatgccgggctggctgaattcggcggctacggtacgcgctgcggtaaaccgcggaatacgcaaaatattgataatctggccgccgaaggtattcgcttaattccgcctacaccgttcaccggttgtacgcctgaacgggccggactattaccggtatcaagcctaacagttccgcccctggacaacaacttcgcgcagcaaaaacatccccatatggggccctatttaagaaggccgactgaccatcctgcgctggaaaacgtcaatttcgccctgaaacccggtcagatgctgggtatctgcgggccgactggttccggcaaaagtaccctgttgtcgctcattcagcgtcatttcgacgtcagcgagggggatattcgctttcatgatattcctctgacgaagttacaactcgatagctggcgtagcgcctggcggtatgttagccagacgccattccttttttctgacactgtggcgaataacatcgcgctgggttgcccgaatgccacccagcaagagattgagcatgtcgcgcggttagccagcgtacatgacgatattttgcgtctaccgcaagttacggatacagaggtgggcgagcgcggtgtgatgccttccggcgggcaaaaacagcgtatctccattgctcgtgcgttattagtcaacgcggaaatcctcatccttgatgatgcgctttcggcggtggacggacgcactgagcaccagatcctgcataacctgcgtcagtgggggcaaggaagaacggtaatcatcagtgcccatcgcctttctgcactgacggaagccagtgaaattattgtgatgcagcacggacatatcgcccagctggcaatcatgatgtgctggacaacaaagcggctgttccggatggctattgagcagcaaggcaacgttagtttgcggtccggtagacacaatggtgacaggttccgcactttcacgcagcgttttcgccatcagctctaccgccgtacagttttgcggtgcgaatgtcggttccgatcacccgattcgccactttacggcaaagcccatttcgtgggtcaccaccatcatggtcattccttcgttcgccagttccaccatcacgtccagtactcgttgatcatctccggatccagcgccgatgtcgtgcgccggaaacttattggcgtgagcagaaagcccgacacgctccagcagtttcagggctttttcacgagccggcgctttatcgcgtttaagcactttcacctgcgccagggtcaggttttcgataatcgacagatgagggaacagctcgaaatgctggaataccatcccgacgcgggaacgcagctttgccagatcggttttcttgtcgttaaccacgataccatcgacggtgatttcaccttgctgcaccggttcgaggccgttgacggttttaatcagcgttga

SEQ ID NO: 144129 - DNA, 1836 bp, Homo sapiens
ttaacgcgttgcggaagtcggcgtcttcatgtagcggaagaaatcgctatccgggctcatgaccatcacgtcctgattgccagagaagctgttctcataagcacgcaggctacggatgaatgcgtagaagtccggatctttactgaatgcatcagcaaacagtttggctgcttcggcatcgccttcaccacgcatgatgcggccctgacgctcagcttctgccagcgttctggtcacttcatagtcggcagtcgcgcgcagtttttccgcttcttcctgaccttgtgaacggtgacgacgcgctaccgcttcacgctcggcgcgcatacggttgtagatcgcttcagacacttcggtcggcaggttgatctgcttgatacgcacatcgacaacttcaatacccagccgcggcatactgttcgggttgatgaccggactttgccttcgtctcacttcgttttcacagtcgaattgggtccaaacatttcgcattgataatttgtcatggataccacagtggtaaccgcctgatttcaaaccgggtgtcgctgggttatcgctcgccacgggaatatctgcggcagcgggcttgtaatgggttaagtgataacagatgtgcgcactgccaatttccagcaaagctttatcctgtacccgaataaccccggcaaaccccagagggaattctccgctgattgtcgtatctccattcagatataccgacgactcaccactaacgacaataacgctggtataactatatcctgtgcgcaaggaagtaacctgcgacccatctgcaagcgcgtttttctctccaatcagttcaagtccaccattcatattaacggtattgccatcgccaatcacaaccagacctgacgttttctctgcgctgccatcaaataaattactctcatcctgtttctcgcgatacaccccagcaaaggaggcgttaccaaacgggctaagtaccagacctttgatatcgtaccgataggcctgcaaacgcaatgacgacgccagcggcaaaatgggcaattcctgcgccagaatactctgcgcttcgtcataggcttcaatacgcgccgccagctgctgcgaagagagcgccttacgcaatacgctgtcgaatttcggatcgcaccagtgggcgaggttggtctgctcccagtccgctttggggattggctccagatatttttccagctggcggaagtcatgattaatcgctttatcgcgacgcaagcggcgacgacttttctccaggtcaagaaaaccagcttctgcattaccttctgttttcacatagatatggcgaacataacaacagccatgctgacgattaatgctatgcattttcttaaacgccagcgccactgctttcaacatggcttgccgtacttcgtcagaataaggcgatactgcatgctgggcataccagtcagcaatgctgatgaaccccgccatatcttcagtcaccagcaacgctcgccattcaccctcaattttcaccgcttcaccaaaaacgatcttcggcacgatgacaccggcccgttccagttctttaattaccgcaacctcacggacaatcgttggtcggccgaacggataacgtacggaatgaaacagatgatgcgtcatgcgctttacatacagctttttgccgttgcgctcgacgatcactcgttgtggcgatattttcagcaccgagagcgagtatcttaccggactggatcgcgaaattggcgatgctgaccacgggctaaatatgaaccgaggctttagcaaagtggtggaaaaactccctgctatcgcagataaagatatcggtttcat

SEQ ID NO: 144130 - DNA, 1224 bp, Homo sapiens
atggaggggagggcagggcaagctgttctgctgacactggatggctcccctccgatcctcctgggtgtgctgctggagccctgggaggagggggttgggcagtcgctggcgctgccgctggtggtccctgtgcttgaagtgccggtggtatcggagtccatgcacccaaggcccagcacccagcaacattctctggcccagcagagggcgttatcccgccacaatgacctgatgatgtcatcatacagccatttttttgcccatctctcccgcctgaaactcattaaccgctggccgctcatgcgcaacgtgcggacggaaaatgtgtccgaacacagtttgcaggtagcgatggtcgcccatgcgctggcagctatcaaaaatcgaaaatttggcggtaatgtcaacgccgaacgtatcgctttactggcgatgtaccacgatgcctcagaagtgctcaccggcgatctccctactccggtgaaatacttcaattcgcaaatcgctcaggagtacaaggctattgaaaaaatcgctcagcaaaaactggtcgatatggttccggaagagctgcgggatatctttgcgccgttaattgacgagcatgcaatgatagatcaaccacaaactgaaaatcaaaagaccctcgccctttttggtatgggcaccaatgtgtttcgccgaatgcatcgcaaaattgtggtgatcgacgcgcgtatagcctttattggcgggttgaattactccgccgagcatatgtccagctacggtccagaggctaaccaggattacgcggtacgccttgaagggccgattgtcgaagatattctccagtttgagctggaaaacctgcctggacaaagcgcggcacgacgctggtggcgacgtcatcacaaagcggaagagaaccgccagccgggagaagcgcaggtattgctggtctggcgcgataacgaagaacatcgcgatgatattgaacgccattatttgaaaatgctcactcaggcgcggcgggaagtgattatcgccaacgcctacttcttccccggctatcgatttttacacgccttgcgtaaagcggcacggcgcggggtgcggatcaaactgatcattcagggcgaaccggatatgccgattgtcagagtcggtgcgcgcttgctgtataactatctggttaaaggcggcgttcaggtttttgagtaccgccgccgcccgctcctttag

SEQ ID NO: 144131 - DNA, 2277 bp, Homo sapiens
atgtctcattgcatcggcggccccattatgagctccggcaacaatagcatccatatcataaccgaactgacggtacggctggtgcaggtgatgcgggttctcctcattaagctggttgccccattcatcatactccccgcgccaagccgtatagccgtcttcgctgatgagcgccagcggcaggccccggtggtcgcagtggtaaaaatgaacttttcgcgccgttgctccaacacgctggcggcaaaagatctaaaagtggtcgggcagaaagcgacgggcataaacgtttctggcgatgcgaatacagtgaatatcactggtaacgttctggttgataaggataaaaccgcagacaatgcggcggaatatttcttcgatccatccgtgggtatcaacgtttacggcagtgataataacgtgacgctggatggaaagttaactgttgtatcagacagtgaggttacttctcgtcagagtaatttatttgatggcagcgcagagaaaacgtcaggtctggttgtgattggcgatggcaataccgttaatatgaatggtggacttgaactgattggagagaaaaacgcgcttgcagatgggtcgcaggttacttccttgcgcacaggatatagttataccagcgttattgtcgttagtggtgagtcgtcggtatatctgaatggagatacgacaatcagcggagaattccctctggggtttgccggggttattcgggtacaggataaagctttgctggaaattggcagtggcgctacgctaacaatgcaggatattgacagttttgaacatcatgggacaagaaccctggatttgcccctatatttccagacatctgttatgtggcggtttacgaagcggtcccaaggatattgtctggcgatagcgggtttttaccgtgcaacgcatagtgccggtgaatggttcgcgatcgacccagtgcaactgctgggcaatcaacccgacagacatcagccgcgggtgttcatggccctgagcgacaaccagaatgttgttttcgacgtctttgtccaccacataccacggttcttcggtaccttctttggtgccaccgatacccagacctttacgctgaccgagagtgtgatacatcagcccctggtgctcaccaatttcatcgccatcgacggtaatgattttgcccggttgcgccgggagataacggcccaggaactcgcggaatttacgttcgccaatgaagcaaatgccggtagagtcttttttcttcgcggtgaccagaccaagatcttcagcaatcttacgcacctgcggtttttccagttcgccgaccgggaacaggctttgcgcaatctgctcatggctgagcgtataaaggaagtagctctggtctttattgctgtccagaccacgcagcaggcggctcttgccatcgacatcggcccgacgtacgtaatgaccgaatatccggattcggcgtgcgaccggctttatattcgggaaggaacagttcgtccagcagcggggactcaggatgaaaaagagaagatgcctcacctggatgaggacccagctcctccattctggcgtttggggcatttgatggcgtgccgctggagctgtaggacagagagagagacacagtcagatttcgggcagttccctaacgtccaattccctgaatccccacaaattcagctccacgttcccgtggccctttcgattcgaagtggccacaggaacctcggagctcatgcagatgagagttggaaaactctccttgggtgtgaggagctggagaaagatgttgagatcccggatcgagcggggcacacaatagtggtaccgtcctgctggtttgcggtggaacgccgcttcggccacgatcttccgtcgtctccagtggagtggctgacggataatggttcatgctaccgggctaatgaaacacgccagttcgcccggatgttgggacttgaaccgaagaacacggcggtgcggagtccggagagtaacggaatagcagagagcttcgtgaaaacgataaagcgtgactacatcagtatcatgcccaaaccagacgggttaacggcagcaaagaaccttgcagaggcgttcgagcattataacgaatggcatccgcatacgccactgccaatttccagcaaagctttatcctgtacccgaataaccccggcaaaccccagagggaattctccgctgattgtcgtatctccattcagatataccgacgactcaccactaacgacaataacgctg

SEQ ID NO: 144132 - DNA, 2916 bp, Homo sapiens
  misc_feature (1)...(2916): n = a,t,c or g
atggtgggtaactacctcggatctcagcaacaaacacggattgttcccatcgtcaccctaggtctggaccggaggacacgtgataataacgtgacgctggatggaaagttaactgttgtatcagacagtgaggttacttctcgtcagagtaatttatttgatggcagcgcagagaaaacgtcaggtctggttgtgattggcgatggcaataccgttaatatgaatggtggacttgaactgattggagagaaaaacgcgcttgcagatgggtctcaggttacttccttgcgcacaggatatagttataccagcgttattgtcgttagtggtgagtcgtcggtatatctgaatggagatacgacaatcagcggagaattccctctggggtttgccggggttattcgggtagcgatggtcgcccatgcgctggcagctatcaaaaatcgaaaatttggcggtaatgtcaacgccgaacgtatcgctttactggcgatgtaccacgatgcctcagaagtgctcaccggcgatctccctactccggtgaaatacttcaattcgcaaatcgctcaggagtacaaggctattgaaaaaatcgctcagcaaaaactggtcgatatggttccggaagagctgcgggatatctttgcgccgttaattgacgagcatgcatatagcgatgaagaaaaatcgctgtgggatgttgtgctggcagatgtacgctggcacgacggcgctaaaaaagccttcaccctggcccgtcaggcgggtgtgatgaccgttctggacggggacattacgccgcaggatatcagtgagctggtggcattaagcgatcacgcggccttttcagaaccgggtctggcgcgcttaacgggcgtgaaagagatggccagtgcgctaaaacaggcacaaacgctcacaaatggtcatgtctatgtgacccagggtagcgcaggctgcgactggctggaaaatggtgggcgtcagcatcaaccggccttcaaagttgatgtggtagataccacaggtgcgggtgatgtttttcacggcgctttggcggtggcgctggcaacaagtggggatttagcggagtcagtccgcttcgccagcggtgtagcggcgttaaaatgcacacgtcccggaattttcatgagccttaccgaactaaccggtaacccgcggcacgaccaactcctcatgctgatcgccgagcgtgggtatatgaatattgatgagctggcaaatctgctggatgtctccacgcagacggtccgccgggatattcgtaaattaagcgagcaaggcctgattacgcgccatcacggtggcgcgggtcgggcttccagaatcgttaatacggcgttcgagcagcgtgaggtttcgcaaaccgaggaaaaaaaagcgattgccgaagcggtggcagactatattcctgatggttcaacaatatttatcaccattggtacgactgttgagcatgttgcccgggcgttacttaaccataatcatttgcggataatcaccaacagcctgcgtgtggcgcggattcttcccaaaaacccgcgctttgaagtgatggtgcccggcgcgactggcgagcgggaatccgcgcagacacaagaaggcagacacagtgtagctacagcagagcagaaagcaacagttacaacaacgacagagcactgctctaccaccaacctacagaagcggattaaagcggacaccgacggacgaagcgagagctgtaacgacatgcgtcggtaccttgcacacacggcgaacgaacaagaacacgagcagccaaacggccatagtgccgtaggacaaaccgtcgccaatgaaacgacaggatccccaatttcaacggggagtgagcaagaactgcgacgtaaactcgcggcaccgattatgggcaaaaatggcccagaagagattgatgctacggcagaagattacgagcgcgatattgcctggtgccatgaacatggctatctcgatgacagccgatttgttgcgcgctttatcgccagccgtagccgcaaagggcgcatcgcgtgtgaaggtatttcggtattcggcgaggtgttatggcaaggcaatgatgccgatgccgctcagctcgagcagcttgtcgggcagcccgtgcgggtttccgcgctggcgcggttttcatttgctgaacgtcatgcngttgtcgaacgctttgccgcactgctggaagcaataaagccgattaaccgcgattattgccagagaaacggcacaagttgtagcacctcggcggcacacagaccaccaggccagtcagaggacacgagggacacgccaggacgacggaaagcgacaacggcgcagcagagggaggagcacagacgcgagcagagcacgcacacgcagcgacaggtcgatcgggcggcgagcgcggcccatggcgcagaggatacccccataatagaagtggcgctggtggcgttggcgaatctggcggcggtgcggttgtacggcgaaatcgagttctggttcgcgatgatcaaagtcaccacgattatcgtgatgattgtcatcggcctgggcgtgattttctttggctttggcaatggcgggcagtcgattggagcgaacgagcgagtaaggcacatccattacccaaagttagcgcgagaaaggcgtgtacttgtaactgtcactgctcgttgctttcacgactggcttcattggaagtccgcggctcgtcgccagacagacgacaagatgaggcgaggacgacgagcccacaacgaagcgcgagatactcacaccacacgagactggacagcagcactcgagtccccaaacccactacgagagagcgccggacgtgtaaaagaaacaggctctggctcgcgggctcgacagaatgacaagcgtcacagataa

SEQ ID NO: 144133 - DNA, 3669 bp, Homo sapiens; identical to SEQ ID NO: 129987

SEQ ID NO: 144134 - DNA, 702 bp, Homo sapiens; identical to SEQ ID NO: 138658

SEQ ID NO: 144135 - DNA, 2160 bp, Homo sapiens
ttaactcgggtggaagttgtcgtgtggcccgtacaggttggtcggcatgactgagcggtaatcgcgtccgtactggcggttgtatgattcgcacagtttgatcccggcgattttggcaatagcataaggctcgttagtcggctccagcgtgccctgcaacaactcgctttctgccatcggctgttttgccagtttcgggtagatgcaggacgatccgagaaacagcagtttgttcacgtcgttctgatgcgcggcgtgaatgatgttgctctcaatcatcatgttctggtagatgaaatccgccggataggtgttgttggcaacaatgccgcccactttcgccgccgccagatagacctggtcaatacgttcgctggtgggtctgtcgcagaaagtgaagaaattgcgctcgaagcactgaagctcatcgacgttgaatatgaatgtgcttaagccggtaatgtcgatcgacgaagcaactcggcggaagatgcgcctgtcgtgcacgatgaaccggtggtgtatgttgctggtgcgccagatacgtggatgccctggtagttttcgcggatcagctcttcgttgctgaggttctcgcttcggcgcatagccccagtagactttacgcacacgctcatggagatactccgcaaaggcttcggctaaacggtcggcaagcgctttcaccatgattttgttgtaatcatcgtgctgcgcttcaaaggcatcagccagtgcgtcctcttccagcccgccagtcacggcaaatgcgccgatgtaatctgctttaccagaaagcttcggcgcaacgaagtcagcgagacagtagttagcgaagcctgttttttcggtctgttgacgcagatggtggctgacgttgatcacatgggtacgcgtttcgtcacggtagatttcaatgtcatcgcccacacggtttgccgggaacaggcccaccacgccacgcggattcagcgttttctcggcgcttaatttatccagcatgtcgttggcgtctttaaacagccgctgcgcctcaacgcccaccacttcatcttccagaatgcgcggatacttcccggccagcgaccaggtcataaagaacggtgtccagtcgatgtaattacgcagcgtttcgatgctggcttcgacttcctgcacgccgagacggtgcgccaccggcggcgtgtaagcctgccagtcaaaagcgaaatcgttatcgcgcgccgcttccagcgtgaccggtggtgtgcgcggtttcttgcgcccgtgctgaatacgtacggtttcgtactccttgcgggtacgagcgacaaaatcatcacgctgggtatcggaaagcagcgccgccaccacaccaacggtacgcgaggcattctgcacatacaccgtcgggccgctgtagttctgctcgattttcaccgccgtgtgcgcaaggtaagagcgccccacacccccgcccgggtccagggccacatcacgaatgaggtaatttttcagggtaaagcgtgacaggaagcaacctgcggtaatcgccccaccaggacgaccgccaatgttcgccatatcggcaaaattggactccagttgttcctgatactcgtcacccagcggtaagcgccatgcgcggtcaccggattgttcagacgcggcaatcagttcatgggccagcggattatggttcgccatcagaccagtaatatgatgacccagcgcgatcacgcaggcaccggtcagcgtcgccaagattgacacaatccctaactgttcgccatcggcattgtaatcgagtaaatcgtcgatcaactggaaagcagtgccgagaatttccccttttttggcatcttcagcagaaacgttgattcctagaaatacctgcagggctttaaaatccactttttccatatcgatagtcacgttttcctgcgcgtaggtatcggtataggttaatttttcttcaacacccgcgatgtttttgtatttggcgcttaacggctcaagtgtcttggcagcatcttctttgtagacataggtaatggcaatttcagtgccgttcagattggcgctgaatttcttcgattcttctttgtcaccgcagccagcaagagagaaaaccagaacagatgcaacaacgagggaaaacagcttattgaaagccttcat

SEQ ID NO: 144136 - DNA, 554 bp, Homo sapiens; identical to SEQ ID NO: 139891

SEQ ID NO: 144137 - DNA, 1755 bp, Homo sapiens; identical to SEQ ID NO: 128995

SEQ ID NO: 144138 - DNA, 4917 bp, Homo sapiens
ttattcaccagatgcctgttgcgcttccggcttgccataaatcagcaacggtttgctttgaccatcaattaccgactcgtcgataaccactttttcgacgtcttccatggacggcagatcgtacatggtatcgagcagtgcggcttctacgatggaacgcaggccacgggcaccggttttacgcgccatcgctttcttagcgatagcatccagcgcctcgtcacggaattccagatccacgccttccagattaaacagcgcctgatactgcttggtcagggcgtttttcggctctttgaggatctgaatcagagcttcttcgctcagttcattcaacgttgcgacaaccggcagacgaccaataaactcagggataagaccaaacttgatcagatcttccggttcaacctgcgccagcagctcgccttcgcttgctttgtcggacttcgcttttaccgtcgcgccaaaatgattctggtaacaggaatgtgattgattataagaacatcccggttccgcgaagccaacaacctgtgcactcaaggccttggccgccgtgtaacgattactatcgctgctgacagcatcgagaccgctgttaaaagcgagctggtcaacgttgcgaaaaaagtacgtattgacggcttccgcaaaggcaaagtgccaatgaatatcgttgctcagcgttatggcgcgtctgtacgccaggacgttctgggtgacctgatgagccgtaacttcattgacgccatcattaaagaaaaaatcaatccggctggcgcaccgacttatgttccgggcgaatacaagctgggtgaagacttcacttactctgtagagtttgaagtttatccggaagttgaactgcagggtctggaagcgatcgaagttgaaaaaccgatcgttgaagtgaccgacgctgacgttgacggcatgctggatactctgcgtaaacagcaggcgacgtgtgccgcatccggtacgcggcaccgtttcgttggtcgagtggcacatggcccgcgccacgttaatcatattcatgttctgcagcgcagtctcaccgccgccagcagtctcgacgatatgctgatgcgctttcaccgctgggcgcgcgatctcggcctggcaggtgcgagtctgcgcctgtttccggatcgctggcgcttaggtgcgccgtcaaacccaaatcatctggcattaagccgtcagtctttcgaaccgctgcgtattcagcgttaggggcaggaacagcactatcttgggccgcttaacggaccagagctgctggtggtgctaccggaagcgaaagcggtgggatcggtggcgatgtcgatgctgggaagcgatgctgatttgggtgtcgtgctgtttaccagtcgcgatgccagtcactatcaacaagggcaaggaacgcagttacttcatgaaattgcgctgatgttgccggagcttctggagcgttggattgaacgccgtcagcttgaggcgatcatcaattttgccagcgaaaacggcctgcaaagctggcagcaatgtgatgtgacgatggtgcgcaattttgctgtacgcagtcgccgtaaagggctgggagcagcaagtctggcgttacggctttctgcgctacgtagcttttttgactggctggtcagccagaacgaactcaaagctaacccggcgaaaggtgtttcggcaccgaaagcgccgcgtcatctgccgaaaaacatcgacgtcgacgatatgaatcggctgctggatattgatatcaatgatcccctcgctgtacgcgaccgtgcaatgctggaagtgatgtacggcgcgggtctgcgtctttctgagctggtggggctggatattaaacacctcgacctggagtctggtgaagtgtgggttatggggaaaggcagcaaagagcgccgcctgccgattggtcgcaacgctgtggcgtggattgagcactggcttgatttgcgcgacctgtttggtagcgaagacgacgcgctttttctgtcgaaactgggcaagcgtatctccgcgcgtaatgtgcagaaacgctttgccgaatggggcataaaacaagggctgaataatcacgttcatccgcataaattacgtcactcgttcgccacgcatatgctggagtcgagcggcgatcttcgtgcgagaggcgcttacctttgtgccaaattattatccggggctgcgcaggttccagaatggagatctgcattcgcctggtttgcccgctgtgccgaacaggcaaggcaaaaccagtacttacaggtcagctcttgcgtacccgccctggaaggctgcgatgttaacggtgccagttttacccttgaacagatgctcgcctggcgggaccatccgcaggttaccggccttgcagaaatgatggactaccctggcgtaattagcgggcagaatgcgctgctcgataaactggatgcatttcgccacctgacgctggacggtcactgcccgggtttgggtggtaaagaacttaacgcctatattactgcgggtattgaaaactgccacgaaagttatcagctggaagaaggacgccggaaattacaactcggcatgtcgttgatgatccgcgaagggtccgctgcccgcaatctcaacgcgctggcaccgttgatcaacgaatttaacagcccgcaatgcatgctctgtaccgatgaccgtaacccgtgggagatcggccatgaaggacacatcgatgccttaattcgccggctgaaatgcattaccgagtttatcgagcaggataccgaagaagcccgccagcaggctacgcgcccgattgaagtgattgaaggcccgttgatggacggcatgaatgtggtcggcgacctgtttggcgaagggaaaatgttcctgccacaggtggtcaaatcggcgcgcgtcatgaaacaggcggtggcctacctcgaaccgtttattgaagccagcaaagagcagggcaaaaccaacggcaagatggtgatcgccaccgtgaagggcgacgtccacgacatcggtaaaaatatcgttggtgtggtgctgcaatgtaacaactacgaaattgtcgatctcggcgttatggtgcctgcggaaaaaattctccgtaccgctaaagaagtgaatgctgatctgattggcctttcggggcttatcacgccgtcgctggacgagatggttaacgtggcgaaagagatggagcgtcagggcttcactattccgttactgattggcggcgcgacgacctcaaaagcgcacacggcggtgaaaatcgagcagaactacagcggcccgacggtgtatgtgcagaatgcctcgcgtaccgttggtgtggtggcggcgctgctttccgatacccagcgtgatgattttgtcgctcgtacccgcaagagtcgaaacccaggcggtacagctaacgcacaatctaccttcgagcaaaaagcggcaaatccctttgataataacaatgatggtctgccggatttaggcatggctcccgaaaatcatgatggggaaaaacactttgctgaaattgtgaaagatttcggcgaaaccagtatgaatgataacgggctggatactggcgagcaggcaaaagctttcgcattgggaaaagtccgcgaatggtggtcgatgccggacaatgacattcgccgccgaagaaccgcaaggcattcacgcctgaaagagaatctgccgctgattacgctaatcgtgatgatggcaatcagctggggtctggagcagttcaatcatccgttcgggcaactggcgtttatcgcgaccacgctggttgggctgtacccgattgctcgtcaggcattacggttgatcaaatccggcagctacttcgccattgaaaccttaatgagcgtagccgctattggtgcactgtttattggcgcaacggctgaagctgcgatggtgttgctgctgtttttgattggtgaacgactggaaggctgggccgccagccgcgcgctgtggcgattaacagccatagcgccacccttgggacagcaactggttggcactctcgcacacgttccgccgttcttcctgatgatggcaggtctggcggtttacgcggtgctgtttgcgggctggtcaagtaacaacaaatactcgttgctgggtgcgatgcgtgcttctgcgcagaccctgagctacgaagtgttcctcgggctttccttgatgggcgtggtggcgcaggccggttcattcaacatgaccgacatcgtcaacagccaggcgcatgtgtggaacgttatcccgcaattctttggttttattacctttgccatcgcgggcgtggcggtatgtcaccgtcacccgtttgaccagccggaagccgagcaggaactggcggatggttaccacattgaatattccggtatgaagttcggtctgttcttcgtgggtgagtacatcgggattgtgaccatctctgcattgatggtgacgctgttcttcggtggctggcaaggcccgttgttaccgccattcatctggttcgcgctgaaaaccgcgttctttatgatgatgttcattttgattcgtaatgtccttcggctggaaaatctgcctgccgctgacgctgatcaacttgctggtaacggcggctgtcattctctggcaggcgcaataaggggcaataagaccatgaccttaaaagaattgttagtaggtttcggcacccaggttcgtagtatctggatgatcggcctgcacgcgttcgccaaacgcgaaacgcgaatgtacccggaagagccggtctatctgccgccccgttatcgtggtcgtatcgttctgacccgcgacccggacggcgaagagcgttgcgtagcctgtaacctctgcgcggtagcctgcccgtcggctgtatctcgatgcaaaagcagaggatag

SEQ ID NO: 144139 - DNA, 1308 bp, Homo sapiens
  misc_feature (1)...(1308): n = a,t,c or g
gcctacaaaagcggcatgtcggtgatgggctgggaagtgacttcagcggtgacgctgatcttcctcgcgctaatctttttaccgcgctatctgaagcgcggcattgccaccatccccgattttctggaggaacgttatgataaaacgacgcgtattatcatcgacttctgcttcctaattgccaccggcgtctgctttctgccgattgttctctactccggcgcgttggcgctcaacagcctgtttcacgtcggggaatcgctacagatttctcacggtgcggctatctggctactggtaattttgcttggtctggcgggaattttgtatgcggtgatcggcggactgcgcgcaatggcagtggcggactccatcaacggtattgggctggttatcggcgggttgatggtgccggtatttggcctaatcgcgatgggcaagggcagctttatgcagggcattgagcaactcaccaccgttcacgccgagaaattaaactcaatcggtggcccgaccgatcccttgccgattggcgcggcatttaccgggcatcgtgcaacgcacctggcgtcaaaaagcctggcggaagggcaaaagggggcgctgttaacggcggtgctgaaaatgctcgacccgctggtactggtgctgccagggttgattgcgtttcatctgtatcaggatttaccgaaagccgacatggcctacccgacgctggtcaataacgttctgccagtgccaatggtgggtttcttcggcgcggtgttatttggtgcggtgatcagtaccttcaacggctttctgaatagcgccagtacgttattcagtatgggtatttaccgtcgcatcattaaccagaatgccgagccgcagcagctggtcaccgtcgggcgcaaatttggtttctttatcgctatcgtttcggtgctggtcgcgccgtggatcgccaacgcgccgcnagggctgtatagctggatgaaacagctcaacggcatttacaacgtgccgctggttaccatcatcattatgggctttttcttcccgcgcatcccggcgctggcggcaaaagtagcgatggggattggcataatcagctacatcaccatcaactatctggtgaagttcgacttccatttcctctaccggaattgtgaaagaacttgtcgactgctgttgctgaaaggcgatggacctgtaactgtcgaggggaaaacagttgcctctgaccgaaagcgctacagtggcatctcgaaactgaccgtcaacacccgccaacatctgttgagaattacgcaacgcttaccccga

SEQ ID NO: 144140 - DNA, 393 bp, Homo sapiens
catccggcgaatcacataccaggagatgagtaacatggtggtaaagagcgcccacagcagggttaatgcaatgctgatactgccgaaatcgccgcgcacgccttcgcttaacgtatggacacgcaccagcacaccgtcgaaatggtccagacgttcccagctaacatagcgactgtccatacgaatgccgccccgcgtgtcatgttccattgcctgcgccagcaaggccagttcacgaggatcaaaaatattcctgtcatagagctgatactcaccatcgaggtttttatcgatggcgtttcttaaaaattgctgcatagtacgcacgggaatactcatccccagcacgccataccagtagttattactgtctaccggaacactgacggtaac

SEQ ID NO: 144141 - DNA, 695 bp, Homo sapiens
ccacgctacgcccggcaaaccggttttgacatattccagatgctgctggagtaattccggtgggatacgcgctttgacgcggaacatcagtttcagccgttcatcgctggtttcgacggtttttggcgtgaactgggcgacactggcgacaaaactgatggttgcaggaatacgcagatctggcgcggcatcgaggatcagccgggcttcaccgcccagtttcagcgtgcccgcctgttcggttggcaggaagaaagtcatatagacgtcgctgagatcgaccatattcagcacccgaccgcctgccgccagcacttcgcctggcttggcaacccgatactgcacgcgtccgtcacgcggggctttcagttcgctgtcatcgatatctgcggcaatgcgccgttcagtggcttgtgccgcttcgacgcgggtttgcgcctgaatgatattggtgcgtgccgcttctatagccgctttatggaaggaccacagcatggattctgcccgagagttcttgcctgccagcacccgcacacggtgagctcgccagccccagcgggccaagcagacatcagcagctcggatccgggtccgcgggggcagccaaaatccacagctgccaaggccccggccccagcttcggccagcaccatagacggaaaagcagttgcgctcccccagccccagaagaaacc

SEQ ID NO: 144142 - DNA, 3639 bp, Homo sapiens
atgcctatatctccagccagccgcccactggatttcacctctctgcgtgatgctgtaaccgagttcgaacagcatcgctacgagcacgcctgtaaaatcgaattcaaccgacgacgcactctgccagttaatggtgtgtcggatgcattagtcagcgaggggaatctcctgtctcgcgaaaatgaaagcctcgacaatgaaattaccgctgcactggaagttggttacttgctgcgactagcgcacaactcctcgtcgatggttgaacagacgatgtatgtctcgcgtgccggattttacgtttcgacgcagccgaccttgtttacgcgcaatgttccaacgcgttattacggctatgtcacccaaccctggtttattggccattcacaacgagaaaatcgtcaccgcgcggtacgctggttcacttcgcaaccggaacacgccagcaatactgaaccgcaggttaccgtcagtgttccggtagacagtaataactactggtatggcgtgctggggatgagtattcccgtgcgtactatgcagcaatttttaagaaacgccatcgataaaaacctcgatggtgagtatcagctctatgacagtaagctgagatttttgacctcttccaatcctgaccatccaacagggaatatttttgatcctcgtgaactggccttgctggcgcatgcaatggaacatgacacgcggggcggcattcgtatggacagtcgctatgttagctgggaacgtctggaccatttcgacggtgtgctggtgcgtgtccatacgttaagcgaaggcgtgcgcggcgatttcggcagtatcagcattgcattaaccctgctgtgggcgctctttaccaccatgttactcatctcctggtatgtgattcgccggatggttagcaacatgtatgttctgcaaagctcgttgcagtggcaggcgtggcacgacaccttaacgcgtttatataaccgtggcgcactgttcgaaaaagcccgtccgctcgctaaattgtgtcagacgcaccaacatcctttttctgtcattcaggtcgatcttgaccattttaaagcgattaatgaccgctttggtcatcaggcgggcgaccgtgttctttctcatgctgcaggattaattagcagttccttgcgtaccggttttaaagcggttataaaccggaccgccccaatatctattaagccgaaaacccgctttcaaggcggcaaaagccccttgaaacggcccaattccccgccagattatcggtttgcccagcggaacttgaaaagcccccccgcttttaaccggaaaccgctgttcccatttattcgggggtttgcccaaaggcccaaagggcgaaaaatgttgcttgggccggcacaggcccggttccgggggttgctggaaattaatgatctgcgtattcctgcaaccatcagttttgtcgccagtgtcgcccagttcacgccaaaaaccgtcgaaaccagcgatgaacggctgaaactgatgttccgcgtcaaagcgcgtatcccaccggaattactccagcagcatctggaatatgtcaaaaccggtttgccgggcgtagcgtgggtgcgggtgaatgaagaacttccgtggcctgacgacctcgtggcctacaaaagcggcatgtcggtgatgggctgggaagtgacttcagcggtgacgctgatcttcctcgcgctaatctttttaccgcgctatctgaagcgcggcattgccaccatccccgattttctggaggaacgttatgataaaacgacgcgtattatcatcgacttctgcttcctaattgccaccggcgtctgctttctgccgattgttctctactccggcgcgttggcgctcaacagcctgtttcacgtcggggaatcgctacagatttctcacggtgcggctatctggctactggtaattttgcttggtctggcgggaattttgtatgcggtgatcggcggactgcgcgcaatggcagtggcggactccatcaacggtattgggctggttatcggcgggttgatggtgccggtatttggcctaatcgcgatgggcaagggcagctttatgcagggcattgagcaactcaccaccgttcacgccgagaaattaaactcaatcggtggcccgaccgatcccttgccgattggcgcggcatttaccggtttgattctggtgaacaccttttactggtgtacaaatcagggcatcgtgcaacgcacgctggcgtcaaaaagcctggcggaagggcaaaagggggcgctgttaacggcggtgctgaaaatgctcgacccgctggtactggtgctgccagggttgattgcgtttcatctgtatcaggatttaccgaaagccgacatggcctacccgacgctggtcaataacgttctgccagtgccaatggtgggtttcttcggcgcggtgttatttggtgcggtgatcagtaccttcaacggctttctgaatagcgccagtacgttattcagtatgggtatttaccgtcgcatcattaaccagaatgccgagccgcagcagctggtcaccgtcgggcgcaaatttggtttctttatcgctatcgtttcggtgctggtcgcgccgtggatcgccaacgcgccgcaggggctgtatagctggatgaaacagctcaacggcatttacaacgtgccgctggttaccatcatcattatgggctttttcttcccgcgcatcccggcgctggcggcaaaagtagcgatggggattggcataatcagctacatcaccatcaactatttggtgaagttcgacttccatttcctctaccggaattgtgaaagaacttgtcgactgctgttgctgaaaggcgatggacctgtaactgtcgaggggaaaacagttgcctctgaccgaaagcgctacagtggcatctcgaaactgaccgtcaacacccgccaacatctgttgagaattacgcaacgcttaccccgacttgatgccgaagcgctaattaatctggtgcgccacgtgacgccgcgtctgtattccatcgcctcctcgcagccggaagtcgagaacgaagtacacgtcaccgttggtgtggtgcgttacgacgtggaaggccgcgaacgtgccggtggtgcctccagcttcctcgctgaccgcgtggaagaagagggcgaagtccgcgtatttatcgaacataacgataacttccgcctgccagccaatccagaaaccccggcaccggtacttgcgccgttccgcgcctttatgcagcaacgcgccgccgacgaagcgccaggtaaaaactggctgttctttggtaatccgcactttacggaagacttcctgtaccaggtggagtggcagcgatacgtcaaagatggcgtgctgacacgtatcgatcttgcctggtcgcgcgatcaaaaagaaaaagtttacgtacaagacaaactgcgcgaacagggcgcggagctgtggcgctggatcaatgatggtgcccacatttatgtctgcggcgacgctaatcgcatggcgaaagacgttgagcatacacttgtgagagtaattcgcaaatttagtagcatagattatcctctagagtctacagacaagagtacaacaatacatgggtcacag

SEQ ID NO: 144143 - DNA, 957 bp, Homo sapiens
atgggctttcgacggacgatgccacacatcgtaatttcggcgctggtgggtggtttactgctggtgttcgctgactgcctggcctggacctgcaggcatgataagctcgatgacataagcgatgtagcaaaaattaccggcctgaccagcaaagccattcgcttctatgaagagaaggggctggtgacgccgccgatgcgcagcgaaaacggttatcgcacctacacgcagcagcatctcaacgaactgaccttactgcgccaggcacggcaggtgggctttaacctggaagagagcggcgagctggtgaatctgtttaacgacccgcagcggcacagcgccgacgtcaaacggcgcacgctggagaaggtggcggagatcgaacgacacattgaggagctgcaatccatgcgcgaccagctgctggcactggcgaatgcctgccctggcgatgacagcgccgactgcccgattatcgaaaatctctccggctgctgtcatcatcgggcagggaaatacgtaggcctgataagacgcgtcaagcgtcgcatcaggcatcggtgctggcctattaagactctcagccagcgcgcggtttctgaatttcagcgcctgatacagccaaatcatcagtaccagtcctacacacgccagtgcgccccagaaacggataatcatgccgataactcatataacgcagggctgtttatcgtgaattcactctataccgctgaaggtgtaatggataaacactcgctgtggcagcgttatgtcccgctgatgcgtcacgaagcattgcgcctgcaggttcgactgcccgcgagcgtggaacttgacgatctgctacaggcgggcggcattgggttacttaatgccgtcgaacgctatgacgccctacaaggaacggcatttacaacttacgcagtgcagcgtatccgtaggcgctatgttggatga

SEQ ID NO: 144144 - DNA, 702 bp, Homo sapiens
atggccaaggtttcccgggagatctgcccggctggtcctggttaccactactcggcctccgacctccgctacaacaccagacccctgggccaggagccaccccgagtgtcactcagccagcctcgtaccctgccagccacctctcggccatctgcagaaacggataatcatgccgataactcatataacgcagggctgtttatcgtgaattcactctataccgctgaaggtgtaatggataaacactcgctgtggcagcgttatgtcccgctggtgcgtcacgaagcattgcgcctgcaggttcgactgcccgcgagcgtggaacttgacgatctgctacaggcgggcggcattgggttacttaatgccgtcgaacgctatgacgccctacaaggaacggcatttacaacttacgcagtgcagcgtatccgtggcgctatgctggatgaacttcgcagccgtgactgggtgccgcgcagcgtgcgacgcaacgcgcgtgaagtggcacaggcaatagggcaactggagcaggaacttggccgcaacgccacggaaactgaggtagcggaacgtttagggatcgatattgccgattatcgccaaatgttgctcgacaccaataacagccagctcttctcctacgatgagtggcgcgaagagcacggcgatagcatcgaactggttactgacagtctgttctga

SEQ ID NO: 144145 - DNA, 660 bp, Homo sapiens
tcactgtgggtgcatcgtaagtgggtcgctccggctcttcacaaacggcagatgatcgcaggcgtgattgcgcgctgagcgaataaacgcttccgtaactggctgacgctgctcgccatcgcgcacggcggcgtacagtcggctccacaagccttcgcccagggttttggtcaccaccagaccctggcgctcaaaactctctactacccaatgcggtagcgcggcaatacccatccgcgcggcaaccatctgaatcaacaataaggtgttatcgacgcttttcagtgacgggctgacgcctgccggctgaagaaaatgccgccagacatccagtcgactacgctgcaccggataaattaatagcgtctcgctggcgagatcttccggtgtaattcgcgttttcgccgccagtggatggtcaggtgctaacaccagacgcacttcatagtcgaacatcggcgaataatgcagcgcactgcgcggcagaatatcggacgtcattaccagatccagctctccgcagtgcagcgtatccgtggcgctatgctggatgaacttcgcagccgtgactgggtgccgcgcagtgcgacgcaacgcgcgtgaagtggcacaggcaatagggcaaatgtcattaccgatgttgcaagtcgcgctgagcat

SEQ ID NO: 144146 - DNA, 1575 bp, Homo sapiens
atgccaatggtggtgtgcgccgcgaaaagctatctcacacaatacggcataccggaaaaacccgccgatttgagtagtcattcatggcttgaatacagcgtgcggcccgacaatgaatttgaactgatcgcaccggaagggatctcgactcgcctgatcccacaaggaagatttgtgactaatgatccgatgacgctggtgcgctggctgacggcgggtgccgggatcgcctacgtgccgctgatgtgggtgatcaacgagatcaatcgtggggagctggagatcctgctgccgcgttaccagtcagatccacgcccggtttatgcgttatataccgaaaaagataagctgccgctgaaggtacaggtcgtgatcaactcgctgacggattattttgttgaggtcggggcgaggggaccgttcgtgcacgtagaaagattaattatccttctgaaaatagtgaaattattacgcagtaccggcaacagtcaggtgatcgactttcaacgttggctgggccacgacaagcgggcaactttgttattatggaagctggaggcggccggctcccctctaagaccactgagtgttcaggtgacaacccctcaggaggtggcagaaacggataatcatgccgataactcatataacgcagggctgtttatcgtgaattcactctataccgctgaaggtgtaatggataaacactcgctgtggcagcgttatgtcccgctggtgcgtcacgaagcattgcgcctgcaggttcgactgcccgcgagcgtggaacttgacgatctgctacaggcgggcggcattgggttacttaatgccgtcgaacgctatgacgccctacaaggaacggcatttacaacttacgcagtgcagcgtatccgtggcgctatgctggatgaacttcgcagccgtgactgggtgccgcgcagcgtgcgacgcaacgcgcgtgaagtggcacaggcaatagggcaactggagcaggaacttggccgcaaagccacggaaactgaggtagcggaacgtttagggatcgatattgccgattatcgccaatgttgctcgacaccattacgccagtcttctctacatgaacctcagaggcttcagagacaatgctatgaaagacaaagaagggccaaggacgtgttccagattgaaggagacactaaagagatgacactaaatgagacgtgtgatcctggattggatccacaactgggaaaaaaatgcaataagcaacattattgggagaactgtacccaaagtcaatgcatcaccttctggttgttgagtgccaacccgtcgatcaaccgcggtacgctggagaaagagagccgcaccgtcgcgcaacgtctctccgtgctgcacggcatcaacgcgccggagttcttcgacaaggcggtgttcagttctctggtgctgacactgcgtgatgaagggtatatcagcgatagcggcgatgccgaaccggcagaaacgatgaaggtttatcagttgctggcggagttgattacatcagacgtgcgtttgacgattgagagtgcgacgcagggcgaagggtaa

SEQ ID NO: 144147 - DNA, 3717 bp, Homo sapiens
atgataagtgcaaatcgtccgataattaacctcgacctcgatctgctgagaacatttgttgctgttgccgatctgaacacttttgctgccgcagctgccgctgtgtgtcgtactcagtccgccgtaagtcagcaaatgcagcgtctggaacaactcgttgggaaagaactgttcgctcgtcacggtcgcaacaaactgttaactgaacatggcattcaacttcttggttacgccaggaaaatcctgcgttttaatgatgagatcgtgtatccaaccgaattcggactaaccggattgctttggctgacactgatcctgaaggaactgatggctaacgtttcgcgtccgttgcgatcaatgccgaaagcgattgcgaaagaactggagctgaccgcatcagcggaaattttactctgggatgactattttgcacctggctacggcgtgccgaacgacgaaggcatggaagcagtgaaattgctgccgcggctggaaggcattctgcttgatcctgtgtataccggaaaagcgatgcgggggctgattgacggtatcagtcagaaacgcttcaaagatgaagggccgattctgtttattcatacccggcggtgcgcctgcgctgttcgcctatcatccccacgtttagctccggaaacgctcatgcaagaaagtatacaactggttattgattccttgccgttcctgctgaaaggggctgggtatacgctgcaactcagtatcggcggcatgttttttggcttactgctcgggtttattctcgcgctgatgcgtctgtcgccaatctggcccgtgcgctggctggcgcgtttttatatctctatttttcgtggtacgccgctcatcgcacaactgtttatgatctattacggcctgccgcagtttggtatcgaattagatcccattccgtcagcaatgattggtctgtcgttgaacactgccgcctatgctgccgaaacgctgcgcgccgccatttcttctattgataaaggtcagtgggaagcggcagccagtattggtatgacgccgtggcagaccatgcgtcgcgcgattttgccacaggcggcgcgtgtggcgttgccgccgctgtcgaacagctttattagcctggtaaaagatacgtcgctggccgcgacaatccaggtgccggagctgttccgtcaggcgcagttgattacctcgcgtacgctggaggtgttcaccatgtatctggcggcttcgctcatctactggatcatggcgactgtgttatcgacgttgcacagagatcccagtggtagattttgttggccagtggcgcaaggagccggacgctggctggtggcggatgatcgccagtatctgaacttttccagtaacgattatttagcagggggcggacaatttggcatcggtagcggcggctccggtcacgtcagcggttatagcgtggtgcatcaggcactggaagaagagctggccgagtggcttggctattggcgggcactgctgaatatctctggtttcgtcgctaatcaggcagttattgccgcgatgatggcgaaagaggaccgtattgctgccgaccggcttagccatgcctcattgctggaagctgccagtttaagcccgtcgcagcttcgccgttttgctcataacgatgtcactcatttggcgcgattgcttgcttccccctgtccggggcagcaaatggtggtgacagaacgcgtgttcagcatggacggcgatactgcgccactggcggaaatccagcaggtaacgcaacagcacaatcgctggttgatggtcgatgatgcccacggcacgggcgttatcggggagcaggggcgcggcagctgctggctgcaaaagccgtgcgttacaactggcagaaaaactgcgtcagcaaggctgctgggtcacggcgattcgcccgccaaccgtacccgctggtactgcgcgactgcgcttaacgctaacccgatatcgaccgtctgctggaggtgctgcatggcaacggttaataaacaagccattgcagcggcatttggtcgggcagccgcacactatgagcaacatgcagatctacagcgccagagatgtgacgccttactggcaatgcttccacagcgtaaatacacccacgtactggacgcgggttgtggacctggctggatgagccgccactggcgggaacgtcacgcgcaggtgacggccttagatctctcgccgccaatgcttgttcaggcacgccagaaggatgccgcagaccattatctggcgggagatatcgaatccctgccgttagcgactgcgacgttcgatcttgcatggagcaatctcgcagtgcagtgtaaatgggttggcattcaatttccaaagggggatcctctagaatcgactacggcattcactactaatgttattggtgtggtaaacgatgagactgtagatggcaaccaaaaagtggatgaacgaggtacaacaaataacactcatattatcaaccatggccagcagaatgttcatggcggggtatctaatggaagtcttattgaatctggtggatatcaagatataggaagtcataacaattttgtggggcaggctaataatacaaccattaacggtggcagacagtcaattcatgacgggggtatttccacaggtacgacaatcgagagtggcaatcaggacgtttataaagggggtatcagcaatggaacgacaattaagggcggtgcttcacgcgtagagggagggagtgcgaatggaatactcattgatggtggtagccagatagtaaaagttcaagggcatgctgatggtacaacgataaataagtctggctctcaggacgtagtacaaggaagtctggcaacgaacacaaccataaatggtggtcgacagtatgttgaacagagcacagtagaaacaacaaccattaaaaatggcggtgagcaaagagtatatgagagccgtgcgctggacacgacgattgaaggcggaactcagtctctgaatagtaagtcaacggcaaaaaatacgcatatctattctggtggcacgcaaattgttgataacaccagcacctcggatgttattgaagtttattctggtggcgtgcttgatgttaagggtgacataaacgcatatggttcggcaaacaagacgattattaaagataaaggaacaatgtcagttttaaccaatgctaaagctgatgcgacccgaatagataatggcggggttatggatgttgcaggaaacgcgacaaataccataattaatggtggcacacagaatattaataattatggcatagccacaggcaccaatatcaacagcggaacgcaaaatatcaaaagcggcgggaaagctgacacaacaattatatcctccgggagccggcaggttgttgagaaagatggtacggcaattggcagcaatattagcgccggaaaatcgctgattgtctataccggccccattgcacatggggttaaccaggagacgggcagtgctttagttgccaacacgggtgcagggactgatatcgaaggatacaacaagctctctcacttcactattaccggaggggaggctaattatgttgtgctggaaaataccggcgaactgacggtagtggctaaaacctcggcgaaaaatactaccattgatactgagtgcctcagaggatccctaacctccgccatttaa

SEQ ID NO: 144148 - DNA, 1098 bp, Homo sapiens
atggcctgctgtggaatgtcctggccgtggttggagtcctgcaaggcagattgtgctttggctcaaccaaaagcaccatttcactccagcagccctcctcagggtgaagaccagtttttagtggtaccgacatcgaatggtatcaactcatataacgcacggctgtttatcgtgaattcactctataccgctgaaggtgtaatggataaacactcgctgtggcagcgttatgtcccgctggtgcgtcacgaagcattgcgcctgcaggttcgactgcccgcgagcgtggaacttgacgatctgctacaggcgggcggcattgggttacttaatgccgtcgaacgctatgacgccctacaaggaacggcatttacaacttacgcagtgcagcgtatccgtggcgctatgctggatgaacttcgcagccgtgactgggtgccgcgcagcgtgcgacgcaacgcgcgtgaagtggcacaggcaatagggcaactggagcaggaacttggccgcaacgccacggaaactgaggtagcggaacgtttagggatcgatattgccgattatcgccaaatgttgctcgacaccaataacagccagctcttctcctacgatgagtggcgcgaagagcacggcgatagcatcgaactggttactgatgatcatcagcgagaaaacccgctacaacaactactggacagtaatctgcgccagcgggtgatggaagccatcgaaacgttgccggagcgcgataaacttgtattagagttgaacactgatcgcgatgagcgaagccgccagatacatggtgaacacctccagcgtacgcgaggtaatcaactgcgcctgacggaacagctccggcacctggattgtcgcggccagcgacgtatcttttaccaggctaataaagctgttcgacagcggcggcaacgccacacgcgccgcctgtggcaaaatcgcgcgacgcatggtctgccacggcgtcataccaatactggctggcgcttcccactgacctttatcaatagaagaaatggcggcgcgcagcgtttcggcagcataggcggcagtgttcaacgacagaccaatcattgctga

SEQ ID NO: 144149 - DNA, 2238 bp, Homo sapiens
ctacattagggtgttgtgtgttgcgtgtatgatggggatattctggtcaaagtgtagcagagagaagtggttggaatgatgacgctcccccatgtggaccccgatttgatccgttccgttccggttttcactggcgtcttcagcagcattcgccacccggtgagcgctctgttccgccaacaggcttcgacctgttccccccatggcagaattcacataactactgtcgccgagcgcaatcacgccataacgcagattcggctggaagcccagactatctttgattccctgaaagagtggcacaatgctatcaggaagttcgccctgcccggtcgtggacgtaaccaccagaacatacttatcctgatagggcagccagtcgcttaattcaggatcttcaaataccgttgctttgtggccctgcgcggtcagaatcgcttccgcttcttcggccactaacagtgaattcccgtacatggtgccgacaaaaataccaatttccgccataccgttttctccctggattaggaacttatctctccatccgcgccagccaaattgtgataacgcctgcatccaggtgtcgtccaggcccgcgtgaatagtcagcggctcgccagtaaaaggatgcgtcaatgacaactgactggcatgtagcattaaccgctggaggccaaaatgctcagcaccgctgcgattctggcgtaaatcgccatgtttgctatcgccaataatcggatgacgcaaatgggcaagatgtcggcgaagctgatgtttgcgtccggttttcggctccagttccaccaggccgtagcgcgtggtcgggtaacgtccggtcgctaccggcatttcgacgctcgccagttgcaaggtgtcgatgcgttgctcttgcaggtatttacttgcgccaagtgccagcgtgtcggttgcgcacagtaaggcggtagtttcaggcgtaatcacttttgcaacgttctcatagccttgcttcatagcaagcccggttgtcacgtcactgtgcggcacgccgagataactgatattacgatgcccctggtcatacagccgttgcatcaggattttgattgccccttcgtcgtcataacagaccgaagcaaagccttttgcgtcacgcgccagcagaaccagcgatgactgccagtgggctaacatttcttctgttatgccagtaaaaccgaacagcactacgccgtcgatattacgccgtttcagcactcccaaatgttcggcaactaattgcggggaaaactgactttccatcatgattgggtcgtaaccttgttcatagaacgctggcagcatggtttgaacggcgagattttctgacaacgaatccagacgggtaacaatgatggcgaccactttatcgcataggttccagcgctggttacccaccatactgcggcgcacccagcatctcctgacggatagcgcttcctgagtttgcgccagtaaacgatccgccagccctggctccagtcctcccccgccctgcagcgcctgtagtaacaaacgttccagcggtgtatcgaggccaataacatggacttcatctttgccaggaaaccactgctgggtaatcgcccgtcccaacgccacgcgcacgacggcggttaattcatgtggatcgctttggatgggcgcatgttccgccagcgtttcgagaatggtgcgcatatcgcgaatcggtactttttcatcgaggagattttgcagcactttatgcagtgtggtgagcgtgacgacgccaggaacgagatcttccgtcagctttggcatctcctgggcgacgcgatccaacagctgttgcgcctcctgacgaccaaacagctctgcggcatgctggctaatgaggtggttaagatgcgttgctaccaccgtgctggcctcaaccactgtgtacccctgaatctgcgcctgttcttttagcgcactttcaatccagatagcattcaggccaaatgccggatcgacggtcgcctcaccaggtaacgtcccggcagcggttccagggttaatcgccagccagcgccccggataagcatcaccactgccaatctccacgcctttcatcaaaatgcgatagcgggcaggttgcagatccatattgtcgcgaatgtgcaccactggcggcagaaatcccatctcctgggcaaatttcttgcggatactgcgtatacggcccaacaactcaccatcctgctggaaatcgaccat

SEQ ID NO: 144150 - DNA, 2044 bp, Homo sapiens
atggagctactagctcatagtattgtcatagcaacatggcgattacgccagaatcgcagcggtgctgagcattttggcctccagcggttaatgctacatgccagtcagttgtcattgacgcatccttttactggcgagccgctgactattcacgcgggcctggacgacacctggatgcaggcgttatcacaatttggctggcgcggtctgcttcctgaaaatgaaagggttgagttcagtgcgccatcgggtcaggatggagatccaaccttaggtctcatcaaggaagtggcatgtgagctgagtgggatgatgagaaggagccagccatgggaagaggccgaggaaagcattccagacagaggggagagcctgctggaagtgtctgggacaccgaacgcaggctggggtgctgagggccttgcagaacgggaagcgctgctcttatgctgctgttgcgggcccatggggccagaccccctcgggctgggctcccccgggtctgtccggggccgtagccgtttgattcaccacgctattagcggcgaggcgttatggcgaagtcgatccagtcgaaggctctctgagtatggaccggctgcccgccagtttgccattgaaaaaggtgcccccgcccttcgcgctatgacctttatcgaacgtgcggcgatgcttaaagcggtcgctaaacatctgctgagtgaaaaagagcgtttctatgctctttctgcgcaaacaggcgcaacgcgggcagacagttgggttgatattgaaggtggcattgggacgttatttacttacgccagcctcggtagccgggagctgcctgacgatacgctgtggccggaagatgaattgatccccttatcgaaagaaggtggatttgccgcgcgccatttactgacctcaaagtcaggcgtggcagtgcatattaacgcctttaacttcccctgcttggggaatgctggaaaagctggcaccaacgtggtctgggcggaatgccagccatcatcaaaccagctaccgcgacggcccactgactcaggcgatggaatttgaagataaggcgcaacagcgagatgtggaaacggcgaggcacttcacattttttcggattattgcaaatgaggataaaaaaaccgggtttccccggtttcagacaatagtgattacggcttcgcacaaaaccatcgatcgtacacgttatacgtacggagcgtggcgctgttatcggccacttctcactgttgaggagtatcgtgcgacgggaagtctgatcacccaaccgaagttccctcctcataaatcttctgaagttcatcgagtgccgcggaatcagggacgctttgtggcggtcaattccacgttgccgactgaacccgcaacggttgcgcctgttcgcaatggcaatgcatcgcgtgacacggcgaaaacgcaaaccgctgaacgtccgtccactacgcgcccagctcgtcagcaggcggtgattgaaccgaaaaaaccgcaagcaaccgtgaaaacggagccgaagccggtagcacagacgccgaagcgtactgaaccagctgcccctgtggcgagcacgaaggcaccggctgcgacttctacgccagcaccaaaagagacggcgactacggctccagtacagacggcatccccggcgcaaaccacagcaacacccgctgctggggcgaagaccgcaggtaatgttggttcgttgaaatcggcaccgtccagccattacactctgcagctgagcagttcctctaactacgacaacctgaacggttgggcgaagaaagagaatctgaaaaactacgttgtctatgaaacgacgcgtaatggtcagccgtggtatgtcctggtttctggcgtgtacgcttcgaaagaagaggcgaaaaaagcggtatctacattgccagcagatgtccaggccaaaaacccgtgggcgaaaccgctgcgtcagcggcaccgggatcttcggggcgatgaacgaagggatgaccggcgatccgagtattttaatcgccaagtcatttcttga

SEQ ID NO: 144151 - DNA, 761 bp, Homo sapiens
agcacaatccatcgcccgcagccagtatagcggattggtttcggttgatttaccttgcagcgcccagatgtcgctacattcagtagaaagatagtcagccagttgataaaccggaattttttcttctgctggcgtatcaatggctggcttattgtgattctgcacgcaacccagcaatgccagacatggcagccctgccagccacagccgttggtgcaataatcgatgaaaaatgtgtcgcatattcaccagacttaaagcctatcccagtgggcgtaattgttgcagacagtctggacatggacagcgcggagaaaccggagcgtacatatcgaatttatatcgcagccgtggtgatgactaccggcaactctggcacagatggaataatcgatcgccatgaagaatcgcgcaacgccctaaagatattagggtgccagcaaactattcatcttaattttgctgacacccgcgctcatttacagctcaatgatatgatttccgccctggaagacatcattaaaaatcaaattccttctgatgttgaaatcatgcgggtatataccatgcatgatgccgaccgccatcaggatcatcttgctgtttatcaagcttcaatggttgcctgccgaactattccgcaaattctcggctacgaaaccccaagtacctggctttcatttatgcctcaggtttttgaatccgttaaagaagaatatttcacagtcaaacttgctgcattaaaaaaacataaaagctag

SEQ ID NO: 144152 - DNA, 2796 bp, Homo sapiens
atggaagcattacttcagcttaaaggcatcgataaagccttcccgggcgtaaaagccctctcgggcgcagcgttaaatgtctatccgggccgcgtgatggcgctggtgggcgaaaacggcgcgggtaaatccaccatgatgaaagtgcttactggcatctatactcgcgatgccggtacgcttttatggctggggaaagaaacgacatttaccgggccaaaatcttcccaggaagccgggattgggattatccatcaggaactgaacctgatcccgcagttgaccattgccgaaaacattttcctcggtcgtgagtttgttaatcgctttggcaaaattgactggaaaaccatgtatgccgaagcggataaattgctggctaaacttaacctgcgctttaaaagcgacgccaaagtttcgttcggcaattcgttcgcccgttgcgtggcaggaggctgcatgaatattcgccgtaaaaaccgcttgtggattgcctgtgccgtgttggcagggctggcgctgactatcggtctggtgctatatgcgctgcgctcgaatatcgatctcttttatacgccgggggaaattctctacggcaagcgtgaaactcagcaaatgccggaagtcggtcagcgtctgcgcgttggcgggatggtgatgccgggtagtgtgcagcgcgatcccaattcgctgaaagtgaccttcaccatttacgatgctgaaggctcagtggatgtctcttacgaaggcattttgccggatctgttccgtgaagggcagggcgttgtggtgcagggcgaactggaaaaaggcaatcatatcctcgcgaaagaagtgctggcgaaacacgatgaaaactatacgccgccagaagttgagaaagcgatggaagctaacctggagcgcaactcaaggagggcacaggggcgagagggccgttgcgaaaccggcagccgctaccaccgcttcacaaccggaaattgcctccgcgcgatgattgttgatctgaataccaacaaagtgatctattcgaaccacccggatctggtgcgtccgattgcgtctatcagcaaattaatgaccgcgatggttgtgctggatgcacgactgccgctggatgaaaaactaaaagtggatatcagccagacgccggagatgaaaggggtctattcgcgcgtacgactgaatagcgaaatcagccgtaaagatatgctgttgctggcgctgatgtcttcagaaaaccgcgcggcggcaagccttgcgcaccattatccctttagagcacatggaaacaaaaaagcacagcctgtagctccgataaagcactgtttcggcaagggggtcatcccgacttaccaacccgatgcaaactgcgaataccggagaatgttatcacgggagacacacggcggcgtctggtgttcggtctggggttctgtctttaccctgaacgccggcttcccgtggggcgtgtggatcgcgtttgacttgctgattggcaccggcttttgcctgtgccggctgggcgctggcgtggcggtatacgtctttaaccgtgggcaataccatccgctggtgcgtccggcgctgttggcgagtctgtttggttactcactgggtggcttgtcgatcactatcgacgtgggtcgctactggaacctgccgtacttctacattccgggtcacttcaacgtgaactcggtactgttcgagacggcggtctgtatgaccatctatatcggcgtgatggcactggagtttgctccggcactgtttgaacgtctggggtggaaggtgtcgctacagcgactaaacaaggtgatgttcttcatcatcgcgctcggtgcgctgctgccgaccatgcaccagtcttcaatggggtcgctgatgatctcggcgggctacaaggtgcatccgttgtggcagagctatgaaatgttgccgctgttctcgctgctgacggcgttcatcatgggcttctcgattgtcatctttgaaggttcgctggtgcaggcgggtctgcgtggcaacggtccggatgaaaagagtctgtttgttaagctgaccaacaccatcagtattgccaaaagtttgatcgcccggcgcttaaaattcgcctttcagaatgcccgcgcgtttgaatatctgatgacccgcttctccacgccggaagaagtttttggtcccctttctattcaggcgctaaaagatgaagggcgctatgaacgtttaaccagcggttacctgccggaagcagaaattgtctttctggatgagatctggaaagcgggcccggcaattcttaataccttgctcaccgccattaacgagcgccagttccgcaacggtgcacacgtagaaaaaatcccgatgcgtctgctggtggcggcctccaacgagctgccggaagcagacagcagtctggaagcgttatatgaccgcatgctgattcgtctgtggttagataaagtctttagagcacactttggcggctggcaaaatatgtatcggcattattcccaatcactgaaatgtgaaatgaatgtcggcgtctatctcccaccaaaagccgcgaatgaaaaattgccggtgctgtactggctttcaggcctgacctgcaacgagcagaatttcattactaaatcggggatgcagcgttacgcggctgagcacaacattattgttgttgcgccggacaccagtccgcgaggcagtcatgtcgcagatgctgaccgttacgatctcgggcaaggtgccgggttttacctgaacgcctttagagcacagtacgggtga

SEQ ID NO: 144153 - DNA, 556 bp, Homo sapiens
gggcataaagtcgcattgctggacattccggctaatggtgaaattattcgttatggcgaagtgattggttacgccgtgcgtgcaatcccacgcggaagctggatcgacgaatcaatggttgtactaccggaagcgccgccgttacacacgctgccactggcaaccaaagtcccggaacccttaccgccgctggaaggatacacctttgagggctatcgcaatgccgatggcagcgtgggcaccaaaaacctgctcggtatcaccaccagcgtccactgtgtggcaggcgtggtggactatgtagtaaaaatcattgaacgcgatctgctaccgaaatacccgaacgtcgatggcgtgctattgaccagcataggtacgttggccgaagcattccgcggggcttatgacaatatctcccgtgcttcacgtaatatcgccgcgacactggcgattggaatgcgcaacgcgggtcgggcgtttgggctgatcgtcaagtactcaagggttttgttgaccttttcctctgtgacgatggagtacctacgtccagggacag

SEQ ID NO: 144154 - DNA, 2787 bp, Homo sapiens
atgattctttccaataacgtgtttgctgatgaaggtcacggtattgttaaatttaaaggtgaagttatctctgctccatgttctattaaaccaggtgacgaagatttaactgtaaatctgggtgaagtagcagataccgtactgaaaagcgatcagaaatctttggctgaacctttcactattcacctgcaggactgcatgctgagtcagggtggaactacttattcaaaagcgaaggttactttcactacagcaaataccatgacgggtcagtctgatcttctgaaaaataccaaagaaactgaaatcggcggcgccactggcgttggcgtacgtattctggacagccagagcggcgaagtaactttaggtactccggtagtaattacgttcaacaataccaacagctatcaggaactgaatttcaaagctccggacaagcacctcacagcccgtcagtacgccagtctgcgcgcagaaaaccggttggatccacggtttgaattcgtggttttccaacgccagactgatggcttcaggcgtgacgatatggtgatagtgattatcattaatatatctgtgactattactccccgtggcggatatgatctccggattgtactgaaagaaaatatcgcgccagaaagcctgtccaaaacgcaaacggggcgcggcatgccaacagcgcaacattgccggcgttatcttgattttgcgccaccgccatcggatatggctgaaatgttcacggcaaagttgccagaccacaacgcatataccacagtggctgacatgataaagccggaggaaacttgcctccggcattactatttacttgcctgtgaccgctgctgccgttcctggcaccatcagctctgtagcaacgataacaatcaccaaaccaacaagcaccggtaccgaggtgcgttttacgacttcaaacggcgagatcttcgccatcccggcaaccgcaacgactacgccagaaacgggcgaaagggtacggccaagcattgtcagaatcaccaataccagcatcaggatgatactcgccgaaccaaacgaggtagcgatagaaatcagactttgaataaagccgatggtgctaagcccctgagcgaataccccagcggcaaccagcagcatcaccacgttagctatgaagtcgttatgaagacatctgataatgaacgtataaaatatgaaattactggccaggcggtgctccagatactgcgcatgaagataaatttttcattgcagactcttattaagcaattactcgtaatgaaatcggctgaggaagatgctttccgacgcgatttaattgacagcataattcgtgattttagcaatagtgattcaggagggccaaaccgaagaacagcgacagctgacaataaaagtatgcttcaatgtcctgcggtaactctggtcaaatatgctggttaccggttcgacgtaaaacctaaagcgaaggccaaaccgaaaacagcgggcatcaaacgtccagtcgttaagatggaaaaaacggcggaaaaaggcggtcgcccggcgtccaacgatgaatatgtcagcgtctcggcgttttcgcccattgtctccccatcgcaagtgccgtggggacagcaagcctttgctgcatatcttgctgaaaataaagatgcctggttggattacgacccggcttctccaggcccttttcgaagctccgggagtgttttggcctttggtcctctcaacggactggtaccccccggccccatggaggaaaacggggaacacagccggcaaatttcgaagaccagtaattgcatagatcacctggtggaggtacggttggttttgggcccctctctcagcacttgctaccagagaggacagctctacaccagagagggaaaaacccccaaaacccgggggccaaaatggggccatgaaacgcggtatgaatacaacatcgccggtgacctgaccgccgtcattgccccggacggcagcagaaacgggacacagtacgatgcgtggggaaaggccgtccgtaccacgcagggcgggctgacgcgcagtatggaatacgatgctgccggacgggtcatccgcctgaccagtgaaaacggcagccacaccaccttccgttacgatgtacttgaccggctgatacaggaaaccggctttgacggaaataatcattatcgcggtaacgaacacttcgatacccagtggaatccgctgccggattacaacaaagataacccggcgcatcgcttccgcgcgttcggaggtacaccaggccactggatcgaatggggccgtttaatgctgcacatccatgctgcactggaagcccgttgcgaacaaccaccagcatggctgctagaagatgccaaaggtctgtttaacgccaccgtgcgcgatgcctgggcacccgatggcgcggacgggattgtttataccgttgactgggaaggaaaaccggtggtccgcgaacgtgtacgttggcctatcgtcgaagcaatgggtacggcctacgcgctctacaccgtcactggcgatcgccagtatgaaacctggtatcaaacatggtgggagtactgcattaagtacctgatggactatgaaaatggttcctggtggcaggagctggatgcggacaataaggtcaccaccaaagtctgggacggcaaacaggatatttatcacctgctgccattgcctggtgatcccgcgtatcccgttagcgcccggcatggctccagcggttgcagcgggtctgctggatattaa

SEQ ID NO: 144155 - DNA, 1976 bp, Homo sapiens
atgcaggatcgcaattttgatgatattgcggaaaagttttcccgtaacatttacggcaccaccaaagggcagcttcgacaggctattctgtggcaggatctcgatcgcgtgctggcggaaatgggcccgcaaaaactgcgtgtgctggatgctggcggtggaaaaagggcagaccgcaatcaaaatggccgagcgtgggcatcaggtcattttatgcgatctttctgcgcagatgatcgaccgcgcaaaacaggcggcagaagcaaaagctggcgcgaaggcaataagatccagttgctggaaaacggcgagcaatattatcccgcggtgtttaaggcgattggcgaggcacaagaacgcatcattcttgaaacgtttatctggtttgaggatgacgtcggcaaacaactgcatgcggcactactggcaagcaagccaaacgcgggggttaaaagcggaaagtcttgctggatggctacggttcgccggatctcagcgatgagtttgtcaatgaactgacggcagctggcgtagtgttccgctactacgatccccgccctcgcctttttggtatgcgcaccaatgtgtttcgccggatgcatcgcaaaattgtggtgatcgacgcgcgtatagcctttattggcgggctgaattacttccgccgaggcatatgttccagcttacgttccagaaggctaaaacaggggtttacccggtaccgctttgaagggcccgatttgtccaaggatattccctccggttttgaagcctggaaaaacctgccctggaccagaagcgccggaaacaacgctggttggccaaccttcaatccacaaaagcggaaagagaaacccgccaaccccgggagaaaaccgccgggtatttgctgggtctgggcggccgataaaccagggaaccatccaccgatggatagggcgcagattgcatgcctgcaggtctcgcatgatctgtatcggcattattcgcactcactgaaatatgaaatgaatgtcggcgtctatctcccaccaaaagccgcgaatgaaaaattgccggtgctgtactggctttcaggcctgacctgcaacgagcagaatttcattactaaatcggggatgcagcgttacgcggctgagcacaacattattgttgttgcgccggacaccagtccgcgaggcagtcatgtcgcagatgctgaccgttacgatctcgggcaaggtgccgggttttacctgaacgcgacgcaagcgccgtggaatgaacattacaaaatgtatgactatatccgcaacgagctgccggatttagtgatgcatcattttccggcaacggccaaaaagtctatctctggtcattctatgggcgggctgggcgcgctggtgctggcgttacgtaacccagatgaatatgtcagcgtctcggcgttttcgcccattgtctccccatcgcaagtgccgtggggacagcaagcctttgctgcatatcttgctgaaaataaagatgcctggttggattacggcccggtcattaaaaaagcgctgcatgttgatgtgaaagatgtccccggtgcaggagctgcgggtggtatgggcgcggcgctaatggcgtttcttggtgcggaactgaaaagtggtattgaaatcgtcactacggcgctgaatctggaggaacatattcacgattgtacgctggtgatcaccggtgaagggcgtattgacagccagagtattcacgggaaggtaccgattggtgtcgcaaacgtggcgaagaagtaccataaaccggtgattggcattgcgggtagcctgaccgatgatgttggcgttgtacatcagcatggcattgatgcggtcttcagcgtattgaccagcataggtacgttggacgaagcattccgcggggcttatgacaatatctgccgtgcttcacgtaatatcgccgcgacactggcgattggaatgcgcaacgcggggtga

SEQ ID NO: 144156 - DNA, 470 bp, Homo sapiens
gcggtgcagagcatattcgccgctttattcaggcggggatgagcgagcgcgagatagccgctgaactggagtggtttatgcgccagcagggcgcagaaaaagcctcttttgacaccattgtcgccagtggctggcgtggggcgctgccgcacggcaaagccagcgacaagattgttgcagcgggcgagtttgtcactctcgatttcggtgcgctgtatcagggctactgctctgatatgacgcgcaccttgctggtgaatggcgaaggggtgagcgccgaatctcacctgctgtttaacgtctatcaaattgtcctgcaggcacagctcgcaacaatctccgcgattcgccccggcgtgcgctgccagcaggttgacgatgccgcgcgccgggtcattacagaagcaggttatggcgactatttcggacataacaccggtcacgctatcggcattgaaggccatgaagac

SEQ ID NO: 144157 - DNA, 2544 bp, Homo sapiens; identical to SEQ ID NO: 138916

SEQ ID NO: 144158 - DNA, 476 bp, Homo sapiens
ctggaggctggagggccaagaggcgggaagcttcccgtacgggggccgctgtcacctgcctgtgggagaacccatccagacatgaagagcgccaaaggtattgagaacttggcttttgtcccctccagcccagacatcctgcgccgcttgtctgcgtcgccctcccaaatcgaagtctctgccttgtcctctgacccccaaagagagaattctcagccacaggagcttcagaagccccaggagccccagaagtcaccagagccatctctgccttcagcccctcccaatgtctccgaagagaagctccggtcactgtcgctgtccgagtttgaggaggggtcttacggctggaggaacttccatcctcaatgtctccagcgctgcaacacacctggaggctttctgcttcactactggcctcttggccgtcacgcaaggtattgtagttaatggcctagtaaatattagcattttcc

SEQ ID NO: 144159 - DNA, 1510 bp, Homo sapiens
ggctcaaccgccgctgtctggctgggcgcagtgcaatggttcccggagtccgctatctgggcatggcgctggtcactaacctgggcgtctatatggcggggatcgcgctgggggcagtcataactgcgctgatggtggtgttcctgcgtctgatgatgttccgtaaaggcaaattgttaatcgatagcctgtaagaaggaaaatccagatgacattactcgcttcgctgcgcagctggcttaaggcgcaacaactggatgcagtgcttctctcctcacggcagaacaaacagccgcatctggggatctccaccggatcaggttatgtggtgattagccgtgaaagtgcgcacattctggtggattcgcgctattacgttgaggtggaagcccgtgcgcaaggctaccagctgcatttgcttgacgcgacgaacacgcttaccactatcgtcaatcaaatcattgccgatgaacagttgcaaacgctcggttttgagggccagcaggtgagttgggaaaccgcgcaccgctggcagtctgaactcaatgcgaaactggttagcgccacgccggatgtgctgcggcaaatcaaaacgccagaggaggtggagaaaatccgcctcgcctgtgggattgctgatcgcggtgcagagcatattagccgctttattcaggcggggatgagcgagcgcgagatagcccctgaactggagtggtttatgcgccagcagggcgcagaaaaagcatcttttgacaccattgtggggatcctcagagagcttcagaagccccaggagccccagaagtcaccagagccatctctgccttcagcccctcccaatgtctccgaagagaagctccggtcactgtcgctgtccgagtttgaggaggggtcttacggctggaggaacttccatcctcaatgtctccagcgctgcaacacacctggaggctttctgcttcactactgcctcttggccgtcacgcaaggtaaagtccagcgccctcttgaggctcgggccagtggagagcgaggcagagcagtcatcagcatatggggctctcctccgaatcagttgtatgtggtgattaacagtgttagtgtgctcgctatggtgcgtttgcgctattatgttatggtggaagcccgtgtgctagccttccagctgcatttgcctgttcatttgagcaaggtatccactatcgcctatcgaatcatagccgatcatcagttgcatccgttcggtttcatgggccagcagtttagttgtggcaccgtgcacagctgtcagtctttatccatcgctagcatggttcgttcccctcaggatgatctgcggcgcttgttcacgccagagtatgttgtagaatactcctgcctctgcactgtggtgatttgctcgatcgtcgagtgcagatgcatattccccgcttccttcagatgcggatcagccagccccagatcacatctattgcgtagtggcatatgcccctgcagcgcgcgggtatag

SEQ ID NO: 144160 - DNA, 876 bp, Homo sapiens
gtacgtttcatcgcgtttcttggcgtgtcgatgcctaacttctggctggcgtttttactggtgatggcgttttcggtgtatctgcaatggctacccgcgatgggttacggcggctggcagcacatcattttgcctgcggtttccattgcctttatgtcgctggcgattaacgcgcgtttactgcgcgccagtatgctggacgtcgccggtcagcgtcacgtcacctgggcgcgtctgcgcggcctgaacgacaaacagaccgaacgtcgccacatcctgcgcaatgcctcgctgccgatgatcaccgccgtggggatgcatatcggcgaactgattggcgggacgatgattatcgaaaacatctttgcctggccgggcgtcgggcgctatgcggtgtcggcgatttttaaccgtgactatccggtgatccagtgctttacgctgatgatggtggtggtttttgtggtctgtaatttgattgtcgatttgctcaacgccgcgctggacccgcgcattcgtcgtcatgaaggagcgcacgcccagtggtggctgccgtatgacccacaggcgattgatttgccgtcgcgcctgctttcgccggatgcgcagcactggctgggcaccgatcacttaggtcgcgatattttctcgcggctgatggcagcgacccgcgtgtcgctcggttcggtaatggcctgcctgctgctggtgctgacattagggctggttattggcggcagcgccgggttgattggcgggcgcgttgatcaggccaccatgcgcgtcgccgatatgtttatgaccttcccgacctcgattctgtcgttctttatggtttggcgtggctcgggcacccggggcttgacccaaacgtaa

SEQ ID NO: 144161 - DNA, 3474 bp, Homo sapiens
ttacccgcctaaatacgcacttctcaccgcttcattcgccagcagcgcatcaccagtatcggaaagcactacatggccgttttccagcacgtagccgcgatccgccagctttagcgcctggttggcgttctgctcgacgagaaagatagtcatcccctgctcgcgcagctgctcgatggtgtcgaaaatttgctggatgataatcggcgcaagaccgagcgatggctcatcaagcagtagcaaacgcgggttgctcatcagcgcacgaccaatcgccagcatctgctgttcaccgccggacatggtgcccgcccgctgaatacggcgctcatgcagacgtggaaacagctcatacacccactttatgcgctcctggaactggtcgcgttcagcaaaaaaaccgcccatcgccaggttctcttccaccgtcatccgcgagaagacgcgacgcccttccgggacaatcgccaccgcttcgcgcatgattttcgctgtctgccatgatgaatccccatcgttgcgcgcgttattgcacatcgaggcgtagtgctggttgatttgcagacgcggaatgctgtcactgttgagttctaccgtccagtgaccgttatgcttacgcaccagcacatctggaatgacatactcaggttcgccagtctggatcgactgcccggggcgcggatcgagcgactggatcagattgacggcttctttcagcacatcttctttcagacgcgtgacgcgcattaaagtgcggaagtcgtgattggctaacagatcgagatgatcgctaatgatcagtctggcctcttccagccacggcgtggtcttatcgaattgggagagttggatcagcagacagtcacgcagatcttttgccgccacaccgaccggatcaaaccgttggatccgcttaaggacggcttcaacttcgtcgatgtcgatctcttcatcgcctatactttcgagaatatcttccagcgggacagtcagataaccggtttcatcaacggcatcgacgatagaggtagcaatagcgcggtcagtgtcggaaaacggtgtcagctcaacctgccacatcaggtaatcctgcaaggtctgcgtcgtttcgcccctgaactgggtagcgagtcggtgaacggtacagcttcccgcgaaactgagcgtttctatctcgatgtgcagaagcagttcccgaaagtgaccgcgcagaaagtaatcgtcagcgaagcaggcgcgtcggtttactcggcttccgagctggctgcacaggagttcccggatctcgacgtttcgctgcgtggcgcggtgtctatcgcccgccgtttgcaggatccgctggcggagctggtgaaaatcgatccgaaatctatcggcgtaggtcagtatcagcatgacgtcagccagacgcaactggcccgcaaactggacgcagtagtagaagactgcgtaaacgccgttggcgtcgatctcaacactgcttctgttccggcattcgggcagcaacacagcaggcactgaaagatctgatgggtaacagcagcgaactgcgtaacctgaaagcgtttgacttttactgatgagaaattccgtgtgccgaccgtaaccgacatcatcaaagagctggaaaaaccgggtcgcgatttgcttctgatcaaagaggttaccctgcgtgtaatccgcttcgagatagaatgtgtgctgtttgttatactgtgcactgactcccacgccgttattccagccattacctttgaaactgtacttctcccgggagttgttcaacagatattcggtatcccctgaaaactcgcggatagcgccagtcttcacatagacattcagctggctgttgcctgcggtgatgtcataccccagtatcatgctggcacgccccagcagcgattcgtagtgattccgatgtattggaaaagggtaaaataacggattaacccaagtataaatgagcgagaaacgttgatgtcgaattcttatgactcctccagtatcaaagtcctgaaagggctggatgcggtgcgtaagcgcccgggtatgtatatcggcgacacggatgacggcaccggtctgcaccacatggtattcgaggtggtagataacgctatcgacgaagcgctcgcgggtcactgtaaagaaattatcgtcaccattcacgccgataactctgtctctgtacaggatgacgggcgcggcattccgaccggtattcacccggaagagggcgtatcggcggcggaagtgatcatgaccgttctgcacgcaggcggtaaatttgacgataactcctataaagtgtccggcggtctgcacggcgttggtgtttcggtagtaaacgccctgtcgcaaaaactggagctggttatccagcgcgagggtaaaattcaccgtcagatctacgaacacggtgtaccgcaggccccgctggcggttaccggcgagactgaaaaaaccggcaccatggtgcgtttctggcccagcctcgaaaccttcaccaatgtgaccgagttcgaatatgaaattctggcgaaacgtctgcgtgagttgtcgtcgtttgctgtttccgggtgttccagtgattacgtcatggcgaccaaagatggccgtatgattttgaccgatggaaaacagaaaacgatatgactgacctttatgttcgctttgatctgctagcgtactcttcgcctgggtcgcatcgaacgaaattgctccgaaatcgccgaggttaaatcccagaccaaacatggcggcacggtaatattcagcatattgtccaccaccataccaggtcgttccccacggtccgacccactgcaacgtggcctgggcaaatttgctctcctgctgttcattactattggttctgtatttcgccagtgtcaccgcgtatttgattcgcccctgacgctggagtaatggcacactggagaacggtacgctgtagctattgacgctgccgtccgcttctttgatttcaactaacaaatcaccgctcgacgacgtggaatagagatcactaatttcaaaagcaccaggcgatacataagtttggtaaatggtgtaaccattttgcttaatcgttatctgggcattgcttttggcgataccacgcaccacaggcgcaaaccctttcaggctgtctggcagcatgttgtcatctgacgccagctgcacaccacgaaagctgacactatcgaaaaaatcgcctgcagtataatcatcacctacggtcagttcgcctttcagaggaataaccgcccgttgcaaatagctgctgagattcttccattctgcggtttggccactactacgactccatgttgaattgttgcgcaatctccatgggcctaaattaacgccactgtttaaattcagaaaatagctgtcgccagaatcactgtctgcgctgctatgaatactgttagccccgctaaacgaatatcccagtaatagcgcgtt

SEQ ID NO: 144162 - DNA, 1275 bp, Homo sapiens
atggaagaatctcagcagctatttgcaacgggcggttattcctctgaaaggcgaactgaccgcgattttttcgatagtgtcagctttcgtggtgtgcagctggcgtcagatgacaacatgctgccagacagcctgaaagggtttgcgcctgtggtgcgtggtatcgccaaaagcaatgcccagataacgattaagcaaaatggttacaccatttaccaaacttatgtatcgcctggtgcttttgaaattagtgatctctattccacgtcgtcgagcggtgatttgttagttgaaatcaaagaagcggacggcagcgtcaatagctacagcgtaccgttctccagtgtgccattactccagcgtcaggggcgaatcaaatacgcggtgacactggcgaaatacagaatcaatagtaatgaacagcaggagagcaaatttgccagggttgagtacgacgagacgggaaagtgctgcgcatccggcgaaagcaggcgcgacggcaaatcaatcgcctgtgggtcatacggcagccaccactggctgcgcggcctgaacgacaaacagaccgaacgtcgccacatcctgcgcaatgcctcgctgccgatgatcaccgccgtggggatgcatatcggcgaactgattggcgggacgatgattatcgaaaacatctttgcctggccgggcgtcgggcgctatgcggtgtcggcgatttttaaccgtgactatccggtgatccagtgctttacgctgatgatggtggtggtttttgtgcttctggacgggaacgcggatgatatcatgactaaccgtagctcgtaccccgtagctgcgacttctactgtaactggcggttacgcacagagcgacgctcagggccaaatgaacaaaatgggcggtttcaacctgaaataccgctatgaagaagacaacagcccgctgggtgtgatcggttctttcacttacaccgagaaaagccgtactgcaagctctggtgactacaacaaaaaccagtactacggcatcactgctggtccggcttaccgcattaacgactgggcaagcatctacggtgtagtgggtgtgggttatggtaaattccagaccactgaatacccgacctacaaacacgacaccagcgactacggtttctcctacggtgcgggtctgcagttcaacccgatggaaaacgttgctctggacttctcttacgagcagagccgtattcgtagcgttgacgtaggcacctggattgccggtgttggttaccgcttctaa

SEQ ID NO: 144163 - DNA, 617 bp, Homo sapiens
tttgccggctggatggccgttccgggcggctggaagtgatgttgtttcctgacgccctggattaataccagcaattgctggaaaaagcccgcatacttatcgtcagcggacaggtcagctttgatgacttcagcggtgggcttaaaatgaccgctcgcgaagtgatggatattgacgaagcccgggaaaaatatgctcgcgggcttgctatctcgctgacggacaggcaaattgatgaccagcttttaaaccgactccgtcagtctctggaaccccaccgctctgggacaattccagtacatctctactatcagagggcggatgcacgcgcgcggttgcgttttggcgcgacgtggcgtgtctctccgagcgatcgtttattaaacgatctccgtggcctcattggttcggagcaggtggaactggagtttgactaatacaggaatactatgagtctgaatttccttgattttgaacagccgattgcagagctggaagcgaaaatcgattctctgactgcggttagccgtcaggatgagaaactggatattaacatcgatgaagaagtgcatcgtctgcgtgaaaaaagcgtagaactgacacgtaaaatcttcgcc

SEQ ID NO: 144164 - DNA, 392 bp, Homo sapiens
tcgacgttggcatagatggaaccgcgcaggacgttctctcttgtgcctggcttctgtggctcgacattgcgtctctgctggtcaccacaccgatgtgcagaccagcggttcccccttctcactgctgaacccgtcccctgcctgaacacctgcagctctgtttcccggcgatggaggctcgctgtcaccagcttgctgccgggccgttcccatgggagtctttgtgtgccatctgttttcatttgggcatttgggtgaagactgagaagcggcacttcaaacagcacgccgccaatacctaatcctatgccgcgaaatttgacgttgccgataaacaaaccgacgactgccaccaaagccagaatactgaccgttaatgctatatcactcat

SEQ ID NO: 144165 - DNA, 1548 bp, Homo sapiens
atgatgcctcttcatgtatttgagcctccgtcggtgctactggcggcgggcgacaagccgattatcttccgcacgatggacatcggcggcgataaaagcattccttatctgaatattccccaggaagagaacccgttcctcggctatcgcgcggtacgtatttacccggaatttgctggcctgttccgcactcaactgcgggccattttgcgcgccgccagtttcggcaacgcccagttgatgatcccgatggttcacagcctcgatcagatcttatgggtgaaaggcgagatccaaaaagcgatcgttgagcttaagcgcgatggcctgcgtcatgcagagacgattacgcttgggatcatggtggaagttccgtcggtgtgctacatcatcgaccacttctgcgatgaggtcgatttcttcagtatcggctccaacgatatgacccagtatctgtatgcggtcgatcgtaataacccgcgcgtatcgccgctatataacccgattacgccatcgttcctgcgcatgttgcagcaaatagttaccactgcgcatcagcggggcaaatggggatatgatgtcaaagcgagttgtcaggccagcaggcaaagcctttcaggcattacgcaggactggagtatcgctgatgggcaatggctggttttttcggatatgaccaataacgccagcggtggggccgtatttttgcaacaaggagcggaattttcactattaccagaaaatgaaactggaatgactctgtttgccaataacattgttggagtccattggagaggacacgtgatcaacaaaacacgtttcgtcgctgaagaaacgcgcaacgccgtgtgggcagcgattaaagaattacactactcccctagcgcggtggcgcgtagcctgaaggttaaccacaccaagtctatcggtttgctggcgaccagcagcgaagcggcctattttgccgagatcattgaagcagttgaaaaaaattgcttccagaaaggttacaccctgattctgggcaatgcgtggaacaatcttgagaaacagcgggcttatctgtcgatgatggcgcaaaaacgcgtcgatggtctgctggtgatgtgttctgagtacccagagccgttgctggcgatgctggaagagtatcgccatatcccaatggtggtcatggactggggtgaagcaaaagctgacttcaccgatgcggtcattgataacgcgttcgaaggcggctacatggccgggcgttatctgattgaacgcggtcatcgcgaaatcggcgtcatccccggcccgctggaacgtaacaccggcgcagggccgccttgccggttttatgaaggcgatggaagaagcgatgatcaagttgatggggacatccagtttttcttttccacgaacaccatcacgggtcgcggtcatttccgtaccatggtcgatggcatctgtccatgtaaagacggaaatctgcgttttaacaggattctcgagcatcgggaaccattctacccccagatcccagctaccttcgcgtacgcctga

SEQ ID NO: 144166 - DNA, 524 bp, Homo sapiens
gggccatcgtcaagtttaagcgtaacgtgcaccaggacggcggctattgctctgtacagattcaacaatgcaggtttgctcttatatttaaggatttttgccggatgcggcataacggccttatccggcgtacgatttcgcagcaatctgtaggccggataagatgcgtcagcatcgcatccggcagggtttattattgttttttcgctctagaaggcaaaaaaccttccagctcaatcagtgccgcaccgacacagatggcagtatcggcaaggttgaaggtggcgaagtgccagtcgccgacgtagaagtcgatcatatcgacaactaagccgtgccacaggcggtcgaacaggttgcccagcgcgcccccaataatcagcgcgactcgagtgcacagacaaatgcgatacagcaccagcagcggggccgccgctttactatccatcacggttacgccgtcgtgatcaataaaaacgtggtagcgggggatgattttaccattcgccacgtgaactgtgaag

SEQ ID NO: 144167 - DNA, 1562 bp, Homo sapiens
atgtcgtcaaccctacgagaagccagtaaggacacgttgcaggccaaagataaaacttaccactactacagcctgccgcttgctgctaaatcactgggcgatatcacccgtctacccaagtcactcaaagttttgctcgaaaacctgctgcgctggcaggatggtaactcggttaccgaagaggatatccacgcgctggcaggatggctgaaaaatgcccatgctgaccgtgaaattgcctaccgcccggcaagggtgctgatgcaggactttaccggcgtacctgccgttgttgatctggcggcaatgcgcgaagcggttaaacgcctcggcggcgatactgcaaaggttaacccgctctcaccggtcgacctggtcattgaccactcggtgactttcgatcgtttggccgatgatgtgcatttgaagaacgggcccttcagcatatcatttatggcgccattccctgaacaccgggtgcaaggtgcgttgcagcgcgtcgttttgcgcaagaacataaagacattttggaccataaggcataactgcctgcgcctggcttcagttcagggctttcttcagatgttccgccagctcggcaatgcgtccggcgaatcgttatcgataatgatgtgcttacgttctgtttgcggcggtacgcgaatgccgaccagttcagcaagtggcgcgctctggctccagtcaatatcacttgcctgccactggacctgcaggcagactcgctccctcggtctgacgggttgtgatgataaaaaagccgaaacagaaacgctcccgcctgccaatagtcaacctgccgcaccagctcctgaagcgaaacctactgaagctcctgttgcaaaagcagaagctaaacctgaaacacgtgcgcaaccggtggtcgatgaacaagcggttttcgacgaaaaaatggatgtctatatcaagtgctacaacaagttacagatcccggtacagcgcagtctggcgcgttatgctgactggctgaaagattttaaacaggggcctaccggtgaagagcgtactgtttatggcatctacggcattagtgaatccaccctcgctgagtgtgaaaaaggcgtaaaaagtgctgtggcgttaacgcctgcgctgcaaccaattgatggcgtggcgcgacgggaaaaagctgataatgatatggctccgctccagcaaaagctggtggtggtgagcaacaagcgggaaaaaccgattaacgatcgccgttcgcgccagcaggaagtgactccggcaggcaccagtatacgctatgaggcaagcttcaaaccgcaaagcggaggaatggagcagacgtttcgcctcgacgcccagcagtaccacgccctgacagtgggcgataaaggcgtgtccgccatagggcatcaccattttctggctatcgggcagggcggcatgaagttcactggaacatgctgttggcaccagcagatcatcactggcgcagatgatttgcaccgggcagcggatgcgatccgcatggtgactaaagtcagcgcgtttgagggcgttaagtcgacgca

SEQ ID NO: 144168 - DNA, 1043 bp, Homo sapiens
cgaaagatggcccgcagatgaccaccgccgaaaaggtacggattttccttttcggcgtgtttgaactgctggcctttatcgcccactgtcagggcgtggtactgctgggcgtcgaggcgaaacgtctgctccattcctccgctttgcggtttgaagcttgcctcatagcgtatactggtgcctgccggagtcacttcctgctggcgcgaacggcgatcgttaatcggtttttcccgcttgttgctcaccaccaccagcttttgctggagcggagccatatcattatcagctttttcccgtcgctgttgcataaaacgaaacgatgcggcgacgacatttaagccgtcattgaccagatccgatttaccgctgatctccatgccttccagcagtgccagttctttgccttccactgaaatggtcattttttccagtgacagtttttgatttcctacacgctcaccaaaacttgccagcgtgctggaaccgtcggttttcagattattaaaggtcaactgcactttctggttgtattcgttaactgcgtctatccgaccactttgcgcctccccggaaagggagatggctttgccgtctctgtcagcatttaactggaactcgccgccgctaaaggcgactttttcatccttttgctcgtaattcagtggcttgagcgaaatatcggaactggaatcaccgctgtaaccaatgcgcgagttaatctcaaaaggcgtttcaccttttgccatatcaaacagtggtttgcttacttcgttattaaccagcgtggtttgaattgatgccatcgacgggatcaggttcagttttttaagctgggcaagcgggaagggaccatgatcaaccgattcgttgaagatgacgctctgaccgcttttaatccacggattttctttcccggcaatgggtttcaccaacagttgcaactggctgctgaatacgccgcgatgatagttttgataactcacttccaggttggattcaggagctgtcagtttgagttgcgcgttcgcctgcgcgaccat

SEQ ID NO: 144169 - DNA, 3312 bp, Homo sapiens
atgcagagtgatggctgttttagtacttcaggtggaattcgtccttttcatcttcagaactggaagcagaaagttaatcagactaagaaagcagaatttgtacgcacagcagaaaaatttaaaaatcaagtaattaacatggaaaaagataaacacagtcatttctacaaccaaaaaagtgacttcagaattgagcatagtatgctagaagaattggaaaataaattgattcacagcaggaaaacagaaagagcaaaaatccagcaacaattggccaaaatacataataatgtaaagaaacttcagcatcaattaaaagatgtgaagcctacacctgattttgttgagaagctcagagaaatgatggaagaaattgaaaatgcaattaacacttttaaagaagagcagaggttgatatatgaagagctaattaaagaagagaagacaactaataatgagttgagtgccatatcaagaaaaattgacacatgggctttgggtaattcagaaacagagaaagctttcagagcaatctcaagcaaagttcctgtagacaaagtaacaccaagtactcttccagaagaggtactagattttgaaaaattccttcagcaaacaggagggcgacaaggtgcctgggatgattatgatcaccagaactttgtaaaggtgagaaacaaacataaagggaagccaacatttatggaagaagttctagaacaccttcctggaaaaacacaagatgaagttcaacagcatgaaaaatggtatcaaaagtttctggctctagaagaaagaaaaaaagagtcaattcagatttggaaaactaaaaagcagcaaaaaagggaggaaattttcaagttaaaggaaaaggcagacaacacacctgtgctttttcataataaacaagaggataatcaaaagcaaaaagaggaacaaagaaagaaacagaaattggcagttgaagcttggaagaaacagaaaagtatagaaatgtcaatgaaatgtgcttcccagttaaaagaagaagaagagaaagagaaaaaacatcagaaagaacgccagcgccagtttaagttaaaattactactagaaagttatacccagcagaagaaagaacaggaagaatttttgaggcttgaaaaggagataagggaaaaggcagaaaaggcagaaaaaaggaaaaatgctgctgatgaaatttccagatttcaagaaagagatttacataaacttgaactgaaaattctagatagacaggcaaaggaagatgaaaagtcacaaaaacaaagaagactggcaaaattaaaagaaaaggttgaaaacaatgttagtagagatccctctaggctttacaaacccaccaaaggttgggaagaacgaaccaaaaagataggaccaacaggctctgggccacttctacatatcccacatagtttgagagctagagctagaaataaaaccttaatgagggttgcaaacctacatgcccatatgaaccagccaaacaacatgcaggaaggaggttttgaagacgtgccagtgcagaagcagacctgcaccggccagaacaccaggttcaaggcgtttgttgccatcagggacagtggccacactgatctgggtgttaagtgctccaaggaggtggccactgccatctgcggggccatcatcctggccaagctctccgttgtgcccatgcgcagaggctactgggggaacaagatcggcaagccccacaccatcccttgcaaggtgacaggctgccacggctctgtgctggcgcgggtcatccctgcgcccaggagcactggcatcgtctcggcccccatggccaagaagctgctgctgatggcagctatcaatgactgctacacctcagccaggggctgcactgccatcctgggcaacttcgtcatggtcattttttatgccatctctaaggtctacagcaggctgaaccctgacctctggaaggagactgtattcaccaagtctccctatcaggaattcactgaccacctcctcaagacccacaccagagtctccgtgcagaggacccaggctccagcggtggctacaacatcggatataccatcctcaggttctacagagccagaattgtctcaaagcgtacttgatgcttttgaccttgcgcttcccaagataaaaattctgacggagggatttgtggacttgattttcacaaggcctgcgaggtgtttacaagcctcgagggctttgagtagaaaagcacaggagggttctttctctccgcgggcactgattccgggtcgcggcggacgtcgcttccggagcagcatggcggccactgaggatgagaggctagcagggagcggtgagggagagcggctggatttcttacgggatcggcacgtgcgatttttccagcgctgcctccaggttttgccggagcgctattcttcactcgagacaagcaggttgacaattgcattttttgcactctccgggctggatatgttggattccttagatgtggtgaacaaagatgatataatagagtggatttattccctgcaggtccttcccacagaagacagatcaaatctaaatcgctgtggtttccgaggctcttcatacctgggtattccgttcaatccatcaaaggtctcacttcatgctgtattaccttcatctgaattctgggtggtaaaaggaactagatattccaagtggtatcacatagaaccgtcactgagagtggtgactgagcgtctaggagacagattaggccaagagaatgctcctggaacagctcatccttatgatagtggccacattgcaatgacctacactggcctctcatgcttagttattcttggagacgacttaagccgagtaaataaagaagcttgcttagcgggcttgagagcccttcagctggaagatgggagtttttgtgcagtacctgaaggcagtgaaaatgacatgcgatttgtgtactgtgcttcctgtatttgctatatgctcaacaactggtcaggcatggatatgaaaaaagccatcacctatattagaaggagtatgatacatcttcagggtaaatttctggtagtggaattgcctgatcaaaagtcctatgacaatggactggcacagggagctggacttgaatctcatggtgttctcattgttcagttcccacctatgagtgagaacatgcggtgtttggttttctgtccttgcgatagtttgctcagaatggtggtttccagcttcatccgtgtccctacaaaggacgtgaactcatccgtttttatggctacatag

SEQ ID NO: 144170 - DNA, 3390 bp, Homo sapiens; identical to SEQ ID NO: 118996

SEQ ID NO: 144171 - DNA, 2586 bp, Homo sapiens; identical to SEQ ID NO: 139273

SEQ ID NO: 144172 - DNA, 3144 bp, Homo sapiens
atgaaactgtcgaaggaaaaatgcgaccaggtcaacgccattgagcgtgataaggcgctggcatgggtggagcgcaatattaaagtaccactgaccgaaccacaaaaagcgggtatcgcgtcattttgtccctataacattggccccggtaagtgtttcccgtcgacgttttataagcggctgaatgctggtgatcgtaaaggtgcatgcgaagcgattcgctggtggattaaggatggcggacgcgattgccgcattcgttcaaataactgttacggtcaggttattcgtcgggaccagtacgcgcttgagccaattaaaatgttatctcaagagaaatggacgatgagtgatatagcattaacgctcagtattctggctttggtggcagtcgtcggtttgtttatcggcaacgtcaaatttcgcggcataggattaggtattggcggcgtgctgtttggtgggatcatcgtcggccattttgtttctcaggcggggatgacattaagtagcgatatgctgcatgttattcaggaatttggcctgatgggaagatcccccggcgcgctcggcaacctgttcgaccgcgtgtggcacggcttcattgtcgatatgatcgacttctacgtcggcgactggcacttcgccaccttcaaccttgccgatactgccatctgtgtcggtgatccagacaccccgggaaacccaaaaacgaacagctttacagtcgcgctatttctgcggcattttgctcgacgacgggcagtcagaagaaccaaagttggagtgcgacaacaaagcaacgcgcggaaaccattgataattacctttccggcgctggtaaccacctttcacgactcaatgcgaccgcttacctcaccaaaaccagtaaatattgctcgggtagcaaattaccccccagacgagccgattgcagagctggaagcgaaaatcgattctctgactgcggttagccgtcaggatgagaaactggatattaacatcgatgaagaagtgcatcgtctgcgtgaaaaaagcgtagaactgacacgtaaaatcttcgccgatctcggtgcatggcagattgcgcaactggcacgccatccacagcgtccttataccctggattacgttcgcctggcatttgatgaatttgacgaactggctggcgaccgcgcgtatgcagacgataaagctatcgtcggtggtatcgcccgtctcgatggtcgtccggtgatgatcattggtcatcaaaaaggtcgtgaaaccaaagaaaaaattcgccgtaactttggtatgccagcgccagaaggttaccgcaaagcactgcgtctgatgcaaatggctgaacgctttaagatgcctatcatcacctttatcgacacgtgtgttagcaggaaccgcgggctttccgttctcaccggcaacgtcggcataaacggcggcaactcaggcgtacgcgaaggtagctgggatctgggggtagaatggttcccgatgctcgagaatcctgttaaaacgcagatttccgtctttacatggacagatgccatcgaccatggtacggaaatgaccgcgacccgtgatggtgttcgtggaaaagaaaaactggatgtccccatcaagtttttatggtgctacgccagtaacacattgatcaatcaacatggcgacatctatcacacccatgaggccaacgcacagcagcagccgcacccgaaagagatgctgtcgacgataatgcagaccttggcctatgtggccgtgatggcgatgcagtgtttgtcacccccgaaaggtctgttgataaacgacctgcaccgccgtgtgcataacagcggtcactggacacaaaacggtgccagcatcagccagtttgagatgcatgtgcgggcgattaccgatctgccgttaccgcaaccagtggtgaataatccgtcggtgatgatcaatctgattggtagcgatgtgaattatgactggctgaaactgccgctggtgcatctgcactggtacgacaaagaagtccgtccggggcgtaaagtggggcatctgaatttgaccgacagcgacacatcgcgtctgactgcgacgctggaagccttaatcccgctgctgccgccggaatatgccagcggcgtgatttgggcgcagagcgtttacgccgcatccggcaacggtgccgactgcctgatgcgacgcttgcgcgtcttatcaggcctacaaattcccgcaccctccgtaggccggataaggcgtttacgccgcatccggcaatggtgccgactgcctgatgcgacgcttgcgcgtcttatcaggcctacaaattcccgcaccctcctctccgagagtcttgagagcctaccttccggcaaaaacgcccgagaagtgatcgccgccgtgaaggacaaactggaaacgctgaaaagtagtctgccggaaggcgtggagatagttacaacatacgatcgcagccagctcattgaccgcgccatcgacaacctcagcggcaagttgctggaagagtttattgtggttgatcaagcaaaaggaggttttgaagacgtgccagtgcagaagcagacctgcaccggccagaacaccaggttcaaggcgtttgttgccatcagggacagtggccacactgatctgggtgttaagtgctccaaggaggtggccactgccatctgcggggccatcatcctggccaagctctccgttgtgcccatgcgcagaggctactgggggaacaagatcggcaagccccacaccatcccttgcaaggtgacaggctgccacggctctgtgctggcgcgggtcatccctgcgcccaggagcactggcatcgtctcggcccccatggccaagaagctgctgctgatggcagctatcaatgactgctacacctcagccaggggctgcactgccatcctgggcaacttcgttgatacgacttcggttgattcgccgtcgatctctgtacacggggatcctcgagagctcagacaattatcagcctttatccggcgttctaaggtgtttatcccactatcacggggctgcagctcgcatgcctgcaggtctcatagcgtatactggtgcctgccggagtcacttcctgctggcgcgaacggcgatcgttaa

SEQ ID NO: 144173 - DNA, 1386 bp, Homo sapiens
atgcgagttgtcatactgggaagtggtgtggtaggcgttgccagcgcctggtacttaaatcaggcaggacatgaggtcaccgtcattgatcgggagccgggggccgccctggaaaccagtgccgcgaatgccgggcaaatctcccccggatatgctgcaccgtgggcggcaccaggtgtgcctttaaaagcgattaaatggatgttccagcgccatgcgccgctggcggttcgtctcgacggtacgcagttccagttgaaatggatgtggcaaatgttacgtaactgcgacaccagccactacatggaaaacaaagggcggtgctttgagctgccagttgctgtgtacgcaggtggtcaggcggtgctggttaagcaatgcaaagccatcggtggccccgatcgcgctccagatacgctcaataccatgcccatttttaaagcgtgtacgcccgacaaccggcgtgccgtctggcgtcatcgggcgcagaccagtccagaaagtcgcctgctcgacatgaccgccgcgtggatagagatcgcgaaccaccatctccagcgtttcacgacgcggttgcaacagctcggtattaaaaccaacaatctccggcattccggcaaaacgaatgcggttattgtatacatgatacaatcgatctcgctggtggatgaaatgagttgccatctggtgctcaccacgggcggaactggcccggcgcgtcgtgacgtaacgcccgatgcgacgctggcagtagcggaccgcgagatgcctggctttggtgaacagatgcgccagatcagcctgcattttgtaccaactgcgatcctttcgcgtcaggtgggcgtgattcgcaaacaggcgctgatccttaacttacccggtcagccgaagtctattaaagagacgctggaaggtgtgaaggacgctgaggcgtaccgtactgcattcagttgctggaagggccatacgttgaaacggcaccggaagtggttgcagcattcagaccgaagagtgcaagacgcgacgttagcgaataaaaaaatccccccgagcggggggatctcaaaacaattagtgggattcaccaatcggcagaacggtgcgaccaaactgctcgttcagtacttcacccatcgccagatagattgcgctggcaccgcagatcagcccaatccagccggcaaagtggatgattgcggcgttaccggcaatgttaccgatcgccagcagggcaaacagcacggtcaggctaaagaaaacgaattgcagaacgcgtgcgcctttcagcgtgccgaagaacataaacagcgtaatcaggcgtttaatcgcaaacagagtgttttgcgggttcgtcactgcctgacgtttagccggctgaccaactag

SEQ ID NO: 144174 - DNA, 730 bp, Homo sapiens
tgctgtaatcattcttagcgtgaccgggaagtcggtcacgctacctcttctgaagcctgtctgtcactcccttcgcagtgtatcattctgtttaacgagactgtttaaacggaaaaatcttgatgaatactttacgtattggcttagtttccatctctgatcgcgcatccagcggcgtttatcaggataaaggcatccctgcgctggaagaatggctgacatcggcgctaaccacgccgtttgaactggaaacccgcttaatccccgatgagcaggcgatcatcgagcaaacgttgtgtgagctggtggatgaaatgagttgccatctggtgctcaccacgggcggaactggcccggcgcgtcgtgacgtaacgcccgatgcgacgctggcagtagcggaccgcgagatgcctggctttggtgaacagatgcgccagatcagcctgcattttgtaccaactgcgatcctttcgcgtcaggtgggcgtgattcgcaaacaggcgctgatccttaacttacccggtcagccgaagtctattaaagagacgctggaaggtgtgaaggaccctgacggtaacgttgtggtacacggtatttttgccagcgtaccgtactgcattcagttgctggaagggccatacgttgaaacggcaccggaagtggttgcagcattcagaccgaagagtgcaagacgcgacgttagcgaataaaaaaatccccccgagcgggg

SEQ ID NO: 144175 - DNA, 628 bp, Homo sapiens
  misc_feature (1)...(628): n = a,t,c or g
ttttttgagagacggagtttagctctttcgcccaggctggaatgcagtggcatgatctcggctcactgcaacctccgccttccagtttcaagtgattctcctgcattcttctcaggattccactgcaatgagctggtggaggaataatttctggatcatcttagctgtggccatcattgttgtctctgtgggcctgggcctcatcctgtactgtgtctgtaagtggcagcttagacgaggtaatggccattttacctctccgaatccagctcaggtgaaccaggaaggtgtgctccatgctctgaattatagcactttatttccctcccctcattttcagccatttccagggctacagaaaacggtttcattagggtgccaattacaaatgggaaccaggacnnnnnnnnnnnnnnnnnnnnnnnnnnnnnnnnnnnnnnnnnnnnnnnnnnnnnnnnnnnncgatttctgtgaggtttctggtgagggttctcctcctggctcgcaggcagctgccttcttgaaaagtccccacaaaaagccgttccttggtgcattcaagcccggacccgaccgtgccncgactacggcgctcaacctagtgtctcagttnttttttctttcgcca

SEQ ID NO: 144176 - DNA, 1371 bp, Homo sapiens
atgggctggcaaagacattttcagagcagcgccgtgtttatgtcctgtgcccagttgtttgcgctgatgcgttacaagcccctctggtggtcccccgctgactctttggtaaaagtctgctgcatctgccaattcttttacgagtttgccgtgagcattcctggatgtggcaacctcagtctcaagaagagcgacaggacgccagctcccatgcagagacagatccaggattccactgcaatgagctggtggaggaataatttctggatcatcttagctgtggccatcatcgttgtctctgtgggtctgggcctcatcctgtactgtgtctgtaagtggcagcttagacgaggcaagaaatgggaaattgccaagcccctgaaacacaagcaagtagatgaagaaaagatgtatgagaatgttcttaatgagtcgccagttcaattaccgcctctgccaccgaggaattggccttctctagaagactcttccccacaggaagccccaagtcagccgcccgctacatactcactggtaaataaagttaaaaataagaagactgtttccatcccaagctacattgagcctgaagatgactatgacgatgttgaaatccctgcaaatactgaaaaagcatcattttgaaacagccatttcttctttttggcaaaactgaagagggttcacacaacttattttaaaacaatcaagaatggttgaacttcagtaggtctctgggccctgaaagccagtggtgattttatgaagctctataagataaagcacttccccaaaccttagatgaagacaccccctgcgatcggatgactgcagccagaggagacacatgggtgcttcggctctgaggacttaggaggggtcagccttgtgctgtttggagggaaacttttccatgggaaggaccacggggctccatggctcccacctgtgggaaactactcatttcttggcattctttcccccttcattccctttggtttgcatggttctgagtgatattaaatctcagcatttggttgtgcagacccttctaggctcccatccccagcaaggccctcaccaagcatgctggtctttaccctctcaccccacccacctcctgcactgtgaggctgtgggtgagttacagctgagtgctctcgtgcccaggttcccacaccacatcttcgcgagtttgcaagggcagggagtaccttttgttctcgtgaaccctcccttcctagacaccctgcaaaccccagtgcctttatatgatgtaggccaaattgaccatagagatttgagttttcacctaggttttctccccgtgcttgcaagttgtactgtaacaatggacaaaggacaaaagtt

SEQ ID NO: 144177 - DNA, 423 bp, Homo sapiens
tggtacaataatgtctccaaaacccaatattgaaacaggcatgaggcacacactcattactgagaaatagatcagttttggtactctgatgactactggcaacttttcattatttccaaaaggtccagctgcgagttcaaccatgatactctcaccattcttgaagttgggcaacttcagtgttttaattaaattcagacagaaagcaatccccaagatatcctgtaaaatccaagcccacctgtcttcatttcgaaacacagcccaaacaacagctactgctatgcacagtccagagagaaaaataagtctcacttccatgtttttgccacgacatgcaatcgtgcattgtccatatggtatcttatgaattagtgcagcaagacagttgtacagactcattgctgatgctatgcagaaaat

SEQ ID NO: 144178 - DNA, 418 bp, Homo sapiens; identical to SEQ ID NO: 118810
  misc_feature (1)...(418): n = a,t,c or g

SEQ ID NO: 144179 - DNA, 756 bp, Homo sapiens; identical to SEQ ID NO: 118812
  misc_feature (1)...(756): n = a,t,c or g

SEQ ID NO: 144180 - DNA, 1787 bp, Homo sapiens
gcaccgcgcgagcttggctgcttctggggcctgtgtggccctgtgtgtcggaaagatggagcaagaagccgagcccgaggggcggccgcgacccctctgaccgagatcctgctgctttcgcagccaggagcaccgtccctccccggattagtgcgtacgagcgcccagtgccctggcccggagagtggaatgatccccgaggcccagggcgtcgtgcttccgcagtagtcagtccccgtgaaggaaactggggagtcttgagggacccccgactccaagcgcgaaaaccccggatggtgaggagcaggcaaatgtgcaataccaacatgtctgtacctactgatggtgctgtaaccacctcacagattccagcttcggaacaagagaccctggatcttgatgctggtgtaagtgaacattcaggtgattggttggatcaggattcagtttcagatcagtttagtgtagaatttgaagttgaatctctcgactcagaagattatagccttagtgaagaaggacaagaactctcagatgaagatgatgaggtatatcaagttactgtgtatcaggcaggggagagtgatacagattcatttgaagaagatcctgaaatttccttagctgactattggaaatgcacttcatgcaatgaaatgaatcccccccttccatcacattgcaacagatgttgggcccttcgtgagaattggcttcctgaagataaagggaaagataaaggggaaatctctgagaaagccaaactggaaaactcaacacaagctgaagagggctttgatgttcctgattgtaaaaaaactatagtgaatgattccagagagtcatgtgttgaggaaaatgatgataaaattacacaagcttcacaatcacaagaaagtgaagactattctcagccatcaacttctagtagcattatttatagcagccaagaagatgtgaaagagtttgaaagggaagaaacccaagacaaagaagagagtgtggaatctagtttgccccttaatgccattgaaccttgtgtgatttgtcaaggtcgacctaaaaatggttgcattgtccatggcaaaacaggacatcttatggcctgctttacatgtgcaaagaagctaaagaaaaggaataagccctgcccagtatgtagacaaccaattcaaatgattgtgctaacttatttcccctagttgacctgtctataagagaattatatatttctaactatataaccctaggaatttagacaacctgaaatttattcacatatatcaaagtgagaaaatgcctcaattcacatagatttcttctctttagtataattgacctactttggtagtggaatagtgaatacttactataatttgacttgaatatgtagctcatcctttacaccaactcctaattttaaataatttctactctgtcttaaatgagaagtacttggttttttttttcttaaatatgtatatgacatttaaatgtaacttattattttttttgagaccgagtcttgctctgttacccaggctggagtgcagtgggtgatcttggctcactgcaagctctgccctccccgggttcgcaccattctcctgcctcagcctcccaattagcttggcctacagtcatctgccaccacacctggctaattttttgtacttttagtagagacagggtttcaccgtgttagccaggatggtctcgatctcctgacctcgtgatccgcccacctcggcctcccaaagtgctgggattacaggcatgagccaccg

SEQ ID NO: 144181 - DNA, 1553 bp, Homo sapiens
gcaccgcgcgagcttggctgcttctggggcctgtgtggccctgtgtgtcggaaagatggagcaagaagccgagcccgaggggcggccgcgacccctctgaccgagatcctgctgctttcgcagccaggagcaccgtccctccccggattagtgcgtacgagcgcccagtgccctggcccggagagtggaatgatccccgaggcccagggcgtcgtgcttccgcagtagtcagtccccgtgaaggaaactggggagtcttgagggacccccgactccaagcgcgaaaaccccggatggtgaggagcaggcaaatgtgcaataccaacatgtctgtacctactgatggtgctgtaaccacctcacagattccagcttcggaacaagagaccctggactattggaaatgcacttcatgcaatgaaatgaatcccccccttccatcacattgcaacagatgttgggcccttcgtgagaattggcttcctgaagataaagggaaagataaaggggaaatctctgagaaagccaaactggaaaactcaacacaagctgaagagggctttgatgttcctgattgtaaaaaaactatagtgaatgattccagagagtcatgtgttgaggaaaatgatgataaaattacacaagcttcacaatcacaagaaagtgaagactattctcagccatcaacttctagtagcattatttatagcagccaagaagatgtgaaagagtttgaaagggaagaaacccaagacaaagaagagagtgtggaatctagtttgccccttaatgccattgaaccttgtgtgatttgtcaaggtcgacctaaaaatggttgcattgtccatggcaaaacaggacatcttatggcctgctttacatgtgcaaagaagctaaagaaaaggaataagccctgcccagtatgtagacaaccaattcaaatgattgtgctaacttatttcccctagttgacctgtctataagagaattatatatttctaactatataaccctaggaatttagacaacctgaaatttattcacatatatcaaagtgagaaaatgcctcaattcacatagatttcttctctttagtataattgacctactttggtagtggaatagtgaatacttactataatttgacttgaatatgtagctcatcctttacaccaactcctaattttaaataatttctactctgtcttaaatgagaagtacttggttttttttttcttaaatatgtatatgacatttaaatgtaacttattattttttttgagaccgagtcttgctctgttacccaggctggagtgcagtgggtgatcttggctcactgcaagctctgccctccccgggttcgcaccattctcctgcctcagcctcccaattagcttggcctacagtcatctgccaccacacctggctaattttttgtacttttagtagagacagggtttcaccgtgttagccaggatggtctcgatctcctgacctcgtgatccgcccacctcggcctcccaaagtgctgggattacaggcatgagccaccg

SEQ ID NO: 144182 - DNA, 1295 bp, Homo sapiens
gcaccgcgcgagcttggctgcttctggggcctgtgtggccctgtgtgtcggaaagatggagcaagaagccgagcccgaggggcggccgcgacccctctgaccgagatcctgctgctttcgcagccaggagcaccgtccctccccggattagtgcgtacgagcgcccagtgccctggcccggagagtggaatgatccccgaggcccagggcgtcgtgcttccgcagtagtcagtccccgtgaaggaaactggggagtcttgagggacccccgactccaagcgcgaaaaccccggatggtgaggagcaggcaaatgtgcaataccaacatgtctgtacctactgatggtgctgtaaccacctcacagattccagcttcggaacaagagaccctggttagacaagaaagtgaagactattctcagccatcaacttctagtagcattatttatagcagccaagaagatgtgaaagagtttgaaagggaagaaacccaagacaaagaagagagtgtggaatctagtttgccccttaatgccattgaaccttgtgtgatttgtcaaggtcgacctaaaaatggttgcattgtccatggcaaaacaggacatcttatggcctgctttacatgtgcaaagaagctaaagaaaaggaataagccctgcccagtatgtagacaaccaattcaaatgattgtgctaacttatttcccctagttgacctgtctataagagaattatatatttctaactatataaccctaggaatttagacaacctgaaatttattcacatatatcaaagtgagaaaatgcctcaattcacatagatttcttctctttagtataattgacctactttggtagtggaatagtgaatacttactataatttgacttgaatatgtagctcatcctttacaccaactcctaattttaaataatttctactctgtcttaaatgagaagtacttggttttttttttcttaaatatgtatatgacatttaaatgtaacttattattttttttgagaccgagtcttgctctgttacccaggctggagtgcagtgggtgatcttggctcactgcaagctctgccctccccgggttcgcaccattctcctgcctcagcctcccaattagcttggcctacagtcatctgccaccacacctggctaattttttgtacttttagtagagacagggtttcaccgtgttagccaggatggtctcgatctcctgacctcgtgatccgcccacctcggcctcccaaagtgctgggattacaggcatgagccaccg

SEQ ID NO: 144183 - DNA, 430 bp, Homo sapiens
cgacgccataatttctttcttcattggatttggactaagatttggagcaaaatggaactttgcaaatgcatatgataatcatgtttttgtggctggaagattaatttactgtcttaacataatattttggtatgtgcgtttgctagattttctagctgtaaatcaacaggcaggaccttatgtaatgatgattggaaaaatggtggccaatatgttctacattgtagtgattatggctcttgtattacttagttttggtgttcccagaaaggcaatactttatcctcatgaagcaccatcttggactcttgctaaagatatagtttttcacccatactggatgatttttggtgaagtttatgcatacgaaattgatgtgtgtgcaaatgattctgttatccctcaaatctgtggtccgtcgacgcggccg

SEQ ID NO: 144184 - DNA, 1863 bp, Homo sapiens
gcaccgcgcgagcttggctgcttctggggcctgtgtggccctgtgtgtcggaaagatggagcaagaagccgagcccgaggggcggccgcgacccctctgaccgagatcctgctgctttcgcagccaggagcaccgtccctccccggattagtgcgtacgagcgcccagtgccctggcccggagagtggaatgatccccgaggcccagggcgtcgtgcttccgcagtagtcagtccccgtgaaggaaactggggagtcttgagggacccccgactccaagcgcgaaaaccccggatggtgaggagcaggcaaatgtgcaataccaacatgtctgtacctactgatggtgctgtaaccacctcacagattccagcttcggaacaagagaccctggttagaccaaagccattgcttttgaagttattaaagtctgttggtgcacaaaaagacacttatactatgaaagaggttcttgatgctggtgtaagtgaacattcaggtgattggttggatcaggattcagtttcagatcagtttagtgtagaatttgaagttgaatctctcgactcagaagattatagccttagtgaagaaggacaagaactctcagatgaagatgatgaggtatatcaagttactgtgtatcaggcaggggagagtgatacagattcatttgaagaagatcctgaaatttccttagctgactattggaaatgcacttcatgcaatgaaatgaatcccccccttccatcacattgcaacagatgttgggcccttcgtgagaattggcttcctgaagataaagggaaagataaaggggaaatctctgagaaagccaaactggaaaactcaacacaagctgaagagggctttgatgttcctgattgtaaaaaaactatagtgaatgattccagagagtcatgtgttgaggaaaatgatgataaaattacacaagcttcacaatcacaagaaagtgaagactattctcagccatcaacttctagtagcattatttatagcagccaagaagatgtgaaagagtttgaaagggaagaagcgcccagacaaagaagagagtgtggaatctagtttgccccttaatgccattgaaccttgtgtgatttgtcaaggtcgacctaaaaatggttgcattgtccatggcaaaacaggacatcttatggcctgctttacatgtgccaagaagctaaagaaaaggaataagccctgcccagtatgtagacaaccaattcaaatgattgtgctaacttatttcccctagttgacctgtctataagagaattatatatttctaactatataaccctaggaattgagacaacctgaaatttattcacatatatcaaaatgagaaaatgcctcaattcacatagatttcttctctttagtataattgacctactttggtagtggaatagtgaatacttactataatttgacttgaatatgtagctcatcctttacacccccccctaattttaaataatttctactctgtcttaaatgagaagtacttggttttttttttcttaaatatgtatatgacatttaaatgtaacttattattttttttgagaccgagtcttgctctgttacccaggctggagtgcagtgggtgatcttggctcactgcaagctctgccctccccgggttcgcaccattctcctgcctcagcctcccaattagcttggcctacagtcatctgccaccacacctggctaattttttgtacttttagtagagacagggtttcaccgtgttagccaggatggtctcgatctcctgacctcgtgatccgcccacctcggcctcccaaagtgctgggattacaggcatgagccaccg

SEQ ID NO: 144185 - DNA, 2393 bp, Homo sapiens
gcaccgcgcgagcttggctgcttctggggcctgtgtggccctgtgtgtcggaaagatggagcaagaagccgagcccgaggggcggccgcgacccctctgaccgagatcctgctgctttcgcagccaggagcaccgtccctccccggattagtgcgtacgagcgcccagtgccctggcccggagagtggaatgatccccgaggcccagggcgtcgtgcttccgcagtagtcagtccccgtgaaggaaactggggagtcttgagggacccccgactcccaaccgccgaaaaccccggaaggtgaggaaccgggcaatgtgccaataccaaaatgtctgtacctactgatggtgcctgtaaccacctcacagattcccagcttccggaacaagagacccgggttaggaccaaagccattgctttttgaagttattaaagtctgttgggtgcacaaaaagacacttattactatggaaagaggtttctttttaatcttggccagtatatttatggactaaacgattattattgattgaggaagccaccacctatttgtagaattggttcaaatgatcttctaggagatttgtttggcgtgccaagcttctctgtgaaagagcacaggaaaatatataccatgatctacaggaacttggtagtagtcaatcagcaggaatcatcggactcaggtacatctgtgagtgagaacaggtgtcaccttgaaggtgggagtgatcaaaaggaccttgtacaagagcttcaggaagagaaaccttcatcttcacatttggtttctagaccatctacctcatctagaaggagagcaattagtgagacagaagaaaattcagatgaattatctggtgaacgacaaagaaaacgccacaaatctgatagtatttccctttcctttgatgaaagcctggctctgtgtgtaataagggagatatgttgtgaaagaagcagtagcagtgaatctacagggacgccatcgaatccggatcttgatgctggtgtaagtgaacattcaggtgattggttggatcaggattcagtttcagatcagtttagtgtagaatttgaagttgaatctctcgactcagaagattatagccttagtgaagaaggacaagaactctcagatgaagatgatgaggtatatcaagttactgtgtatcaggcaggggagagtgatacagattcatttgaagaagatcctgaaatttccttagctgactattggaaatgcacttcatgcaatgaaatgaatcccccccttccatcacattgcaacagatgttgggcccttcgtgagaattggcttcctgaagataaagggaaagataaaggggaaatctctgagaaagccaaactggaaaactcaacacaagctgaagagggctttgatgttcctgattgtaaaaaaactatagtgaatgattccagagagtcatgtgttgaggaaaatgatgataaaattacacaagcttcacaatcacaagaaagtgaagactattctcagccatcaacttctagtagcattatttatagcagccaagaagatgtgaaagagtttgaaagggaagaaacccaagacaaagaagagagtgtggaatctagtttgccccttaatgccattgaaccttgtgtgatttgtcaaggtcgacctaaaaatggttgcattgtccatggcaaaacaggacatcttatggcctgctttacatgtgcaaagaagctaaagaaaaggaataagccctgcccagtatgtagacaaccaattcaaatgattgtgctaacttatttcccctagttgacctgtctataagagaattatatatttctaactatataaccctaggaatttagacaacctgaaatttattcacatatatcaaagtgagaaaatgcctcaattcacatagatttcttctctttagtataattgacctactttggtagtggaatagtgaatacttactataatttgacttgaatatgtagctcatcctttacaccaactcctaattttaaataatttctactctgtcttaaatgagaagtacttggttttttttttcttaaatatgtatatgacatttaaatgtaacttattattttttttgagaccgagtcttgctctgttacccaggctggagtgcagtgggtgatcttggctcactgcaagctctgccctccccgggttcgcaccattctcctgcctcagcctcccaattagcttggcctacagtcatctgccaccacacctggctaattttttgtacttttagtagagacagggtttcaccgtgttagccaggatggtctcgatctcctgacctcgtgatccgcccacctcggcctcccaaagtgctgggattacaggcatgagccaccg

SEQ ID NO: 144186 - DNA, 3680 bp, Homo sapiens
gcaccgcgcgagcttggctgcttctggggcctgtgtggccctgtgtgtcggaaagatggagcaagaagccgagcccgaggggcggccgcgacccctctgaccgagatcctgctgctttcgcagccaggagcaccgtccctccccggattagtgcgtacgagcgcccagtgccctggcccggagagtggaatgatccccgaggcccagggcgtcgtgcttccgcagtagtcagtccccgtgaaggaaactggggagtcttgagggacccccgactccaagcgcgaaaaccccggatggtgaggagcaggcaaatgtgcaataccaacatgtctgtacctactgatggtgctgtaaccacctcacagattccagcttcggaacaagagaccctggttagaccaaagccattgcttttgaagttattaaagtctgttggtgcacaaaaagacacttatactatgaaagaggttcttttttatcttggccagtatattatgactaaacgattatatgatgagaagcaacaacatattgtaaatgattgtgctaacttatttcccctagttgacctgtctataagagaattatatatttctaactatataaccctaggaatttagacaacctgaaatttattcacatatatcaaagtgagaaaatgcctcaattcacatagatttcttctctttagtataattgacctactttggtagtgggaatagtgaatacttactataatttgacttgaatatgtaggctcatcctttacaccaactcctaattttaaataatttctactctgtcttaaatgaggaggtacttggtttttttttttcttaaatatggtatatggacatttaaatgtaacttattattttttttgagaccgagtcttgctctgttacccaggctggagtgcagtggcgtgatcttggctcactgcaagctctgccctccccgggttcgcaccattctcctgcctcagcctcccaattagcttggcctacagtcatctgccaccacacctggctaattctttttgtatttttagtagagacggggtttcaccgtgttagccaggatggtctcgatctcctgacctcgtggatccgcccgcctcggcctcccaaagtgttgggatcacaggcgtgagccaccgcgcccggcccaatttgcataattctttacagtaaaacccattcagaaatagtaactacttgtatctaccatcagagctgaaagaaacagatttcgttaaaaaaaagtataggggtgggtcaaggcatttttttttagaaaaatatactgtatatagtacatctcggaaactacacagaccatatgttttatttaatgtgaaggcacaactttaacattaaaagcaaagcgttttagttatttatgatgtaactgtcagtaccagctcataaaaatatatttttgcaagcatatcattgaagactctttcagattgtcaattcaaaaagtcaatttaaaaaagtccgaagtctatttgtagaaaatcaatgacacattatagcagttccacataatattattgctggacaatctgttcaccagatatccacaggggtttcccttcattttgttgcaccaatcccaaaatggtcccatcatctggttagctggttaccctttcccagaactttttcatttcccttacggtctcccaggcaacaaactggaggcagtaataagtgtgcaaggtactaaatagaggagagcaggttgcccctttttcatcagcacccagaacaacaaatgtaagtatcatgccaatagcataggcaactgtagacggaaacatagtatatgtaagaagaaccagtctgaacatcatatcttgtgcaagtatgcaatcaacaggccctggtacaataatgtctccaaaacccaatattgaaacaggcatgaggcacacactcattactgagaaatagatcagttttggtactctgatgactactggcaacttttcattatttcccaaaaggtcccagctgcgagttcaacccatgatactcctcacccattctttgtgatgaatggtgttaggataccaaaaaatccctcatagaggaggagaaggcctagaagtctcacacatgacttgaagttgggccccttcagtgttttgattaaactcagacagaaaagcagtccccaagatatcctgtaaaatccaagcccacctgtcttcatttcgaaacacagcccaaacaacagctactgctatgcacagtccagagagaaaaataagtctcacttccatgtttttgccacgacatgcaatcgtgcattgtccatatggtatcttatgaattagtgcagcaagacagttgtacagactcattgctgatgctatgcagaaaattgctatcataacataaactacaaatgctccaaattctgtattatctccttctgtagctttagagcaaacagtttcttgatctttggttccagtttccaagtggcttttgcaacttggctgagatggtgtactaacaaaaaatttggttggttgggatgacagatgtggtatgctagtagatgaactgcctaatttttgatttttattaaatatttttaagagttctaccccatgtagtctctgtcgcagttctggaggggaaacagcactttgggaataaggcaccagaagaggaaccagcctctggaaaattaaattcttttctctggggtactgcaggtaagtcttgaccaaatatattacactggggatctttgtcatctttcattaaaatattacaatgaaaaggattattactttcaagatcaccttgaggaagagaggagctaagtgtatttacaacaccatgctttttccatacagaaggtcttacaggaccatcatcaataaggttttgagccaagtgtttggaaatgctcagttctcgtgtgatttcattatgaactttgctagcttccgacgctttctgggcagtgagtgtttttaatgtatctaccgtcagggctgaaagatcttgcaaatggccaatttgagaatctaatgattgtaatgatctttttatgtagttgacacgatctccaacttctttaatctgaatgcacatctgttccactctttcaaaagtgacacgaattctctcttcactcccagaatgaaatttgtcatctttttcattgaaatacatttcaacacactgctcttcaaaatcatgaagtttcttttgatcttcttctgttaagaaaagttcatcaatttcgtatgcataaacttcaccaaaaatcatccagtatgggtgaaaaactatatctttagcaagagtccaagatggtgcttcatgaggataaagtattgcctttctgggaacaccaaaactaagtaatacaagagccataatcactacaatgtagaacatattggccaccatttttccaatcatcattacataaggtcctgcctgttgatttacagctagaaaattagcatgaattctttgctgattaatagttttttcaagttctcttctcagtctgacttccgccccatactttccaacagtgccatcatccaccaatatgaaatgggaatgcagattattcaaaacattcaatttgctcagggggttcaataaggtttgataaggagcaaccaccttgaatgttgtcat

SEQ ID NO: 144187 - DNA, 575 bp, Homo sapiens
tttacatgtttttttctctgttttcagtgtggctttggacaggaatatatgaataaatcactgccatacaggttttccaatacacaagtgctagaaaatacacacaattccccaatgcgtaagttgtgctaatgtctttccaagttctgggttgggaagtggagggtggcagcgtttgtttgtgcgcaaccgtccagtcctgttcacagcgaggatttggagtcctccagggtctcatcatgggaattgatttgtcagcggacgcctctgccctgtctggcttcaggagttccagtgatggcttatggcggcccactcactatggtgggctgagtggaagctccttaaccatgtccccagagacactgaggtgctcgctcttttaatgtcctcgtttgttgccgtaagttctttgctaggtttcattttggcatttggcaaatcagcctggaagtctggccccatgacagcaatcactccctccccaccctcctgaagctagaggaagatttgctcagatccattaattaaagcaggaattggtgtgacaatgagctgcatggtttagggagtct

SEQ ID NO: 144188 - DNA, 529 bp, Homo sapiens
  misc_feature (1)...(529): n = a,t,c or g
tcatttctgaaaagtcatgggccactggcaagttaggaaacgaaagtgaaatcagctgatagtgacatcagtcagaacaaatgtaccaaagttcagagagctgtttactaggcacgactgcgaaggcaagggggcaccagctcaggactgcatctgcctgccatttcccttccactcctcctttctggagtctgacattagaaagccagcgagaaggaagattcaaacaaccaaccctgatttcctgcttctccttttcatgagtgttcctgtggtctctgcacctcctttctctccnnnnnnnnnnnnnnnnnnnnnnnnnnnnnnnnnnnnnngtccttggttccctgaccaggaagcgaggtgactgacaagccctgtggagcgtccctgcagaggactccggccagcctgagtgacgcaatccaaagagcgctcccgggtaggaaatggccccggtggaatgccttgccagagcagcgcatagcaggctcccgagaaggattaacactggctgaaccaccggaag

SEQ ID NO: 144189 - DNA, 605 bp, Homo sapiens
ctgtatgtactgtgccctctcctggctcttgaggctctggagtcccaattgtctgtgttagtcagtgaccaggttccagggaaaatgatgtcatgtggtggtccaactttactggaaccaaagagacagtactttgcaaagaaaaggatcactgccaggtgcactggaattgctacagttttagtccgcatgatcctctcctgaaggaggaagccttgtttcaaaattagtttccatcatggagtctatcaaatgagttcccacctctccagccagcctagaaagcaaacagagctgcccacatgttctctgccctgtctgggaggttgagggccacagtgtatagactggtaagccagacaggcctcctcgccgcaagctgctaactttgcttttacctgtaccttgggtccccgggcagctagctataaagcaagagggacaggagcccaagaagagacactgaggacaagagatcacaccagagtacatgtctctgcctctgttttcagtgtggctttggacaggaatatatgaataaatcactgccatacaggttttccaatacacaagtgctagaaaatacacacaattccccaatgcgt

SEQ ID NO: 144190 - DNA, 2250 bp, Homo sapiens
gcgatctggctgcgacatctgtcacccattgatcgccagggttgattcggctgatctggctgccgttctgagtgtgcggaaggcaggactcaaaatgagatcccatttgactccctctgtatgtactgtgccctctcctggctcttgaggctctggagtcccaattgtctgtgttagtcagtgaccaggttccagggaaaatgatgtcatgtggtggtccaacttactggaaccaaagagacagtactttgcaaagaaaaggatcactgccaggtgcactggaattgctacagtttagtccgcatgatctctcctgaaggaggaagcctgtttcaaaaatagtttccatcatgagtctatcaatgagctcccacctctccagccagcctagaaagcaaacgagctgcccacagtgtatagactggtaagccagacaggcctcctcccgcaagctgctaccttgctttcacctgtaccttggtctccgggcagctagctataaagcaagagggacaggagcccagaagagacactgaggacaagagatcacaccagagtacatgtctctgcctctgttttcaggggggctttggacaggaatatatgaataaatcactgccatacaggttttccaatacacaagtgctagaaaatacacacaattccccaatgcgtaagttgtgctaatgtctttccaagttctgggttgggaagtggagggtggcatcgtttgtttgtgcgcaaccgtccagtcctgttcacagcgaggatttggagtcctcccagggtctcatcatgggagtgatttgtcagcggacgcctctgccctgtctggcttcaggtccaggggaagctttgaaagcagtcaagccttgtctttgtaccccatgttgtcctgtctttgttgaagtcactcagagatcactcctgggacctctggggttggaagttccaagtgatggctttatggcggcccaactcactatggtgggctgagtggaagctccttaaccatgtccccagagacactgaggtgctcgctcttttaatgtcctcgtttgttgccgtaagttctttgctaggtttcattttggcatttggcaaatcagcctggaagtctggccccatgacagcaatcactccctccccaccctcctgaagctagaggaagatttgctcagatccattaattaaagcaggaattggtgtgacaatgagctgcatggtttagggagtctttgggagccttggaagtcctgaaggacagccaattcttgttacttaagaagttcacagttgccctggctgccccttgctgccccttcggccttctttgacacaggggccccacctcctatggtaggggggttccttccgctggaagcgggagatcagcggtaagtggtaaattagatgggttaaagcaaatgtggccccttttggccatgggtggaacttaacccttgccatccagtaagcccttaagcagctgtcaagctttgtttcagccctttcaggcttcaatggatacacaccattgtctataagccagaggatgagtaaggcctgggccgctgcccaaaagctagaaaacccgggccccggggaggaaaaaccttgccccctttcccccataggaaaagaagggggcccggccggcctgccaccaggccaaagggacacagtcaggaaggccctctgccagccgccacgctctctcatcactgttgcactgggctaggagtagaggctggggggcaaaaagggttgaggaccaagggacccgtacacgccaagcctggccaggcccaggccaacccgaggcaccccccagggctttccagctcagggaactggtgacactgtagggtgctggtgtcctcattcccacaggcagaagttatataagccgattctcaggttgggcaggtcagttaggttgccagcctcccaggagaatagcgtataacatcaggcagatgacctcaatctcgaggcctatgatgctcatgaacagcagctggtcgcgccaccgaggccttgggccggccatctctactgccctctgccgggggacagaaaggaggtgcagagaccacaggaacactcatgaaaaggagaagcaggaaatcagggttggttgtttgaatcttccttctcgctggctttctaatgtcagactccagaaaggaggagtggaagggaaatggcaggcagatgcagtcttgagctggtgcccccttgacgaaa

SEQ ID NO: 144191 - DNA, 467 bp, Homo sapiens
atgactacgccttgcctggccggacggactgacagaagagagtgaaagtgccatggaaagccattcactcctcaatcccaacctgcagcaaggtgaaggagtcctctccagcttccgaaccacgtggacaggagtttgtggaggatctgggcttctggagagtattgctgttgatcttcgtcattgctttgctgtctcttggcattgcttattatgtgagtggggtgctacccttcgtggaaaaccagcctgaactggtgcattaaaggagctcatggaagatgaggcaattaatttcctgtttcctggcttccaatgtttgttctcagtttctcagaatttttcttagcgcaaagcagtgagggcagtacatgttctttttgcatttttaattattgtaatccttttagataatgatgtgttcatttgaactaactacatactatgatcaagtatattgcatccct

SEQ ID NO: 144192 - DNA, 1338 bp, Homo sapiens
ccgcctccttgaagctgccgctgtcgctgctgctcgttcgagtcgcagatccttgccagcacattacagaatatttttgttgaaccttcttgagaattcagagaaactgctgagtgaccactgaacgaaaagatctaatcttaaggcttacgcgtgttccatccaccacatcagaacaatgtcggtatgtttttgtaaatgattcttctcagactaacggtgcccttgctgcaagccttgttattgatggggactttaattattccaagcggcttttggaaagtggctttgacccaaatattcgtgacagcaggggcagaacaggccttcaccttgcagcagctcgagggaatgtagacatctggccagttactggcataaaattcggtgccgattcttctgggccacagatttattcaagggaaacacagctctttcacctctgtgggccatgtgggatactatccaatttttggtttccaatgggactcaaaattgatatttgcaatcatcaaggtgctacccctttagttctgggcaaagcgcagaggagtaaataaagatgtcatccgattgctggaatctttggaagaacacgaggtgaaaggatttaacagaggaacccactcgaaactggagaccatgcaaacagctgagagtgaaagtgccatggaaagccattcactcctcaatcccaacctgcagcaaggtgaaggagtcctctccagcttccgaaccacgtggcaggagtttgtggaggatctgggcttctggagagtattgctgttgatcttcgtcattgctttgctgtctcttggcattgcttattatctcaaaatactccacatggtcctgtggcatactgcagacctcttcaccctgcaagtctttggtctagaataccctgccggacgccagcagcccgcccacaggcctaagctcagggcccaagctcctgagctcctcttccaggcctgtactgacgctggcccagtttcaacacatctcatttgggactggccaaataagtactcagtagccacatggccagtggctggtaccctggacagtgcagtcacagacatatgtcctctgagtattcctggaaggtcccctgagaactatgacgttaagcggtgggcagtggctctgagcacacagctgcagcctagcgaaccagaggcccaggtctgtctgaggtcacgaggcacaaccaaagacaatgaagaagaatccggagcctctctcaattctcccaatcctgggacagggcaggatccctccagatccaccttttctctgtcgtctcctggatcagtctgctcagacctgggctga

SEQ ID NO: 144193 - DNA, 1162 bp, Homo sapiens
ccggttcgatccacgcgtccgcccacgcgtccggcctgcaatggacccggcttgtctgtgctgtgcttcatgcgtcacgacatcctggagtatttcagtgtctacgggacagccctgagcatgtgggtctcgctgatggcactggccgacttcgacgaacccaagaggtcaacatttgtgatgttcggcgtcctgaccattgctgtgcggatctaccatgaccgatggggctacggggtgtactcgggccccatcggcacagccatcctcatcatcgcggcaaagtggctacagaagatgaaggagaagaagggcctgtacccagacaagagcgtctacacccagcagataggccccggcctctgcttcggggcgctggccctgatgctacgcttcttctttgaggactgggactacacttacgtccacagcttctaccactgtgccctggctatgtcctttgttctgctgctgcccaaggtcaacaagaaggctggatccccggggaccccggccaagctggactgctccaccctgtgctgtgcttgtgtctgatgctgcgcccagcccggctctgagcccctggccctccccagctcacacttggccagagtcccagacaggttctcctcctgcagctcctgctgtccttccctgccctggagcatccaggagaaacatctcttccacaccctgagagggttcccggggtctgtgaagggcccaccatgctgcactaaatgcttcttaagaaactgctaattcccttgtgacggggtgcgcaggacacaactgtgaagataaaaaggttttcttccaggccttgtcacaaccactggcgtgtctggggaaacctaggctgcggatgcccaccccctgggggccggagccagaagtcccaaccgggggccccctgacaggaggggcttccatgacttaattgtatctaggaaacgcgaacacaaatattgtccttggcctcagcatcccgacagccccctattaaaagatctcgcactcgtgtcacctgtacacttacgcaaacccttgtgcgcgcaccgtcagcgggtgcgccggaaagacgctttcaatgataacatagaatgcggcgatgtcggagattaagaaacgaatcataaagggagacgctcttagtgaaccg

SEQ ID NO: 144194 - DNA, 1404 bp, Homo sapiens
ctccaccatgcctgcaatggacccggcttgtctgtgctgtgcttcatgcgtcacgacatcctggagtatttcagtgtctacgggacagccctgagcatgtgggtctcgctgatggcactggccgacttcgacgaacccaagaggtcaacatttgtgatgttcggcgtcctgaccattgctgtgcggatctaccatgaccgatggggctacggggactgggactacacttacgtccacagcttctaccactgtgccctggctatgtcctttgttctgctgctgcccaagcaagcagccagcacccccctttcccgcttcgcagcagcagcacatggaaagttggaggcggcaggccactccgagcagggcggcgacgagggccctgccaagcgcgaagggccacactggcaggctcctcactgcagcgatttacgaaggccgcccaaagcctggccaagtctctgcggccacatctggaagacgtttgggcagagttcggcccccgcaccacagcaggctgataagcgtctgctgctggcttggagctccgggaagctgcagcctcagaccaccggccctggctgcctgagccttccagagataagggcgatttcaaactattttatcgccatcatcattattgttctaactggtactgagcccctcactagcccctccaagctgccctcttctgagccgtccctctactcagccctcaccttggggagcgtcccacctccacagggtccacaggagcacgctgaggccgtgttctgcctgggccagggctgtcagacctccatggaagggtcctggggagacacagctggaggtgtctggaagctgcgttcatgtgggccctgctggtccttcaggctcgagaacacgatgtccacaggctcccaggaactgcaaggcagtaggggcagcacgctggactatggtctgcccagagacagagacagaggaagcgtacagccccccggctgccccatcatggacaccgaggcccaggcccccaacactttcctggagcccacattagcagcagctttggcaaggggtgaagaagacccccagagtgggatgagtattcccggcatctgctccccgcctcccaccttcccaagacacggcagccctactgtcccctcggagacctcggccctggtgccaggcctggaatgcagcttggcccgtttccggggaactgggaagctgtcagactggtctggagggacctttgtcaaactgcatcaacgcggccagctgccctccccctgcacggcagcggtgagaactgtcacccatggccctgatgatgatgagaccatccctataaactttataaaattaatcaaggaagaagagaggaggagaaatgagaataaaccaggcttgtag

SEQ ID NO: 144195 - DNA, 850 bp, Homo sapiens
  misc_feature (1)...(850): n = a,t,c or g
gccccccaccgctttaaattggtccctaaacccccccccttttnttttttaaaatttgaattatttttttttcaggccgttccagcctgggcttttcatttttatatattgatgaaaatgtcctggccccataatcccaggaaccctgagcggcccccttggaggagtgtggtaaacaacaaccggtctggaaggcaggagtctggttcattcttgtatggccttgcccaagtcccaccccttcctcagcttgtttcctcagctgcaaaatggagatgaaggctactatccttttaggtattgtgattcattatgtcaggcagaccatgacgaggcgaatggacagatccagaggcagtgcccagcgtgttgacacccgggagatggcaaaggggatgatgatttctgcagggacgtagaactgcagggcataggtgcacaggatgccggcaatgtagagaagcttgacagactggtacagccagcagataggcaggctgaggattatgctgcccttggtgtcggtctccaaaccgcaggtagcccagagccgccatgccaatgtatagggaagtgacgatggacattcccaaagacaggatggctgggaagtggcgggcattcttcatcttgttttccagaggcagaaccacaccaatgctttcaaaagaaaaaatggctgttccgaagaagagagggtaggtcttccagcttgctaccagtggcaaccggctggggtctgggatttcctgggtaatgtactgtatgatgatgaccaagctgaccagcatgctgatgttggccagcatggagaagatggtcaagatcctgaggttccggatgaggacca

SEQ ID NO: 144196 - DNA, 1098 bp, Homo sapiens
atggactcgcgactctacatgctctccttcctgcccttcctggtgctgctggtcctcatccggaacctcaggatcttgaccatcttctccatgctggccaacatcagcatgctggtcagcttggtcatcatcatacagtacattacccagattattactatgactgcagtcacaggaatttccaacacccatgaccactgtccattcaaaggtgttcgtgggctcgttgggtcagtgctaatctgtgtcctgagggctcttcagtcagcttttggtgcatgctgcctggcctgggactcacccttcaaggcagtgggctaccctctggcccaggacaggtccagaaatgccatccaagagccaagtcctggaattggggaccccaagagcctacttggtgctctacccctgtggctgagctggtatttatacaaggcaaatgaaagcataaaacttacgtccacaaaaaacgtgtatgcaaatatttatgacaacatgactcataataggccaaaactaaaaaccgtccagagatccatcaactgcaatggaagctccatctctcccttgacagaagaaccacccaaactggctagtgctccttttagtgccaagaacaatgatgggttttgtcatgctgatactggcagccaaccacctttctctcactacctaccacctattatcacacaaccaccgctaaagcccttagctatgtgggcctgtggcttaagtgaggttccggctgggatattaaaagtgcttattgctgaagattctgagtcagtaggcctgcagctcaggaatagggagaaagagttcaagaccaaggaagctgcagccctggaatctcacagcagccttggcactgaagtggcacaggagggtcagaagaagaggaccagcctccagaactacttccagcagaatgggggtgaaggcttggctagtctcttggcttttgtctgtgacacctggacagaaatccatgaaaagtgctgcataaatgaagaagagtgggagaaagaagcgcctgtaccacggattggcattttagatgccctcgaggaatatgcagctcgagatatattcttatga

SEQ ID NO: 144197 - DNA, 984 bp, Homo sapiens
atggccgaggtcactcacaggcagactgcagctgcagccctgcatgagcttgatgagctccaagatgagctgatgagtgctgtgatctgcactagccctggaatcaaccagaaaaaggcagactcaccaggctccagagctgagggacattgcagctttgcaacctggtctcttgagatgaccgcatccatccctaagagcttcaaaatcatcagtatgctgccaacgcccaagtttatagctgtagtcaagactttctctgtgaatttccaactcacatatccaactgctgcacttggagacctcaagtttcttctcaaaatccaacatcttatgatcaccatttccccaaaatcaaagaaaaggatttcttttaaatcctacgactatacaagcctccttgatgttcctgctgaagaacccagcactgaatggggtgttaggccctcttgtcagctgctcgtttccatcacccacaccacaggcgaagcactgaaggctgagaccatccctgatggtctccggggatacccgatgtactcagctcggtctacttcggtccacgtccccagcacctttgccatatctgtcaagtggaaaacagcctttaccatccctgccattaagggtgtgggccaaagatatgttcatgtggtgttgaggaaagcagacattgactgcaccaagagggcgggagaactcactgaggatgaggtggaacgtgtgatcaccattatgcagaatccatgccagtacaagatcccagactggttcttgaacacacagaaggatgtaaaggatggaaaatatagccaggtcctagccaatggtctggacaacaagctccatgaagacctggagcgactgaagaagattcgggcccatagagggctgtgccactcctggggccttcatgtccaaagtcagcacaccaagaccactggccgccatggccgcactgtgggtgtgtccaagaagaaataa

SEQ ID NO: 144198 - DNA, 698 bp, Homo sapiens
gggggaggggaattgacggcttaatagaccgcctgtagaattcggcatgggcacgccggccgcttgtgctgcagcccatgtctcttagtgatccccttgaaaagttcccagcatatttttgcgagtactcaaccccccaaacctcgatggccggcggaaaatagccctttgcccatcactgcccatttaagggtgtgggcccgaagatatgctccatgtggtgttgaggaaagccgacacttgacctcaccaaagagggcggggagaactcacttgaggatgaggtggaacgtgtgatcacccatttttgcagaatccacgccagtacaaagatcccaagactggttcttgaacaagacaagaaggatgtaaaaggatggaacatacagcccaggtccctagccaattggtctgggacaacaagctcccgtgaaagacctgggagccgactgaaagaagattcgggcccattagagggcctgcgtcactttctgggggcctttcgtgtccgaggccaagcacaccaagaaccactgggccgccgtggccggcacccgtcgggtgtgtccaaggaggaaataaggtctgtagggccttgtcttgttaataaaatagtttatataccaaaaaaaaaaaaaaaaaaaaaaaaagtcgacgcggccgcgaatttagtagtagtagtagtagtaggcggccgc

SEQ ID NO: 144199 - DNA, 1203 bp, Homo sapiens
cgacttttaaacatcccatccaattagactgtcactgtcaaccagcttaacgcccgtaacgcaaaggagcattttccatttcataggcctggccttttgcccgtgatgtgtgctgctatgcaggggcctctccccagcatcacaccgacaggcaccacggcccacttgggggcccagcactcccatacctcctccacagccaacctgctcacctgagcctttccaacagattaaaaggtacctttggttaagagtccccttgtgcagtacgggcccaggtaaatacttcaaggtgtttcttgcttcttgggttgagtggtcagtttcagattttatatgattgggagaattccgtgaagtaacagaagcctttctttcctcagccaacacaattcccagagaaaccaagaagagcattgtggccattgtcatctggcaagaacctcttgtcaacggcgcacaccaggagatggtccggcaggctgggggacttgacccccacgaggagaaagcccgcagggacatccatgggctcgttggaaatggagacaaggcgcaggtccttcccggcctggcaaaacccgtctgtggtacagcatccttcaggcagagggtgcagctggaaaggggttggggggccatttgtttccagccctccttctccctcttcttcctcttcctcattgtccactcggctaccaccttctagagcggcaaggctgctgttcagcttccaggtacagctgggaaaagatgggcctgggcaccaggttgttggaccgcagggatgcctcgatggaattgtgcaagacctcttcaaagcgtgtcgtcttcacgctgtccagcgtaagaatttcccatcttcaagaggatggagtcttctgtttaaaatggcatctcagattcggtgcaaaagcctggctccacgcaaggtagaaggtgaaacagctgcaaggaggaagggccgtgtagccttcgctcagcagagacgaagaaagggtggctgtcctcagctgcagctactgaactcactttgttgttttctgctccaaacaaagccagaggggccagaggagagcccttcctatgggcatcaaagtacaagatgtgcgctttgattctttctccatgaacacactgctgctcagccgcgccgtgtctggaattccaccacacggactagggatcaacaatgccgtccaa

SEQ ID NO: 144200 - DNA, 3006 bp, Homo sapiens
atgggaaattcttacgctggacagctgaagacgacacgctttgaagaggtcttgcacaattccatcgaggcatccctgcggtccaacaacctggtgcccaggcccatcttttcccagctgtacctggaagctgagcagcagcttgccgctctagaaggtggtagccgagtggacaatgaggaagaggaagaagagggagaaggagggctggaaacaaatggccccccaaaccctttccagctgcaccctctgcctgaaggatgctgtaccacagacggtatcttgtcaaactccgggccccccaaaaaacgccacaaagggtggtctccagaatctccatcagctccagatggtggctgcccccaaggtggtgggaacagagctaagtatggccatgggaacttcccttacctctgtgggaacctgaatgacgtcgtggtcagccccctcttgtacacgtgctaccagaattcccagtctgtctcacgggcatacgagcagtacggcgcctctgccatccagcccatctccgaggagatgcagctcctgcttaccgtctactacctggtccagctggtcgcacctgaccgagatccggcagtaccagcaggcgccgcgcagcccttcccgcccgcgcccagccgctgcacccgtgacctccgcgcactgccctggctggccagcctggccgccagctcctgcaacgacagcgtgcacgtcatcgagtgtgcttactccctggccgagggcctctccgagatgttccggctgttggtcgagggcaagcttgccaagaccaactacgtgcgcgcggccatcgactcctgcatcgccgtcaccggaaaataccaagcccggattctttccgagagccttctcactcctgcggagtaccagaaggaagtcaattacgagctggttacggggaaggtagactcgctgggggccttctttagcaccctctgtccagagggtgacattgacattttgctggacaaatttcaccaggaaaatcaaggccatatttcttcctcactcgctgcctcttctgtcactaaagcagcatccctggatgtcagtgggacaccggtgtgcacaagttacaatctggagccacacagcatccggcccttccagctggcagtagcgcagaagctcctctcccatgtgtgttccattgcggattccagcacccaaaatctggacctgggatcctttgagaaggtggactttctcatttgcattcccccctcagaagtgacctaccagcagactctgctccatgtgtggcattcaggggttttgctggagcttggtctgaagaaagagcacatgacgaagcagagggtggaacagtatgttctgaagctagacacggaggcacagacaaaatttaaggcttttctgcaaaactccttccagaacccgcatacactttttgtcctaatccatgaccatgcgcactgggatcttgtgagtagcactgttcataacctctattctcaaagtgacccgtcggtgggattggtggaccgattgctcaactgcagggaggtgaaggaggcccccaacattgtgacacttcacgtgacctccttcccgtatgcactgcagacacagcacaccctcatcagcccctacaacgagatccactggcctgcctcctgcagtaatggagtggacttatatcatgaaaataagaagtacttcgggctgtcggagtttattgaatccaccctttcaggacacagcctccccttgctcagatacgatagctcctttgaggccatggtcactgcattaggaaaaagagatgacaatgagcggaaatatgctggaatgtggaattatgtttttgagccaatggaggggttttgccaggccgggaaggacctgcgccttgtctccatttccaacgagcccatggatgtccctgcgggctttctcctcgtgggggtcaagtcccccagcctgccggaccatctcctggtgtgcgccgttgacaagaggttcttgccagatgacaatggccacaatgctcttcttgcacactgtgctggaacagccagtcccatcttggcagagaagtacttcctgccttggggctgcaggtttgccatctataaaggggataaagatgtacgcggtttctctgggaattgtgttggctgtggaaagaaaggcttctgttacttcacggaattctccaatcatataaatctgaaactgaccactcaacccaagaagcagaaacacttgaagtattacctggtccgtaatgcacaagggactctaaccaaaggacctttaatctgttggaaaggctcagctttgcccttcatggccacagtcagcaacgcaggtaaatgcctcctgagcccctactacttgccagtcatttctcaggcccagaggctgcagtggttctgccccgtgtgggaccagttcaccgtctttgatcacctgctgggtccaagcacctcagaggttccccacctcactggccgctggggatggcctttcccagaggaggaaataagggtggaagatgagtttagaagccggcagatccccgccagtacttgttccagttccctcttcccagccctggagagcacggctgccttccccagcgagcccgttcctgggacgaaccccagcatcctgatgggagctcagcaggcaggaccagcttctgatcacccctcactaaacgcagcaatgggtccggctgttttcaacggcaaagattccccgaagtgccaacaactggcaaagaataacctgttggccctgccgcgaccatcggctttaggtagctctgcctgtcctggccgtcctggggatcctgctcttctttgggccaaggccagagggggcatgggagctgctgggctggggccgctgagcctcctggagtctgatgtggcttccatgagagtcaggccaggaccacaggtgcctcctgagtccgtgggtctgggcccaggccctggtgctctatga

SEQ ID NO: 144201 - DNA, 1536 bp, Homo sapiens
atgaagctcttagcaaaagcacctctaaatctgttacgcgcctttgaagcggctggtcgtaccggagcttttgcgttggccgcctctgagttggaactgtcacccagtgcgatcagccatgccatccgcaaactggaaaacttgcttgatgtacgcctttttcagcgcagtacgcgagaaattacgctgacgaaagaaggtgaaatactgcttgagcacatacagcggggatttaacgaattacagcaggggttggcattagtgacggctgatgaatccaggcctttgcgccttcatactgcaccgagttttgcccatcaatggcttttaccacgtcttggtcaccggcgatgttgtattcataccgcgtttcatggccctgcgtgtctttcacggcaattaactgtccacggctgtcgtatgcgcggtactgactctagcccttcctcgtcggtgcaccgccgtcatctgcccgaagcggtcatggtcataacgggttacataaccggaacagtcggtgaagctcagcaactgaccgtaacggctccacgtcatggttttccggctgccggtggcatcttccgttgcgcaggcccgggttcgcctgcgtttgcggattcccggggtttccgtctgggcttcttgcattctgggacagccaagtctgtgacttgcacgtactcccctgccctcaacaagatgttttgccaactggccaagacctgccctgtgcagctgtgggttgattccacacccccgcccggcacccgcgtccgcgccatggccatctacaagcagtcacagcacatgacggaggttgtgaggcgctgcccccaccatgagcgctgctcagatagcgatggtctggcccctcctcagcatcttatccgagtggaaggaaatttgcgtgtggagtatttggatgacagaaacacttttcgacatagtgtggtggtgccctatgagccgcctgaggttggctctgactgtaccaccatccactacaactacatgtgtaacagttcctgcatgggcggcatgaaccggaggcccatcctcaccatcatcacactggaagactccagtggtaatctactgggacggaacagctttgaggtgcgtgtttgtgcctgtcctgggagagaccggcgcacagaggaagagaatctccgcaagaaaggggagcctcaccacgagctgcccccagggagcactaagcgagcactgcccaacaacaccagctcctctccccagccaaagaagaaaccactggatggagaatatttcacccttcagatccgtgggcgtgagcgcttcgagatgttccgagagctgaatgaggccttggaactcaaggatgcccaggctgggaaggagccaggggggagcagggctcactccagccaccgaagtccaaaaaagcagtgtaggaccgcctctactattcgggatacagatgttagccaccatggtctgagtccatatattattgatttatcgatctactcactcatactgatttattctccaatgtga

SEQ ID NO: 144202 - DNA, 2652 bp, Homo sapiens
atggaaaacttgcgtgatgtacgcctttttcagcgcagtacgcgagaaattacgctgacgaaagaaggtgaaatactgctggagcaatacagcggggataaaccagaggaggaccggtctgtggtggtctgttcgtcattagaagatttcttccagggcctcaaaagtgcttccggaaacatcggtatccacaaccgaccaacaggtttcccagcaaacggggccaagatttccgcatattgggttatacccccccccggaaatgcagctgccggtgttgatgatggaaccattatcgctctgacctgtgtttggctactgctgtcctcttttacagctacgttacccgttcctgcgtggctgatacccgtaacgccagtagttaaacaagatatgactaaggatattgctcatgtggtgatgcgcgatagtgaggcgctaagcgtgttatacggcgtatgggggtacgaggtcccagctgattcggcctggtgcgatcaggcagtaagagcggggctggcatgtaaaagtgggaatgcttctttacaaacattggtagatcagaatttgccctggatcgcatcgcttaaagtcggggacaaaaaattgcctgttgtggtcgttcgcgtcggtgaggctagcgttgatgtcctcgtaggtcagcaaacgtggacgctgacacataaatggtttgagtcggtatggacgggtgattatcttctgttgtggaaaatgtcgccggaaggggagagtaccattacgcgtgatagcagcgaggaagagattctctggctggaaacgatgttaaaccgcgcattgcatatttcgacagaaccttcggcggagtggcgtcccttgttggtagaaaaaataaagcaatttcaaaaaagccaccacttgaaaactgacggtgttgttggcttttcaacgttagtacatctctggcaggtggcccatgctcgtgctgtatgcctcgctggacgcaacactccgttggtgcgccaaaacattcgtacgatggcgatgatccagctgctgctcggcaatatggggatggcaggcggcggcgttaacgccctgcgcggtcactccaatattcaggggctgacggacctggggctgctgtcgcagagcctgccaggttacatgacgctgccaagcgagaagcagaccgatctgcaaacctaccttaccgccaacacgccaaaaccgctgctggaaggccaggtaaactactggggcaactacccgaaattcttcgtctctatgatgaaggccttctttggtgataaagcgacggcggaaaatagctggggctttgactggttgccgaagtgggataaaggctacgacgtcctgcaatacttcgagatgatgaaagagggcaagaaccacggtgagctgaacgaagttgactcgtcgaagatccagaccgaagtgttccgtctgccatcgacctgcttcgcggaagagaacggttctatcgttaactcaggtcgctggttacagtggcactggaaaggtgcggacgccccggggattgcgctgactgacggcgagatcctctccggtatcttcctgcgcttgcgcaagatgtatgccgaacagggtggcgcgaacccggaccaggtgctgaacatgacatggaactacgccattccgcatgagccatcttcagaagaagtggcgatggagagcaacggtaaggcgctggccgatattaccgatccggcaaccggtgcggttatcgtcaagaaaggccaacaacttagttcgttcgcccaattgcgcgatgacggtacaacctcctgtggctgctggattttcgccggtagctggacgccggaaggcaaccagatggcacgccgtgataacgccgatccgtctggcctcggtaacacgctgggctgggcatgggcatggccgcttaaccgccgcattctgtataaccgcgcctccgcagatccgcaggatatattgataactcagaaaccagtaaaatgcaacaagacgcaccacgctgggaaaatcgctgctattcagcagagttttgtatcgatgaatggtggccaggccacttattgctctcgcgtaagcgggtaccgtgacattctgcctgaacttgacctggtactgtggctgattaaagccgatgaccgtgccctgtctgtggatgagtatttctggcgacacatcctgcagtgcggacatcagcaggtgctgtttgtggtgacgcaggccgaccaaacggagccctgccatgaatgggatatggccggtattcagccttctcctgcacaggcacagaatattcgcgaaaaaacggaggcggtattccgtctgttccggcccgtacatccggttgtggccgtatcggcccgcaccggctgggaactggatacgctggtcagtgcgctcatgacagcgcttcccgaccatgccgccagtcccctgatgacccgactgcaggacgagctgcgcacggaatctgtccggtctcaggcccgtgaacagtttaccggtgcggtggaccggatatttgacacggcggagagcgtctgtattgcctctgttgcacgcacggttctgcgtgccgtccgtgacacggtggtctctgttgcccgtgcggtatggaactggattttcttctga

SEQ ID NO: 144203 - DNA, 1065 bp, Homo sapiens
tcatccacatttttcggtccggctgacgcgatcgcgaatttccaccaggtcgtacactgggccaaaaacgttttcgagcgtggcgagcgcgaaggtgaccaccatctgcgcctgaaagtgggtaaagaccttggtctgaccgacgaaagcaaatgggcaccgctgtgggttatccgacttcccgatgtttgaagacgacggtgaaggcggcctgacggcaatgcaccatccgttcacctcaccgaagaaaatcatatcgccatcttgcgcggcagtacgatccaggatgtcttcgatgatttctgcattaaggaacttcgctaccgggccagtgcgatcagccatgccatccgcaaactggaaaacttgcttgatgtacgcctttttcagcgcagtacgcgagaaattacgctgacgaaagaaggtgaaatactgcataatccgtgtagctaatagccggtaccgcttgatcatatgatcctgatagcggtttaacggttcgagatacaccacggttccggtacgcgcggcgacctgttccagtacgcgcagggaatcactcaccattttgcggtcgccgtccaggctacgcggcgaggtcatcggcggtaagcggaaggtaaacatgccccacgcagccggaacgacgatgcctttaccgcccacttctgccagcgcttcgagaatgcgctcgatctgctttaagccattaagacgacgctcttcgataaagtcgccaatccatccgtcatagccaccgcaggcggtggtcaccggtaaaccggtttctttgatcgccgctttgacttcctgaacatgggtgttggtgaagcgatcgctgacaaaaaactgctggataacgcagcagcagacctggcagcaatctccggtcaaaaaccgctgatcaccaaagcacgcaaatctgttgcaggcttcaaaatccgtcagggctatccgatcggctgtaaagtaactctgcgtggcgaacgcatgtgggagttctttgagcgcctgatcactattgctgtactcggtacccttcagaatgtctaagattttaatcat

SEQ ID NO: 144204 - DNA, 882 bp, Homo sapiens
atgaaactgatgtttgcatcggacattcatgggtcgttaccggcgacggaacgtgttctggagttgtttgcccaaagcggtgcccagtggctggtgatccttggcgacgtgttgaatcacggcccgcgtaatgctttaccggagggttacgcgccagccaaagtcgctgaacggcttaatgaagtggcacataaggttatcgctgtgcgcggcaactgcgacagcgaagtggatcaaatgctgctgcatttcccgataaccgcgccgtggcaacagttgtaccagtggaaaggatggtttgaggcgaataagatgacgccacccaataattatggccttcgatttgaccgtagctttatggcgattgctgccgcagttgacggcttgggagttgtgcttgaatcaaaactactggctgaacgtgaaatcgctagcggtaaactgagtgctgataaccattccgaaggtccatgtgagccgtttaccttggacttcggggattctctacgagaccttggatcctcctgcaaaatcaagcccttttttcaaccgggataccagtcagctgaaggaacggtactttccaccgggaccggaacggaaagaccgactcccctaaccgtcttccttattcaccgcgcacatgagataccacagacagcacgccacagacacacggcgctgcacagaagcctcaacaaccaccaaacgacaccaggatcaccagcaacacacacgacaagcacatggagccatgagagaaaaaccaacagaaaacaattaaactttgtgttattgttgctggataaaatctatgtatttgagaaaaatatatttcaaagccttttcatctttaaatgttattcagtagttgaaggctag

SEQ ID NO: 144205 - DNA, 1032 bp, Homo sapiens
aggaaaggagattttggcctggggggaaggttttttttccgctgagcaccccagggtggtccgagggaaggctagacccgctggtcgaggggccaaaattcagtgaaccgcttcatcgctaggaaaaagggttcatgaatgaagctgttagcaaaagcccctgtaaatctgttacgcgcctttgaagcggctggtcgtaccggagcttttgcgttggccgcctctgagttggaactgtcacccagtgcgatcagccatgccatccgcaaactggaaaacttgcttgatgtacgcctttttcagcgcagtacgcgagaaattacgctgacgaaagaaggtgaaatactgcttgagcacatacagcggggatttaacgaattacagcaggggttggcattagtgacggctgatgaatccaggcctttgcgccttcatactgcaccgagttttgcccatcaatggcttttaccacgtcttggtaagttcatacgtgagaacccaagcatcgatctgcgactttcagccagcacagaatatgcacgttttgaacaggatgattttgatctcgatatagtttacggtgaaccccgcccatcaccctatgagaagatcccgcttgctgttgaagaacttacgccactgtgttctccccagctggctgagcggctaaagaaaccagaggatctctatgcgttgacattgattcagtgcgatgtgcagttgtaccagtggaaaggatggtttgaggcgaataagatgacgccacccaataattatggccttcgatttgaccgtagctttatggcgattgctgccgcagttgacggcttgggagttgtgcttgaatcaaaactactggctgaacgtgaaatcgctagcggtaaactggtatgcccacttgtaaacagtaccagcgaaatacattacatcggtcattatttggttttcccccagcaccaacacatgcattctgcgcttgatgtgttcaaaacctggctactgaatgaactcaatctgggtaaaattcgttga

SEQ ID NO: 144206 - DNA, 1566 bp, Homo sapiens
tcactgcaagcgaatgccggagatgtaataagcatcatcggatcgtcgggatcggggaaaagtacctttctgcgctgcattaacttcctcgaaaaaccgagtgaagggtcgatcgtggtcaatggccagacgatcaatgccgttgccatcagagcagctggttcttggtacagctatattcatatttagtcccaaggtgtagttgctaaatagagctggatttggaaccggattaatggtttgaaacgcctgcccaatatacaaatagatcgccagaaagtggcacacactaccgccgagcacgaagccgtgccagatggcatggttgtatggaatgcgtttgcagacgtagaaaatcaccccgagcgaataaaccacgccgcctaccgccagtaaggtaacgctgcccgccgcgagcttaactgccatttcataaattaccaccagcgacagccagcccatcgccagataggtcaccagagataaaattttgaatcggtgcgcgatggtcagtttaaacagaatacccagcaatgccaggctccagataacaatcatcaacccgcgcgctaacggagaatccagccccaccagcaaaaacggcgtgtaggttccggcaatcaacaggtaaatagcgcaatggtcaaatttcttcagccacatttttgcccgttgatgaggaatggcgtgatagagcgtcgaagcgaggaacagcaagatcatactgccgccatagaggctgtagctggttatcgctgtggcgctggcattaagatccaccggctgaaccagtagcaacaccagcccaacgataccaaacaccaacccaatgccgtgactgacgctgttggctatttcctcactggccagatcttcatcgatgatctgacggataaagttagtcgggcgggcttctgcctcactcatcgtggattcctcaaagcgtaaacaacgtataacggcgtatgattttttgatttcatacagcggtgtttgacccgccacaatatggccctgagctttaatgatcaagccactgaaatcgtcgatattgctgcaaaccaccgggctaatcatcgagcgggcgttagcgttcaggtaatccagatccatttccagaatctgggtgtccggattggtggcgataaaacgtgcaccgttagcgacgaaataggctgctttatgcatcatgtcccagttgtaggaacgcgtttcgccaacaatcacgaaatcagggttcacatcggtaatagtgaaaccggctttgtacagttcataaatcagtgcgccttcgcccaccacatacgctttcttgccttcctggcgacgcaggaaatcggcagtcgccatcgcagaggtataaaacacgctgtcaggtacatcgacacctgcggtggcaaagcggttcgccagatcttgcccagtctgcgaaggatagttggtcagcaacaccagcggcaggcctttatccataatcccgtgcaaaaattccgctgcacccggtacggcgacgttatcgtgcatcagcacgccgtcgatatcgcaaattacatttttaatggtcat

SEQ ID NO: 144207 - DNA, 1650 bp, Homo sapiens
  misc_feature (1)...(1650): n = a,t,c or g
atgggacacgcggcggaaagttatacgctattgaccattggcgacggtctggtggcacaaattccggcgctggtgatttctaccgccgcgggggtcatcgttacgcgtgtcagcaccgatcaggatgttggcgagcagatggtgaatcagctttccagtaacccaagcgagatctttttgcttgctgaacgggatgcggcaacgttgctggcgctgctgaccagcgatgatgcgccgaccgacgacgtgttaagcgcggagtttgtggtgcgcaatgaacacggcctgcatgctcgtccaggtaccatgctggtcaataccattaaacaatttaacagtgatattaccgtgacaaaccttgatggtaccggcaaaccggcaaacggacgtagtctgatgaaagttgtggcacttggcgttaagaaaggtcatcgcctacgctttaccgcccagggtgcagatgctgaacaggcgctgaaacatatcggcgacgctatcgctgctgggcgcataatgagcagacgtgttgctactatcacccttaatccggcttatgaccttgttggtttctgcccggaaattgaacgcggcgaagtgaacctggtgaaaaccaccggtctgcatgcggcgggtaaaggcatcaacgtggccaaagtattaaaagacctgggaattgatgtcaccgttggcggcttcctgggccaaccagtatcgcgtggtgctggagccaacaccgaaaataccccaggcctcgcggcgctggataccattcgcctgaccagcagcgacggcggcgtggtgccgctaagctcaattgccaaaattgagcagcgttttgcgccgctctccatcaaccatctggatcagttcccggtaacgaccatctcctttaacgtgccggataactattcgctgggcgatgcggtgcaggcgattatggacaccgaaaagacgctgaatctgccggtggatatcaccacgcagttccagggcagcaccctcgccttccagtcggcgctgggcagcactgtctggctgattgtcgcggcggtggtggcgatgtatatcgtgctcggcattctgtacgagagctttattcacccgatcaccattctctcgacgctacccaccgcaggngttggcgcactgctggcgttgctgattgctggtagcgaactggatgtgattgcgattatcggcattattttgctgatcggtatcgtgaagaagaacgccatcatgatgatcgacttcgcgctggctgctgagcgcgacataggcatgtcgccgcgcgaggcaatctaccaggcttgtctgttgcgttttcgtccgatcctgatgaccactctggcggctctgcttggcgcgctgccgctgatgttgagtaccggggtcggcgcggaactgcgtcgtccgttaagtaatcgcatggtcggcggtctgattgtcagccaggtgctgacgctgtttaacacgccggtgatttattttgctgttcgaccgcctggcatttgtggaccaaaagccgctttgccccgtaatgaagaggaagaatccagcgcattaacaccgctttccacgcagccgaagcactggtcgaaaccttcatcgcgcacgtgttcgacgcaccatcgcaaatcatgccgctga

SEQ ID NO: 144208 - DNA, 1206 bp, Homo sapiens
  misc_feature (1)...(1206): n = a,t,c or g
tcaggcaggtgatgtggcctttccgggcctcagtttcccgatctgtgaaatggtcagaacttctccaggtgcccgtgaggaccagactggagggaacgcattgcagaagtgtaggtgggcatggacgctcaataaacaacaggagccgcggttaatttctttctctcgcggaagaaaaacacagccaacattgcaaaagaacggctgcagattattgttgctgaacgccgtcgcagcgatgcagaaccgcattatctgccgcagttgcgtaaagatattcttgaggtcatttgtaaatacgtacaaattgatcctgagatggtaaccgtacagcttgagcaaaaagatggcgatatttctattcttgagctgaacgtgaccggaagcagaagagctgaaataagcccgggcngtcgccattaacgcgtgttcagcttccataatatccgggcgctgcaataagatttgcgacgacaatcccgccggtaatttaacgctttgcaggctgtcgctgtttactgtctgcgcttgcggcagcttgccgtagcttcccagcaacagttgcaatgcattattcgcctgcgccagttccccctgacgtttagcgatgtcgctgcgggtactttctatcaccccgcgagcctgttccagcgccagaacattactgctacctgtcaacagttgtttttcgacaaacgcatatgactgctgataattacgcagcgtttcttcggctatttgcaattgcgcatacgccagttgctgattgaaatagctttgcgcgacattagaaaccagcagaatatgcaccgcgcgctgagcttcctcagtggctaaataattttgtcgctcggcttcgctcatgttctttaagcgaccgaaaaaatcgaggtcaaagctggcgttaaggccggtcgaaaactcccgtgtcgtggcggtattccctttaagattaccgctccagctgccgctgccctcgccattgagctgtgggtagcggtcggcatcggtcagacgatattgcgcccgtgcctcctgcactttcagcgtcgccatgcgcaaatcccgattattcaccagcgcctcgctaatcagcgtcttcacctgattatcaacaaaaaaggtgcgccagcccgcgttctgatagttatctgctgcgttaaccaggccgttctggctgagtgagaactgctgcggcacgggcat

SEQ ID NO: 144209 - DNA, 3348 bp, Homo sapiens; identical to SEQ ID NO: 139624

SEQ ID NO: 144210 - DNA, 3534 bp, Homo sapiens
atgccggacagattcatttcacctgccacccgcacagggaagttcgtaccggcaaccctgaaagtgaaaaacctgaacggacagaatggcaccatcagcctgcgtgtacgcccggatatggcacagaacaatgctgacagactggtcattgacggcggcagggcaaccggaaaaaccatcctgaacctggtgaacgccggcaacagtgcgtcggggctggcgaccagcggtaagggtattcaggtggtggaagccattaacggtgccaccacggaggaaggggcctttgtccaggggaacaggctgcaggccggtgcctttaactactccctcaaccgggacagtgatgagagctggtatctgcgcagtgaaaatgcttatcgtgcagaagtccccctgtatgcctccatgctgacacaggcaatggactatgaccggattgtggcaggctcccgcagccatcagaccggtgtaaatggtgaaaacaacagcgtccgtctcagcattcagggcggtcatctcggtcacgataacaatggcggtattgcccgtggggccacgccggaaagcagcggcagctatggattcgtccgtctggagggtgacctgatgagaacagaggttgccggtatgtctgtgaccgcgggggtatatggtgctgctggccattcttccgttgatgttaaggatgatgacggctcccgtgccggcacggtccgggatgatgccggcagcctgggcggatacctgaatctggtacacacgtcctccggcctgtgggctgacattgtggcacagggaacccgccacagcatgaaagcgtcatcggacaataacacttccgcgcccgggttcgacctacagccatttcttaatggcagcatcattggatcaagtgtcatcggctggcaggtgtgccgtgagctggcgggggttgaacgtatctatgcaatgcgcaaaaaagccgttggtctgcttggcaatgccaaaggtgccgctaagccaattccgtttgctgaggatacctgcgtaccgccggaacacctggcggattatattgctgaatttcgcgcgctgctcgacagccacggcttaagctacggtatgttcggtcacgtcgacgcaggtgtcttgcacgtccgtccagcgctggatatgtgcgatcctcaacaagagattttgatgaagcaaatctctgatgacgtggtggcgctgactgcgaaatacggtggtttgttgtggggcgagcacggcaaaggttttcgcgctgaatacagcccggcgtttttcggtgaggaactttttgcagaactgcgcaaagtgaaagcggcatttgacccgcataaccgactcaacccagggaagatttgccctgccagaaggtctcgatgcgccgatgatgaaagtgatcgcgttgaatgcgcggtacattcgatcggcagatccccattgcggtacgccagcagtggcgcgtccgatgtgtccgtcgatgaagatcacccagaaccggattcattcaccgaaagggcgcgcaacgctgctggcatgcgaataaaggcgaatatgacttctcacacgaatgtcaaagaggcgatgtcgggctgtctggcctgtaaagcgtgttcgacccagtgccccatcaaaattgatgtgccggagtttcgctctcgttttctgcagctctatcacacccgttattacgcccgctgcgcgaccacctcgtctgctacggtcgagagctacgcgccgctgatggcacgcgcgccgagaaccataacttgttcatcaaccagccgctggaacaactgtcggtcactgcctgatgtttcgtatttacgcccaacacttcgcatcggtgggcgaaacgttgcatccttcatcgatatcgcatcttcaccaccagcgacggtggaagaacgcatcacatccggtccggcattcagcaccattacgccagcctctgcgcccgcactacacggacaatccacgcgcccgacctttgtactgtggtttcagctctgcgccaatcaacagccccataccgcgaatatcgctaaatacatcgtactgctgatcgatcttctgcagatggtcaacaaaacgctggcgtttcgcctgaatgccttccagcacttcaggcgtattgatgatatcaaacgccgcccccgctactgcacaggccagaggattaccgccgtaggtggaaccctcgcgcaagccctgcaaaaactctggcgtcgctgccgtcacaccgccctcgccctggatcggctcaaccaccaccgcacaggtgtgatcatccatcaccgctttcactgcatggagatcgttaaagggaacgtggatgatgtctgccggtttcggcccaaagccgtcggaatattttggctgcccacccaccgaaacggtaaacagcgagcgaccatgaaaagcgttatggaaggcaataattttggttttgaacgggctatgacgcacacaggcgtaatggcgtgccagtttaaaggcggtttcgttagcttccgtgccggagttcataaacaccacgcgttcggcaaacgttgcctcaatcagtttacgcccaagacgcagcgccggttcattgcgaagcctgcgatacgccgccagcattttgtggctcgattgcgtttcgaagatcacttttcccgcaacacgctcgccgctcataccacttttaccctggtagatcggatgaaaatgggtgtacggcacccaggcagaatcgaagtgaatcgacgggacatccagcgtctgtttgatccagtcggtgttgtagagcaagccatcataggtggagttggtgatcaccgcatgaaccggccattgtgcttgcgtggtagcagcgactttctcttcgatgctgtcgcgagtaaattcacggcgcgggatcccaccaagaatccccaacgcattacgcgtcggtttcagccagactggcactacatcgttcatcatcaacagatgcgccagcgatttatgacaattgcggtcgatcaacagcgtactgccggatggcgcggcgtacatacccacaattttgttcgacgtcgatgttccgttggtaacgatataactctgttccgcgccaaaagtccgcgcgatgtactcttccgcttccaggtgtggcccggtgtggtcgagcaacgaaccaagctcggtgaccgaaatagagacatcagccttaagagtattcccgccgaaaaaatcataaaacagacagccaaccgggcttttttgatatgcggtgccgcccatatgccccggcgtacaaaaggtgtacttccgctctttgacgtagtccctatgcgtttacctgtgcacaataaattaccggctggaagcctgggcgtttattaccgcagatggaatgccctgcaacatgtggggaaacgaaaaatggagctgacgatgaaaccattacttgcctcaccctcgctgccattagtgacttatcctgcgagcgccacggaacagactggagacattcgccatgctgactgcgtgacgggctga

SEQ ID NO: 144211 - DNA, 2991 bp, Homo sapiens
atgcccgtgccgcagcagttctcactcagccagaacggcctggttaacgcagcagataactatcagaacgcgggctggcgcaccttttttgttgataatcaggtgaagacgctgattagcgaggcgctggtgaataatcgggatttgcgcatggcgacgctgaaagtgcaggaggcacgggcgcaatatcgtctgaccgatgccgaccgctacccacagctcaatggcgagggcagcggcagctggagcggtaatcttaaagggaataccgccacgacacgggagttttcgaccggccttaacgccagctttgacctcgattttttcggtcgcttaaagaacatgagcgaagccgagcgacaaaattatttagccactgaggaagctcagcgcgcgtccatgaccattaaaaatgtaatttgcgatatcgacggcgtgctgatgcacgataacgtcgccgtaccgggtgcagcggaatttttgcacgggattatggataaaggcctgccgctggtgttgctgaccaactatccttcgcagactgggcaagatctggcgaaccgctttgccaccgcaggtgtcgatgtacctgacagcgtgttttatacctctgcgatggcgactgccgatttcctgcgtcgccaggaaggcaagaaagcgtatgtggtgggcgaaggcgcactgatttatgaactgtacaaagccggtttcactattaccgatgtgaaccctgatttcgtgattgttggcgaaacgcgttcctacaactgggacatgatgcataaagcagcctatttcgtcgctaacggtgcacgttttatcgccaccaatccggacacccacgggcgcggtttttatcccgcttgtggcgcgttgtgtgcagggattgagaaaatctccgggacctgcaggacggcaagattcaattttactatcacccttaatccggcttatgaccttgttggtttctgcccggaaattgaacgcggcgaagtgaacctggtgaaaaccaccggtctgcatgcggcgggtaaaggcatcaacgtggccaaagtattaaaagacctgggaattgatgtcaccgttggcggcttcctgggtaaagacaatcaggatggttttcagcaactgttcagcgagctgggcattgccaaccgtttccaggttgtacaggggcgcacccgaattaacgttaagctgacggaaaaagacggcgaagtgaccgacttcaacttctcgggttttgaagtcacccccgccgactgggaacgctttgtgactgattctctgagctggctcggtcagttcgatatggtctgtgtcagcggaagcttaccgtcaggcgtcagcccggaagcgttcaccgactggatgactcgcctgcgtagtcagtgtccttgcattatctttgatagtagccgtgaagcgttagtagcaggtttgaaagcggcaccgtggctggtgaaacctaaccgccgcgagctggaaatctgggcaggccgtaaactgcctgaaatgaaagatgtgattgaagctgcacatgcgctacgtgaacaaggcatcgcgcatgttgttatttcactgggtgccgaaggcgcgctttgggttaatgcctccggcgaatggatcgccaaaccaccgtcagtcgatgtcgtaagcaccgttggcgcaggggattctatggttggtggcctgatttatggcttgctgatgcgtgaatccagtgaacacacactgcgtctggcgacagctgttgcagccctggcggcacgcgcctatatggcgaagaccctgctgggcgcggcggcgcgaaaagcaaaactggaaatcatcgacaatccgaacgacgctgaaatggggattgttctcggtgattccatcccgaacgacagcgcgctgaacggcatgatcaaccactacggcaccaccccgctcattcgccagtgcgtcacgcccggcatgatggcattgcatgaaggccgcacatatcgcgtctcagcagtcattcaggagcgcaaatgggtctacctgcacaccgacgcagaaatcatccgccttcatgactgcgtgattgacataacaccaatgccggggattctctcgagtcgcgctaagccaattccgtttgctgaggatacctgcgtaccgccggaacacctggcggattatattgctgaatttcgcgcgctgctcgacagccacggcttaagctacggtatgttcggtcacgtcgacgcaggtgtcttgcacgtccgtccagcgctggatatgtgcgatcctcaacaagagattttgatgaagcaaatctctgatgacgtggtggcgctgactgcgaaatacggtggtttgttgtggggcgagcacggcaaaggttttcgcgctgaatacagcccggcgtttttcggtgaggaactttttgcagaactgcgcaaagtgaaagcggcatttgaccctcataaccgacttaaacccaaggaagaattgcccgcccgaaagttctttatcccccaaaaacaaaatggaacccgtgaaagccctgtcatatcattgggagatcccaatggggcctcaggatttccacctaatgcttttgcttatcatttcgtctctgctgaaaattccttccctcaatctgcctatgcccaagcattcttaaaaactaaaaaattgattgaactcgatgcctgcaagcctcatattgatgatatggtcaacggtattctctggctgctggataacgagctgcgcgggccatttaatatggtttcgccctacccggtacgcaatgaacaatttgcccatgcgctcggtcatgcgctgcatcgcccggccattttgcgcgtccccgcgaccgccattcgactgttaatgggcgaatcttcagtactggtattaggtggacaacgcgcgctgcctaaacggctggaagaagcgggttttgcgtttcgctggtacgatttagaagaggcgctggcggatgtcgttcgctga

SEQ ID NO: 144212 - DNA, 3939 bp, Homo sapiens; identical to SEQ ID NO: 138992

SEQ ID NO: 144213 - DNA, 751 bp, Homo sapiens
tgccgtaatacgcagaatattattatctgcctgttcaacgcccggatcgggaacattttctacctgaacgtgatgtgggccgcgataagtcaatgctttcatgcaacctccagagacagttcaaaaaagagtcagtctttaaggttagctatcacagcgggaaaacgggcggtaccacaggttttgggagaattcctggtgttcagtgagaatatattcatcacagaaacagttcgtaaggaaaaagaaccagacaaatatcagggataaatattataatcatggcgaatgatttgttcatgattaacagggagaaagggttatgtataagacaatcattatgccagttgatgtatttgaaatggaattgagcgacaaagctgttcgccacgctgaattcctcgcccaggatgacggagttattcatctacttcacgtactacccgggtcagccagcctgagcctgcaccgttttgccgctgatgtgcgtcgttttgaagagcatctgcaacatgaagcacaagaacgtctgcaaacgatggtcagccacttcaccatcgatccttcccgcattaaacaacatgtccgttttggtagcgtgcgggatgaagtcaatgagttggcagaagaactgggggctgatgttgtagttattggttctcgcaacccatcgatttcgacccatctgttaggttctaacgcctcgagcgtgatccgccacgccaatctgccggtgctggttgtgcgttaa

SEQ ID NO: 144214 - DNA, 1341 bp, Homo sapiens; identical to SEQ ID NO: 124441

SEQ ID NO: 144215 - DNA, 4343 bp, Homo sapiens
atgacccgcgacaacccagtcatcccacgctttattcatcgccgcgaagtcgtttttatcggccaggaaaatggtggcatccagaatgctcgatttattgctgccctgtttttccagcacggcgtcaatctgtgccagcgtgttggcggtttgctcaaaggcatcggcgtcgaggttttccggtacaccagtgtagtagagcgtgttgttgtggattactacatcagaccagcgggcttcagcatcgatacgaacgataggggtagtgtgacggacgattttgcaccagacggtcagctggcgaaagcgataccaggctttaagccgcgagaaccacagcgacagatggcggtagccgtcacccaggcgatagaaaaaggccagccgctggtggtggaagcaggaaccggtacgggcaaaacctacgcttacctggctcctgcgctgcgggcgaaaaagaaagtcattatctcgaccggctcaaaagcgttgcaggatcagctctacagccgcgatttgccaacagtctcaaaggcattgaaatatacgggcaacgtggcgctgctgaaagggcgctcaaactacctctgcctcgaacgtctcgaacagcaggcgctggcggggggcgatctgccggtacaaatcttaagcgatgtgatcctgctgcgctcctggtctaatcaaacagtcgatggtgatatcagcacctgcgtcagcgtggcggaagattcacaggcgtggccgctggtcaccagcaccaacgacaactgtcttggcagcgactgcccgatgtataaagattgctttgtggtcaaagcacgtaaaaaagcgatggacgccgatgtggtggtggtaaaccatcatctctttctggcggatatggtggttaaagagagtggatttggcgaactgatcccggaagcggacgtcatgatcttcgacgaagcccaccagctaccggacattgccagccagtattttggtcagtcactctccagtcgacaactgctcgacctggcaaaagacatcaccatcgcctaccgcaccgaattaaaagacacccagcagttacaaaagtgcgctgatcgtcttgcccagagtgcgcaggattttcgtctgcaactcggtgagccaggttatcgcggtaacctgcgtgagctgttagctaatccgcaaattcagcgggcatttttactgctcgatgacaccctggaactttgttatgacgtggcgaaactgtcactggggcgttccgccttgctggatgcggcatttgagcgcgccacgttgtatcgcacacggctgaagcggctaaaagagatcaatcagccgggctacagctactggtacgaatgcacttcgcgccattttactctggctctcacgccgctcagcgtggcggataaattcaaagagttaatggcgcaaaaacccggtagctggatcttcacctcagcaacgctgtcggtgaacgacgatctgcatcatttcacctcgcggcttggcatcgaacaggccgatagctgttctataggaaacagctatgtttttagactagtcattggagaacagatgattgatgtcttagggccggagaaacgcagacggcgtaccacacaggaaaagatcgcaattgttcagcagagctttgaaccggggatgacggtctccctcgttgcccggcaacatggtgtagcagccagccagttatttctctggcgtaagcaataccaggaaggaagtcttactgctgtcgccgccggagaacaggttgttcctgcctctgaacttgctgccgccatgaagcagattaaagaactccagcgcctgctcggcaagaaaacgatggaaaatgaactcctcaaagaagccgttgaatatggacgggcaaaaaagtggatagcgcacgcgcccttattgcccggggatggggaacgaaccgatgactggatggatggccgccgcagtcgtcacactgatgatacggatgtgcttctccgtatacaccatgttatcggagagctgccaacgtatggttatcgtcgggtatgggcgctgcttcgcagacaggcagaacttgatggtatgcctgcgatcaatgccaaacgtgtttaccggatcatgcgccagaatgcgctgttgcttgagcgaaaacctgctgtaccgccatcgaaacgggcacatacaggggcagaaggttgtggcccggttgaacaaggcaacagccaattccagcgaaatgcactgcactgggcggtcactaccggcggcttcaacagtgaaacagtacaggacgtcatgctgggagcggtggaacgccgcttcggcaacgatcttccgtggtctccagtggagtgcctgacggatattggttcatgctaccggcctaatgaaacacgccagttcgcccggatgttgggacttgaaccgaagaacacggcggtgcggagtccggagagtaacggaatagcagagagcttcgtgaaaacgataaagcgtgactacatcagtatcatgcccaaaccagacgggttaacggcagcaaagaaccttgcagaggcgttcgagcattataacgaatggcatccgcatagggcaaatccagatgccaacgtagtcagcgaagatgtgctgcgtgagagcgtcggtaagtcggtcgttaaccttattcacggcgtgcgtgatatggcggcgatccgccagctgaaagcgacgcacactgattctgtttcctccgaacaggtcgataacgttcgccggatgttattggcgatggtcgatgattttcgctgcgtagtcatcaaactggcggagcgtattgcttatctgcgcgaagtaaaagatgcgccggaagatgaacgtgtactggcggcaaaagagtgtaccaacatctacgcaccgctggctaaccgtctcggaatcggacaactgaaatgggaactggaagattactgcttccgttacctccatccaaccgaatacaaacgaattgccaaactgctgcatgaacggcgtctcgccgccctgttcatccggcgggccgtaaaccgggatcggatcgccaacgccccagcgcagcggaaacagcccctggacgtgatccatatgataatgcgtcagcaaaaactgctggaacgatccgggcgaccagcgatcggcgagatcgtgcagcccggcgtcgatcagggtgattgcgtcgttaaacttcactacgccgctgcacggttggcggcgatactgcggcgagcgccgcgctctggcgcaggccgcacactcgcagccccatgccggaacgccctgtgcgccgccggtgccgttgacatgatgcagatgaaactgcaaatgcaggccgatcatgccgacaacttcgccatcaagcagcgccagatggtagcgcatgtttgggtcgcgcagattggcgttaaaacccacgcgaaacgcgtggtggaaagagagccatccatgaatacagatacgtttatgtgcagcagcgacgaaaaacagacccgcagcccgctgtcgctgtattcggaataccagcggatggagattgagtttcgcgcaccgcatatcatgcccaccagccactggcatggtcaggtcgaagtgaatgtgcctttcgatggcgatgtggaatacctgatcaacaatgaaaaagtgaatatcaatcagggtcatatcacgctgttctgggcctgtacaccgcaccaactaacagataccggaacctgtcagagcatggcgatttttaatctgccgatgcatctgtttctctcctggccgctggataaagacctgattaaccacgtcactcacggcatggtgatcaaatcactggccacacagcaacttagcccgtttgaagtgcgccgctggcagcaggaattaaacagtccgaacgagcaaattcgccagctcgccattgatgaaattggcctgatgctcaagcgatttagcctctctggctgggaaaccgaatctgggcaataaaaacctcgcgcacacacaaaaacagcgtctcgcgccatgcgcaattttatgttagccagatgctgggctttattgccgaaaactatgatcaggcgctgaccatcaacgatgtggctgagcacgtcaaacttaacgccaactatgcaatggggatattccagcgggtcatgcaattgacgatgaaacagtacattaccgcgatgcgcatcaaccacgttcgcgcgttactgagcgataccgataaaagtattctcgatattgccctgacggcaggctttcgttcaagtagtcgtttttacagcacgttcggcaaatatgtcggcatgtcgccgggatcctctagatcgacctga

SEQ ID NO: 144216 - DNA, 1026 bp, Homo sapiens
atgaacaccaccggacacaacaaacacaaacccaaccagaggaccgacaacacgtacacacccacacaccacaagcaggccgcgcaccgatacgccagcagaagccaaccgcccgaccaagagagcatgacaaacccgcgaccagccggcggacagaacgggaacgacgaggggagaaagacctccctcatcaggtccagcgaccctccgcaccaagcagcgcgccagaaagggacagccgccccctccccgccgcaccgccgaacagaagacgtgcacgccgaggacccggcagtgcacgcctcctgtctacaggtcgactctagagcatcccctttcgatggcgatgtggaatacctgatcaacaatgaaaaagtgaatatcaatcagagcatggcgatttttaatctgccgatgcatctgtttctctcctggccgctggataaagacctgattaaccacgtcactcacggcatggtgatcaaatcactggccacacagcaacttagcccgtttgaagtgcgccgctggcagcaggaattaaacagtccgaacgagcaaattcgccagctcgccattgatgaaattggcctgatgctcaagcgatttagcctctctggctgggaaccgattctggtcaataaaacctcgcgcacacacaaaaacagcgtctcgcgccatgcgcaattttatgttagccagatgctgggctttattgccgaaaactatgatcaggcgctgaccatcaacgatgtggctgagcacgtcaaacttaacgccaactatgcaatggggatattccagcgggtcatgcaattgacgatgaaacagtacattaccgcgatgcgcatcaaccacgttcgcgcgttactgagcgataccgataaaagtattctcgatattgccctgacggcaggctttcgttcaagtagtcgtttttacagcacgttcggcaaatatgtcggcatgtcgccgcaacaataccgcaaacttagccaacagcgccgccagacgtttcccggctaa

SEQ ID NO: 144217 - DNA, 4809 bp, Homo sapiens; identical to SEQ ID NO: 131890

SEQ ID NO: 144218 - DNA, 752 bp, Homo sapiens
  misc_feature (1)...(752): n = a,t,c or g
gcgtgaggtcgcctctagaggatcgcatgccgtattcaatggctgggataaacattggctattgactgaatcaatgtattgcaatgtttatattttaattatttatagtttaaggacaaataatgagtaagtttgttaaaacagctattgctgcggcaatggtgatgggcgcgttcacctctacggcaacaatcgctgcgggtaacaacggtactgcacgtttttacggcaccattgaagactcagtgtgttctatcgttccggacgatcacaaactggaagttgatatgggtgatatcggtgccgaaaaactgaaaaataacggcaccaccacgccgaaaaatttccagattcgcctgcaagattgcgtatttgatactcaggaaacaatgaccactacctttactggtaccgtttcttctgcaaatagcggcaattattacaccattttcaataccgataccggtgcggcatttaacaatgttagcctggcgatcggtgactctctgggtacctcttacaaaagcggcatgggtattgaccagaaaatcgcgacagatactgccactaataaaggcaaagcgaacgagaatgtgaactttaaagcctggatggtcggcgcacgtgatgcgcangatatgggtaatttcgaagcaaataccaccttccagattacttacctgtangcatacccccataacgaactgcgatgcngnatttaaatcgactatgagcgaaacaagaccaagacg

SEQ ID NO: 144219 - DNA, 1356 bp, Homo sapiens
atgaaagatacctggacggtcactgccgttaagccgaagtatcagacctatgtggtggtgatcggtgaaagcgcgcgtcgcatgccctcggtgcctttgcgcgttaacggtttgatatttgctgactacattgccgccagtggctccacgcagaaatcgcttggcttaacgctcaatcgcgttgtcgatggcaaaccacagtttcaggataactttgtcaccctggcaaatcgcgcgggcttccagacctggtggttttccaaccagggtcaaatcggcgaatacgataccgctatcgccagcatcgccaaacgagcagatgaagtgtacttcctgaaagaaggtaattttgaagcagataaaaacaccaaagacgaagcgttactggatatgaccgctcaagtgctggcgcaagagcactcgcaaccgcagctgattgttctacatctgatgggctcacatccgcaggcctgcgacaggacacaaggaaaatacgaaacctttgtgcaatcgaaagaaacgtcgtgctatctctataccatgacgcacacggatgatttactgggccagctgtacgatcagttacataaggcctgcaggcatgaagtgttcgccgcccaaaacctaaagctgagtaccgtgacaaccagcggggtgaatttatcccgcacctggcaggaagtaaaaggcagcgacgatgcctggttttacaccgtttttcagcttagtggtcaggcaataatggagcaggatgagcgtcaggagtcttctaaacagatttcattacttttgccacgcactctgctggaacaatattttccccatcaaaaacctatctgcgcagaaagactggacgctgacttacccatggtgcaactcagtcatcgcctgttacaggagagcatgaataatccggcactttctgaaacagaaagtgaactgcgctacaggcgatggaatgcagaggcggcgggaagatatgcccttaatgccactgaaaaactacataatctgtacagcaataaaaaggaattgtttgatggctaccacgtcactggcgtggttcttcttcgctggcaacttcttagtgccgtaatgatgtttctggccagcacactcaacatccgttttcgtcggtctgattatgtgacgtgtgatgggtgcccgatccgatccctcgcccgcaacccatgcctgacccaccacccgatgaagaaccgattaaattgtcgcatcgtgagcgtagatctgcgaggatacgcgcctgctaactttgcgtcgatgaccacgagaatagattgtgaccgctttttctaccctgaatgttttgcctcccgcccaactcacgaaccttaa

SEQ ID NO: 144220 - DNA, 2685 bp, Homo sapiens; identical to SEQ ID NO: 139987

SEQ ID NO: 144221 - DNA, 1707 bp, Homo sapiens
tcattcatcattctgaaagcagcaagccggcacaatcgacacgtcgatatagccgctgcggatctcgcctgcgaacgggtgattgcgcccgtaaccgcgttgggtggagtaggccagcgccagcaaatagccttcgtcgccgcgcatcaactgctgcaaacgggaggagcgtgagcaggggtaaaccggcggcgtgcgggtgatgtcatccggctgtgcgccgctatcctcttcaaacttcgccagcccctgacgcgccagcaggctgaaaacgtgcggcgacggctgctgttcgctgtcggcggtggtcagcgtcggcgcttcgccgtttgccagcagggtaaaatcgagcaggcgatgggtgtagtcgtaggttgggccaagcagctggccgccgggaatgtctttataaacggcggagatacggcgttcgagacgcatcccggtggtgtcgagcggctcgcttaccgccagcttcgccaacgtggtgcggtaggcgcgcagcaggaaaatcgcttcaacgttatcgccgctggcctgtttcagcgccagcgccgccagttcgcggtcggcaatggggatcctcacgccaataaactgaatatgcgttgataatagcacgactgccggatgcggcgtgaacgccttatccggcctacacttcgcccgtaagccgtaggcctgataagacgcgcaaagcgtcgcatcaggcatggcgcacgactgccggatgcggcgtgaacgccttatccggtctacacttcgcccataaaccgtaggccacatcaaatcatcaggcactttgaagtcggcatacgggtcgtcttcatcctgctcttcggcgctgagcgcgctgtgcaacactatactgctggcatcgcgctgagcaattttatcggcaacgctggcgggaataatggcgtattcaccttcgcagaaaatcattgatatggccatgaatggcgttggatgccgggcaaccgcccgcattatgggcgttggcctcaacacgattttccgccatttaaaaaactcaggccgcagtcggtaacctcgcgcatacagccgggcagtgacgtcatcgtctgcgcggaaatggacgaacagtggggatacgtcggggctaaatcgcgccagcgctggctgttttacgcgtatgacaggctccggaagacggttgttgcgcacgtattcgggcattcgctgccgctggtgagcatcatcggcaaaggggacgagcaggtgggctacttcggcgccatgtgcgtgctggggctgagcggcgtggtgctgctctacgtctgcttcttcacgaccaaagagcgctacacctttgaggtgcagccgggctcgtcggtggcgaaagaccttaagctgctgctgggcaacagccagtggcgcatcatgtgcgcgttcaagatgatggcgacctgctccaacgtggtgcgcggcggggcgacgctctacttcgtgaaatacgtgatggatcacccggagttggcgacccagtttttactttacggcagcctcgccaccatgttcggcccgctttgctcctcacgcctgctgggccgcttcgagccgcgtcaccgccttcaagtggatcatcgtcgcctactcgctgatcagcctgctgattttcgtcaccccggcggagcacatcgcgctcatttttgccctcaacatcctgttcctgttcgtctttaa

SEQ ID NO: 144222 - DNA, 987 bp, Homo sapiens
atgcgtgtcatcaccctggcgggtagtcctcgctttccttctcgctccagctccttgctggaatatgcgcgggaaaaactaaatggcctggatgtagaggtttatcactggaatctgcaaaacttcgccccggaagatctactttatgctcgtttcgatagtccggcactcaagaccttcaccgaacagctgcaacaggccgatgggcctgattgtcccccccgccgtgttacatatgcgttcaccgaatacgtgcgcaacaaccgtcttccggagactgtcatacgcgtaaaacagccagcgctggcgcgatttagccccgacatagccccactgttcgtccatttccgcgcagacgatgacgtcactgcccggctgtatgcgcgagccagagtgtaccacgcctcccgtgaacaacgccgcgctgtccagggcatcggctcttttcagaggaattgtttgatggctaccctcaccactggcgtggttcttcttcgctggcaacttcttagtgccgtaatgatgtttctggccagcacactcaacatccgttttcgtcggtctgattatgtcgggcttgcggtgatcagcagcggtctgggctttagattatcgcagtgtgctctaaagctggatactgcctttaatcgcgcagggttaacgccgcgtatcgttttcacggcaacggatgctgacgtcattaaaacttacgtccggttagggctgggggtaggggtcattgccagcatggcggtggatccggtcgccgatcccgaccttgtgcgtgttgatgctcacgatatcttcagccacagtacaaccaaaattggttttcgccgtagtactttcttgcgcagttatatgtatgatttcattcagcgttttgcaccgcatttaacgcgtgatgtcgttgatgcggctgtcgcattgcgctctaatgaagaaattgaggtcatgtttaaagatataaaactgccggaaaaataa

SEQ ID NO: 144223 - DNA, 429 bp, Homo sapiens
atgtccgacctcatgggcgggctgctccacttcctgaataccattcctccatcaatgaagtttgcggcagcgtttctggtcggtgcgatgctggcgttcgatatgggcggccccatcaataaaaccgcctggttcttctgcttctcactgctggaaaaacacatttatgactggtacgccatcgtcggcgttgtcgcgctgatgcgcccgtcgcggcgggaaaaagaggctgccagtagtgccattgtggtcggtgccacagtcgcaaccgaaccggctattccttacgctctggcagctccgttgccgatgattaccgccaatacgctggcgggcggcattaccggcgtgctggtgatcgctttcggaatcaaacgtctggcacctggtttgggtatctttgacccgctgatcggcctgatgtcgccg

SEQ ID NO: 144224 - DNA, 523 bp, Homo sapiens
atgctgctggctgacgtcggtatgttggggatgccaaacgcgggtaaatcgacctttattcgtgcggtatcggcggctaaaccgaaagtggcggattatccgtttaccactctggtgccaagtctgggtgtggtacgaatggacaacgaaaagagcttcgttgttgccgatattccaggactgattgaaggcgctgcggaaggcgcaggtctgggcattcgcttcctgaagcacctggaacgttgccgcgtcctgttgcacctcatcgatatcgatccgattgacggcaccgatccggttgaaaacgcgcgtattattatcagcgagctggacaacaattaccagccaggatctggcgacgaaaccgcgttggctgaagaagcgaaacagccagagaaagtcgaattcatgtgggatgattatcatcgccagcagcttgaagagattgctgaagaggatgatgaagactgggatgacgactgggacgaagacgacgaagaaggcgttgagttcatttacaagc

SEQ ID NO: 144225 - DNA, 705 bp, Homo sapiens
gattccgaccttgacagtgtcaagcaggcctgtcatggcgtctgtagagcgtccctcacgttgggtccgtctggtgtttcctcgcaattagactgggtgatgggttttgggaagacgcccacagagaggatccccctgctggagctgatgctgctggctgacgtcggtatgttggggatgccaaacgcgggtaaatcgacctttattcgtgcggtatcggcggctaaaccgaaagtggcggattatccgtttaccactctggtgccaagtctgggtgtggtacgaatggacaacgaaaagagcttcgttgttgccgatattccaggactgattgaaggcgctgcggaaggcgcaggtctgggcattcgcttcctgaagcacctggaacgttgccgcgtcctgttgcacctcatcgatatcgatccgattgacggcaccgatccggttgaaaacgcgcgtattattatcagcgagctggaaaaatacagccaggatctggcgacgaaaccgcgttggttagtgttcaacaagatcgatctgctggataaggctgaagaagcgaaacagccagagaaagtcgaattcatgtgggatgattatcatcgccagcagcttgaagagattgctgaagaggatgatgaagactgggatgacgactgggacgaagacgacgaagaaggcgttgagttcatttacaagcgttaa

SEQ ID NO: 144226 - DNA, 421 bp, Homo sapiens
atgatggataacctgcaaactgaacccgtgattaaccgtgacggtcaggaagagaagcaggtgggcttcaacagcatctacatgatggccgactccggtgcgcgtggttctgcggcacagattcgtcagcttgctggtatgcgtggtctgatggcgaagccggatggctccatcatcgaaacgccaatcaccgcgaacttccgtgaaggtctgaacgtactccagtacttcatctccacccacggtgctcgtaaaggtctggcggataccgcactgaaaactgcgaactccggttacctgactcgtcgtctggttgacgtggcgcaggacctggtggttaccgaaaacgattgtggtacccatgaaggtatcattgatgactccggttatcgagggtggtgacgttaaagagccgctgcgc

SEQ ID NO: 144227 - DNA, 2470 bp, Homo sapiens
tgccgtaatacgcagaatattattatctgcctgttcaacgcccggatcgggaacattttctacctgaacgtgatgtgggccgcgataagtcaatgctttcatgcaacctccagagacagttcaaaaaagagtcagtctttaaggttagctatcacagcgggaaaacgggcggtaccacaggttttgggagaattcctggagttcagtgagaatatattcattacagaaacagttcgtaagggaaaagaaccagacaaatatcagggataaatattataatcatggcgaatgaactgttcatgagtaacagggagaaagggttatgtataagacaatcattatgccagttgatgtatttgaaatggaattgagcgacaaagctgttcgccacgctgaattcctcgcccaggatgacggagatattcatctacttcacgtactacccgggtcagccagcctgagcctgcaccgttttgccgctgatgcgcgtcgttttgaagagcatctgcgacatgaagcacatgaacgtctgcaaacgatggtcagccacttcaccatcgatccttcccgcattaaacaacatgtccgtttttcacttactagtattaggaccatgcaagttctggaacacctggggcaggatcagtgcctgaaaaacaaaagtctattcccgattccatggggaagcttctacgcagcaccattgttactgttgacgctgattaccctggcgttgctcccactcttcctgtacattacctatcgagtcggcaccattcgtcgcgagatctccaagagcacgcagcgcagcctggcggatatgagtgcgctgaccgaggaaacgctctcggtgtctggtatgttgctgaccaaggcattcggacggcagacacgtcataacaagtctgtgcaggattatctgaaagtgcttaaggaaaaaaatgcgcagcagccttcagctgaatccgcccccggcgtcgctatcgcacctggcggcagaccggtctgcacttacgcgcaaacgaaagtctactcctttggtttgccaagtattttcaccttcatgcaaaccatcccgtcaacgggaattgatttcaccgtctgggccagcgttattggcggtgtcattgccatcggttgcgcatttgtcgttgcgctgtaccgttatcgctttcgtggtaagccgttcgttagcggaatgctgtttgtggtgatgatgtcaccagatatcgtgatggcgatttcgctgctggtgctgtttatgctgctgggtattcagcttggcttctggtcgctgctgttctcgcatatcaccttctgtcactcgagtctctctataagcagcgaggcatcgccagcaccagataacgaacccacggatcaggccgatcaggtagatccaaccaggtgccacgtgattccgaaagcgatcaccagcacgccggtatgccgccccagtatggcggtaatcatcggcaacggagctgccagagccctctttttcctgtcgggtaaacagtttgggcgcaatgaacgtcgcaagacccgccgcgacgggcggcatcagcgcgacaacgccgacgatggcgtaccagtcataaatgtgtttttccagcatgagaagcagaagaaccaggcggttttattgatggggccgcccatatcgaacgccagcatcgcaccgaccagaaacgctgccgcaaacttcattgatggaggaatgatagcaaaccagaaacgccggagcgaaagccggtttatcggcaatcgacgaggcaatataagcgcccatgatggggatcataaaggtgaagccaaggtaaccgatggattcaactacccagtcttcacggaagttcgcggtgattggcgtttcgatgatggagccatccggcttcgccatcagaccacgcataccagcaagctgacgaatctgtgccgcagaaccactgctgcacctctgttagacgcgtacactagaccctgcgttatcctatgtctggtgaaaacgctagtcgatagccgaggctgtcgattgactgcaagtctggtcgcaatcgcctgctggggcagcacggcagggtttagccgtattaggcgcgcgtctatccagctatccgtcgacgtcactagacttcgacttgcgcctacggtacgattcgagcttgcggacgaggcgggtatcagactcacatcaagagcgcggctaagtacgcgtgtatccatcagaactcacggggcatacacgcagcgaaacgaaccatttgaagccaaagtaccagttgatccgctgaaaaagaaaatcgccagtgtgtttcttgaatcttttttgttctattccggtttagccgccgataccgcacgaataaaggtcgatttacccgcgtttggcatccccaacataccgacgtcagccagcagcatcagctccagcagcagctcgcgcttatcgatagcgatatcaccgtaa

SEQ ID NO: 144228 - DNA, 879 bp, Homo sapiens
atggagaaggcaggcctggctccaggcagcacagaggcactgggtgccagccagcacctgggccaggcgccaggcggaagcgctctggcagatcagccccgcacccccaacagccccacagggggcccatccagggccacacacctgcccccaggagcaggacgtcctggccatgccatcggccacctgctcgtcttgtccgtgaggccttcccagctggccgggctcaccccgcggctcctgcacctgtgcctgcccggggaatctggggccatttcccactcttcaaccgtcagcgacatcttgggccttcttttccagacaggcaagtttaaccttcaacttccttcatttgatgagcaggtgatcccagccaggctcccgaagacggagatgagggcagaagagcccaaagaagcaacggaggtgaaagaccaggtagagacccaggggcaggaggacaataaaaggggcccctgtagcaatggggaagcggcctccacctctaggcccctggagactcagggaaacctcacttcctcctggtacaatcccaggaccttggagggaaatgtccacctcaagagcttgacagaaaacaaccagactgacaaggcccaggtgcatgcactcattcaggcttctgccgttttggatttaaccgaagatgatttcgattttctgacgagtaacaaagtttggattgctactgaccgctctcgtgctcgtcgctgcgttgaggcttgcgtttatggtacgctggactttgtaggataccctcgctttcctgctcctgttgagtttattgctgccgtcattgcttattatgttcatcccgtcaacattcaaacggggcccaactttgactgcatgctttga

SEQ ID NO: 144229 - DNA, 2649 bp, Homo sapiens
atgaccgacctgtacgcacttgcccaagagtgttccctgtatgatctggatgcaagccgatactgcatggatgacctgcaggtgctctctgtctccacagtcgcctctgcagtgggagctcgggtgccccacattcccaactgctgcagacacaaccaaagcctccccatcccttcccccacccctgccggcaatcgcgtacaggagcacgttctgaacgcccgagtgcgggagcaacggatgcaggtgggaaagggcaaggccccgggtgctcctatattttacatcagtgaaccaagcacctaccaagtccctcgatgtgcccagtcctggaccccagcatttgcgagacagcagcagacccagcactactctctgccatccaggcactgttatgatccccgcctagcagacctaactattcagcgctacccttgcctgcttcagattctgaaagcatctcccagtgttcttgctaaagaggctctggaagggctccatataatgccagtcattcacctgcaaggagggtcaaagagaggcatctacggtccttgggaagcacctcctgtgggtggagcacaaatgaggggcttgagagatggagcccaggcccctgtgagtcagacgggctgctgcaagtgtgcagacctgctgtggggcaccgtggggccgccgcagcagccttccaccaccagccccggctcaggcaggcctctaggaggcaaaggtccttcaccccgatcccaggtgctgatccggagtggccgggtgcccattgtgtccttggagtgtgtgtcctgcaaggcacaggccgtgtacgaagtgagccgcagctcctacgtgtacttggagggccgctgcctcaattgcagcagcggctccaagcgagggcggtgggctgcacgtacgttcagcaacaagacgctggtgctggatgagaccaccacatccacgggcagtgcaggcatgcgactggtgctgcggcggggcgtgctgcgggacggcgagggatacaccttcacgctcacggtgctgggccgctctggcgaggaggagggctgcgcctccatccgcctgtcccccaaccgcccgccgctggggggctcttgccgcctcttcccactgggcgctgtgcacgccctcaccaccaaggtgcacttcgaatgcacgggctggcatgacgcggaggatgctggcgccccgctggtgtacgccctgctgctgcggcgctgtcgccagggccactgcgaggagttctgtgtctacaagggcagcctctccagctacggagccgtgctgcccccgggtttcaggccacacttcgaggtgggcctggccgtggtggtgcaggaccagctgggagccgctgtggtcgccctcaacaggtctttggccatcaccctcccagagcccaacggcagcgcaacggggctcacagtctggctgcacgggctcaccgctagtgtgctcccagggctgctgcggcaggccgatccccagcacgtcatcgagtactcgttggccctggtcaccgtgctgaacgagtacgagcgggccctggacgtggcggcagagcccaagcacgagcggcagcaccgagcccagatacgcaagaacatcacggagactctggtgtccctgagggtccacactgtggatgacatccagcagatcgctgctgcgctggcccagtgcatgctcattcaggcttctgccgttttggatttaaccgaagatgatttcgattttctgacgagtaacaaagtttggattgctactgaccgctctcgtgctcgtcgctgcgttgaggcttgcgtttatgcaaaacacagcaatcttgagatggcagagatggtcaccaaagctggccatggtgtcaggactaagttgggcgaccgccaccatagtgattcagcgtctgtcgtcgtcacgggacacccttgcgatgatcatcaactctatacacagacggccacagtggtcttcggcggcgcccattgcgacaagaagctaagaactttgataacaggttacaggaactggccaactagaataaccagtttagagaagaatataaatgacctgatggagctgaaaaacacagcacgagaacttcgtgaagcatacacaagtatcgatagccgaattgatcaagcagaagaaaaaatatcagagattgaagatcaacttaatgaaataaagcgtgaagagaagattagagaagaaagaatgaaaaggaatgaacaaagcctccaagaaatacgggactatgtgaaaagaccaaacctacatttgactggtgtacctgaaagtgactgggagaatggaaccaatttggaaaacacaattcaggatattatccaggagaacttccccaacatagcaagacaggccaacattcaaattcagaaaattcggagaacatcacaaagacacttcttgagaagagcaagacacataatcatcagattcaccaaggttgaaatgaaggaaaaaatgttaagggcagccagaaagaaaggtcaggttacccacaaagggaagtccattaggctatcagcagatttctctgcagagaccctacaagccagaagagagtggggaccaatattcaacatgatgaacaggagttcttattcgacatag

SEQ ID NO: 144230 - DNA, 953 bp, Homo sapiens
ttaaccagactggccatcgggtgccagtgccgatgcttcaatgacggcaacatcaaggttccccggagaaccgtaatggaccatttgcgccacttcgctcaaatgcaggtcaacgaaactcaccgcgccctgattgatctttttacgtaaaccggacgatgtttgatatggcgcccccccaggaaacagcatcggcgtcagaaagtacatcgtcagcggcggcgctgattgacgcacccgtcagaaggcgaatttgatacggctttttggcctcatgctgttcgttagctctgcgggcaatcgcggtgggtagggctttcggcgaacccgccggggtaaagccgctaaatgccaccatgtcgttatgctggataatttctgccgcttcattggcggtcatccttgtccactgagtttccatttttactcgtttttcgaggaaagcgttcatcccttcctggtaatcttcgctgtcatacaccgcgcggcgcatcccctgaatacgttcaaattcatcggagttcatggtgtgtgcttcgcccagtacacgcagctcttctttgataacggcaatggctaacggcgctttctcagagatgtggtgcgccatttgtaaggtgaaatcttccagttcttccacttccacaacatggttgaggatgccgacagccagcgcgcgctgggcggtgattggcgaagcggtaaaaatcagctctttgacaatgtggaagcccgcgtcgcgggtcaggttgtgaatgccgaccaggttatacgggacacacaaggtttacaggcgtcattgagaaggttgaggtactggcggcgatgatcagatcggaactccttgacctttcagcaggaactgaaggtagagcacgttcgaagactgccaagtccaggacataccttttgcagacaattacaacaaacttggctccttggctttctgccat

SEQ ID NO: 144231 - DNA, 1486 bp, Homo sapiens
ttagccattgccgttatcaaagaagagctgcgtgtactgggcgaagcacacaccatgaactccgatgaatttgaacgtattcaggggatgcgccgcgcggtgtatgacagcgaagattaccaggaagggatgaacgctttcctcgaaaaacgtaaacctaatttcgttggtcattaatccctcatccacggctttcagcagatcagctccctgcggcacatctttaacaaacatgtcgcgaacctgattccccagtgcgtcgctaaaggctttgcggtcgagatcggtgatacttccacgcccgcttctttatgccgtcgatatttattgctgatcggtaccgagctgacgagctgatgttatttggctccggttttgctaccaaaaagctggtaagcaacgagcgtaatcgtgggtccgagggtcccgccggctccaccgggaacccgaaggttgccgaaaggtcaagaagacttaagcgaaggggggaaccatggcggaggacggcgaacacaaagggggccccaagctgtgttctggggactagcaacagcagcagcatcggagagcctggctggaggatcaaatctttaatcatgttccctgcctcatttctttgatcatgcatgctgcatctaactattcctgggccccagttcattcctcttcctatggctttgtccagctgtttcttaactgaatgccggtaccgagccgcctggacggccgtttgaatgttgacgggatgaacataataagcaatgacggcagcaataaactcaacaggagcaggaaagcgagggtatcctacaaagtccagcgtaccataaacgcaagcctcaacgcagcgacgagcacgagagcggtcagtagcaatccaaactttgttactcgtcagaaaatcgaaatcatcttcggttaaatccaaaacggcagaagcctgaatgaggtaatcgggcagaagctccggtatcgtcgtcaggaatggtggcatcgggctttacatcgtacagcgccccctctacctgatcaatcaaccgctgttggtcattttgcgccatattgcgaagcattgcagtgacgataatctccaaagcttctacctgcgcacacagttctttcgactcttcttctttttgggcaagcttaaataacaactcagcaatgagatttttcatgtctgtatttccttatccaaagtatggagaagttaacattatgtttcacaacttcatagtgtctggaagtattatttttatgacaaaggaaatactttgcgcaaatattttttgtttgattaccagcgaaacgtttctcttatttaaataattacccacacaaaatataggcttttaattatcaacctttattataaataaaagttatgaaatatattctcttcgttaacttataattaagagaaaaaaactcaccgcatggccatttaagccaggaataaattagcttcccgttcatcattttgtgt

SEQ ID NO: 144232 - DNA, 766 bp, Homo sapiens
  misc_feature (1)...(766): n = a,t,c or g
tttataaacaagcccccgctctggtcgataacgtattaagaatgttcatgccagatgaaaacataacgaaattaattcatcaaacgaatgaattaagtgtcatgtaaattcacattctgtcctgaaaattcagttcgtcacagttaaccagttttagtggattaactgagttcatattgcggcatttgtctgtttctgttgccagcagttcaatccactgcatcagtaaagtatcaaacagaaaaacgaagacaggcgaaaacgacgagccaccaatacttgcgaatcattacctgagcctgtgcatgtttaaccaagtctggcaggaaatatacacgaaatgaataatctgaaaaccaggcttacacatcctttactttgtaatgagatcggtgtcaacttcgcttaacggctttgttttggacaggttgccaggctttctttttttcactttcgccagttcttccgcagagtaatgcgacgcgacatccagccgtcgaagccccattttgatgtactcgctgttgatctcaataccaatgaattttcgtccgctggcgatggctacggcaccggtagtaaagctaccagcaaacgggtcgagaacgatatcgcctgggttggaagaggcgagaataatgcgtttcagtaaggcttccggtttttgcgtcgggtggntttcatattcatccatcanataacgcacgcgcgggaaatcccanacgttaccccggactttttgatgattgaaggcttgggaggtttt

SEQ ID NO: 144233 - DNA, 1350 bp, Homo sapiens
atggatcagcgtaaaaaagaagtggttggtgctgaaataatgcgtcacttcgaaaaaggcgtcatgctgcaaacgcttgactccctgtggaaagagcacctggcagcgatggactatctgcgtcagggtatccacctgcgtggctacgcacagaaagatccgaagcaggaatacaaacgtgaatcgttctccatgtttgcagcgatgctggagtcgttgaaatatgaagttatcagtacgctgagcaaagttcaggtacgtatgcctgaagaggttgaggagctggaacaacagcgtcgtatggaagccgagcgtttagcgcaaatgcagcagcttagccatcaggatgacgactctgcagccgcagctgcactggcggcgcaaaccggagagcgcaaagtaggacgtaacgatccttgcccgtgcggttctgcaggcgttgctgaaaatcttatatcacaatgtgaatttaatgatgagatgctgaccgagggagtgatacgcgaaaagatgggctttaatccgcagactctccgcgaagtattgcaggcgtgtcagcaacaaggttgtgtagcaaataacctcgatttagatgttgtgatgattattattgatggtgccttcagcggaattgttcaaaactggttaatgaatatggcgggttatgatctttataaacaagcccccgctctggtcgataaccgtaccggcatggagcgcgcatcaaatggtggcccgtggcaggtgcagtcgctacctgcgcggtcataccgccagctcgacagctactacggtgaagcgatggcgattggcgagcgtgcgctggtagcgctgctggatttcagcggccctagcccgtctggcgattggcgatatcaaacgcatcacactttcccgccaactggatggcggcggcaggccaccctggtgaagatgcgggcctgtatagaggccgttaaagccgtgggcgaagagctttgtccggcgctgggcctgacgatcccggtgggtaaagactccatgtcgatgaaaacccgctggcaggaaggtaacgaagagcgcgaaatgacgtcgccgctgtcgctggtgatttctgcatttgcccgcgtggaagatgtacgtcacaccatcacgccgcagctttctaccgaagataacgcactgctgctgattgatttgggcaaaggcaataacgcgctgggcgcaacggcgctggcgcaggtttatcgtcagcttggcgacaaaccggcagatgtacgcgatgtcgcgcaactgaaaggcttctatgacgcgattcaggcgctggttgcacagcgtaagctgctggcgtatcacgaccgcttaatctag

SEQ ID NO: 144234 - DNA, 2605 bp, Homo sapiens
  misc_feature (1)...(2605): n = a,t,c or g
ttatttcacttcaaccacattcagccgtaactcatccaactgattttcatcttcttctggctgccagcacgccggttgtagtgggatctcttcgcgatcaaacgccagatcacccccgttaaccacttcagaaccgtgggtgatgcctttgaaatcgaacaggttggtatcgcacagatgcgacggcaccacattctgcatcgcgctgaacatcgtctcgatacgccctggataacgtttatcccagtcacgcaacatgtcagcaatcacctgacgttgcaggttaggctgtgaaccgcacaggttgcacggaataatcgggaacgcttttgcatcggcaaatcgctgaatatctttctcgcggcagtaggccagcggacgaataacgatatgtttgccatcatcgctcatcagtttcggaggcatacctttcatcttaccgccgtagaacatatttaagcctctgtgtcgaatatatttatttcctgaataattaatcatggcaaaaagaaccaaagccgaagctctgaagacccggcaagaactgattgaaactgccatcgcccagtttgcgcagcatggcgtaagcaagacgacgctcaacgacattgccgacgccgctaacgttacgcgtggcgctatctactggcacttcgaaaacaagactcaactgtttaatgagatgtggttgcaacagccttcattgcgggagttaatccaggaacacttgacggctggattagagcatgacccgtttcaacaattgcgtgaaaaattgattgtcggcttgcaatatattgccaaaattccccgccagcaggcgttgctgaaaatcttatatcacaaatgtgaatttaatgatgagatgctggccgagggagtgatacgcgaaaagatgggctttaatccgcagactctccgcgaagtattgcaggcgtgtcagcaacaaggttgtgtagcaaataacctcgatttagatgttgtgatgattattattgatggtgccttcagcggaattgttcaaaactggttaatgaatatggcgggttatgatctttataaacaagcccccgctctggtcgataacgtattaagaatgttcatgccagatgaaaacataacgaaattaattcatcaaacgaatgaattaagtgtcatagtaatgcgacgcgacatccagccgtcgaagcaccatttgatgtacggttcttttgccgatgaacgtgtgattgagcagcatattgaggcaggcatttcactgtgtgatgcggtgaactttctcgtggaaaaatacgcgctggtgcgtaccgaccagccgggattcagcgcctgtacccgctctcagttaataaacagcatcgatatcctccgggctcgcagggcgaccggcctgatgacccgcgacaattacagaacggtaaataacattaccntggntgctgggaagaactcgtggtccgctgccgagtcgtgctatataagtcgacatacggagcaagcgacggctggggcagcagtgcagtgttgtgctgatagtatggcgctgcctcttgtccgtccttccgtcgactacacgtgcactcagcttgctgcatcaggatcggtccaggcatgccggccgcagcaggatactcatgctatcacgtcaagagcgcacggcaagtacggcgttagtccagcacgcgctccagggcgactaaccgacagtgacaacgaagcactgctgacgccaaacacgggccacagcaaacagagcacaagggaaaccaggcgccacacccgcacaaacgcgcgacgaccacgccgagagaaccgacacgccccagcgacacccaccaggccggcagcaagccacggggacagcagccaccgcacacctccgagggcgacacgcgacgccagaccaacgggcgcgcggagaagacgactagaaggaggaccccattgcagactgcacggtagccgggagaatgcacaagtagagaaaaccggagtagagcatcgggtcgacatttaccggtttccaccaggcaaacagtacacccagaatcggaaacagcacgaaggtgctgcacattacccacaaatgcagtcgccagtgaccaccgccagcaataatcgcctcacgcgacaacttcgcacgccctgcataaagaacagcagggcaatagctgactggcctgttacaaaaacgcttttcacgacggttatcgctacactaaatattacgatgatgtcgaagtcgatgcctggcgagggcggcgtatcactctatactggcccggtgatcaccagctaccgctatacccattatgactccagcgatgcaggtggtagttatagcaatatgatttccgtgcgtctgaatgacccgcgcggcactggttatacgcaactatggctaagccgcggaacaggtgcttacacctatgactggacgccagaaacacgctacggcagcatgaagagcgtcagtctgcaacgtattcaaccgctgactgagcaacttaatctcgggctgacggcaggtaaagtgtggtacgacaccccaaccgatgattttaacggtctgcaacttgcagcccgtctgacctggaaattctga

SEQ ID NO: 144235 - DNA, 1347 bp, Homo sapiens; identical to SEQ ID NO: 129241

SEQ ID NO: 144236 - DNA, 1093 bp, Homo sapiens
ccggatcatgtgggtcgaggaaatcggccagcgattcggtaaccatccattcggtgcgtcgctgctcttctgtggtggtaacgctcacatccgcaatgcggatatctacaaaaccacacttcttcagccagtttttcagcgccagcgcggaagggatgaaatagacattacgcatttgcgcgtaacgatcgcctggtaccagcaccgtgttctcatcaccatcaataaccagcgtttccagcaccagttcaccttcattgaccagttgatctttcaactgccatagatgctccagcggtgaacggcgatggtaaagcacgcccatcgaaaagacggtatcaaaggctttcagtgccggaagttgttcaatactaacggtaacaaatgcgcgcgcatctgctcgaagtgcctgcatcatctcaataaccgcagctgtgagcggcagttgtgcgccgacgccgtgagaagtatccagcgcattcgccagatccttaatatgcagatcaatacggaagcccggcttgaagttgcggtccatcaccatcggcgctttggcatccaaaacggtactgcccgccagtccaccgcgaattgcctgataaaccaggtccgggttaacgcccgctttagttgccagcgttaacgcttctgacatcgcggcaatattcagcgccacaatgacctgatttgccagtttggtgacgttacctgcaccgatttccccggtatgcaccacggaacccgccatcgctttcatcaaatcatagtatttgtcgaaaatagccttgtcgccgcccaccatcactgacagcgtaccgtcgatggctttcggttcaccgccgctcaccggagcatccagcatatcaatgcctttcgctggctccgcgccttcaataatgccattctcacccagcgccacctctttcacatgaggggagtttggcagcatggttatgatgacgtcgcactgttcagcgatcgctttagccgtagacgctgtttctgcacctgcagcaatcacgtcagcaatagcttctgggttacggtcagcaaccaccagcgagtaacctgctttcagaaggtttttactcat

SEQ ID NO: 144237 - DNA, 685 bp, Homo sapiens
actggattagtgatcagatgatagtcatcgatgaccagataaatgtgggctatgccattccgccagctcaatgaaaagctgggcgaagagtgacgtcaggctggcatattgccgtttttgcgccatcgtctcacatatcgcacagtgaccgttggttgcctgctgcacggcggcaatgagatagctggcgaaacgctcttgctggttatcaccttcatccagcgagtaccagccgatatcgtttttgcctgccgcccactgggaaatgagggtggtctttccgtagcccgcaggactcgtgatcagcgccagccggaagttgttcgcgccggaaagtttatccagcaggcgctcacgaaccacggtatggtcgagtcgaaccggacgacttaattttgacggaatcagcataggtaaccacttcactgtggaaaatgaggaaaaactattttttttgcccttcggcactaatgggtattaggacagccctaaacctttctaagggacgagattaacgtttttttatgtgtctgaatttgcactgtgtcacaattccaaatctttattaacaactcacctaaaacgacgctgatccagcgtgaatactggtttcccttatgttcatcagattcacttaagcaagggtttcttcttcattcctgaagaaagtgccatctaaaaagat

SEQ ID NO: 144238 - DNA, 1494 bp, Homo sapiens
atgctgattccgtcaaaactaagtcgtccggttcgactcgaccataccgtggttcgtgagcgcctgctggctaaactttccggcgcgaacaacttccggctggcgctgatcacgagtcctgcgggctacggaaagaccaccctcatttcccagtgggcggcaggcaaaaacgatatcggctggtactcgctggatgaagtaccggtccaccccgtgccgccgccattcgatcaaccggttttgccatcgccggaatccccccactggcatcactttctcgcccagcggccctgtaacccaggcgtgacgttcagcccactgggtggctgcaatcatcgcttccaccgttccttcgccaccgtcggcaaccggaacagaaactgcctgcatcatctccataaccgcagctgtgagcggcagttgtgcgccgacgccgtgagaagtatccagcgcattcgccagatccttaatatgcagatcaatacggaagcccggcttgaagttgcggtccatcaccatcggcgctttggcatccagcacggtactgcccgccagtccaccgcgaattgcctgataaaccagcctgcttacaccaccggttctcaaccgatgatcacgttgctgctgattgcctgcccgctgctgccattcatcattatggcgatttgcaaaggcgatcgtttgccatcgcgttcccgcggtgcggcctgggtgtgcggttacgaccacgaaaaatcaatggtgattaccgctcacggttttgccatgccggtgaaacaggcgtttgcgccggtgctgaaactacgcaaatggctgaatccggtgtctctggtgccgggctggcagtgcgaggggagtgcgttgctgttccgccggatggcgctggttgaactggcggagtatcgcgacattatcaaactgctggggcgtcagagcgtcggcccggatgcctccggctgggtgttccgcctgacgccgtatgtgatggtgggcgtcatgctgactatcgctactgcgctgccggtggtgaccgtcggttctccgctgccgcaactgggtgatttgatcaccttactgtatctctttgccatcgcgcgtttcttctttgccatttctggtctgataccgttaatgggaggcgatatgcacgaaataaccctctgccaacgggcactggaattgatcgaacagcaggccgcaaaacacggcgcaaaacgcgtaactggggtctggctcaaaattggcgcattttcttgtgtcgaaaccagctctcttgccttttgttttgatctggtttgccgcggcagcgtggcggaaggttgtaaactgcacctcgaagaacaagaggccgaatgctggtgtgaaacatgccaacagtatgtgacgctactgacccagcgcgtccgccgctgtccacagtgtcatggtgacatgctgcagattgtggcagacgacggtttacagattcggcggatagaaatagaccaggagtga

SEQ ID NO: 144239 - DNA, 2664 bp, Homo sapiens; identical to SEQ ID NO: 137763

SEQ ID NO: 144240 - DNA, 645 bp, Homo sapiens
aatgggggctgcataaccagctggcggtgtttaacccggcaccggtgacctgatttcttttggaacgtccctcgcaaaacatggccttagtgccatgtttttattgtttaaagcccccacgtccattaataatgcatttgcattaccttagttcaagcttataatttgagcagaaaacaggctgtaaaaggacagtgaatcatgcccgctaatgctcgctctcacgctgtactgaccactgaatcaaaggtcacgatacgcggacaaacaactatccccgcgccagtgcgtgaggccttaaaactgaagccaggccaggacagcattcattacgaaattctgcctggtgggcaagtatttatgtgccgactgggagatgaacaggaggatcatactatgaatgcatttttgcgttttctggatgcagatatccagaacaacccgcaaaaaactcgtccattcaacattcaacaaggaaagaaacttgtcgctggcatggacgtcaacattgatgatgagattggcgacgacgaataatggattttccacaaagggttaatggttgggcgctatatgctcatccctgttttcaggaaacctacgacgctttagttgccgaagtcgagacattaaagggaaaagatc

SEQ ID NO: 144241 - DNA, 541 bp, Homo sapiens
ggatgattgttaccgctcccgggacgcgttcccgggaataatttcgcagggaggcaaaatgacaaacctgacactggatgtaaacattatcgatttcccatcaatacctgtggcgatgttgccgcaccgctgtagccctgaattgctcaactacagcgtggcgaaatttatcatgtggcgtaaagagacggggctttctcctgttaaccaaagccagacttttggcgtcgcctgggacgaccctgccaccaccgcaccggaagcgtttcgctttgatatctgcggcagcgttagcgaaccgattcccgataatcgttatggtgtgagcaatggtgaacttaccggtggacgttatgccgtggcccgccacgttggcgagctggacgatatttcacacacggtatggggcatcattcgccactggctgcctgcaagcggcgagaaaatgcgtaaagcaccgattctgtttcactacaccaatcttgccgaaggggtgacagagcaacgactggaaacggatgtttatgtgccgttggcgtga

SEQ ID NO: 144242 - DNA, 693 bp, Homo sapiens
atgggtctgcccgtgatgtggagcctggaagaagccgacgtgcagcaagtcttggatgggaagatcatgaagaacgcaggcgtccctctgagccccttcaccccgccagccccggggcaggctcccagcttgccctccgagttggccttgtcagggaaaggagccagcagacgccctctcgctcagctggcgcacggcaagaacactatcgccagcgcgattccaaactcgtggttccgatcaaaacgctcttctgctaacatgggccgctttgatcttcctgaaaagcacacttggagcagcgccactttacagacggcatccgagagctttagaaaagttaactcaccccttgtcaaatggctcttcattgtggagcccggctttgcactgggacagtcggactgcagagctgctcctctaaaccctaaaggaggaaccgttagcgaaccgattcccgataatcgttatggtgtgagcaatggtgaacttaccggtggacgttatgccgtggcccgccacgttggcgagctggacgatatttcacacacggtatggggcatcattcgccactggctgcctgcaagcggcgagaaaatgcgtaaagcaccgattctgtttcactacaccaatcttgccgaaggggtgacagagcagcgactggaaacggatgtttatgtgccgttggcgtga

SEQ ID NO: 144243 - DNA, 939 bp, Homo sapiens
ctattcctcgcgcttcagctctgtttcggcggtaatggtaatgtgctgtgcctttagcacggcgatgttgtcttcggcttgactgccgaaatccagcaccagtttatccggggttattgccagtaatttgctgatcagctgcccgccattccaagtcaatggcgtatgatcgctgtggccatctgtaacccacttctgtatcacattgccatgtctcctacagtgtgctccagccttatgtttggttcctatttgatggccttttctggtgccatggcccacactggatgcatgctgagactgactttctgtgatgcgaacaccatcgatcactacttctgtgacatcctccctctgctccagctctcctgcaccagcacctacatcaatgagctggtggttttcactgtggttggcatcaacatcattgtgcccactgttaccatctttatctcttatggtttcatcctctccagcatcctccatatcagttccaaggagggcaggtccaaagctttcagcacttgcagttcccatataattgctgtttctctgttctgtgatgcaaacaccatcaatcattacttccgtgacatcctccctgtgttccagctctcctgcaccagcacctacatcaatgaactggtggttttcattgtggcaggcatcaataccattgtgcccactgtcaccgtctttatctcttatggtgacatcctctccaggatcctccacatcagttccaatgagggaaggtccaaagccttcagcacttgcagttcccacataattgctgtttctctgttcttctgtgatgcaaacaccatccatccctatttgtgtgacatcctccctctgctccagctctcttgcaccggcacctacatcaatgagctggtggtttccactgcagcagtcattattttccactgtcaccat

SEQ ID NO: 144244 - DNA, 1364 bp, Homo sapiens; identical to SEQ ID NO: 142970

SEQ ID NO: 144245 - DNA, 1551 bp, Homo sapiens
atgcccgtgccgcacgccgcgctgggcgataacgtcatcggcaaaatgctgcacgtcacccatgtcacctttcaacacggcgatttccagacagtcgtcgtggttgatgtgcacatgcagcgtggcgacggagaggtcgtggtgatgatgctggccattaccgctggaaaacggttctacagcgtagtcgtgggtaataacacgcagcggtccaactgtggtgtactttttcacagcgaatgcaccgctgtacacggatccagggaacagcaacgcttactgcgcgctaatcggggcgtttcaaacttacgaatacgcttacacttgatgcgagtgcagctgtcatcctccgacaagatgtttggctttacccatgcaacagggactgaattcgccggtgttgcccaactgaaagacagtaccttcactctggaacgcgacaacaccgctgcgcttactcacgcgatgttgcagtctgacagtgaaaataccacatcggtaaaagttggagagcaatccattggtggactggccatgaatggaggtaccatcattttcgatacggatattcctgctgcgacgctcgcggagggatatatcagcgtcgatacgctggttgtcggcgcgggtgactacacctggaaaggccgtaactatcaggtaaacgggacgggcgacgtgcttatcgacgtgcctaaaccgtggaatgatcccatggcgaataaccctctgacgacgctcaatttgctggaacacgacgatagccatgtcggcgttcaactggtgaaggcgcaaacggttattgggtcggggcgacgaggtggaagcggacaaaatttccagtggctgtggctggaggatccccggcgcagcggcattattccgcgtgatgccgatcagtacaatgctattcaggaacgcctgatttcacgctttagcgagctttacagtcgggaaccgttttatttttgctgctgtcaggacaccgatgaagacaggagtaccgtgctgtacttgcaggactgcgcccagcaggcagggcaggagtcgcggtttatctacattgaagatctcggtttgggcgtcggcggcgtactgaccgatcttgatgataatgtcatccagcgtgcatttaagctgtatccgctggagtggatgatgcgtgacgataacggtccgctgctgcgcaagcgtcgcgagcaatgggtggagccgttatggaaaagtatcttgagtaataaagggctaatgccgctgctttggcgcttcttccctggtcatcctaatcttcttgcgtcctggttcgatggcgagaaaccgcagattgccgctggcgaaagctatgcctcaccgatgaacgcacgcgtcgtgaacaacctgcgtcacgctaccaacagcgagctgctgtgcgaagcgtttctgcatgcctttaccgggcaacctttgccggatgatgccgatctgcgtaaagagcgcagcgacgaaatcccggaagcggcaaaagagatcatgcgtgagatggggattaacccggagacgtgggaatactaa

SEQ ID NO: 144246 - DNA, 981 bp, Homo sapiens
ctcttgatgcctgcgcgcgactctagaggatcggtgggacaacgcaaccatactgttcgtcggcatttaacccgctacgcacggcgatgttggcctgtttacgcgtaatgtgatgaagttccctgggctttgtcggggaaatgtcaggcaccagagtaaacattgtgttaatggacgtcaatacatctggacatctaaacttctttgcgtatagattgagcaaatcccaaatagccgttaaaattatatgcattatcacgccgacaggtgcattacacgatgtcacggtaacgcctgtacggtaaactatgcgggtttacggtcagtacccacatcaactgtgtggactggtctcaatttattgacgaagaggattaagtatctcatggctgaatggagcggcgaaatatatcaggcccatgcgttgagcccggcaaaaagagcgaccaatccaaaaagattacggtttccattcctcttaaggtgttaaaaatcctcaccgatgaacgcacgcgtcgtcaggtgaacaacctgcgtcacgctaccaacagcgagctgctgtgcgaagcgtttctgcatgcctttaccgggcaacctttgccggatgatgccgatctgcgtaaagagcgcacggccgaaaatcccggaagcggcaaaaagagaacatgcgtgacatggaggattaaccccggagacgtgggaatactaaagcaaaaaaatagcggcgcgtagcgggaatccgcctgatgcgctacgcttatcaggcctacgtcatattgcaatttattgaatttgcacgaacttgtaggccggataaggcgttcacgccgcatccggcataaacaacgagcacgttgtctgcgacccaccgctttttatacatggacgtttaactatgaaaaacaggctgctgatcctcagcctgctggtttctgtacctgcctttgcctggcagccacaaaccggcgacatcatctttca

SEQ ID NO: 144247 - DNA, 900 bp, Homo sapiens
atgaaactcataatcaaaagggtcagcaacagtggccacgacctggcaaacattctcaggctggccacatccacgcagtgcaaaaagtggctggatgcagtggttcatgcctgtaatcccaacatttcgggaggccaagcgggttactcggaccgctgctatgtcatgggctggcctgccttcctccacacacggggccgtaaatgtgatgtgcggcacctgctgtttggtgtcgggagctgctcttttcttggaagttttgctgaaagacgtaacatcagccactgctctgctgatatcatcttccgattggtgaccctgtttgttatcttcctgtgtagattgtggatccctcttcttgtcatccactcttttggaattggacgatcttttccgcccagcatccactccatccgggagtgtatttgtgggttcagcccccgtcagtccatccgcaccgtccgggaggtgcaatccacgagccacgggaacgctgcacgtaaacaagcgggtttacggtcaggacccacatcaactgtgtgtcctggtcccaatttattgacgaagaggattaagtatctcatggctgaatggagcggcgaatatatcagcccatacgctgagcacggcaagaagagtgaacaagtcaaaaagattacggtttccattcctcttaaggtgttaaaaatcctcaccgatgaacgcacgcgtcgtcaggtgaacaacctgcgtcacgctaccaacagcgagctgctgtgcgaagcgtttctgcatgcctttaccgggcaacctttgccggatgatgccgatctgcgtaaagagcgcagcgacgaaatcccggaagcggcaaaagagatcatgcgtgagatggggattaacccggagacgtgggaatactaa

SEQ ID NO: 144248 - DNA, 2856 bp, Homo sapiens; identical to SEQ ID NO: 140021

SEQ ID NO: 144249 - DNA, 2017 bp, Homo sapiens
gcctgagcggcgctctagaggatcaacaaaatcgctgccttcgtcgctgacaatcaggaattcgccgggggccggactgtttagtgattgtgccgctcgcgccgtttcatggcgttgataaacgggcgcggtggaggttgcccccaggttattccagcgatttccgcactcaccgggcgtaataacacattcacgccatcgagcttcccggcgttggcgcgttttaccagcgcgtcccagtctttactgttgccgagattgaccagcgcatttttcagtcgcacacagtcatctttggcagaacataaatccgctgtcttcagtacaatgtcgccaaaatcatcaagcaataccatgccggatttttgaattgctgaacgtaatgaggcactgacgcgagattcatcttccggtttagggtgcagctggcgattaactgcttcagtcaatgcccgccgctttgttgacccagttcagattctggtaatggcaatgagcgggcgtcgttccagatgatctgcgagcagtcaaacggtaaaaaaggtgaattggttttcgcgctccaggttccggaagttcgaatattacacattcccgtaccgctaatacgcaatgtatcgcctacccgcacgccagcgtcagccagttgttttacgctggtggcttcaatggtctgcgcgcctttcatccatgagagagtgaatttcagcggcatatccagcgggatccagaatacagcataaacagcaccagcagcgagcccgcagcgataatcgtactgcgcagccagtggcactacatggcggtcgagatagatatcgatatcggtttgttgaccgagatcctgagcaatgtatggctgccagtgtgcgggatagaccaggtcgataataccgagtgaaatattgttgatctgttcctgatcgttttcgccaaacaatccccaacgacggggtgtaccgcgcagacaatgaatttcccgcagggaggattttgccgggggcgcgaatagcccccacagacctgcgcccagcagcagtaacgcgccgcctgccagccacggaacaaatacatccggggtaatcaggcagaaaaagaacatcaggaaggaggcgacgatcagcaacgcttcacgcagcccgcgcggacgactcagcgcatattcttcatggggatcctctagagggaacgtgcatacagcagtcactcgtatggccgcgccatcaatattgccctgacgtaacaaagaacggaaacgggcggcaacgacgtccgggttattcggatcaataagttccagccgatataacgactgttgcaccagatcttcacgatgggtcgcttcgcctaaccgaacttgctccagcaactgttgctgagcggttggtgctgcctcgaccatcggcatgacggccagaccgagggaaagcgtgaatatgtttagtgtgaatttgcgcattccttttgtcgagaagcggaaacggtgttgatcccagccttgtccaaacagggtcagcacatagttgtaataggcatcgctgccgggaaagttatcggccacgcgctggcgctgaacggcctgcgcatcgcggttttgtaaaaagggcagcatggcggcagaaaaaccgactggtcctttaccctgcgctttccccgtagccacatccactttttccggcggataaccgtttttctcagtgaatgtcgccatcggtttaaaccggttgagcatccgcgctttttgcggatcgctgtcaggcatcatgcctacccacatgtaaacgcggatagcgtcgtagctgctgatcaatgttttttcggcttttagctgccagcctttgtctttctcatagcgcacccagtctggcgaaaaacctttcggggcggtttccagcaataaacgttgatgggtttcgcgcaacgtggtccaaggcgcgccaaagcgggtgaaatactgggcagcgttcggcggcagtagccatttgccggtacaactggaccagccagaccggaccat

SEQ ID NO: 144250 - DNA, 1998 bp, Homo sapiens; identical to SEQ ID NO: 138668

SEQ ID NO: 144251 - DNA, 1076 bp, Homo sapiens
cgcccctccaccgcgcgcgtcgccgcatgactcgtatacaagaaagaacataactttcctctaacataacgtgggcaagtcttactgccgtgtcgtgtgccgccagaagaccggagtgaggcacgtgggtttgcccgtaaaggttggttcgccccactatttgttgtccccacttgccattggggttcctaaagtatgggatgtatatcgctggtggtacacaggattaatttcagatctcaggatgcatttctgtgttttaatagtattattatgtgtttatttcaagatgtaatagaaatacacagtccattaaacttatgatttcatggatatcagtgtcatgcccaggaggaagcaaaagtgagcaatctctatttaaaaatatgtgcaattatacaggcattcacagtgtagtggcttttaaattttctacccattaactaaacatgctttccatttggggatgaattccacactggtctcgttttggtggaagacagggctctgccttccatttcataaccagaaagaaccaactactcccttcctcctccctgatagtgaggaaagtgtgggcacatgagcctttgcttataggtcacatggatgctcttactgaagactttgaatctgagggagtgaagcaagacacaaaaggcattggattacctgtggcagtagctcctatcctgaccactcactttatgagtgagcattttgatatcacaaagcaccaaacaagatccagaacattgcaggagtcagtccagggtcacacagctattgaagagtagggcctcatggtgggacaagacctcttctccaagccccatactctgtactacattccatttgagaaaaagaataaagttaaggtctctgggagttaggccacccttatgagcactggtccccaaaaaatgggaggaagctaaacctgaggttttaagctggcagcgcggcaacacccagaaaaagggatcacagggtttctcctttacgaaaaaatgggcgaaacacgtttgcgctcactttcttcacgcctgggtcaaaacgcagagcaaccacaaccc

SEQ ID NO: 144252 - DNA, 705 bp, Homo sapiens
atgaacagagcagtgtatggagacccacatcgtgaacttttgctccaagaacttccacaggaacataccaggaaagccgagaaagtccacagaccctttgaaggaggcggattgccactgcaggctccatgggacagtcgaggaactcaagtgctggaatccatggctgacagacctgaagacggatcatatcacgggattctgcagatactccccagtactagcccagagcccagtagctccactgggtggccagtactggaagtcctagccagaaaaatcagacaagagaaagaaataaaggacatccaaacaagtaaagaggaagtcaaactgttgctgtttgctgatgacatgactgtatacttagaaaaccctaaagactcatccagaaagttcctagaactgagagcggggaagggtggagaaaagattaagaagtcggatggttgccgtgtctgtgtagagggagtgaggaaagtgtgggcacatgagcctttgcttataggtcacatggatgctcttactgaagactttgaatctgagggagtgaagcaagacacaaaaggcattggattacctgtggcagtagctcctatcctgaccactcactttatgagtgagcattttgatatcacaaagcaccaaacaagatccagaacattgcaggagtctgtccagggtcacacagctattgaagagtag

SEQ ID NO: 144253 - DNA, 811 bp, Homo sapiens
ttaaacatcaagttctggtacaggaaaagagctgagatggcttacttttgatggacgaaaggaatatttccccattattacaaaagaggatgccaacttaacaagctgtgtaggtttggtggtggaaagattacggagtttgaatctgaggacacaggtagcaatggttggaacctgaaggagagaaacctccaaggagaaggttagctgttgtttgaatggataagcccttctaatctgaagatattttcttttggtaagaggaagcgggaacccgttcccgccctcatttctagatatgggatttcctttgtggaagggaatcatagtgtcctttctcccttgcccttcctgtggctgttgggctggtgcctagaagtgggtgaggtccagggccaggcttatgcaagctcagcctcattcctggtgaagatggcatcacgtcaagaagcaacagtgggtttgattgtcactcaccaggcttaatgctgcggctaagaggagctgctattaaagaatttccattcaggacccacaccatctgtcgagaatcacgaatagcataggatttgggtgctgcctcccctgccagatgacaaaaatgcacaaaatacgcgtgaggttatcaacttcaggactccagttgcatcctggtattaatggcttttgagtttctggagaaagtttcgtaactccgagaagtagtggctataacgataaatgaagggcgaatagggcaaggcctggtttgtgaatcaaagcctttaaaagattcccggggtccgaggttgaaaatgtaatcagtgtcatc

SEQ ID NO: 144254 - DNA, 770 bp, Homo sapiens
tgactactaattgcaccttcccccccgatgctctgaggaaccctgaaaaatgatctcatgtcagaactgcccacctgtgggatggataagagaaggtgctcctcacccactcctattccccattggtcatgggttcccatgaagcagctctctctcacatccaggtttatgcatgtgtgaattccaactagtttccagcaagtgaccttccctatgttatcttgggagccctgaagctggaagagagaaatgttcaatgttgctgagataatacactgccaggttacactgtctcaaagttggttgcacggcaatgactggagtaaaaggcctgcttacagcatgtaaggtggggttcaggagtatcccaaagagaatgcggggcactgaagcaataagagataatgccagaagcatagttttggggacaaattatgcctggctgaaaaattggaacttagcagtgggtacccattgcaagacccaatatgcctgcttgtcatgtgcaaagaaggacaagttctcttgagagaagacagcctgttatgctcatggtcatgctcaggatattatggtatatttattgcagtatacatgtacttggttagtggatttgcagattatattacaaaactttattaaaataactttcacaaaatggaccacctgggttaaaaggattccttattccgggaaggggaggaatggaagggccccttaccaaatttcccgaaattatggatgattacccaggggggtttcatacctcg

SEQ ID NO: 144255 - DNA, 1304 bp, Homo sapiens
caattggattttctaaatgagctggctcttctaaaaaagccacaaagttgtactctctattctgttccagagaatccacaaaggagtatcattgaactccaagtaacaggaaagtgactttatgctgggaacatccctggggcctgtgacacggaaggacatggataggtgcccccccagcctcgtggacgttgagagcaataagtacctccaactgtggtcgctgatccacacagatgctcacgctcatcatgggaagaagcgagggagtggaccacttgttgacctggggaaggctgttccttcagaggaacaggaaaaactccctgcaggcgaagataagcttgcagggcaagaaaatcagcagaatccagtacatccagagcagggaagtcagatgggcagggatagaaggcagcagaaagataaagaggacccagatcatgtgggcttgcctcctcaccaccatctgatctatcttgttctcttcacaaaaggctctgaagacatcatgaacccacaacgggaggcagcacccaaatcctatgctattcgtgattctcgacagatggtgtgggtcctgagtggaaattctttaatagcagctcctcttagccgcagcattaagcctgcctgtagagacacagaattcagtgacaaggaaaagggtaatatggtttacctgggaatcaagggaaaagatctctgtctcttctgtgcagaaattcagggcaagcctactttgcagcttaagcttcagggctcccaagataacatagggaaggacacttgctggaaactagttggaattcacacatgcataaacctggatgtgagagagagctgcttcatgggaacccttgaccaatggggaataggagtgggtgaggagcaaattctcttatccatcccacaggtggacaattctgagatgcgttcattcttcatggttcctcagaggatcccagcagtattgagacataatcacccatggcagggcactgaacatgagcaagagatagacagccagcccatcttacatcacaccacctgtgccctctgccagaggagtgaggacattgtgatggtgaaggaggaagaagaggaggagaaaccacagaaagactcaagagtgggtttgcagccagataaacagtgctggggtcagacatctttggtgccccgtggggctccatcctaggcttgaagaggtggtgaatacaagagaaagtatgtctggcaagcccaaggacagaacaaattctgatgccggaatccaggctgtggccagacagccagaataa

SEQ ID NO: 144256 - DNA, 771 bp, Homo sapiens
tctcctctctcaaatagtcatacacatgtcatcgtcaggtctactcagatacctctaacttcatgtatccccaattgggatgtgttgtgcggttttctcaaaaaccgctaaacattctctgtgtggtggcactttcggtccactccatttcctcgagccggaaatacaggagacatccttgattcctccaagccctcactgtccatccattgtattagcaaagattggtaggtgtaaggtggaaaaaagggttgatttttaagataacatcattacttgcctggactactgccatcacattctcactacccacctctcactttatttgggtagcctaccatcccgtctcatattgtggcccatgagatagaagccccccacttatgtctcatgggccacatcttaagcatatgtccacattttgccgcaagtgtggtaggaaattttacttctttttgggaagctacatgtgctggtcacaactggggttctgttattaaggacgaaaaacaaaataggtttgaggagggtgatggagggtctctgccacatggctaatgggaggagcctgtcactattccctgcctggggggacgtaactgagtgtcagaccagaaagactgaaacatcttctccattttcctttgtgtttccagtcactcttcatttaatagcctgtagagacacagaattcagtgacaaggaaaggggtaatatgggttaccctgggaatcaagggaaaaagatccccggttaccgaagctcgaattt

SEQ ID NO: 144257 - DNA, 1195 bp, Homo sapiens
ctggccgactgtagtagatataatggactggagatgaccctgagttgttgcgccggggcgagtaccagatgccgttggaggtattgagcgcggcggattgaagtcgccggaggcgtcagaaggggagatagcgccacggctgctgttagatggcgagccgttggcgttaagtggtgacaagtggcggatttcaccatggttattagtaaccgatgatacggcaaccatcaccgcgtttttgcagatgattcaggaagggaaggcaatcaccttacgcgatggcgatcagaccatttctctgagtggcttaaaagcagcgttgttgtttattgatgctcagcaaaagcgcgttggcagtgaaaccgcgtggatcaagaaaggggacgaaccgccgctcagcgtaccgcccgcgcctgcgctgaaagaggtcgcggtggttaacccaacgccgacgccactctcactcgaagaacgcaacgatttgctggattatggaaactggcggatgaatggtctgcgctgctcgcttgatccattgcgtcgtgaggtgaatgtcactgcgctgactgatgataaagcgctgatgatgattagctcgcaaatctttaacggccacatggtccatatcatcaaagacctggttttcaccgaccatgccccagataaaggtataagctttggttccgacaccggaatggatcgaccagctcggggagatcaccgcctgctcgttatgcatcacgatatgacgcgtttcttgcggctgccccatcatgtggaaaacgcaggcgtcatcatccatattgaaatagaaataaacttccatccggcgctcgtgggtgtgacacggcatggtgttccactagttacccggagccagctccgtcagccccatactcgattggcaggtttccagtacatccgggaccaaatatttgttaatcgtgcgacggttactggtgaggaaatagcttacgccgagttgtttaccaacttccccgccaacggaaaccgttttagttatcggcataatgccgccaacaataattcggtcaatgtggctgtaaaccatggtgtactcatcggcgacaaataccttttcaaccaaaaattcattgcgcagcccttgggtatccagcgtttttgcgtgcgcactgtggatgctctgtcttacgtccacatcaacctccgataa

SEQ ID NO: 144258 - DNA, 2117 bp, Homo sapiens
  misc_feature (1)...(2117): n = a,t,c or g
gtagcacacaacaacacatgaaacaatggtttaacagcacggacaaaccacgaactgggaccttgggatctaccaaggcatccaagacaacttctgccctatataacaactgcggaccaattaaagtccttgaaattccagacttgcgacaacgctccctgatgcacatatgggccatgaaaaggattttggggccctccccctggcggatgatcttgatgcgaagagtgccgttaaaccctgcgctagtaggggagtgtggaagcaaccctcacacctgccttaacagatttcaggattcgctacgcttccggataacagttttgcacccaatttacgttccaacaggtaggtgcaagcaacgggcaggatcctccggcgtacgtagttccgaccccccagaggctcggaggaccataggcgagacacatgacacagatgagactgaccacaatcgtacgtggacgttccaacgatatttcgccggcattgattccgccaataccaactttgtgctggcaaacaccgaaccaacacatatatttgtgtggacgcgggctgcttataacaataacaatgaaaccgcgtggatcaagaaaggggacgaaccgccgctcagcgtaccgaccgcgcctgcgctgaaagaggtcgcggtggttaacccaacgccgacgccactctcactcgaagaacgcaacgatttgctggattatggaaactggcggatgactggtctgcgctgctcgcttgatccattgcgtcgtgagtcacccgatggcggcaacgtacatgccccatcctacaccctcacttgcatagacagacaatctacacagtttgagtcgatcacacacactctaccaatgacttacaatcactactcaatggttgcgcactatagatctcggtcaccctcagacccgaacccgagccagggagtcatccacaggcccccacgcatgcatcaaccatttcattgcctccacagtcagcgccaccacatcttggtcctcattgcagccatgtccccatccgaggtttttgggttgagctcaacnggtggatggcgtactggcacaattggcgggtacacaatctcatttgggttacgcgtacacactctagttttttgcccttacacgctgaatgaggagcgctggccgcacgggcgccgccgaggcgaaacggccggggagcgcacaagcgcagcagcgacaagcagcggtcgaggcagaccacacaagcgggagaagagcgggacgacgcaagccagcacggagggcagcacagacggcgaggaggcgcaagacccgcgcgcagagcagacagcagacgaaagaagggagaggagccacgagcaccgagcacacgccccagcacagaaggcccgcacaccacaagacgccagcgcatgcacacgaagcgcgagacgcacgcgacacgcagccaccccgcgaccacgcagaacagacagcaactcgcaaccacgacgacgcaccaggcccaccacgacgcaacacagcacacaagaaccaagtacccaccacgagagacaacgagacactagacaaaaacagagaacgaaaggacgagcgaacgaaacggcacaaccacgacagcgacgagacagacggagccgacccacgacaacaggagcgagcgcacagagagacaacgcgaggaccacgccaggaaggcaagacaacgacgaacgagaagaaggaacaccacctgccccgataacccgcaggaagagccccaaggcacccagacaccgaggacgaacaccacaccgcgcaaccaccaagagcggaggcgagacagaaccggacgcggcaccggacgacagcaggacgagagacaacgaaagcagggaaaagcggacgcgtgtcgacccggaacagagcgaagcgagacaacgagacgccgacgagaccgaagaggaagcgacgcaacggggacacgacgcgagcagagccggagaacggcaagcgcagcgagcggcggacaaagcagcgaaagaacagcaagagccaacgaccgcgccgcacagagcgaccaggagcggccacgaggcccacgagaagcagccagcagaacgacagggaagagaatga

SEQ ID NO: 144259 - DNA, 955 bp, Homo sapiens
atgctgattcgtctgtggttagataaagtgcaggataaagcgaatttccgctccatgctgaccagtcaacaggatgaaaacgacaatccggttcctgatgccttgcaggtcacagatgaagaatatgaacgctggcagaaagagattggtgaaattacgctgcccgatcatgtatttgagctgatttttatgctgcgccagcaactggataaattaccggatgcgccttatgtctcggatcgtcgctggaaaaaagcgatccgattattgcaggccagcgccttttttagcggtcgcagtgctgttgccccggtagatctcattttgctgaaagattgcctgtggtatgacgcgcaaagcctgaatttgatacaacaacaaattgatgtattgatgaccggtcacgcctggcaacagcaagggatgttgactcgccttggcgcgattgtgcaacgtcacctgcaactccagcagcaacaaagcgataaaacagccttaacggtaattcgtctgggcggcattttcagccgtcgtcagcagtatcaacttcctgttaacgttactgcttccactctgactctactgctgcaaaaaccgttagggtaccgagctagagatcgcaattttggtcagttcgcccagcgtatgcagctcggcaaactgcgcttcatcgttggcgtcctgaatagaaccggggcgcagaccgtcgcccagcgacagcgaaacgtcataagcggcacagatttcacaaatttcgcggaagtgttgatagaggaaattttcctgatgatgggagaggcaccatttcgccataatcgaaccgccgcgagagacgataccggtcaggcgtttcgcggtcatcggcacatagcgcagcagtacgcccgcatggatagtgaagtaatccacaccttgctcggcctgttccagcagcgtgtcgcggaacgcttcccag

SEQ ID NO: 144260 - DNA, 1878 bp, Homo sapiens
atggtttacgcagttattgcgttggtgggtgtggcaattggctggctgtttgccagttatcaacatgcgcagcaaaaagccgagcaattagctgaacgtgaagagatggtcgcggagttaagcgcggcaaaacaacaaattacccaaagcgagcactggcgtgcagagtgcgagttactcaataacgaagtgcgcagcctgcaaagtattaacacctctctggaggccgatctgcgtgaagtaaccacgcggatggaagccgcacagcaacatgctgacgataaaattcgccagatgattaacagcgagcagcgcctcagtgagcagtttgaaaacctcgccaaccgtatttttgagcacagcaatcgccgggttgatgagcaaaaccgtcagagtctgaacagcctgttgtcgccgctacgtgaacaactggacggtttccgccgtcaggttcaggactctagagatccccggtaccgagctccgatccatttggttgaagacgtttatccccgttacaaaaagtggtgcgacgaatacttctacctcaaacatcgcaacgaacagcgcggtattggcgggctgttctttgatgacctgaacacgccagatttcgaccgctgttttgcctttatgcaggcggtaggcaaaggctacaccgacgcttatttaccaattgtcgagcgacggaaagcgatggcctacggcgagcgcgagcgcaatttccagttatatcgtcgcggtcgttatgtcgagttcaatctggtctgggatcgcggcacgctgtttggcctgcaaactggcgggcgcaccgagtctatcctgatgtcaatgccgccactggtacgctgggaatatgattatcagccaaaagatggcagcccagaagcggcgttaacgtcagtgacggcttctcggaaaacagctgctggtaatccgtggcaaattgccccagatgccagaatccccactgcatggcggcgtctttcaccgtcacacgttgcgaccacggacttatcagctcgcggccaaagtatccgccagcgctgttcgcactgcacgctgatggagagtttccggattctcgcagaacgtcgccagcgcctgttggacaaagccccacagcgcggctttacgctgctctttcagttccagcgccgactggttacgcatcatatggtaaacccgatccgggttaaggcacaagttagcttccgggtgatgcgtctcatgtctacagtccagattgcgttcgccattaggccaggtgcctttaataaactgcacgacgcctactttttttccgtgagcaactgcgcgtgttgccgtaccaaatgccgcggtggttttgccttttccattgccggtaaagacgatgataataccgcgttcatcctgggcctgggcacacgagcatctacttttgctttcactcgctggctgacgctgttggtagcgttcatcactcattgggaaaaaacccagataggcccggttggggtgcaaagattctccagccgatcgccgccgtcgcgcacgtcgccaattgccacggcatccagtacggtggtgatgccgctcgccaccatcagcgcgtcgtggctgctcatcgccgagtgggcaggccagtcaactttcgggcgcggggtgaagaactactggtgtccgctgttactttatgcgcttattcctgtcgccaatacctgcgaaatgatcctgatgcccgcctgcttcggtctggccgatgacaaactgtggcgttggttgaatgaaaaactaccttgttcactgatgcttttgccaacgctgccgccttccgtgctgggcattcgtctgcaaaaccagttacagcgccagtttgtgcgccagggtgggtag

SEQ ID NO: 144261 - DNA, 2199 bp, Homo sapiens
atgacttatttagcactcggtaccccggaattgcacatgcgtattgaagaagatctgaagttaggttttaaagacgttctcatccgccctaaacgctccactcttaaaagccgttccgatgttgaactggaacgtcaattcaccttcaaacattcaggtcagagctggtccggcgtgccgattatcgccgcaaatatggacaccgtaggcacattttctatggcctctgcgctggcttcttttgatattttgactgctgtgcataaacactattctgtcgaagagtggcaagcgtttatcaacaattcttccgctgatgtgctgaaacatgtgatggtttctaccggtacgtctgatgcggatttcgaaaaaactaaacagattctcgacctgaacccggcattaaacttcgtttgtattgacgtggcgaatggttattccgaacacttcgtgcagttcgttgcgaaagcgcgtgaagcgtggccgaccaaaaccatttgtgctggtaacgtagtgactggtgaaatgtgtgaggagcttatcctctcaggtgccgatatcgttaaagttggcattggcccaggttctgtttgtacaactcgcgtcaaaacaggcgtcggttatccgcaactttctgcggtaatcgaatgtgccgatgctgcgcacggtctgggcggaatgatcgtcagcgatggtggctgcaccacgccgggcgatgtggcgaaagcctttggcggcggtgccgatttcgtcatgcttggcggcattgtggcgggccacgaagagagcggcggtcccatcgctgagcgcgaccggcgacaatttctgctgttcctccgcttgagccccgagtctgcgatgaacgctccttggcgcggttcgtcactccgagctgagggcgaatttcctgatgtgaaatatcgcttcttccgtaagtcttgccagcactgcgatcatgcgccgtgcgttgacgtctgcccgaccggtgcgtcttttcgcgatgctgccagtgggattgtcgatgttaatccggatctctgcgtcggttgtcagtactgcatcgccgcctgtccgtaccgcgtgcgctttatccatccggtcacgaagacggcggacaaatgcgatttctgccgtaagaccaatttgcaggccgcttgcccgaccaaggcgctgacgtttggcaatctggacgatcccaacagtgagatttcgcaactgctgcgccagaagcccacttaccgctacaagctggcgctgggaaccaaaccgaagctgtaccgcgtaccgtttaaatacggggaggcgggcggtgcagacagtacgttgctgcgcaccacgctgattgtcgggccgggcgcggtgatcctcggtctgttgatcctcgtcttccacctgacaagaccgtggaccttctggaagctgatgttccactacagttttacctcggtgatgtcgatgggggtgatgctgtttcagctctacatggtggtgctggtgctgtggctggcgaaaatctttgaacatgatttgcttgcccctgcaacaacgctggttgccgaagctggggatcgtgcaaaggttctgagcctgctgacgcccgttcatcgcggactggaaacattgatgctgcaagggatgttgactcgccttggcgcgattgtgcaacgtcacctgcaactccagcagcaacaaagcgataaaacagccttaacggtaattcgtctgggcggcattttcagccgtcgtcagcagtatcaacttcctgttaacgttactgcttccactctgactctactgctgcaaaaaccgttaaaactgcatgatatggaagtggttcatatctcctttgagcgtagcgcgctggaacagtggctgagcaaaggtggtgaaattcgcggtaaactgaacggtatcggctttgcccagaaactgaatctggaagttgatagcgcccaacatcttgtcgttcgcgatgtaagtttacaaggcagtacgctggcacttcccggttcatcggctgaaggtctgcctggtgaaataaaacaacaactggaagagcttgaaagcgactggcgcaagcaacacgctttattcagcgaacagcaaaaatgtctgtttatccctggcgactggttaggtcgcattgaagccagcctacaggatgtcggtgcacagattcgccaggcacaacaatgctaa

SEQ ID NO: 144262 - DNA, 1716 bp, Homo sapiens
atgttaaaaaagagagaacaaactgtgtttacccacgaaaagagtgtgtttcaggggcttgaccgggggaaccgagaattagggcctcctaaaacctttggtgtaaagggtgctcaaaagggaaatttgcaaattttttcggaagacaaaaactttggacctggaggttctggagaaatttggggccatagaggccccaagtgggatatcccccgcgggaaacgtgaaaccttggggaaaccccattttttttggaaacccagccaggaatttgggagaaagggattggggtcctttggcccatgggaaagggtctcaggaaacaagaattccgggaaaaggatttacccctggggaccagtggacgggataaactgccgctggcgagaaccgcgaaacgtggacgtagcggaatatcggcgtgattgcgggtccagatttcgttcactacgccatttttacaggtcacttttttcacttcatcgcccggcatccacacgccaccaaaaagcacaatcttccgctgtaactggttttgcagacgaatgcccagcacggaaggcggcagcgttggcaaaagcatcagtgaacaaggtagtttttcattcaaccaacgccacagtttgtcatcggccagaccgaagcaggcgggcatcagggggatttcgcaggtatcgtagaaagcgtgatttcacccaggatatttcccgtcgtcagaccaccatcatagccggaatgtggtgcctacccacggatctgcggcgcttcgtctttataccaggagtcgttcgcgctttcctgaatgcctttgatcaggtattcatcggaatgagaagtgatcggacgatacgaggacagatccgcattctcaatgtagccgcccgggaacaggaagctgccgtttttactgtcggtcgggaattccggcacgctcaggtagttcaccgcacctttaccgcgtgtcagccattccgggtagaacgcggcaataactgcggtatcaaccttataaacctgctcaacaaagtcgctcagtttgtcgatgaaagacttgatgtacatcaggcgctcaaggttcagcacgcccaaaccgtcgaggttgatcgggttcgcgacaccacctaccgccaggttctgaatgtgcggcgttttaccgcccagcagcgccacgacgcggttagcgtcacgctggcactccaacgcttgcaggttcacttccggcggcagtttcatcgccggatgaccccagtagccattagcgaaaatacccaactgacaactggcaaccagatctttgatcttgttctgaactttggtgaactcttccggactgttcaggtgccaggtcgaaacgcctttcagcatttcggaggctttggttggaggccagagaaagcatcacagtcccaccaacacacgtacaccacagaagaagaagtggacgacggctattctgcagctacgcagccacccaatcacctgacaacactcgacaacactccccatagaagagcacacacgacgccgagcgcgtgtagatgtggcagacacgagccgccacacacccacagacacagacaggcaacaactgcacagggacagaactcgcacgccgagcgagcgaacgaccggagcgttcaccaaatcgcgctggcaaaaacagtcccccatctagagtacacggcagcagcccgcgcgtgcccacgagccccttag

SEQ ID NO: 144263 - DNA, 1653 bp, Homo sapiens
atggaaatcgtggatggttttcaccgccatgaaattggtaaaggctcatcatcattaaaattacgcttaaaaggttatttgccggtgacctgtctggaaggtacgcgtaatcaacgcatcgccgcgactattcgtcataatcgcgctcgtggacgccatcaaatcaccgccatgtcggaaatcgtccgtgaacttagccagttgggatgggacgataataaaattggcaaagagctgggaatggacagcgacgaagtgctgcgcctgaagcaaattaacggactgcaagagttgtttgccgaccgtcaatattcccgcgcctggacgctaaagctggcgcaagcgttcagctgctgccagcaacgtcgattccttcttggcaaaacagagactaatcagtttatgtgggaagggatcggcgcaaaacaccgacagcggaatcgccgctacgccgtgctcctgcgtcagccactggcaaaactcaacatcatccaggctcggtaccccaatcaacatcgtcagcacgccggagagtgcaatccccactgccaggctggtggcgatatcgttgatcggtgtcccgcgcgatgcttcaccaagggtgatagtaaggatggttccccaccacaagccacctggcccttccataatagcgcgacgatgaccgcaaaacgcctgagcgaagcaagccagtgcggtagcaagaaaagcatattgcgtgagcgaattatctatcgtccgtcgattactcgatatccctttcaatcaacaatgaatcatccccttccggagcagacattgggctgtattgccacggattatggtagctctccatcgcctgatagatcacctgggccagctcattattactggacggatcatagcacagcaaatattcggtatcaggtagcggcggaagagaatggagagtacacatatgtggaaagagtgaagatacccttggatcatgggaccttgttaatcatggaaagagcgacacaagctgactggcagctggagcagatccgcagggacatccgagacttccggtctagcgcggggctggacaaagtcatagtgctgtggacggcgaacacggagcgcttctgtgaggtgattccaggcctcaacgacacagccgagaacctgctgcgcaccattgagctcggtctggaggtgtcgccctccacgctcttcgccgtggccagcatcctggaggtctgtgccttcctcaatgggtctccgcagaacaccctggtgcccggagctcttgagctcgcgtggcagcaccgggtttttgtgggcggagatgacttcaagtcaggccagaccaaagtcaagtccgtgcttgtggacttcctcattggctccggcctcaagaccatgtccatcgtgagttacaaccacctgggcaacaacgatggggagaacctatcggcgccattgcagttccgctctaaggaggtgtccaagagcaacgtggtggacgacatggtgcagagcaacccagtgctctatacgcccggcgaagagcctgaccactgcgtggtcatcaagtatgtgccgtacgtgggtgacagcaagcgcgcgctggatgagtatacctcggagctgatgctgggaataagacatttgttgggttcacagatggtg

SEQ ID NO: 144264 - DNA, 2205 bp, Homo sapiens
tcattcattgttggcctcctgcgcgttgggcaatctgttgagcggcatgtaaagcactgacggcacaaacaccgccgccgcatccctgggcgatgggatcaaatccgcccagcaccgaaccgatggcaaacaggttttcaatggtttgccctgcctgtgacgggcgtacgtctcatcagtggttacaccgaactgctgccacggttgcggcgcaaaaaaatctcccttataccattcaccccgcgtggcggtttgtagcacatcaaggccgagaatcggctctcgaatgccgttacgttccgctaccagtccgccactaaagaaactgccgctggcgagaaccgcgaaacgtggacgtagcggaatatcggcgtgattgcgggtccagatttcgttcactacgccatttttacaggtcacttttttcacttcatcgcccggcatccacacgccaccctggcgcacaaactggcgctgtaactggttttgcagacgaatgcccagcacggaaggcggcagcgttggcaaaagcatcagtgaacaaggtagtttttcattcaaccaacgccacagtttgtcatcggccagaccgaagcaggcgggcatcaggatcatttcgcaggtattggcgacaggaataagcgcatcaagtaacagcggccagttttcttcattatcaaggaaacgggcgatattcaccgcgcgaaattcggtggcgttattgcgcagcacatccagttccggcagctctatttcacacaatccctgataaacccagcgggtaaattcgctttcgcgcagtgcatctccccaggcgatgggttgcacgcctttccagcgttcgttaaggaaggtggaaagttgctcgatagattgcgcggacgtcgtgacgttaaaacgttgcagcagtccggcagcgcggcaggcgcagagttcgccctggcaggtgcccatccccacacgggtacgacggcgtaaatccagcaggctattaacgtttaaattttctaccgcgtactgcacttcacccgcagttaccgcttcgcactcacataccaggctacggtgcagacggccttcgctcagccaggcaggcgtgcgatcgccatgacgataaaccgcagaaccgcagcggggcaggcagggagatgactttacgcaaggtaacttcagcgggttcatcgcgttcagcatggtcgagcagcacgatgccacggctgacgttacgtccgctcgggtcgtcatcgctggcaaccagcgggcgcacgcagaataggcccgcaaaatgcgcgttttcgccatcacgggggccagtttttccccttcacgcagcagaatatcaacctcttctgccgtcactcgattatcgtcaatctcgttgtaatcaatacgtaaagaggtggtaccaatcagcgaaatggtatcgccaggcaccagaatatcggcgtcggaaggtttacggcagcggttgatcacatgctggttaatgcggtgatccatgatcagcagcgatcctttcgccgggaacatgcgaatgcgcagatcggcatattcggcaatgtgttgcccccagatcccagcggcattaaccacgacaggtgcatgaagggcctgagtttcgccggtgagatggttacgtacacgaacaccgcacaccgtcgcgccttcacgaatcagccccgtgacttcatgagcggtaaggataacggcaccgtgttctttggcatccagcatgtttgctgcggtcagacgaaatggatcaacggtgccatccggaactttcaccgcgccaatcagtgccgggttaacggcaggttcgataatgcgcgcttgctgcgggtctatagcttctgcgctgatccctgcttcttcgcaggcgcgaataaaagtggcctggaaggagaggtcatcttccggcagggtgataaacaggccgttggttggttcaacgcagtgacgtgcaatgcgtttcaggatctggttttcactaatgcattcgcgggccgattccgcatcggttaccgcatagcgcgcaccgctgtgcagcaggccgtggttacgcccggtggcaccggttgcgatgtcgtggcgctcaaccaaaatcacgcgcagcccgcgcagggcacagtcgcgggcaatcccggctcccgttgcgccgccgccaatgataatcacgtcacttgattgcgagtcgcgagttttcat

SEQ ID NO: 144265 - DNA, 462 bp, Homo sapiens
ctactgctcgtagtctaaggaccagcttttgaggattagcaggattatgaaggctacagctaatgatgggaaggggactgctttgcagatggggtagtcagcagatactgctaaagacatgcttttgaggtaagttcggagagagatattgggtactcgagcaaggctaaaaatcaggactgcaaatgtctggagagcatgttgtgagtgtaactgctgggacccactgttgtcttgatggagagcctttattgccgtcagctctatagcatgcaactggctgccctttgggaaatgtggctcaacatattggatgtgccaatccatgtagcctgcccactggttcagccctgctcccagttccttcttgtgccagtagcaccaaaccgggccttgctctctgccactatcttcattcagtttctccttgagcaccacaatgaggatagcattgctacccat

SEQ ID NO: 144266 - DNA, 1908 bp, Homo sapiens
atggggtttcaccatgttgcccaggctggttttgaactcctgatctcaagtgatctgcccgccttggcctcccaaactgctaggattacagcgcgtgaagctcgggcgccggtagaagaaaataaaaaggcacagcttgagcgtgataaacagcttagcgaacagcaaaaacaagcggcgttggcgaaagaatataaagctcaggtgaagcagcttattgaaatgaaccgaatcaccattgccaatggcgatattggttttaacttcactgacggcaatctgattaagaagatttttgtcgataagctcacacaggcgcagttgattaatggtcgtctggcgattgcccgcttgttggtcgataacaatagcgaaggtgaatacgccattattcccgccagcgttgccgataaaattgctcagcgcgatgccagcagtatagtgttgcacagcgcgctcagcgccgaagagcaggatgaagacgacccgtatgccgacttcaaagtgcctgatgatttgatgtggcctacggtttatgggcgaagtgtagaccggataaggcgttcacgccgcatccggcagtcgtgcgccatgcctgatgcgacgctttgcgcgtcttatcaggcctacggcttacgggcgaaacacccctcgttcagcagccagggggttcctcactgtgtcccagatgtcactctaaagattgcttcagaggctccctccccaatcgttggagggactctgccagttccaatgaccagccagctgccttcagtcacaagcatgcagctgctgctagatctggataccatccctaatgagcccctccattacgactgggaagctctgcgtgagtcaatcaaaacgcacggtctgcgtaactccacgctttctgctctgatgccgtccgagacttcttcccagatctctaacgccactaacggtattgaacccccgcgcggttacgtcagcatcaaagcgtcgaaagacggtattttgcgccaggtggtgccggactacgagcacctgcacgacgcctatgagctgctgtgggaaatgccgggtaacgatggttatctgcaactggtgggtatcatgcagaaatttatcgatcagtcgatctctgccaacaccaactacgatccgtcacgcttcccgtcaggaaaagtgccgatgcagcagttgctgaaagacctgctcaccgcctacaaattcggggtcaaaacactgtattatcagaacacccgtgacggcgctgaagacgcacaagacgatctggtgccgtcaatccaggacgatggctgcgaaagcggcgcatgcctgataagacgcgccagcgtcgcatcaggctccgggtgccggatgcagcgtgaacgccttatccggcctacggctcggatttgtaggcctgataagacgcgccagcgtcgcatcaggcacaggatgcggcgcgttctgcctggtcgtgccactcgtcgggattttccctctctggaggctgggtatcagtggttaccggggcgtggtctggtgattgaaccgcaggcgcaggtgatgtatcagggcgtgcagcaggatgattgtaccgccgctagccgtgcgcgcgtgtcacaatcgcagggtgatgatattcagacgcggctgggtttacacagcgaatggcgtaccgctgttcatgtcataccaacattagatctgaatgattatcacgatccccattcgacggaaattgaagaggatggcagcactatcagtgacgatgcggtgaagcaacggggtgaaataaaagtgggagtcacgggcaatatcagtcagcgagtgtccctgcgcggcagcgtggcgtggcagaaagggagtgatgattttgcccagacggcagggtttttgtcgatgacggtgaaatggtaa

SEQ ID NO: 144267 - DNA, 1806 bp, Homo sapiens; identical to SEQ ID NO: 124452

SEQ ID NO: 144268 - DNA, 2550 bp, Homo sapiens
  misc_feature (1)...(2550): n = a,t,c or g
atgcagcagttgctgaaagacctgctcaccgcctacaaattcggggtcaaaacactgtattatcagaacacccgtgacggcgctgaagacgcacaagacgatctggtgccgtcaatccaggacgatggctgcgaaagcggcgcatgcctgataagacgcgccagcgtcgcatcaggctccgggtgccggatgcagcgtgaacgccttatccggcctacggctcggatttgtaggcctgataagacgcgccagcgtcgcatcaggcacaggatgcggcgtaaaatgccttatccggcattaaactcccaacaggacacactcatggcatataccaccttttcacagacgaaaaatgatcagctcaaagaaccgatgttctttggtcagccggtcaacgtggctcgctacgatcagcaaaaatatgacatcttcgaaaagctgatcgaaaagcagctctctttcttctggcaaaactggccgctgttacttgatgcgcttattcctgtcgccaatacctgcgaaatgatcctgatgcccgcctgcttcggtctggccgatgacaaactgtggcgttggttgaatgaaaaactaccttgttcactgatgcttttgccaacgctgccgccttccgtgctgggcattcgtctgcaaaaccagttacagcgccagtttgtgcgccagggcgaacacgtttggactgcggcactaagcttgctcattactgccgctggcctgccggtattaacggtagtggcgctggcaaaagttggcggcggtgttgacagcctcagcacgccaatcggtaaagtcgctggcgtactgctggcaacggtttgttacctggcggtggggccgcttttcgctacgccgcgtacagctaccgtttcctttgaagtggggattgcgccgctgacgggtgattccgcgctgccgctgtttatctacagcctggtctatttcgctatcgttattctggtttcgctctatccgggcaagctgctggataccgtgggcaacttccttgcgccgctgaaaattatcgcgctggtcatcctgtctgttgccgctatagtctggccggcgggttctatcatcacggcgactgaagcttatcaaaacgctgcgttttctaacggcttcgttaacggctatctgaccatggatacgcttggcgcantgctaactatagatggggatcccttcctaccttcatccctgttccccaaggaaaaccggttttctccatcaccccaagcaggctacatggattggcacatccaatatgttgagccacatttcccaaaaggcagccagttgcatgttatagagctgacggcaataaagacattgggctgtattgccacggattatggtagctctccatcgcctgatagatcacctgggccagctcattattactggacggatcatagcacagcaaatattcggtatcaggtagcggcgataggtgaaattacgctgcccgatcatgtatttgagctgatttttatgctgcgccagcaactggataaattaccggatgcgccttatgtctcggatcgtcgctggaaaaaagcgatccgattattgcaggccagcgccttttttagcggtcgcagtgctgttgccccggtagatctcattttgctgaaagattgcctgtggtatgacgcgcaaagcctgaatttgatacaacaacaaattgatgtattgatgaccggtcacgcctggcaacagcaagggatgttgactcgccttggcgcgattgtgcaacgtcacctgcaactccagcagcaacaaagcgataaaacagccttaacggtaattcgtctgggcggcattttcagccgtcgtcagcagtatcaacttcctgttaacgttactgcttccactctgactctactgctgcaaaaaccgttaaaactgcatgatatggaagtggttcatatctcctttgagcgtagcgcgctggaacagtggctgagcaaaggtggtgaaattcgcgcgaagctggagcggaacaccatgtctgacatggctgcgttcgaaaaactggccacgcctatcgaatacaaccatgtggaatatttctccaacgtgaaaccttacttgtttgccgatgtaattaacaagtttatggctcacgatgagcaggaggagcacactgtgggtcctgggatatggattcccgaggggctgccaaggggctggagggtgaaaattggaaggagagttcagcctgtcagaaacgcacactttgccagtgagctaccagggatgcttggaacaagaactgcccccaaaatgccaggggacccaaacttggacttaattcacagttcgcaagtcctcaacatggggctagctgaacaatttcaactaaatgaaaccctgcatggttctcctgggctgggcctgtgggtgccatgccccagctgtcagccccgcttcacagctgaagataaatcacagcagaaaatggagtgtaatgaaaacactgacagacccttcaaagtaatggagctcgggggtctcccttttgttgcatga

SEQ ID NO: 144269 - DNA, 1800 bp, Homo sapiens; identical to SEQ ID NO: 140094

SEQ ID NO: 144270 - DNA, 4224 bp, Homo sapiens; identical to SEQ ID NO: 142737

SEQ ID NO: 144271 - DNA, 1365 bp, Homo sapiens
atgtatgatgttgctacaaacagccttactcctgatgcaacatatgaaaacaatgactggaaacgtgttgttgatgacaaggtcttccagagcggtgtatttaacgtagcgttgaataacggttctgaatgggatactacaggtcgttccatcgttgataccttgacagttaataatggttctcaggttaatgtttcggaatctaaattaacttcagatactatcgatttaactaacggttcttcgctgaacattggtgaagatggctacgttgataccgatcatctgactattaactcctacagtactgttgcgttgaccgaatctactggtactggcctcacggtccgtgtgaacgataacgtccggggcctctacgccgccaagagcactgcaggcattgcagcaatgagccatcaggtgcaaaatgacagcataagaactgaccagagagcgtctgttatcgatatttcgggaacgttcgtgaattggtgttccgttcactatgttaatcgtacctctttcgcctttgcgggtatgacgcctgccatggcgaaggctatgcgaccgtcgcagatgctgtatattcagttaccaccgttgaaacgtagtctgcttttttctgccgtgctgtgtgcggcgtcattgacctccgtccatgcggcgcagccgatcactgaaccggagtttgcctctgatattgtcgatcgttatgccgatcatattttttacggcagcggtgccacggggatggctctggttgttatcgacggtaaccagcgcgtctttcgcagttatggcgaaacgcgacctggtaataacgttcgcccgcagctggattcggtcgtgcgtattgcttccctcaccaagctaatgaccagtgagatgctggtgaaattgctcgaccaggggaccgtgaagttaaacgatccgctaagtaaatatgctccgccaggcgcacgcgtgccaacctacaatgggacgcccattacgctggtcaatctggcaacccataccagcgccctgccccgtgaacagcccggtggcgcggcacatcgtccggtgtttgtctggccaacgcgcgagcaacgctggaaatacctttctacggagaagctgaaagccgcgccaggcagtcaggcggcgtactctaaccttgcgttcgacctgctggcagatgcactggcgaatgcgtccggcaagccttatacccagttgtttgaagagcagattacccgtccattggggctgaaagacaccacctacaacccctcaccggatcagtgccgccgtttcatggttgctgagcgcgagacagtcgtgcaaaaaggaggcgaaatggcaacagagcgcaatacacgctga

SEQ ID NO: 144272 - DNA, 1443 bp, Homo sapiens; identical to SEQ ID NO: 140093

SEQ ID NO: 144273 - DNA, 503 bp, Homo sapiens
aacacttcctgcgcacgttcaaaagtcagctggttagtgctgctgtagttggtgaaggcaatggcgatggtgcagaccagagggaagaggacgaataatcccattccagccattcccgggtaaacatagcgccaggcgtaggctttacgattggcgaaaatatacagccccgctgaactcaatatcagcgtggtaatggcgaacaggtattccccttgtgcgtacattaaaacaacaaggtaacccaccagcaggccgagcagacctagcactgaccatttcagcgcgtcgctttgccaccaatgtttctttttaatgacatccatggggttcttcctcattccaggacggataaggctttcacgccttatccgacaacaattggtgatacgagtctgcgcgtctttcagggcttcatcgacagtctgacgaccgctggcggcgttgatcaccgcagtacgcacggcataccagaaagcggacatctgcgggatgttcggcat

SEQ ID NO: 144274 - DNA, 2936 bp, Homo sapiens
atgcctgatgtgcccctgggcaacctactgaatgctgactgtgtgctggtgctgctggcggtgttggccgcgcaatatgaaagcctgaccctgcccatcgccattctgctcatcgtgcccatgggcctgctggcagcgatgacgggcgtctggctcagccatggtgacaacaacgtcttcacgcagatcggattgatcgtgctggtcgggttgtcagccaagaacgccatcctgatcgtcgagttcgcccgggagctggagttcgccggacgcacaccgatgcaggcggcattggaagcggcgcgcttgaggctgcggcccatcctgatgacgtcgatggccttcgtcatgggcgtgttgcccctggtgctgagcagtggcgccggcgccgaaatgcgccaggccatgggcgtggccgtgttcgccgggatgatcggcgtgaccctgttcggcctgttcctgacgccgctgttctacgtcatcgtgcgccgcctcgcgggcaatgcaccgctgcgccaccacggtggccagggggcttggggctatggtgtgaatgggaatatgccaggaggcacaaacaacacgcacgaacacaactcactgacgaccggagccaccgacccaacggagcgacccactgaacggacccaccaaacgagcatacccactgagcaaccgggaaacaaagtgaagggcacgacgagtcaaataaaacaacaaaaaaagaaacgcggaacgcaagacacggaacaggaagacgagcgcacgcgaaagaaacccaaccaaagcacggccacaaccaccaccacaggagaacgcagactaaggagcccccccctaaaccaccaccacacgacaaagagccccgaaacagcgagggaagccaaaacgacagcaggcgaaacgaagtgcgccgcgggctgcgcgcgcagcaggggcccacgacgactaagaccgaaagccagcggggacgggtacaaagacgagcacgacagtctgacgaccgctggcggcgttgatcaccgcagtacgcacggcataccagaaagcggacatctgcgggatgttcggcatgatttcacctttctgggcgttttccatggtggcggcaatacgtggatctttcgccaactcttcctctgttggatacagtttgtaaaaagtgactgccgaagaggtgaataacgcacttaaacaagcaaccaccaataacgagtcatttggttataccgatgaagaaatagtctcttccgatatcattggcagccatttcggttcggtgtttgatgccacgcaaacggaaattaccgccgtgggcgatttacaactgatattcatgcaagccatgtttaccatctgcgccgccaataccggatttacgccatccggcgtggaagccttgcatagcttcgaagttttcacggttgatcccaactgctggacccacttcgcatatgaacagacgttatggcaaagcgatccagaaacgccgttaaaggtttatcagctcttgtctggtgcgcactatcggacttcgccgctggatttacgccggatgatggatgcaccagtgcaacattttttacaggcggctggcgaaaacgagattgccggggcgctgtggctggtggatgagggtggattatctcaacaactcagtcaggcggtatgggcaggttttcgtcgcccgcggggtaatctggtggcccagtcgctggcggcgcacggcaacaatccactggcggcgacattgcgtggacggcgggtcagccggatagcagttcatccggctcgtcagcgggaaggcacagggcggcaacttattgctggtgctttgcaatatacgcaagacctcgactatctttcgttatggcgtttctggcaacgctgcggttttgtgctggtgcggatgggtaatcatcgggaagccagcagcggttgctatacggcgatggcgctgttaccgatgagtgatgcgggtaaacagctggctgaacgtgagcattaccgtttacgtcgcgatgcgcaagctctcgcgcagtggaatggcgaaacgcttcctgttgatccactaaacgatgccgtcctttctgacgacgactggcttgaactggccggttttgctttcgctcatcgtccgctattaacgtcgttaggttgcttattgcgtctgttacaaaccagtgaactggcattaccggcgctgcgtgggcgtttacagaaaaacgccagtgatgcgcagttatgtaccacacttaaactttcaggccgcaagatgttactggtccgtcagcgggaagaggccgcgcaggcgctgttcgcacttaatgatgttcgcactgagcgtctgcgcgatcgcataacgcaatggcaattatttcactgactccttcaattttatctcatggtcattgtgagtcagcggcgtaaaattaatgacatcagttaaggagttcgccatgaaacatgaccattttgttgttcataaggccggattaacctggcccaccagttgttccggcttttccccggtgtcgggaataacccggtgccaatggggaaaatagccacttggttggccccgctgtttcttaatgcgctgttggtgagttccgttggcccggacccgagcggtattccggcggggcgtcagtggttttcggtgcaagggtattacggaagataatcgccaggcgcgtgtggatgcgatcatgccgacgtttattgaaacggtgcgctactggcagaaacagagcggagtaggggctaacgccacggcgctcatcggtttctctcaaggcgcgattatggtgctggagagcattaaagccgaaccgggccttgcttcacgcgtcattgcttttaacggacgctatgcgagcctgccggaaactgcgtctacagccacgacaattcacctgattcatggcggtgaa

SEQ ID NO: 144275 - DNA, 564 bp, Homo sapiens
  misc_feature (1)...(564): n = a,t,c or g
ctgcatggtcacggttccctgatctctggcctggaaacggcgctggaaggtcatgaagttggcgacaaatttgatgtcgctgttggcgcgaacgacgcttacggtcagtacgacgaaaacctggtgcaacgtgttcctaaagacgtatttatgggcgttgatgaactgcaggtaggtatgcgtttcctggctgaaaccgaccagggtccggtaccggttgaaatcactgcggttgaagacgatcacgtcgtggttgatggtaaccacatgctggccggtcagaacctgaaattcaacgttgaagttgtggcgattcgcgaagcgactgctttttggtttttgtcctggcttcacgcgggcgataatgccctgatgcacggccccgtcgcttttctcgtcgagatattgncggtttgccaactggataaccacgccttgagactcaagggcgtgaatcagcggtaacagacgtttatcttcacggccttttaaaataaagacttcctgaaaacgttcaggggcgcgctccagcagggcctgcactgcgtggatgccgtaaatcat

SEQ ID NO: 144276 - DNA, 627 bp, Homo sapiens
atgtgggggaccgtgattgtcggcctgaccaacgtacttgccacctttatcgcaatcggccttgttgaccgctggggacgtaaaccaacgctaacgctgggcttcctggcgatggctgctggcatgggcgtactcggtacaatgatgcatatcggtattcactctccgtcggcgcagtatttcgccatcgccatgctgctgatgtttattgtcggttttgccatgagtgccggtccgctgatttgggtactgtgctccgaaattcagccgctgaaaggccgcgattttggcatcacctgctccactgccaccaactggattgccaacatgatcgttggcgcaacgttcctgaccatgctcaacacgctgggtaacgccaacaccttctgggtgtatgcggctctgaacgtactgtttatcctgctgacattgtggctggccgttatgcgtcgcctgcgggaaaaactcgcccaggccaacctgaagctagggcgtaactacccggagccaaaactctcttacacccagcgcggaacctccgccggaacggcctggctggaaagctatgaaattcgcctcaatcccgttttgctgttggaaaacagtgaagcttttattgaagaagtg

SEQ ID NO: 144277 - DNA, 862 bp, Homo sapiens
ctcgaagtgtccaacgcgtgctgctacgcctgcgtgacaccagcgcggaagcgaaacgcgaactggatgaaatccgtgaaagtttgcaggttaaacagagtggctgggcgctgtttaaagagaacagcaacttccgccgcgcggtgttccttggcgtactgttgcaggtaatgcagcaattcaccgggatgaacgtcatcatgtattacgcgccgaaaatcttcgaactggcgggttataccaacactaccgagcaaatgtgggggaccgtgattgtcggcctgaccaacgtacttgccacctttatcgcaatcggccttgttgaccgctggggacgtaaaccaacgctaacgctgggcttcctggcgatggctgctggcatgggcgtactcggtacaatgatgcatatcggtattcactctccgtcggcgcagtatttcgccatcgccatgctgctgatgtttattgtcggttttgccatgagtgccggtccgctgatttgggtactgtgctccgaaattcagccgctgaaaggccgcgattttggcatcacctgctccactgccaccaactggattgccaacatgatcgttggcgcaacgttcctgaccatgctcaacacgctgggtaacgccaacaccttctgggtgtatgcggctctgaacgtactgtttatcctgctgacattgtggctggtaccggaaaccaaacacgtttcgctggaacatattgaacgtaatctgatgaacggtcgtaaactgcgcgaattagggctcagaataatttcccaagacgttgacgctacacctcaccacttacactttgctgtttggcgcatcaccttggccctggctattaccac

SEQ ID NO: 144278 - DNA, 469 bp, Homo sapiens
atgcgtatgttgcaggaagagaatatctggatcgtcggtacggcaggcgaggcggatcatacactctatcagagcaaaatgaccggacgcctggcgctggtgataatgcaccacattatgggaaaactctttttcacagtatttgcatttgagcgcgatatcattgataccttaaaagtggtgctgatcccggtgctgatcgccggagcaactgcgctattactgagtcgcgcgctgaacagtttgagcctcggcagcgacaccgcgacggcgctgggcagtcgcgtggcgcgcacacagttgattggtctgctggcgattaccgtgctttgtggtagtgcgacggcaatagttggcccgattgcctttattggcctgatgatgccgcatatggcgcgttggctggtgggtgccgatcatcgctggtcgctgcccgtcacgctacttgctacccctgttgtcaccaccc

SEQ ID NO: 144279 - DNA, 654 bp, Homo sapiens
ctaagaagtctcatgctctccactcttcacgatgcagcagagccagatgggtcctggaaagttgctgagcccaacatcccacattagagttggagaagctgacagtccttggttggaaagcaggttgagattctgtcccgcctcccgcttctgggaagcaggcattttctttgacacactggggcacatgatgactggtttacccaggttggcactggaaaacaacaagcacctgtctgatgggtctgctccactgccaccaactggattgccaacatgatcgttggcgcaacgttcctgaccatgctcaacacgctgggtaacgccaacaccttctgggtgtatgcggctctgaacgtactgtttatcctgctgacattgtggctggtaccggaaaccaaacacgtttttgatggtcttatggctgcggaagtaatgattacggatatgatcgaaattgactgtttcggcgatccccggcatctggtagatatcgcgcagaaaaccgtacagattcaggtaatcgctgatgcggtgcttatcacacttgaagtgggtcacatacaccggatcaaaacgcaccagcgtagtccacaggcgaatatcggcttcggttagctggttgccggtcaggtaacgatgctggcctcccat

SEQ ID NO: 144280 - DNA, 1431 bp, Homo sapiens; identical to SEQ ID NO: 132019

SEQ ID NO: 144281 - DNA, 1504 bp, Homo sapiens
gtccgccagaacgacgaccgccgctcacctgactgtgacgtttcaccgcacgacgaatctgattcgccttcatgcgacgacggtctttttctacagcgactttagagctggtttctggcggtagctccaccagttcgcgcagatagttagtctgggcgaggtccagctccgtccagccaccgcgtggcagaccttttggcagtgggatatcaccgtaacgaacacggatcaggcggctcacctgcacaccaaccgcttcccacagacgacgaacttcacggttacggccttcggtcagagtcacgttgtaccactggttgatcccttcgccgccgctgaacttgatggttttaaaagctgccggaccatcttccaactgcacgccacgactcaaatcacgcagtttcgcgtcgtcaacctgaccaaatacacgcacggcatattcacgttcaacttcacggcttgggtgcattaaacggtttgccagttcaccatcggtggtgaacagcagcagaccacaggtattaacgtccaagcgacccacggcaatccagcgtgcgccacgcagttttggcagacggtcaaacaccgttggacgtccttccggatcgttacgggtacacaactcaccttccggtttgtaataggccagaacgcgacaaatttgttcagcggactcacgtaccgaaatcaggtgaccatcgatacggattttcaatccaggggtaacttcaacacgatcgccgagtttagcaattttgccatcaacactcacacgaccggcttcaataatagattcgatttcacggcgagaaccgtggccggcacgcgccagcactttctgtagcttttcgctcatagagcttccttttggtgtcgccttcccaggcgtgtcatcattattacgcgccgaaatcttcgatctgacggttataccagcactaccgagcaaatgtgggggaccgtgattgtcggcctgaccaacgtacttgccacctttatcgcaatcggccttgttgaccggctgggcttcctggcgatgcctgctggcatgggcgtactcggtacaatgatgcatatcggtattcactctccgtcggcgcagtatttcgccatcgccatgctgctgatgtttattgtcggttttgccatgagtgccggtccgctgatttgggtactgtgctccgaaattcagccgctgaaaggccgcgattttggcatcacctgctccactgccaccaactggattgccaacatgatcgttggcgcaacgttcctgaccatgctcaacacgctgggtaacgccaacaccttctgggtgtatgcggctctgaacgtactgtttatcctgctgacattgtggctggtaccggaaaccaaacacgtttcgctggaacatattgacgtaatctgatgaaaggtcgtaaactgcgcgaaataggcgctcacgattaatctccccaagcttcctcccatcgcggaggaagccacctcttgcagtcat

SEQ ID NO: 144282 - DNA, 990 bp, Homo sapiens
atgagctttagcgtggctgccctgttgaccgctctgccggtggttaccatgggcgggctggcgctggccggaagctggcttcatcagcatgtcagcgaacgtcgcagtgtcgccatcagtctgttgctgattgccgtcggtgcattgatgcgtgactttacccgcaaagtgcgctgctgcttaacgatgcttggtggggtggggatcggcatcattcaggcggtgatgccttcggtgattaaacggcggtttcagcagcgcacgccactggtgatggggctgtggtccgcggctctgatgggcggcggcctacaagttcagcgatctacattagccgcatccggcatgaacaaagcgcaggaacaagcgtcgcatcatgcctctttgacccacagctgcggaaaacgtactggtgcaaaacgcagggttatgatcatcagcccaacgacgcacaggcatgaaatgcccagtccatcagcaacacacaaggggcagcatgtggcgtctgattcggaacaaaacgttacggcggcagccgtgaaggcggatagtgcgctgcacccggcggctgccgggtggatggacgttatcgtgatggacccgccgaagtttgttgagaataaaagccagttgatgggcgcgtgtcgtggttataaagacatcaacatgctggcgattcagctgctgaatgaaggcggtattctcctgactttctcctgttccggtctgatgaccagcgatttatttcagaaaatcatcgcggatgccgcaattgatgccggtcgtgatgtacaatttatagagcagttccgtcaggcagccgatcatccggtaaagatttcccgggaggtgactatgattgccagcaaattcggtatcggccagcaggtccgccattccctgttaggttatctcggagtggtcgtggatatcgacccggtttattcgctctctgaaccgtcgcctgatgagctctcggggagagtatga

SEQ ID NO: 144283 - DNA, 2203 bp, Homo sapiens
ccggccccctaagctgaggccaagacggggtgttgttggtggggcaaggccgaaaaagccagatacccaggaaatcgctaatgctggcaaaaaagctggaagccaaagtgggttacagtcgggcgcgagtgatgaacggtggcgttgatgctgaaaaagtgattggtatttccggacatctgctggcacctgaggtgtgtattgttgttggcgcttctggcgcagcagcgttaatggcgggcgtacgcaatagcaagtttgtggtggcgattaatcatgacgccagcgctgcggtattttcacagacagatgttggcgtggttgatgactgaaaagtggtgctggaggcactggtgacaaacattcacgcagattgccaataacgtgttgccggatgatcctgcatacggttctggcctggggacttgtaggcctgataagacgcgtcaagcgtcgcatcaggcgctgaatgtcggatgtggcgtgcggcctacaaatcaaaccaaattcaattggttacgattatcccgtcaaagtaattttttcgctaacgtccagaccccggtattcgtggtggaaagcgccacgacacccgcgttaatcgcattacgcgcatctttttcatcgcacaccagcccaccggcaatcagcggttggcggattatgtctgtcacccagcccagcgctatgtgggcatacagcctggcaggatctcaataatcaatcccgttgaggcgtaaattctcgcgcgtcgccagttcactgatgtatgagtcgccaatgctgtacggcttatgttccgccagtgcgcagttgctgtcctccggtttctgttcacttttttttccacagcaggctctgtcgggacgccctgaacgaagcattccaccccagcggttttcaggtcgttaaatgctgcgatatcgcccgcatccacagaaaccgttatggcgatttgttgtttgccattggcgtagtgcatatagccaacgttaatgcgattcaccggaacgccacctttcaccagcgtcaggaaatcggcgggtgttttacaaaccagcaggattttctgtcgatcggcggcgcgatgaatgttgtcgataactttttgcagcgtccagaaacgtacggcgatcccttctgccagtaccatttccatcaggttttgttgtaccggatcttcggcaacctcatcgttggctaccagcaccagatttgcccccgcaaatccgacccattgaacgccgacctgaccgtgaatcaagcgttcatcaatccggcttaaaacaatatttggcatagcgtgttcctctttgttttgcttattggccttcacaggctgtgtggtatgcgccaggatgtcctgaatatggttgataatgagttcccgtggcgttggctgcagctcgccggagcgaactttcacgtactgcagcggcagatactggctgatcagcggcagcggaattggtgaatccgccagattacgtaccagatgagcgaaagcgtcatcaatctggctgtccggccagtaatagcgcacgcgatccgagtagctataaccacgcgccagacgacgcgcgttgccgtcaccgtggtagtggctttgccagtattccgggcggtcgagcatcacgtcttccagcacctgacgcagaccagaacaggctttcgctggcaccagttcttcttcaatcgccgccagagagaacagagcttcacgcagggcgaaggtcagcgctgggccaactttcagaatggcaaagtggtcaatcaccagctggcgcagcgattgcggcgtttgataatcggtagagtgcgcttcgaaaatcagcgtttcgtagttttcgaccatctggcttaaggcgctcgctttggcgggctgataatcaataacgttggtgtgatcgaattcgacgccgggttgaaccaccagggcaatgatgcgtggccagatggcattcaaaccttgcttttcaaaggcgtgacgatgggcttccagcgtggcgcgggcggcatccggcgtggtgaccgccagctcgcttaaggtttcctgcgcgccggcaggtaccggcacttcggtacccatgacatactccaaatcgggttcgccaaggtgttcacgaacgggttcttccgggatcagttcttgccgagagaaatcaaatactggaacctcgtcaaattttaagccgtagtccat

SEQ ID NO: 144284 - DNA, 3845 bp, Homo sapiens
atgcccctcttacacctgctccgccagaatccggtgattgctgccgttaaagataatgccagcctgcaactggcaatcgattctgaatgccaatttatttccgtgttgtacggcaatatctgcaccatcagtaatatcgttaaaaagattaagaacgccgggaaatatgcttttattcatgttgatttgctggaaggcgcgtcaaataaagaagtcgttattcagtttttgaaactggtgaccgaggcggacggcattatcagtaccaaagcctcaatgttgaaagcggcaagagcggaaggttttttctgtattcatcgcctgtttattgttgattcaatttcgtttcacaacattgataagcaagttgcgcaatcgaatccggattgtattgagatcctgccaggctgtatgcccaaagtgctgggctgggtgacagagaaaatccgccaaccgctgattgccggtgggctggtgtgcgatgaagaagatgcgcgtaatgcgattaacgcgggtgtcgtggggctttccaccacgaataccggggtctggacccccccgccacattcgacattcagcgctgatgcgacgcttgacgcgtcttatcagccttctaatccccagcccggaaacgttagcaggaacattcgggaacgaatgtgcgtgacgttctcgaatcttgatcctgagctgaaagcaccacagattctggtgctggcaccgacccgcgaactggcggtacaggttgctgaagcaatgacggatttctctaaacacatgcgcggcgtaaatgtggttgctctgtacggcggccagcgttatgacgtgcaattacgcgccctgcgtcaggggccgcagatcgttgtcggtactccgggccgtctgctggaccacctgaaacgtggcactctggacctctctaaactgagcggtctggttctggatgaagctgacgaaatgctgcgcatgggcttcatcgaagacgttgaaaccattatggcgcagatcccggaaggtcatcagaccgctctgttctctgcaaccatgccggaagcgattcgtcgcattacccgccgctttatgaaagagccgcaggaagtgcgcattcagtccagcgtgaatacccgtcctgacattagccaaagctactggactgtctggggtatgcgcaaaaacgaagcactggtacgtttcctggaagcggaagattttgatgcggcgattatcttcgttcgtaccaaaaacgcgactctggaagtggctgaagctcttgagcgtaacggctacaacagcgccgcgctgaacggtgacataaacaacgagtacattaatgagcgaaatgatttacggcatccacgcagtgcaggccctgctggagcgcgcccctgaacgttttcaggaagtctttattttaaaaggccgtgaagataaacgtctgttaccgctgattcacgcccttgagtctcagggcgtggttatccagttggcaaaccgccaatatctcgacgagaaaagcgacggtgccgtgcatcagggcattatcgcccgcgtgaagccaggacgtcagtatcaggaaaacgatctgccggatctgatcgcttcgctcgatcaaccgttcctgctgatcctcgacggcgtaaccgatccgcacaacctcggcgcgtgcctgcgtatgcggacgccgcagcttcatgcggtgattgtgccgaaagatcgctccgcacagctcaacgctacggcgaaaaaagtagcctgcggcgcggcagaaagcgttccgctgattcgggtgactaaccttgcgcgcaccatgcgtatgttgcaggaagagaatatctggatcgtcggtacggcaggcgaggcggatcatacactctatcagagcaaaatgaccggatcgctggcgctggtgatggggtcggaaagtgaagagtcacccgtgcacgaaatattcaacatgctgctggcggtcttcgatcgggcagcgttaatgcttatctgcctgttctttctcatccgtatccgcctgtttcgcgaactgttgcacaagtcggcgcactcccaaaagaattgctcgccgttaccgccattttctcgctgtttcgccctggtcagcacctggtccggcgtttataaagacatcaacatgctggcgattcagctgctgaatgaaggcggtattctcctgactttctcctgttccggtctgatgaccagcgatttatttcagaaaatcatcgcggatgccgcaattgatgccggtcgtgatgtacaatttatagagcagttccgtcaggcagccgatcatccggtaaagatttcccgggaggtgactatgattgccagcaaattcggtatcggccagcaggtccgccattccctgttaggttatctcggagtggtcgtggatatcgacccggtttattcgctctctgaaccgtcgcctgatgagctggcggtgaatgacgagcttcgcgccgctccgtggtatcacgtagtgatggaggacgataacggcctaccggttcatacctacctggctgaagcccagctaagtagcgaattgcaggatgaacatccctgaacagccatccatggatgagctggcgcagaccatccgcaaacaacttcagggcccggcccggtttcttgaacgcgtgctgctacgcctgcgtgacaccagcgcggaagcgaaacgcgaactggatgaaatccgtgaaagtttgcaggttaaacagagtggctgggcgctgtttaaagagaacagcaacttccgccgcgcgatgttccttggcgtactgttgcaggtaatgcagcaattcaccgggatgaacgtcatcatgtattacgcgccgaaaatcttcgaactggcgggttataccaacactaccgagcaaatgtgggggaccgtgattgtcggcctgaccaacgtacttgccacctttatcgcaatcggccttgttgaccgctggggacgtaaaccaacgctaacgctgggcttcctggcgatggctgctggcatgggcgtactcggtacaatgatgcatatcggtattcactctccgtcggcgcagtatttcgccatcgccatgctgctgatgtttattgtcggttttgccatgagtgccggtccgctgatttgggtactgtgctccgaaattcagccgctgaaaggccgcgattttggcatcacctgctccactgccaccaactggattgccaacatgatcgttggcgcaacgttcctgaccatgctcaacacgctgggtaacgccaacaccttctgggtgtatgcggctctgaacgtactgtttatcctgctgacattgtggctggaatgggtggttagtagcatgatgctcggtgcagcaattggtgcgctgtttaatggttggctgtcgttccgcctggggcgtaaatacagcctgatggcgggggccatcctgtttgtactcggttctatagggtccgcttttgcgaccagcgtagagatgttaatcgccgctcgtgtggtgctgggcattgctgtcgggatcgcgtcttacaccgctcctctgtatctttctgaaatggcaagtgaaaacgttcgcggtaagatgatcagtatgtaccagttgatggtcacactcggcatcgtgctggcgtttttatccgatacagcgttcagttatagcggtaactggcgcgcaatgttgggggttcttgctttaccagcagttctgctgattattctggtagtcttcctgccaaatagcccgcgctggctggcggaaaaggggcgtcatattgaggcggaagaagtattgcgtatgctgcgcgatacgtcggaaaaagcgcgagaagaactc

SEQ ID NO: 144285 - DNA, 656 bp, Homo sapiens
atgctaaacatcgtactttacgaaccagaaattccgccaaatactggcaacatcatccgtctttgcgctaataccggctttcgtctgcatatcatcgaaccgatgggatttgcctgggacgataagcgcctgcgccgcgcggggctggactatcacgagtttaccgccgttacgcgtcatcatgactatcgcgcgttcctcgaagcagaaaatccccagcgcctgttcgccctcaccacgaaaggtacacctgctcacagcgccgtaagctatcaggatggcgattatctgatgttcggcccggaaacacgcggcctgccagcgagcattcttgatgccctgcccgctgaaccaaaaattcgcattccgatggtgccggacagccgcagcatgaatctgtccaatgcggtctcggtagtggtgtatgaagcctggcggcagttggggtatccgggagcgcaccacggaacctgcgccaatcttcgcgccgcgcccaacttcaatattgccgaggattttcgcgcccgcgccaatcatcacaccttcacgaattttcgggtgacggtcaccaccagatttacccgtaccgccaagcgtcacagattgcagaatcgatacgtcgttttcaatcaccgccgtttcaccaacgacgatgg

SEQ ID NO: 144286 - DNA, 739 bp, Homo sapiens
atgttgctgttgagcgcatggggattgttcgatttctggaactggctgcaaaacggcgcggggcagaaaccggtagatatcctgatccgtatcgcactcattcttttcttctcggcggttggctggacggtgctcgccagtttgatcgaaaaccggctggcttcggatattcatggccgcccgctacccagcgcccgcacgcgtaccctgcttacgctgtttcgtaacgcgctggcggtgattatcagtaccatcaccatcatgattgtgttgtcggaaatcggcgtcaatatcgcgccattgctggcaggtgccggggcattaggtctggctatctcgtttggttcgcaaacgctggtgaaagatattatcaccggggtatttattcagtttgaaaacggcatgaacactggagatttggtgactatcgggccgttgaccggcacagtggaacggatgtcgattcgctccgtgggcgtacgacaggataccggggcgtatcacatcattccgtggtcttcgataaccacctttgctaactttgtccgcggcattggttcggtggtggcaaattatgatgttgatcgccatgaagatgctgataaagccaatcaggcactgagagatgcggtagaagatgatgagactcgctttaccagcgagtccagtccgatcttgcggtgctgtcagagggaaggtctagggctgaaggctgttgttcagattcttttgtcccacg

SEQ ID NO: 144287 - DNA, 943 bp, Homo sapiens
gatcatccgaaggtattgagttatctcgatgtactgcgcgacaaagcgccggttggcaacaaagttgccatcatcggttgtggcgggattggttttgatacggcgatgtatttaagtcagccgggcgaatccaccagccagaatatcgccgggttctgtaatgaatgggggatcgacagtagcctacaacaggctggtggcttaagcccgcagggaatgcagatcccccgtagcccacggcagattgtgatgctccagcgcaaagccagcaaaccaggacaggggttaggcaaaaccaccggctggatccatcgcaccaccctgctctcgcggggtgtgaaaatgatcccaggcgtaagttatcagaagattgacgatgacgggctgcatgtggtgatcaacggcgaaacgcaggtattagcagtggacaatgtggtgatctgcgcagggcaagagccaaaccgcgcgctggcgcaaccgctgattgatagcgggaaaacggtgcatttaattggcggctgcgatgtggctatggagctggacgcacgacgggcaattgcccagggaacacggctggcgctggagatttaaatcggtatttgaagcgccggatgcaacgcattccgcacgtcgcggtaataaataaacaaagcgggggaaaatgccgaaacgcggtgccaattttttagcggggttccaacggtaattttctctttccgctcaaaacgcgggacaccatagatttactgccaatttccggcagatcggaaagggttaaaccatattgatccataagggtacgaatcacggctataccgtcaggcatggcttgagccatggcattaaattccgcaaattcgggcgctgattcttcccacgcggttattttggcacacaccagatccagcaaggggttttcaggatccacgggtccgagactcga

SEQ ID NO: 144288 - DNA, 3468 bp, Homo sapiens
ttccacattaagcttgtgctcactggggccacctggactgccctcccctactgccacagccacgtgggcctcagagccagcttgaagcccacgcctcccttctgggggcgcgcccccctgggcacacgcccatctcagcaaaagacggagtgtagattaatcaactttcctgagacacctatttttggcaactcatttaaatatgacattgaagtgtcgaataaatcaccggatgaagaagtcaaactacgacgtcatcatttagccagatgtatgaagaattttaagacggatatctatttcgtttccacgtttgaaccgtcaacaaaatcggtcgatttgctcacggttgaaacttttgctggtacggtatgtgaatatgctgacatgccaaaagagtggacaacgacccgaggactttatgatcctacccacctaataagcgcgtcatgtcataaagttgagggcttattttcatttgaggaccgcaccgtggcgacattaatccggctttttattcatcctgttaaatcgatgcgcggcattggtcttacacatgctctggcagatgtcagtggtctggccttcgatcgcatctttatgatcacggaacctgacggtgcggatatagcggttaagaccttcaccggcatccggctcaaagttccatgcccgccagaccatccggccttcagtatcacgaaccaccagacggaagtgactgccctggtcgtcttcgagtgtgatattgctgtacgtggtagtgaccgcttgcgcttgtctccgggccccggtggcagcaacacggattgggtcattttcgggctcctgataaaagaaaaccccggcagcctgctagctgtcggggtgaatttgctggggaagatactactatcagtcgttgctgcagtctccgagagtggacagaactttctcagcgttcttccggtccgcagtgaaggtccctgctttgtggtcattgacgtagacgtcgaactgcccggcctcagagatattgctgatgaagtcaaaacaggcgttatcgccgttacgccagctgtaatcccagcactttgggaggctgaggtggacgttaatatcgccgccttccgctcacaaaaggcctatatctccggtcaggtgaataaatccggtcaacaggcgatcaccaacgtgccactgactattctcgaggccatcaaaagcttccatgcctgcagtctgagtgttttcatggaatttaccaccggattgatgtcgctcgacaccgcgcttaatgagatgctttctcgcgtcaccccactgaccgcccaggaaacgctgccactggtacagtgttttggtcgtattctggcgagcgatgtcgtttcgccgcttgatgttccggggtttgataactccgcaatggacggctacgcggtgcgtttagccgatattgcctccgggcaaccgctgcccgttgccggtaaatcctttgccggtcagccataccatggtgaatggcctgcgggtacctgcattcgtattatgaccggtgcgccggtgccggaaggctgcgaagcggtggtgatgcaggagcagactgaacaaatggacaatggcgtgcgttttactgctgaagtgcgtacgggcaaaatattcgccgtcgcggtgaagatatctctgcaggtccgtggtgatatggatgacggatggctggcgctgtatgaatcccgcctgaagggaaagctgcacgtaatcagcaagcgatatacgcagcgaattgagcggcataacctgaatctgaggcagcacctggcacggctgggacggaagtcgctgtcgttctcaaaatcggtggagctgcatgacaaacagcaaggtcttgatgcggcgctgattgatgcgccgttagcagtcgatgcacaaacgcctcttagcgagttgctctctcatgtcggacaggcaccctgtgcggtgcccgtggtcgacgaggaccaacagtatgtcggcatcatttcgaaaggaatgctgctgcgcgctttagatcgtgaggggaatcgttttaagaagtttcgcactcgcttcatcgtccattacggcatagcggggagagaattccaggcactgttctaccatgcgagtgacatttttgcctgccaccagcgcaactacgcggaagtgttcgggattatggcgcaccacgtccagcgtgctgcaaccaatcgagccggtcgagcccagaatgtgctttcactttgtcgttcgcgtcacgacgcacgttacgtactgcaacacgcgcttgttctgcttcaccacgaacgattttggtcagatctttacgacgttcttccgtcagcggcggcaggacacacggatgtcgctacccgagagttcgggttcaggccaagatcggacgccataatcgctttttcaacggccggagacattgaacgatcaaacacgttgattttcagtgtacgggaatcttctaccgttacgcttgcagctgacgcgcggctcggcttggccgtaataattcacgacaatgccatccagcaggctgggagaagcacaacccgtgtcatttttgccgatttggggttttggcggctaatcatacatgcctacaggctggatctgcagagagaatttaagggccaacaacagcatatgacctcctgtaatcagcaggcgacggcgcaggcgttgaaaggggatgctcgtaagacctacatgagtgattgcctgaagaacagcaagtctgcgcctggcgaaaaaagtttgacgccacagcagcaaaagatgcgcgaatgcaataatcaagcaacacaacaatctctgaaagacgataataccggcgatcaccgcaccgaggatcccggtatcgatcgactggatcccaagaatgctctggatgttattggctttcagaaccgcggcatccgtggttggcagaatgcctttattggtcaaccagaagtttaccgcgaggttcattaccgcataaccgatgaagccagcgaatgccgctacgcctttattttcgcgtgccaggcccagcgggatggcgatacagaacattcatgttataccgataaaaacatcatcaacattccaaatctgatcgaacagtacggtgtggcgcgcgccatcattgaaacctgggccgctctgccactcagcaccgccaccatgtggggcttcttcatcctctgctttattgccaccgttacgctggttaacgcctgctcttataccctggcgatgtccacttgccgcgaagtacgcgatggtgaagaaccacctctgctggtgcgtatcggttggtcaattctggttggcattatcggtattgttctgctggcgctcggcggcctgaaaccgattcaaaccgccattatcgccggaggatgcccgctgttcttcgtcaacattatggtgacgctctcctttattaaagacgcgaaacagaactggaaagattaa

SEQ ID NO: 144289 - DNA, 2686 bp, Homo sapiens
atgcagatcccccgtagcccacggcagattgtgatgctccagcgcaaagccagcaaaccaggacaggggttaggcaaaaccaccggctggatccatcgcaccaccctgctctcgcggggtgtgaaaatgatcccaggcgtaagttatcagaagattgacgatgacgggctgcatgtggtgatcaacggcgaaacgcaggtattagcagtggacaatgtggtgatctgcgcagggcaagagccaaaccgcgcgctggcgcaaccgctgattgatagcgggaaaacggtgcatttaattggcggctgcgatgtggctatggagctggacgcacgacgggcaattgcccagggaacacggctggcggacctgcaggcagcaagtcaaggcacttgcattgatgaccaggatatcactatcgatacttatgaattcactactgactatctggagaatcccacctgtggtgaaaaagtagtggaagagacgcttgtcagccacctgctgaaatcaaactgcctgatcacccatcaaccagattggggttcgctccaaattcagtatcgtggacgccaaattgacagagaaaaactgctgcgttacctggtctcattccgtcatcacaacgagttccacgaacagtgcgtggaacgcatcctttaaatgacctgttacgcttctgccagcccagaaaaattgagcgtttacgcacgttattacccgtcgtggcggtcttggacaattaacccgtggcgcagtaatagggttttttttcccatcgaccacaagactgctggaagtggatatgcttaaacgcaccgccagcagcgacctctatcaactgtttcgcaactgttcacttgccgtactgaactccggtagtttgaccgataacagcaaagaattgctgtctcgttttgaaaatttcgatattaacgtcttgcgccgtggggggggcagtatgctaaacatcgtactttacgacccagaaattccgccaaatactggcaacatcatccgtctttgcgctaataccggctttcgtctgcatatcatcgaaccgatgggatttgcctgggacgataagcgcttgcgccgcgcggggctggactatcacgagtttaccgccgttacgcgtcatcatgactatcgcgcgttcctcgaagcagaaaatccccagcgcctgttcgccctcaccacgaaaggtacacctgctcacagcgccgtaagctatcaggatggcgattatctgatgttcggcccggaaacacgcggcctgccagcgagcattcttgatgccctgcccgctgaacaaaaaattcgcattccgatggtgccggacagccgcagcatgaatctgtccaatgcggtgtcggtagtggtgtatgaagcctggcggcagttggggtatccgggagcggataccggggcgtatcacatcattccgtggtcttcgataaccacctttgctaactttgtccgcggcattgtttcggtggtggcaaattatgatgttgatcgccatgaagatgctgataaagccaatcaggcactgaaagatgcggtagcggaattaatggaaaacgaagaaattcgcgggctgattattggtgaaccgaattttgccgggattgtcggcttaagcaataccgcgtttacactgcgtgtttcgttcaccacgctgccactcaaacagtggacgagcgacctgcaggcacattgccttggccgcaaatccaaaagaatatcccactcgaagacgaccagggcagtcacttccgtctggtggttcgtgatactgaaggccggatggtctggcgggcatggaactttgagccggatgccggtgaaggtcttaaccgctatatccgcacctcaggcatccgtacagacacggccacccgctgatcgcgaagcatttacccgcattcacctccccgaacacactttatatccccatacgccagccatcgccgctggcgtttttattgacggagacatacccatgacaacacagacgcagcacgacctcgcacccgctaaccaacccgaatttgaactgaccgtcacgccggtccccgatgaacagcgtatcgatttctggccacagtactttggcgctatcccgcagtggctactcctggagccgcatatcttcgcctggatggaccgcttctgtgagggctacagcggtggtatctggtcgttctacaccctcagcaatggcggcgcatttatgtcccccgagcctgacatcgatgagacagccgttgcgtgcctgcgggtcggcagcggtggtgttggcggcagccggcagcaggtcagagacgccagtttgttgtgctgcggtggcttgcacgcggcgaacggggcgttaggtggggtgtccgacccggtcgggaatacccccagccggccgaggagcggcgaggagaaggtgagtgcgtggccggtgtgcgccagtgccggcgccagtgttggtggcggtccggggtggttcggggtgaaggcgggtgcaggcaccgtgccggtggggtgggtgggcggagcaggttctttcagcgtgctgccgaagtggctgatagcgtcagacggtttcgtcttcggccaggcagtcgagggcagtgcagcaaacggaatggcggtgccggtggaggaggaccagtcggacttaaacacggcggcatag

SEQ ID NO: 144290 - DNA, 2007 bp, Homo sapiens
atgaaacagataacctttgctccccgtaatcacctgctcaccaataccaatacctggacgcccgacagccagtggctggtatttgacatgcgtacttctggcgcgtcgtttaccggcgagaccattgagcgtgtgaatataccaaccggttatgtcgagaagccaaataaacagtgtagacactccgtcactcgctacggccacggcggccactcggatcacactccgtcactcactgtggccacagtggccactcagatcacaccccgtcactcgggccacggcagccactgtgatcgcaacctgtcacttgctacagccacagcagccactctgatcacaccccatcacttgctatggccacgatggccccttggatcacactctgtcacttggtgtggccacggtggccactcggatcacactccatcacccactacggccacagcagtcactcggatcacatcccgtcacccactacggccacagcagtcactcggatcacatcccgtcactcactacagccatggcagccactctgattgcattcccgtcactcgctatgcccacggcggccactcagatcacactccatcacttgctatggccacggcagccactcagatggcactctgtcactcactatggccacggcagccacttggatacttggtcaataaaataagaagaaagcgttgtacggatggggtatcgccaagcggtaaggcaccggtttttgataccggcattccctggttcgaatccaggtaccccagccatcttcttcgagtaagcggttcaccgcccggttattggggtatcgccaagcgccaccaaattctgaatgtatcgaatatgttcggcaaattcaaaaccaatttgttggggtatcgccaagcggtaaggcaccggattctgattccggcattccgaggttcgaatcctcgtaccccagccaatttattcaagacgcttaccttgatttcaaatatgcgtgcattagagaatgattttttcaattctcccccaagaaaaactgttcagtttggtggaactgtgacagaagtcttgctgaagtacaaaacggcgattgaaaaacggctggaaaaactggcggttgatccacatcgcgaccgtgcgcagatgctgaaagtcgaaaacgtccagcaggcgtggcagcaatggatcaacaaactgccgcccgcacgtcgtgaggatgaagacgtgaaagagatccgttggatgatagaagagttgcgcgttagttacttcgctcaacaacttggcaagaactctcgggcagaatccatgctgtggtccttccataaagcggctatagaagcggcacgcaccaatatcattcaggcgcaaacccgcgtcgaagcggcacaagccactgaacggcgcattgccgcagatatcgatgacagcgaactgaaagccccgcgtgacggacgcgtgcagtatcgggttgccaagccaggcgaagtgctggcggcaggcggtcgggtgctgaatatggtcgatctcagcgacgtctatatgactttcttcctgccaaccgaacaggcgggcacgctgaaactgggcggtgaagcccggctgatcctcgatgccgcgccagatctgcgtattcctgcaaccatcagttttgtcgccagtgtcgcccagttcacgccaaaaaccgtcgaaaccagcgatgaacggctgaaactgatgttccgcgtcaaagcgcgtatcccaccggaattactccagcagcatctggaatatgtcaaaaccggtttgccgggcgtagcgtggtcattcctgtattccatcaaccagacaatctgcttgcggttggatagcattgaagccaaattgcaagccctggaggctacttgtaaatccttagaagaaaagctggatctggtcacgaacaagcagcacagccccatccaggttcccatggttgccggctcccctctcaggacaacccagatgtgcaacaaagtgcgatggtaa

SEQ ID NO: 144291 - DNA, 811 bp, Homo sapiens; identical to SEQ ID NO: 124448

SEQ ID NO: 144292 - DNA, 7521 bp, Homo sapiens; identical to SEQ ID NO: 121290

SEQ ID NO: 144293 - DNA, 1023 bp, Homo sapiens
  misc_feature (1)...(1023): n = a,t,c or g
gcgagcatcgtcgtgaacacaaggaaccggctgctcaagcgtaacttcaagagtacgatcatccgtcgctttgacacccagcgatgtaacatctgctttacccgcaacaatagctgcggcattgttaatgtgcgcctgtactggtactttggcttcaaatggttcgtttcgctgcgtgtatgccccttcggtttgccgtataccgatatgtcgaaaggcgcgccgtcgtttacctgggtagttgaatccatcggttaccttggcttcacctttatgatccccatcatgggcgcttatattgcctcgtcgattgccgataaaccggctttcgctccggcgtttctgtcgggtgcgggattcctcggcgcggtggtgctggggctggcgattggctatttcgtcttctggttccgcaaagtgcgccttggcaaagcattacaaccgctgctcggttcaatgctgatcccgttcgttactctgctggttttcggcgtgctcacttactacgttatcgggccggtgatgtccgacctcatgggcgggctgctccacttcctgaataccattcctccatcaatgaagtttgcggcagcgtttctggtcggtgcgatgctggcgttcgatatgggcggccccatcaataaaaccgcctggttcttctgcttctcactgctggaaaaacacatttatgactggtacgccatcgtcggcgttgtcgcgctgatgccgcccgtcgcggcgggtcttgcgacgttcattgcgcccaaactgtttacccgacaggaaaaagaggctgccagtagtgccattgtggnntncgcggatcaaggcgttaagggcgcggactttatctataccgacgtgtgggtgtcgatgggcgaggccaaagagaagtgggcagagcggattgcgctgctgcgcgggtatcaggtgaacgcgcagatgatggcgctgaccgacaacccgaacgtgaagttcctgcactgtctgccggcgttccatgacgaccagactaccgcgtga

SEQ ID NO: 144294 - DNA, 576 bp, Homo sapiens
gctcacacctacatggtggcggaagccttggaacagaaagcccgttctctcggtcataccataaaagtggaaactcaagggtcccgtggcgttgaaaaccgcttatccagcgaagagattgccgctgccgattacgtcattctcgctaccgggcgtggcctgagccccgatgatcgcgcgcggtttgccgggaagaaagtttatgagattgccatctcgcaggcgttgaaaaatatcgcccagattttcagcgaattaccgacaaactcgcagctttttgccgcagatagcggcgtgaagcttggcaaacaggaagtgcaaagcgctagcgtgatgagccacctgatggcgggcgtctctgcggcgctgccgtttgtcatcggcggtggtatccctggtggcgcttgccaacatgctggtgcagttcggtttgccgtataccgatatgtcgaaaggcgcgccgtcccttacctgggtagttgaatccatcggtaaccttggcttcacctttatgatccccatcatgggcgcttatattgcctcgtcgaatgccgataaaccggctttcgctccggc

SEQ ID NO: 144295 - DNA, 2307 bp, Homo sapiens
atggtcgggctggatgctggcgtggctaaactcgccacgctgtcagatggcacagtctttgagcctgtaaacagttttcagaaaaaccagaagaagctggcgagacttcagcgacagttaagccgcaaggtcaaattcagcaacaactggcaaaagcagaaacgcaaaatacagcgactgcattcctgtatcgcaaatatccgcagggactaccttcacaaagtcacaacggccgtcagcaaaaaccacgcaatgatagtcattgaggatttgaaggtcagcaacatgtcaaagtcagcagcgggtacggtcagccagccggggcgcaatgtccgggcaaaatcaggtttaaaccgttcgatactggatcaggcctggtgcttgttcccacgcgtcagcatgaatccgcaagaagccaactacgcctatttacgcggtgaagtggaactggttcgtctgccggatgcagaaggccgtatcgctgccgaagagaacctgccaggccaaacaccagcagcaccaccgggagcagcattacaacgcttccgtcgcccctgccgttacggtgatatcgctatcggcatctggttgatagccatacaaacgttccgttttctgagcaactggaccgatggcaaagactattgtctgaaagtgaagtcctgtgaagaccgcgccatgaaacagataacctttgctccccgtaatcacctgctcaccaataccaatacctggacgcccgacagccagtggctggtatttgacgtgcgtccttctggcgcgtcgtttaccggcgagaccattgagcgtgtgaatatccataccggcgaggtcgaggttatctatcgcgcgtcacagggcgcacacgtcggcgtggtgaccgttcatccgaagtcagagaaatatgttttcatccacggcccggaaaatcctgatgaaacatggcattacgacttccatcatcggcgcggagtgattgttgaaggcggcaagatgagtaaccttgatgcgatggatattaccgcgccgtatacgccaggagtgctgcgcggcggcagccatgtgcatgtctttagcccgaacggtgaaagggtgagctttacctataacgaccatgtaatgcatgaactcgatccggcgctggatttgcgaaacgtcggtgttgctgcgccgtttggcccggtcaacgtacaaaagcagcatccgcgtgaatacagcggtagccactggtgcgtgctgggaaccgggggatatcgcccgagcgtgagcggagaaagcccaccctccagacgaccaagaacggaaaccacggcggaggagacaaagaactctagtcaagatacgctgctgcgcgtttgccaccgctttgcgcatgatcggatcttcaatttgctgacggatgcgtgtcttaaaatctgtattactgatagcggcgtgaagcttggcaaacaggaagtgcaaagcggtagcgtgatgagccacctgatggcgggcgtctctgcggcgctgccgtttgtcatcggcggtggtatcctggtggcgcttgccaacatgctggtgcagttcggtttgccgtataccgatatgtcgaaaggcgcgccgtcgtttacctgggtagttgaaatcccatcgggtttacctttgggcttcacctttatgatccccatcatgggcgcttatattgcctcgtcgattgccgataaaccggctttcgctccggcgtttctggtttgctatctggcgaacgacaaagcgctgctcggcacccagtcgggtgcgggattcctcggcgcggtggtgctggggctggcgattggctatttcgtcttctggttccgcaaagtgcgccttggcaaagcattacaaccgctgctcggttcaatgctgatcccgttcgttactctgctggttttcggcgtgctcacttactacgttatcgggccggtgatgtccgacctcatgggcgggctgctccacttcctgaataccattcctccatcaatgaagtttgcggcagcgtttctggtcggtgcgatgctggcgttcgagatgggcggccccctcaaatagagccgggtggctcttctggttatgctggtggcgccggcgcatgtaggagtggtcgccgttcgccagcggacgtgcggcgttgctccaggcccagaggggactttgggcgctgtcacgcccgttgccgcccgcgctggtgagggggcgctcgggcgagccgcggctgcgtcatacgtgtgcggggacaggcgcgtcgtgcgccagtggtggccctgctgagcgcccggggcggccgcc

SEQ ID NO: 144296 - DNA, 2787 bp, Homo sapiens; identical to SEQ ID NO: 144154

SEQ ID NO: 144297 - DNA, 2221 bp, Homo sapiens
  misc_feature (1)...(2221): n = a,t,c or g
catggcggctgtagaggatcaagactggtccgcgaacgtgggtgttaaatatacctggtaatattcttcactccgaggagatactggtaatttaatctaaataatgcccgtcaaggatttgacgggcattactgcaaaggacgcgcaaatgttatctgtagttaaacctcttcaggaatttggtaagctcgataaatgtttgtccagatacggtacgcgcttcgagtttaataatgaaaagcaagttatattttccagtgatgtcaataacgaagatactttcgttattttagagggagttatctctctgcgtagagaagaaaacgtacttatcggtattacccaggctccttatattatggggctggctgatggtttaatgaaaaacgatataccatacaaattaatatcagaaggaaattggtcgggatatcatctaccagccaaacaaaccattacgcttattgaacaaaatcaactctggcgagacgctttttactggttagcctggcaaaatagaattctggaattacgcgacgtgcagctcattgtgcataattcctacgaacaaatccgcgcaacattattatcaatgattgactggaatgaagaattgcgatcacgtattagggcgatggattatatccatcaacgtacacgcatatggcgctctgttgtcgcagaagttctcgctgctttgcgtaaaggcggctatatcgcaatgaataaaggcaaactgctcggtcaccaggtcattgatgccatcgctcatatttttaaagcgcgtcaacggcgaacgagtgaccaccacaaacgcgccaatattcttctgcgggatcatcgccatataggcatgaaaaaatcccgcgtggaagctttcttgattgttaaggacgtcactcacgacaaaaaatggctggatcgcgcgattcgcagtggcttccagtgattatccacgacgtcgccagaaataatcattatcgcgttaacgaacacttcgatacccagtggaatccgctgccggattacaacaaagataacccggcgcatcgcttccgcgcgttcggaggtacaccaggccactggatcgaatggggccgtttaatgctgcacatccatgctgccctggaagcccgttgcgaacaaccaccagcatggctgctagaagatgccaaaggtctgtttaacgccaccgtgcgcgatgcctgggcacccgatggcgcggacgggattgtttataccgttgactgggaaggaaaaccggtggtccgcgaacgtgtacgttggcctatcgtcgaagcaatgggtacggcctacgcgctctacaccgtcactggcgatcgccagtatgaaacctggtatcaaacatggggcgaggggaccgtccggtgcagtttttgggtttgacatcagcctcacgggaggctgtatgtcgttaattaaggtgccttgtatgcaaatcaccaatatgcattgcagtggacagaccgtttcacttgccgcgggggattatcacgcgaccattgtgaccgtcggtgctggtctggctgaattaacctttcagggttgtcatttagtcatcccgcacaaacccgaagagatgccgctggcgcatctgggtaaagtgcttattccgtggccgaaccggatcgccaacggctgttaccgctatcaggggcaggaatatcagttacccattaatgaacatagttcaaaagccgctattcacgggctgcttgcctggcgagactggcaaattagtgaattaaccgccaccagcgttaccctgacagcttttctgccgcccagttacggctatccgtttatgctggcttcacaagttgtttattcgctcaacgcacacacgggtctttccgttgagatcgcaagccagaatatcggcactgtcgcagcgccttatggcgtgggtattcatccttatttaacctgcaacttaacatctgttgatgaattacttgatgaactatntatcggagcgcgcatgggattgcttatctggacttctctactcgatgacgagctgaaggcgctgcccgctttcgaatctaccgcggctggcgatggcgggaatcactgctttccagattgtctcaggcaccatcgcagggatggcagagaccgccgacacgctaagaaaccaagggcatcacagcttgccagcttggccggcatagaagagcctaaactagcacaccgataa

SEQ ID NO: 144298 - DNA, 1920 bp, Homo sapiens
atgaatgactgtccacgacactatacccaaaagaaagcggcttatcggtcagttttacctgatgtacgtgagtggggacacaatccgctaccgtggatggacgaagacgaactgcgttatcgcgaggaagtcccttgttattgcggtaaacaaggttgtattgaaacctttatttcgggcacgggattcgcgatggattatcgtcgtttgagcggacatgcgctgaaaggcagtgaaattatccgcctggttgaagaaagcgatccggtagcggaactggcattgcgtcgctacgagctgcggctggcaaaatcgctggcacatgtcgtgaatattctcgatccggatgtgattgtcctggggggcgggatgagcaatgtagaccgtttatatcaaacggttgggcagttgattaaacaatttgtcttcggcggcgaatgtgaaacgccgcaaccccttgtatctggctttcacgaagccgaactgtcgcttgatgatgcgaaatgcgtgatcggcgctgaacgcagcgaaatgcagatcattcgtaactttattggtcaggccgataacgccgatcatccgcagaagaaaaagtatggccgcgtggaactggtcggtccgttctccgtgcgtgatggcgaagataattaccaactttatctgattcgtccggccagcagttctcaatccgatttcattaacttactgtttgaccgcccgctattactgctgattgtcaccatgttggtcagtacgccgctgctgttgtggttggcctggagtctggcaaaaccggcgcgtaagctgaaaaacgctgccgatgaagttgcccagggaaacttacgccagcacccggaactggaagcggggccacaggaattccttgccgcaggtgccagttttaaccagatggtcaccgcgctggagcgcatgatgacctctcagcagcgtctgctttctgatatctctcacgagctgcgcaccccgctgacgcgtctgcaactgggtacggcgttactgcgccgtcgtagcggtgaaagcaaggaactggagcgtattgaaaccgaagcgcaacgtctggacagcatgatcaacgatctgttggtgatgtcacgagcgtccgctggaagagtaagagctgcacggtatgaccgaagaagtttacctcgacgaaatggtcgtattaacgccaatatgatccttccgtacccgccgggagttcctctggtaatgccgggtgaaatgatcaccgaagaaagccgtccggttctggagttcctgcagatgctgtgtgaaatcggcgctcactatccgggctttgaaaccgatattcacggtgcataccgtcaggctgatggccgctataccgttaagcttggttttgatgataaccatgccatcagcctgttcagcgcatatgcttctctggtttacgttacccctattctcggcggctggcttgccgaccgcctgctcggcaaccgcactgcagtgattgccggcgcgctgttaatgacccttggccatgtggtgctggcgacggaagctgtgtccggtcatcacagtcatatcctgaagatggcagttaccgccctcttcacataccggacagtcgtgcgggtggttggtcatcaaccactcgaccacgctttcacggaactgtttcgcttcttcgtcgtcaatggaaataaaggtgccatcggaagccggtgtcatacaggacatcaccaggcgaccacgcgtgtcttccgcgttttggtattgcttcaccgcacactggcggcaagcaccgacacttcccagcgccggatgccagcaaaacaggttcggctgaatcccattaatcaaatgggtattgctgaacggctgtttgattcccgcctcaaattcttcgcggaaatatttgatggcgctctgtaa

SEQ ID NO: 144299 - DNA, 792 bp, Homo sapiens
atggctgttgctgccaaaacgaaaaacgccggaaaatggcataaccacataatccggcgtttcgacattaatcctggcgatcgtctttatgatcaaggcggtcgcgctcatcatcctttcgctggtactcaccatcaaaagtattaccgccaccgaattttattcatccgttgccgatttgtgctgatgaaagttgtcatactcgtagcatgtctgaacagggtcgatggcggcctgaaaacgggtgtcgatatcatcaaggcggcgattctcggcgcagaaagcttcggcttcggcactggcccgatggtggcgctcggctgtaaatatctacgtatttgccatctgaacaactgcgcaacgggtgtagcaactcaggatgacaaactgcgtaagaaccactatcacggcctgccattcaaggtgacgaattactttgagtttatcgcccgtgaaacccgcgagctgatggcacagcttggcgtaacacgtctggtggatctgattggtcgcaccgacctgctgaaagagctggacgcagaagctggcgctgtcgaagctaacctgagcaatcagatcaacgacatcatcaccaatgctgctgacagcattgacgccggaaacggtatctacctgctcggtttcaccaaccacatgtacctgatagctatgacgggcattcagggcatcaagtaccacctgattgacatcggcaaacgtcagttggatacccgcgtctgccagcagtttaccgataaagccacgaccgatattacctgcgccaaaatgtaa

SEQ ID NO: 144300 - DNA, 4348 bp, Homo sapiens
atgccatccagcgcattgagcgccatacggataaaaagcacgatgggcaatagcaaaaagaggatgggttgtgccgccaacatcaacagcaatccgccgtggttagggtttgaagtggtgggcgtttaccacgacccgaaaccgggcggcgtttctaacgactgggcgggtaacctgcaacagctggtcgaggacgcgaaagcgggcaagattcataacgtctatatcgcgatgcaaatgtgcgacggcgcgcgagtgaaaaaactggtccatcaactggcggacaccacctgttcggtgctgctgatccccgacgtctttaccttcaacattctccattcacgcctcgaagagatgaacggcgtaccggtggtgccgctttacgacacgccgctttccggggttaaccgcctgctcaaacgtgcggaagacattgtgctggcgacgcttattctgctgctgatctccccggtgctgtgctgtattgcgctggcggtgaaactcagttcaccagggccggttattttccgccagactcgctacggcatggatggcaagccgatcaaagtgtggaagttccgttccatgaaagtgatggagaacgacaaagtggtgacccaggcgacgcagaacgatccgcgcgtcaccaaagtggggaactttctgcgccgtacctcgctggatgaattgccgcagtttatcaatgtgctgaccggggggatgtcgattgtttgtatccccctgccacgcccgcgccgagaatacgcgccagcacgagcgttgaaagtagccaaacagcagcgttctcaccgcactattgaccagataaccgaggatcgcggtcatcgccagcggccagaaatgggcgctaaccaccgtacaagtgaagcccgccagcaccgcgctggtttcgatcatgccgattttgttgaactccagctctttttgcatcaacgcgcggaactgttgcccgtccgggttattcagcacgtcgccgatgagatcactcaacaaaaacaccgccacgcacaccacgatccccagcccgacgttcagccagtacaacgtggtgagttcaaggtgactgatttcttttcgctgaataatcgagttagcgataccgaagtcagaaagcgtatctgccagcgcgataatcaccagcgacacggaataaccagtttgacactgtcatcgcaacattatctggtgatcactgcgttgggtgccgatcgccctggaattgtgaacaccatcacccgtcatgtcagtagttgcggctgtaatattgaagacagtcgcctggcgatgctgggagaagagttcacgtttattatgctgctttccggttcatggaatgccattactctgattgaatcaacgttaccgttgaaaggtgccgaactggatcttttaatcgtgatgaagcgcacgacggcgcgtccgcgtccgccaatgccagcatctgtctgggttcaggtcgatgtggcagactccccgcatttaattgaacgcttcacagcacttttcgacgcgcatcatatgaacattgcggagctggtgtcgcgcacgcaagctgctgaaaatgaacgggctgcgcagttgcatattcagataaccgcccagagccccggatctgcggacgcagcaaatattgagcaagcgttcaaaggcctatgtacagaactcagtgcacaagggctccgtatctcaaatcgtacattcaaacactggaacgctcagacactgtccgacactcagcgcatcggctttgcagcggccttgccgcgtcggcacggcggggcttatactacgtcgtactacctccgagacaagtgccgggcttatatcaacggagctataatactcgatcgaagcacaattccatgcgcggggactgacccgctttttcgtgcgtgggagctggggcttgttgaaacccagcaggcgctggttgctaacggcttgcgtcacaagatccgtttgcaggtcgatggcggcctgaaaacgggtgtcgatatcatcaaggcggcgattctcggcgcagaaagcttcggcttcggcactggcccgatggtggcgctcggctgtaaatatctacgtatttgccatctgaacaactgcgcaacgggtgtagcaactcaggatgacaaactgcgtaagaaccactatcacggcctgccattcaaggtgacgaattactttgagtttatcgcccgtgaaacccgcgagctgatggcacagcttggcgtaacacgtctggtggatctgattggtcgcaccgacctgctgaaagagctggacggtttcaccgccaaacagcagaagctggcgctgtcgaagctgctggagactgccgaaccgcatccaggtaaggcactctactgcaccgaaaacaacccgccgtttgataacggcctgctgaacgcgcagttgctgcaacaggcgaaaccgtttgtcgatgagcgccagagcaaaaccttctggttcgatattcgcaacaccgaccgttctgtcggcgcgtcgctttcaggctatatcgcccagacgcacggcgatcaggggctggcagccgatcctatcaaagcgtacttcaacggcaccgcaggccagagcttcggcgtgtggaacgcgggcggcgtggaactgtacctgaccggtgatgccaacgactatgtcggtaaaggcatggcgggcggcttaatcgccattcgtcctccggttggttccgccttccgcagccatgaagcaagcattatcggcaacacctgcctgtatgggcggaccgggtgccaatacaactgtacccgcctggattacgacagtgcgctgaatatccgcgaactgaaaaaagtcgcgctggaaaaaggttgggatgaatataagcaacgctggcacaaaccagccggttctggttcacgccatccggttgccgtgattggtgcaggtccggcgggtctggcagcaggttacttccttgccagagcgggccatccggttacgctgtttgaacgcgaagccaatgcgggcggcgtggtgaaaaatatcgttcctcagttccgtattcctgcagagttaattcagcacgatatcgattttgttgccgctcacggcgtgaaatttgagtatggctgctcacccgatttaaccattgagcagttaaaaaatcagggcttccactatgttctgattgccaccggcactgataaaaatagcggtgtgaaactggcgggcgacaaccaaaatgtctggaaatcactccccttcctgcgtgaatacaacaagggtacagcgctcaagctgggcaaacatgtggtcgttgtcggggcgggtaacaccgcaatggactgcgctcgtgcggcgttacgcgttccaggcgtagaaaaagcaacgatcgtttaccgtcgttcactacaagagatgcccgcatggcgcgaagagtatgaagaagcgttgcacgacggcgtagagttccgtttcctgaataatccggaacgtttcgatgctgatggcaccttaaccttgcgcgttatgtcgcttggcgaaccggatgagaaaggtcgtcgtcgtccggttgaaaccaatgaaacagtaacactgcttgtagacagcctgatcaccgccattggtgaacagcaggatactgaagccctgaatgcgatgggcgtgccgctggacaaaaacggctggccagacgtcgaccataatggcgaaactcgtctgactgacgtctttatgatcggcgacgtacagcgcggaccatcctccattgtcgctgctgtcggaaccgcgcgtcgggcgaccgatgccatccttagtcgggaaaatatccgttcccaccagaacgataaatactggacaacgtctatccagcgaaaggtccgagcctatgatagtggtgatggtaaagtacagacgctgggcgcggtagagcatagcccgttgtatacctcggtagatccgctgcaaagcatgagccgtgaagagaagctggatatcctgcgtcgcgtcgataaggttgcccgcgaagcggacaagcgcgtacaggaagtgactgccagcctcagtggtgtctatgaattaattttggttgcggccaccgacggcacgctagcggcggatgtccgtccgctggtgcgtctttccgtgagcgttctcgtcgaagaagatggcaaacgcgaacgcggtgccagtggcggcggcggtcgttttggttatgaattcttccttgccgatctcgacggcgaagtccgtgcggatgcatgggcaaaagaagcagtgcgtatggcgctggtcaatctttctgccgttgctgcaccagcgggcaccatgccggtagtacttggcgcag

SEQ ID NO: 144301 - DNA, 2247 bp, Homo sapiens
atggaaaagcctttgtggtaccagcgcctctcaactaaggaagtacttggaagcgttgggtggctcttgctgtgtaaaccttatacaattgatacttttccttctcacattagtgagacaagatggatgtatccatcttttagcaactggcatatgcagcaggtcggtgcgaccaatcagatccaccagacgtgttacgccaagctgtgccatcagctcgcgggtttcacgggcgataaactcaaagtaattcgtcaccttgaatggcaggccgtgatagtggttcttacgcagtttgtcatcctgagttgggaccccttattgaacggaaaaggcgtgcccaaccggcgtttcccacggaaaaggggcaggaaaaagggacaggcacccagggtatcaccgggttacagacgtcccaagggcgtacgggacaccagtgaggcagcgcccatcgaacgctgggcgctttatccgggcaaaaaaccgaaacagacgctgccggagcgcaccggctactttttgctattacagcacgaagatgaagtattgctggcgcagcgtccgccgagcggattgtggggcggtttatactgtttcccgcagtttgccgacgaagaaagtttgcggcagtggctggcgcaacggcagattgctgccgataacctgacgcaactgaccgcgtttcggcataccttcagccatttccacttagatattgtgcctatgtggcttcccgtgtcgtcattcaccggctgcatggatgaaggcaatgcgctctggtataacttagcgcaaccgccgtcagttggcctagcggctcccgtggagcgtttgttacagcagttacgcactggcgcgccggtttagcgcaaggtcaggattttcagctgtaccccggcgagctgggaaaacgcatctataacgagatctccaaagaagcctgggcgcagtggcagcacaagcaaaccatgctgattaatgaaaagaaactcaacatgatgaatgccgagcaccgcaagctgcttgagcaggagatggtcaacttcctgttcgagggtaaagaggtgcatatcgagggctatacgccggaagataaaaaataaaaacagtgccggagcacgcctccggcaacttgcataaaaacaaacacaacacgcacccggaatgatgaaaaaatatctcgcgctggctttgattgcgccgttgctcatctcctgttcgacgaccaaaaaaggcgatacctataacgaagcctgggtcaaagataccaacggttttgatattctgatggggcaatttgcccacaatattgagaacatctggggcttcaaagaggtggtgatcgctggtcctaaggactacgtgaaatacaccgatcaatatcagacccgcagccacatcaacttcgatgacggtacgattactatcgaaaccatcgccgggacagaacctgccgcgcatttgcgccgggcaattatcaaaacgttattgatgggtgacgatccgagttcggtcgatctctattccgacgttgatgatattacgatttcgaaagaacctttcctttacggtcaggtggtggacaacaccgggcagccgattcgctgggaaggtcgcgcaagcaacttcgcggattatctgctgaaaaaccgtctgaagagccgcagcaacgggctgcgtatcatctacagcgtcaccattaacatggtgccgaaccaccttgataaacgtgcgcacaaatatctcggcatggtccgccaggcgtcacggaaatatggcgttgatgagtcgctgattctggcaattatgcagaccgaatcttcctttaacccgtatgcggtcagccgttccgatgcgctgggattaatgcaggtggtacaacatactgccgggaaagatgtgttccgctcgcaggggaaatccggcacgccgagccgcagtttcttgtttgatcctgccagcaatattgataccggcaccgcgtatctggcgatgctgaacaatgtttatctcggcggaattgataacccaacatcgcggcgttatgccgtcatcaccgcctataacggcggcgcaggcagcgtgctgcgagtcttttcgaatgataagattcaggctgccaatattattaacaccatgacgccgggcgatgtttatcagacgctgacgacccgccatccctctgcggaatctcgccgttatctttataaagtgaataccgcgcaaaaatcctaccgccgccgataa

SEQ ID NO: 144302 - DNA, 1200 bp, Homo sapiens; identical to SEQ ID NO: 128994

SEQ ID NO: 144303 - DNA, 1908 bp, Homo sapiens
ttaatatccctgctcgaaatagctttcgagaataataaccgcagaggcagagtcaactttgcctttgttgagcgcccgatagccgccctgttcaaacagaccggaacgggcttccacagtgctaagacgctcgtcatggagctttacttcaacaccgaaacggccatgaatacggttggcaaatttacgcgctctggcagtcaatggttgctcggtgccgtccatattcagcggcaaaccgacgatgatttcgtccggctgccactctttcagtaaacgctcgataatgttccagtccggcgtaccgtcctgtgcaggcatggtgagaatatccacaccaatcagttttgccgcctcgcgccagcggtcggcaatcggcgttttgaacagaatattcagatctgccggggccgttagccacgcgttatcgagaatttcttgttccagttgacctttctcccaggaggcataacccagagccaccaatacgtcagacggttgtttatcggtgccgagcgtttccagcacatcgcgggaagtggtcattaccgtgttgtctgaaatgcgaatgctggaagcaaaattggaggccggagtatgcaaaataaacccgcgatcttcagccagcggaccgccgagcataaccggtttatccagacggattgattcatcacgcggctccggcgtgatcttcagcttttccagaatcccttcaattttgagattttccagcggcttgttgacgatgatccccattgcaccattggtattatgttcgcaaatgtagaccacggaacgacggaaaatcggatccggaaactctgcttcaatctcacgaatacaggtacccagagaaaggggcatgcaaacatcagtggtccggaaacgtttaggatatatcaccggaacgcgcacgcccccctcacgatctaaagcgcgcagcagcattcctttcgaaatgatgccgacatactgttggtcctcgtcgaccacgggcaccgcacagggtgcctgtccgacatgagagagcaactcgctaagaggcgtttgtgcatcgactgctaacggcgcatcaatcagcgccgcatcaagaccttgctgtttgtcatgcagctccaccgattttgagaacgacagcgacttccgtcccagccgtgccaggtgctgcctcagattcaggttatgccgctcaattcgctgcgtatatcgcttgctgattacgtgcagctttcccttcaggcgggattcatacagcggccagccatccgtcatccatatcaccacgtcaaagggtgacagcaggctcataagacgccccagcgtcgccatagtgcgttcaccgaatacgtgcgcaacaaccgtcttccggagactgtcatacgcgtaaaacagccagcgctggcgcgatttagccccgacatagccccactgttcgtccatttccgcgcagacgatgacgtcactgcccggcgggttgagaagcggtgtaagtgaactgcagttgccatgttttacggcagtgagagcagagatagcgctgatgtccggcggtgcttttgccgttacgcaccaccccgtcagtagctgaacaggagggacagccgtattgtccatgcgatgaataaaggaaaagttatgaaacacaagctttctgcaatccttatggccttcatgttgacgacgccagctgcgtttgctgcccctgaagcaacaaacgggaccgaggcaacgacgggtactactggcaccacaacgaccactaccggcgcaaccacgactgctactaccactggtggcgtggctgctggcgctgtcggcacggcgacagttgtcggtgtggcaacggctgttggtgtggcgacgttggcagttgttgcagcaaatgacagtggcgatggcggttctcat

SEQ ID NO: 144304 - DNA, 526 bp, Homo sapiens
atgaatgcatgccgtagtccgctgctgaagaagaaatccgccaccgagctcggtgagctggcaaccagtatcaacaccattgcccgtgatgcgcatatggaagcgaatctggagatggagattgttccccagggattacgcgtgctgattaaagacgaccaaaaccgcatgttcgactcgctcgataataaaattattattaccgggcataacgatgcgatggcctacaaaaacaatatctacaacaactggaacctttcgggtgaccgcgcgctttctgttcgtcgggtgctggaagaggccggaatgccggaagataaagtgatgcaggtaagcgcaatggcggaccagatgctgctggattccaaaaatccgcaaagcgcgggcaaccggcgcattgagattatggtgctgaccaaaagtgcgtccgatacgctgtatcaatactttggtcagcatggggataaagtggtgcagccgctggtgcaaaagctggataagcagcaggtgctttcgcagcgaacgc

SEQ ID NO: 144305 - DNA, 1539 bp, Homo sapiens
tcactcagcctgcgcgccggttccctgcgtaccattacgcacatcctgctgccgctgctgcgcccggcgatcctctcggcgctgatttacagctttgtgcgcgccattaccaccgtcagcgccattgtgttcctcgtcacgccggatacccgcgtagcgacggcttacatcctcaaccgcgtggaagatggcgaatacggtgtagcgaatgctacggtccattctgatcgtggtgagccggcgataattcacctggacgggtgatcgggaacacggcccccgggaaaggcaaacagcgtaagggggccatacccaaaaccgcaatggcagctcgcgagcgtaggttggactgaccgccgtaatgtgatcggcatagtacagaccggccttcaggaaagagatttgtccgttgaattccagcccatgaatattaaagaatgaccatggcaattggatgtcattcatgtgatgtgcataaaacatgccttgataggccaggttgtgcacagtaaacaccgacttcgccggacgcccgcgcgccgccagatacgcaggcgcaaggcctgcatgccagtcgtgcgcatgcaccacatcaggacgccagaatgggtcaagcccgctggccatttctgccccaacccaccccagcagcgcaaaacgcaatacgttgtcggtataggcaaataagttggtatcgtgatacgggcttcccggacgatcatagagatgcggcgcgtcaatcaggtaaatgccaaccccgttgtaatgaccgaacaacagcgtgatatgtccggcgaaggtatcacgacgggatactacctgcgcatcggtcacgccacggcgaatatcgggaaatgcaggcaacagtacgcgagcgtcaacgccgtctgcgatttgtgctgcgggtaatgccccaataacatcagccagaacgccgggttttatagacagccgaggagaggataccagcacgatgccttcttctgaacgatagaaacgacgtgcatcttcctctgcgttttcaccaatcaccatgccttccggaataacacaagcacgatcgatgacgcagcggcgcagacggcacgagcgacctacccatacttccggtaacaatacggcggaatcaatgttgcagaatgaattcacgcgaacgcgcgagaacagaacggactgcaccaccaccgaaccggagatcacacaaccgccggaaaccagtgagttaagggtcatcccgtggctaccggagcgatcctgcacgaatttcgctggcggtaatgattcattgtaggtgcgaattggccaattgcgatcgtacatatccagttccggcaccacagaggccagatcgaggttcgctttccagtaagcttccagcgtacccacatcgcgccagtacggctcggcatccgggtcggattgtacgcaagagagcgggaacgggtgcgcataggccagaccggcttcggtgatcttgggaatcaaatctttgccaaagtcgtggctggagttctcatcgagaacggcttctacagacat

SEQ ID NO: 144306 - DNA, 3147 bp, Homo sapiens; identical to SEQ ID NO: 136666

SEQ ID NO: 144307 - DNA, 1233 bp, Homo sapiens; identical to SEQ ID NO: 136655

SEQ ID NO: 144308 - DNA, 1194 bp, Homo sapiens; identical to SEQ ID NO: 136658

SEQ ID NO: 144309 - DNA, 2781 bp, Homo sapiens
ttattgatagtgttttatgttcagataatgcccgatgactttgtcatgcagctccaccgattttgagaacgacagcgacttccgtcccagccgtgccaggtgctgcctcagattcaggttatgccgctcaattcgctgcgtatatcgcttgctgattacgtgcagctttcccttcaggcgggattcatacagcggccagccatccgtcatccatatcaccacgtcaaagggtgacagcaggctcataagacgccccagcgtcgccatagtgcgttcaccgaatacgtgcgcaacaaccgtcttccggagactgtcatacgcgtaaaacagccagcgctggcgcgatttagccccgacatagccccactgttcgtccatttccgcgcagacgatgacgtcactggccggctgtatgcccagggttaccgaactcgggcctgcttgtttcctggccccttccgttgtcatctctttcggaccatgttccactagcagattcgcaaacattgttcgtattgcccggatgtgcccatattcccctgcgctgcaagaactgggtcgaattcttgacttatgagttatcaggacggaagggggcccaaaaaatggaggaagcttcgtgtcgttagcgaaataataagggacaatatgcacagcccgtttagaatcctcccaggggttcctccctgcgtcaggtggtgtgcgtaaaaggataaatgatgaaaaggatgattgtgctggatggcgcacatggcgaaggtggcgggttctgacagcccgatgggcgacgatctggataaaaaccgttccattgttaaacgctttggttatccggtgattatcaaagcctccggcggagtgcggcgtgtctgcggtatgcgcgtaatgcgcggcgacgcataactggcacaatccatctccataacccgtgcggaagcgaaaaaatgccgccaccagaaagtggtcgaagaatcgccaccaacgggcattaccccggaactgcgtcgctacatcggcgaacgttgcgctaaagcgtgtgttgatatcggctatcgcggtgcaggtactttcgagttcctgttcgaaaacggcgagttctatttcatcgaaatgaacacccgtattcaggtagaacacccggttacagaaatgatcaccggcgttgaccctgttctccaactcgctggcaccggccattgttgccgcgtccatcaaagtactggagatggtcgaagcgggcagccgaactgcgtgaccgtcctggcgggagccgatcacgccattattccggtcatgcttggtgatgcggtagtggcgcagaactttgcccgtgagctgcaaaaagagggcatttacgttaccggtttcttctatccggtcgttccgaaaggtcaggcgcgtattcgtacccagatgtctgcggcgcatacccctgagcaaattacgcgtgcagtagaagcatttacgcgtattggtaaacaactgggcgttatcgcgttcacatctataactgggatgagtggtcgcaaataaaccatcccggttgccagatgtgttcgttgggccactgcaatactgttcggtgacagtggtcaggtattcggtcacggaagtgaaaggcttcaagatcggcgatcgcgtttctggcgaaggccatatcacccatttgtgccgcaacacgataggcgttggtgttaatcgcccgggctgctttgccgaatatctggtgatcccggcattcaacgccttcaaaatccccgacaatatttccgatgacttagccgcaattgtactgacagtggtgtctatgaataccatgtcgcgccacgggagaaatctctttctaacgcgcgtgtgttcggcgcacttgggccctatcgggacattcggttggtccacccggtaaaccgattttgcaggggcggcggatcgccctttaacatgagggtcaccttcgctttgtttgaactcatcacgaatatcctgccgtgacatacgcagctttttcaggtggctgaatatttggaaaaagacgtcaaatcccaccattggaatgacaccaagcaccaccagcagtgcgcatagccctaccaaatccatcgcattacccatggcggtaatcggagactcggccatcaagcgcatcatctgcggccagtgatgccagagaaaaaaccccgtcacgctgccaaccaggatggttttcaaaattgctttaagcaactccgcgccagtctgagccgagaacatccgtttaatgcccggtagcgggttgagtttggaaaacttcggctgcaaggatttgccgctaaataccagccctcccagcatgaccggagaaatgagcgccaccagcaccacgccgctaatcagcggcagcagcgccagcatggcttctctgatcagcagaataatctgcccgaggatcagattcgggtcattgataatactgtgatcaaaatgcagcccagcggagagcatgcccgacaatcgacgggccagcgacacaccgccaaaccagataacactaacgcccaccagcaaaatcagcagtgaggtcagttcacgggaacgcgggatttgcccctcttcccgcgctttttctagtcggtgaggtgtgggggcttctgttttgtcgtcgctctcgtcagacacgtcgccaatccttcccaaggggaaaacgcacgacgtgctgaccggaagtgatgacggtcgccacagcaacacgtctctggcgtggggagctggcgtgcagtttaacccgaccgaatccgtggccat

SEQ ID NO: 144310 - DNA, 2655 bp, Homo sapiens; identical to SEQ ID NO: 136656

SEQ ID NO: 144311 - DNA, 1896 bp, Homo sapiens; identical to SEQ ID NO: 136671

SEQ ID NO: 144312 - DNA, 2655 bp, Homo sapiens; identical to SEQ ID NO: 136662

SEQ ID NO: 144313 - DNA, 810 bp, Homo sapiens
ttattgatagtgttttatgttcagataatgcccgatgactttgtcatgcagctccaccgattttgagaacgacagcgacttccgtcccagccgtgccaggtgctgcctcagattcaggttatgccgctcaattcgctgcgtatatcgcttgctgattacgtgcagctttcccttcaggcgggattcatacagcggccagccatccgtcatccatatcaccacgtcaaagggtgacagcaggctcataagacgccccagcgtcgccatagtgcgttcaccgaatacgtgcgcaacaaccgtcttccggagactgtcatacgcgtaaaacagccagcgctggcgcgatttagccccgacatagccccactgttcgtccatttccgcgcagacgatgacgtcactgcccggcctctttcgccacactttctccttatatattctgtttacaacgttcttttcttttggtatttccgcattcggtcgtccagccacaacgggctgaaatcgtccgtgattatgatccgtagtgttcagccatctccaaccaccaattcttctttggttatttactccctgagcttctaattttctttccaaactcacagacatctgggctgctagctgcatgaaggagctacccgctgtgggtactccgtcgtttggcttgaccagccttggggaaccaaaccttttggaaccaggacattggaacccttggcccttgaaactgcctttgtgagctcttggtcttctctcaatattaatcaggatagcatcatccttttgaatgaagtggttgtccaccttcat

SEQ ID NO: 144314 - DNA, 1740 bp, Homo sapiens; identical to SEQ ID NO: 136665

SEQ ID NO: 144315 - DNA, 1986 bp, Homo sapiens
ttagtccccagcatactcccgggaaggcggttttgacgcatactccccttggcggccccttgtttccccggattgtgctcccatatgcacgtcgtaaaggtaggagtagccgcgtttgccgttctcgcttatacgggcggggcgagctccttgctgatctgcccattcacagagtccacagaaacgtgtggtaaccatggaggaattccgaagggaaaatagccacacacaggcagtcggtcctgtcgctcgattcacagctttatccgcaacatttccggacataagagccgttttgccattcgttttatgccgctggacactgaaaacggacaggtaccggaacgtctggatttcgaactggcctgttgctcggagaatgggctgctgaagaaaaacgaatccccagcagtggcgatctttccgaaagcgatgactggagcgaagaaccaaagcagtgacatttgtctgatgccgcacgtaggcctgataagacgcggacagcgtcgcatcaggcatcttgtgcaaatgtcggatgcggcgtgaacgccttatccgaccattcgaccccggaaatctgcaggcgatgagagcgaaaacgataatcgccagcggtgcgggcatacccagcagcaaggggtggaaaccgttgaggatataatcaaccggaacgcgcacgcccccctcacgatctaaagcgcgcagcagcattcctttcgaaatgatgccgacatactgttggtcctcgtcgaccacgggcaccgaacagggtgcctgtccgacatgagagagcaactcgctaagaggcgtaagtgcatcgactgctaacggcgcatcaatcagcgccgcatcaagaccttgctgccgggctacgcaaaagaaccggtacgacgcgcataagaaagggcaaggggcccgaataggaacatagccccgtgctggggtcaatagagaaaaaagcttaactccagagatatcttgactcagaatgcttccttctgctggcagtctgctctgactgtgatcgtcgacagtcttctcgaatctggacagaagtgattcaccgatcagccagtcaaagatgaaaataatcgccagcatcaccacgatcagaatggaaccgtaggcaatcgctacaccgtattcgccatcttccacgcggttgaggatgtaagccgtcgctacgcgggtatccggcgtgacgaggaacacaatggcgctgacggtggtaatggcgcgcacaaagctgtaaatcagcgccgagaggatcgccgggcgcagcagcggcagcaggatgtgcgtaatggtacgcagggaaccggcgcgcaggctgagtgaggcttcatcgagcgatttatcgatttggcccggtaatgactccaatttgtcatgctgctccaccgattttgagaacgacagcgacttccgtcccagccgtgccaggtgctgcctcagattcaggttatgccgctcaattcgctgcgtatatcgcttgctgattacgtgcagctttcccttcaggcgggattcatacagcggccagccatccgtcatccatatcaccacgtcaaagggtgacagcaggctcataagaagcccagcgtcgccaagtgcgtcaccgaatacgtgcgcaaaaacggcttccgaacctgcatacgcggtaaacagcagcgcggggccgaatagcccgaagtatccaaggtcggccactccggcgaacatgagcccggccggctgatggccgggaccgaagggccgaagattaaaggggcaccaggtagggcgcccaaaggggatgaaccgttctgcacgggttaatgaggaactttgccctcccagccaggcgatccgctgatgcccatgagaagcagagaacacatagcccattcccacgggatcaaggccgatatctttggccatttccgaaccggcgatagagagcgtagcgcggtcgccgtagttgaaggatgtgacgataaacaacat

SEQ ID NO: 144316 - DNA, 3288 bp, Homo sapiens
  misc_feature (1)...(3288): n = a,t,c or g
tcatgagaaaagtatattcttattattcccctttagcagatgagaaaaccaaggctcagagaggttaagtatcttgtccacaatcacagagctggcaagataatagagccaggatgtgaacacaggcattccaaccctcgaagctgaaaatgaaggcgcacaagttaagaagtttgcgcacgtcagatcgacgcggtactgaaaactcagggtgctgcggcattcgaaggtgcggttatcgcttacgaacctgtatgggcaatcggtactggcaaatctgcaactccggctcaggcacaggctgttcacaaattcatccgtgaccacatcgctaaagttgacgctaacatcgctgaacaagtgatcattcagtacggcggctctgtaaacgcgtctaacgctgcagaactgtttgctcagccggatatcgacggcgcgctggttggtggtgcttctctgaaagctgacgccttcgcagtaatcgttaaagctgcagaagcggctaaacaggcttaagtctgacaggtgccggatttcatatccggcacttactttccttaactcttcgcactgatgatcctgaatttcctcggctgaagcacggttaagcgtcagtagatttcgttgtgtcgccagcaatacaaatgagttatcactctgccgtaccatcgccagcccgtagcgtcccatatgttcccgcgcctcaggtacttcttctgccagcatcataaatgggctgcgttgtaccagttcgctttccgttacccgacgcgccaggtattcatgcccgcgcaaaccacctggcagtggcaaccagcggctgctgatgttcgccagattgtgatccagagatgcggggcataatctaaaccgtccgtggttgtccgatgaagatagttgagtggactcggagtagatccatcggtaaagcagcacagaacagactcttcgccagatcctctcttttcgcttcttcgcggcggtaagtactggcctgctgccgtgggtgcttaagcgcagcggcattacccctggaagagagccttgccgtaatcggtcaacaaagcagtaataaacgactgggtgacgtgttaaatcaggtacgcagcgccatccttgaagggcatcccctttccgatgcattacagcattttcccacgcttttcgattcgctctatcgtaccagtatttctgccaatcccagcggccgtcccctcctgctggcatgcggatgaattctaagcacgcccctgccgacagcccgtcgccgttcatcccacgcgcggtgatacgccagcgggttaacgaatcaggcatcaggaacgtgaaatacgctttgccttgtttatcggttgtgagtgacggcatccatgccgcggtatccacctcttcacgccgtggacgttcaagcatttttactttcgccgctcgctgancggttagttgcgccagagcgcaaccggctcgctggagagcgcctggatcgtagctgataaacgacagactggagctggtacgcacattgttacgccccagcggatagaaaaatttgccgatattcggcgcgatttctggttgcagcgcgtagatcatttcatcgaccacgcctaccgttagctgcgcagaaacaggtttacctttcagcgacgaggttaattcgacattgaccagttcaccaggctggtaatgggttttgtccgttttcacccggatatccagctggggaacggcaactttgatcccggcgttctgaaaactgtactgaccgttacgggtatacagcaccgaaaaagtgatgttaggcgcaaaggaattgctcactggaacccgggcttcatactgggtatcgtttaaacgttgtagcgttagccagtttgccggatgcgaaagcagcgactgctgttccacgcgatcgcgttccagcgtcaataatgcttcatcaattggctccggaaaggtaatcagcatcttcgcggtttcgcctggctggtacagcgttttatccgccacgatatctaccgtaccagtatgcgccgtgctgcccttaccgctgacggcatgacttaacccagcgagaattaagccgtctttatcgcgtaatgtcagattgtagttgccaggtttagcgaaattgacggtaaaggatttgccgcgcctgtctttggcttttgaacgggaggtacgtgattcaccgatcagccagtcaaagatgaagataatcgccagcatcaccacgatcagaatggaaccgtaggcaatcgctacaccgtattcgccatcttccacgcggttgaggatgtaagccgtcgctacgcgggtatccggcgtgacgaggaacacaatggcgctgacggtggtaatggcgcgcacaaagctgtaaatcagcgccgagaggatcgccgggcgcagcagcggcagcaggatgtgcgtaatggtacgcagggaaccggcgcgcaggctgagtgaggcttcatcgagcgatttatcgatttggcccggtaatgactccaatttgtcatgcagctccaccgattttgagaacgacagcgacttccgtcccagccgtgccaggtgctgcctcagattcaggttatgccgctcaattcgctgcgtatatcgcttgctgattacgtgcagctttcccttcaggcgggattcatacagcggccagccatccgtcatccatatcaccacgtcaaagggtgacagcaggctcataagacgccccagcgtcgccatagtgcgttcaccgaatacgtgcgcaacaaccgtcttccggagactgtcatacgcgtaaaacagccagcgctggcgatatttagccccgacatagccccactgttcgtccatttccgcgcagacgatgacgtcactgcccgggtcattcatgccataatcatgattttctggtgcgatcgggttgagaagcgtgtaagtgacgcagttgcatgttttacgcttgagagcgagatagccgaagtcggcgtgctttgccgtacgcacatccgtcagtagcgacaggtcacgcctgctcgaatgtaagctctgtcgcgaatcttgcatgcctgcaggtccgaagacgtgcgccacaaccgtcctccgtatcctgtcatacgcgtaaaacagccagcgctgacgtgatttagcaccgacgtagccccactgttcgtccatttcagcgcagacaatcacatcactgcccggttgtatgcgcgaggttaccgactgcggcctgagttttttaagtgacgtaaaaccgtgttgaggccaacgcccataatgcgtgca

SEQ ID NO: 144317 - DNA, 3891 bp, Homo sapiens
atgggcaattttgttgagcaatcaacgcttaataaaacacatccggtaatttataacgtctgcaattatcagaaacccgctgccggtgagcctgcgttgttactctgggatgatgtcataaccttattccatgaatttggtcatacgctgcacggcctttttgcccgccagcgttatgccacgctttccggcaccaacacgccgcgtgattttgtcgaatttccgtcgcaaatcaacgaacactgggcaacgcatccgcaggtattcgctcgctacgcccggcattatcagcgcggggcagcaatgcctgacgaactgcaacagaaaatgcgtaatgccagcctgttcaacaaggcgattaaggtcaagcgataccgctcttacagaggagaggtagggcaaaccgcccctaatgttctccaaagagatttcaaggctacgcggccaaacgagaagtgggttaccgatgttactgaatttgcagtcaatgggcgcaagctgtatttgtctccagtaatagatctcttcaacaacgaagttatttcttacagcctttcggaaagaccagtgatgaacatggttgagaatatgctcgatcaggcattcaaaaagcttaatcctcacgagcatcctgttctgcactctgaccagggatggcagtatcgtatgagaagatatcaaaatatccttaaagaacatggtattaaacaaagcatgtccagaaaaggcaattgtctggataatgctgtggtggagtgtttctttggaaccttaaagtcggagtgtttttatcttgatgagttcagtaatataagcgaactgaaggatgctgttacggaatatattgaatactacaacagcagaagaattagcctgaaattcaaagcgttatcgctgatttataacaaagatctgctgccgaacccgccaaaaacctgggaagagatcccggcgctggataaagaactgaaagcgaaaggtaagagcgcgctgatgttcaacctgcaagaaccgtacttcacctggccgctgattgctgctgacgggggttatgcgttcaagtatgaaaacggcaagtacgacattaaagacgtgggcgtggataacgctggcgcgaaagcgggtctgaccttcctggttgacctgattaaaaacaaacacatgaatgcagacaccgattactccatcgcagaagctgcctttaataaaggcgaaacagcgatgaccatcaacggcccgtgggcatggtccaacatcgacaccagcaaagtgaattatggtgtaacggtactgccgaccttcaagggtcaaccatccaaaccgttcgttggcgtgctgagcgcaggtattaacgccgccagtccgaacaaagagctggcgaaagagttcctcgaaaactatctgctgactgatgaaggtctggaagcggttaataaagacaaaccgctgggtgccgtagcgctgaagtcttacgaggaagagttggcgaaagatccacgtattgccgccaccatggaaaacgcccagaaaggtgaaatcatgccgaacatcccgcagatgtccgctttctggtatgccgtgcgtactgcggtgatcaacgccgccagcggtcgtcagactgtcgatgaagccctgaaagacgcgcagactcgtatcaccaattgttgtcggataaggcgtgaaagccttatccgtcctggaatgaggaagaaccccatggatgtcattaaaaagaaacattggtggcaaagcgacgcgctgaaatggtcagtgctaggtctgctcggcctgctggtgggttaccttgttgttttaatgtacgcacaaggggaatacctgttcgccattaccacgctgatattgagttcagcggggctgtatattttcgccaatcgtaaagcctacgcctggcgctatgtttacccgggaatggctggaatgggattattcgtcctcttccctctggtctgcaccatcgccattggcttcaacaattacaggaggactaaacaggtagctgggatgccagcgaagtcttcttcgttgcgtagttcacaagaccgggaaatgcgccccggtgcgaaggccgaacggacccgatacgactcccccggttcctacggtgtggccggccctgggttcctaggttcccgggggggttcgccttttgggggccctggaaaatataacaacaccattaccaaatatgcattaaacatagcgccctctgcacaaaatcagagtccacatggcccgaaactgaaccggagacaagaaacacagcatgcgttagactggttagatgcaggttataccttcacctacagcgaagatcaggctctgactccgtacttcaaactggcttacgtctacgacgactctaacaacgataacgatgtgaacggcgattccatcgataacggtactgaagggtctgcggtacgtgttggtctgggtactcagtttagcttcaccaagaacttcagcgcctataccgatgctaactacctcggtggtggtgacgtagatcaagactggtccgcgaacgatttgacgggcattactgcaaaggacgcgcaaatgttatctgtagttaaacctcttcaggaatttggtaagctcgataaatgtttgtccagatacggtacgcgcttcgagtttaataatgaaaagcaagttatattttccagtgatgtcaataacgaagatactttcgttattttagagggagttatctctctgcgtagagaagaaaacgtacttatcggtattacccaggctccttatattatggggctggctgatggtttaatgaaaaacgatataccatacaaattaatatcagaaggaaattgtacgggatatcatctaccagccaaacaaaccattacgcttattgaacaaaatcaactctggcgagacgctttttactggttagcctggcacaatagaattctggaattacgcgacgtgcagctcatcgggcataattcctacgaacaattcgcgcacattatattcatgattgccgcaatgcaaatgggatccgtatggggtgacgatttctcctcaggtcagcattcggtcgcgcgcaaatcccagctgcacaagcccattcttcgtgtgaagtgccacgaagggtttactatatcagcaaacccgaattccagccctagatatcccaccatcatcgaacaggcggaacagccacggatagttgatttctccatcgtccggttcatgtcgatcagccagtgcctgatactggctggctctatgatgcgtactttcatcaagaaagtatacgcagctatcgaagctggcgacaaagctgctgcacagaaagcatttaacgaaatgcaaccgatcgtggaccgtcaggctgctaaagctactgacggggtggtgcgtaacggcaaaagcaccgccggacatcagcgctatctctgctctcactgccgtaaaacatggcaactgcagttcacttacaccgcttctcaatccggtacgcaccagaaaatcattgatatggccatgaatggcgttggatgccgggcaacagcccgcattatgggcgttgggctcaacacgattttacgtcacttgaaaaaactcaggccgcagtcggtaacctcgtgcatacagccgggcagtgacgtgcatcgtctgcgcggaaatggacgaacatgctccggaagacggtcgttgcgcacgtattcggtgaacgcagctatggcgacgctggggcgtcttatgagcctgcggtcaccctttgacgtggtgatatggatgacggatgggtgggcgctgtatgaataccgcctgaagggagagctgcacgtaagtcagcagcgatatacgcagcgaattgagcggatcaacgtgatctga

SEQ ID NO: 144318 - DNA, 2170 bp, Homo sapiens
tcagctacgacctctttctacctttgccagacggcgttcaagttccggatacagccgctcgataatcgcttcacattcagaccagtgatgaatatcttccgccatcgtgcgttccacgccgacggattttcgcaaccgttcgctgttaacatcgcgttcgtcaatcccctgactacgctcccacaaaatgcggccaaatttgccaaagcgtttaagcagcatcaccagatcacacttttgtacatcaccgcaggtccgcagccccatcgcttccagttttgccgctgagactttgccgacgccggggatttttgccagcggtaaggtttgtaaaaatgccggaacttctgccggcgtaatcacaaactggccgttgggcttattcatgtcggaggcgattctggcgagaaactttactggtgccacgcccgcagacgccgtcagttgcagctcgttgaagattgtctggcggatttcctgggcgatgagggtcgcagaaccgtggcaatggacgctatcggtgacatcgagataagcctcatccagtgacaacggttcaatgcgcgaggtgtagcgcgagaagatttcacggatatgatttgaggcttctttgtaggcgtcaaagcgccccggaagcaaggtgagatgtgggcataatttgagcgccatccctgtcggcatagcgctacgtacgccaaatttacgcgcgggataattgtcggtgctgatcaccccccgacgttcgcggctgccgccaatagcaatagggatatcgcgcagggcgggattgtcgcgcatctccacaaagtattgatacagcgtatcggacgcacttttggtcagcaccataatctcaatgcgccggttgcccgcgctttgcggatttttggaatccagcagcatctggtccgccattgcgcttacctgcatcactttatcttccggcattccggcctcttccagcacccgacgagccgaaagcgcgcggtcacccgaaaggttccagttgttgtagatattgtttttgtaggccatcgcatcggtatgcccggtaataataattttattatcgagcgagtcgaacactggcgcgagctccaccagcagcgttttaaagaacggcataatcttcgcgctgccggcgttcaaacatattgcggttctggtcgtctttaatcagcacgcgtaatccctggggaacaatctccatctccagattcgcttccatatgcgcatcacgggcaatggtgttgatactggttgccagctcaccaagctcggtggcggatttcttcttcagcagcgccgttttctcattcacatcacgcgcttttttctccgtctcttccggcaccgccacggtggcaggttttggcggatgagacgggcagaaaatcattgatatggccatgaatggcgttggatgccgggcaaccgcccgcattatgggcgttggcctcaacacgattttccgccatttaaaaaactcaggccgcagtcggtaacctcgcgcatacagccgggcagtgacgtcatcgtctgcgcggaaatggacgaacagtggggctatgtcggggctaaatcgcgccagcgctggctgttttacgcgtatgacagtctccggaagacggttgttgcgcacgtattcggtgaacgcagcctgttcactggtccatagcgggaacggtttgccacgcagatcgaagtaggaaaactgttcgccgcagccgtagatatggtcctctggttgagcggcaaggcgcagccagatacggttgtggttaaggttgtcgttttgtagttccagcaataaacgcccctgatcgtcggcagagatattcagcgtggcgctaatgtcagaaccacggctgaaatgaattaaccaaccatccggtgactggctgacgatggcgtcggtaagcgcaattttctcctgtagtttatctttaatgctgaaattaccgcggaacatatcgatatccgctatacctgagccaatccataaacaaggattatctttgctatgggttaaaactaagacgttgttgaacaatgtagcggtaaaactgtcgttattctgatgaaattgaaaatctaataatgatttagtgtatgatggtgtctttgaggtgaccacgttcctttggctgtacacaccgccgtcacacat

SEQ ID NO: 144319 - DNA, 4358 bp, Homo sapiens
atggccgcattaccatacatgcaactgtacatagctgattacctggctgacaccatgcatttgtcagcagaggagcatggtgcgtatttgttgctgatgttcaattactggcaaacaggaaagccaatacctaaaaacaggctggcaaaaattgcccgtctgactaacgagcgatgggctgatgttgaaccatccttgcaggagtttttttgcgataacggcgaggaatgggtgcatcttcggattgaggaagatctggcatcagtcagggaaaaattaaccaaaaaatcagccgcaggaaaagcatctgttcaggccagaagaagcagaaaggaagcagatgttcaaacaaaacaagagagaaatttaacaggtgttcaaacagatgttgaagtggtgtttgaacatgatgtcaacacaaaggcaactaataaagatacagataaagatctaaaaacagatccccccctaaatcccccccgggggaatcgaggtgtcaaaaagtttgaccctctggatattactttgccgaactggatttctgtctcgctttggcgtgagtgggttgaatttcgccaggcattgcgaaaaccgattcgaacggagcagggcgctaacggggcgatacgggagctggaaaaattccgccagcagggtttttcacctgagcaggtgattcgacacagcatcgccaatgaataccagggcttgttcgcgccgaaaggtgttcgacctgagacgttactccgacagactggccccgtcacatgtaaccgcgccattcaagacggtagcggagtggcgcgagtggcaactttccgaagccagaaacgttgtgaggagatcaaccgtcagaatcgtcagttgcgggtggaaaaaattctgaatcgctctggcatccagccattgcaccgcaaatgctcgttttcgaattaccagcggaaaacctggtaccgggaagaaccacttagcggcactatcgggaatcgcctgctgaaagacggtcagacagtgattgtggttaccgtggctgatgttatgagtgccctgcacgccagctatgacgatgggcagtcaggcgaaaaatttttgcgggaactgtgcgaagtggatctgctggttcttgatgaaattggcattcagcgcgagacgaaaaacgagcaggtggtactgcaccagattgttgatcgccggacagcgtcgatgcgcactaaaagcattcgctttttcacccgtggaagatggcatagccgttcgccagttgctgtttactttgttggcaaccgcattgatcgtcccctatttcaaacgctcgtcgcggctactgacggggtggtgcgtaacggcaaaagcactgccggacatcagcgctatctctgctctcactgccgtaaaacatggcaactgcagttcacttacaccgcttctcaacccggtacgcaccagacaatcattgatatggccatgaatggcgttggatgcccgggcaaccgcccgcacttatgggcgttggcctcaacacgattttccgccatttaaaaaactcaggccgcagtcggtaacctcgcgcatacagccgggcagtgacgtcatcgtctgcgcggaaatggacgaacagtggggatacgtcggggctaaatcgcgccagcactggctgttttacgcgtatgacaggctccggaagacggttgttgcgcacgtattcgtgtgaacgcactatggcgacgctggggcgtcttatgagcctgctgtcaccctttgacgtggtgatatggatgacggatggctggccgctgtatgaatcccgccctgaagggaaagctgcacgtaatcagcaagcgatatacgcagcgaattgagcggcataacctgaatctgaggcagcacctggcacggctgggacggaagtcgctgtcgttctcaaaatcggtggagaagatcacaagtgggccaaccaccaacgccacacccgggacacagaagacagccaccgacaagagaggcggcaaaaaactaccgatccagataccaatcgggccaatcagcaggattgccagcggtgcggcaatcaacacaatcagcattggtttgaggaagtttttggtcaccgccggtgtaatgctgtccacccagcgttcgatatatgacaggcaccaggtcatcaccagcgccgggatcaccgtgtaggtgtatttcaccgcggtgaccggaatcagggcaaattcgacatgttcaccctgggccgctttcgccatcagttcaataaaactcggatgtaccagcacacccgcgatggcaatcgccagcgacatattggttttaaatttgatggcggcagatgccgcgaccatcagcggcaggaagaagaaagcaccgtcaccaatcacattcagaatggttaaggtcggcgatccttttgtcagcacgccgctcatctcgaggatcattgccagcagtttgaccatcgatccgccgataatcgccgggatcagcggtgacatggtgccgatcagcgcatcgaggatccccgcaccaatgcgacgtagcgtgagtttgggtttacccacgggctgtgcgggctgcatatctcccggcagcaggctgacgacttcctgaaaggcttgtgaaacggtattgccgataatcacctgacactggttgtcactacgtaccacgccgagcacgccggggatggtttttaacgtcgggctgtcgataagtgcatcatctttgataacaaagcgcaaccgcgtcatacagtgcgtgaccgccgagatgttatcaacgccgcccagtgccgctgaatatttttcccgccgattgtgcaaggacaatcggcaaacggtgcagtacactgcgttgattgcgtgtaaagggatgaaaatgatgacgacgatgctggaagtggcgaagcgcgccggggtttcaaaagcgaccgtttcccgcgtgctttcaggtaatggtccggggctcccgacggcagagttcttccagcgagtggcgacactggcgtcgagatcgccttcatcggcggagactttacagccgccaggatggagggtgggatcgccccgcaagcgccagccatgcaaacttaaggtagcgccgagcatatcatccacacgttgcagatcatccgggtgcacgcgcagctgtggtttaccgctgaataacggttcttgctgcaacaactgttggatctgtttgatcagtgccgagttatccaccgttggcgtctgaccgatgacctgacgtgccgcctccagcgccatctgcatcaggcgcgacgctatcacactatcaagtgcatcaagggtagtttgaaattcgctgaccagttgctgcatccgggcatgaattggcgcttgttgagacttcgcctctgccagaccttgctccagcccctgggccagtccttcctgatagccctgcttatgaccttgctggcgaccttcggcaatacccgcctgataaccttgctcatgggcctgcatttgcagttgcgccagttgctgctcaaggctgggttcagcctcttcaatgatggtttcttccggctcgactatgggcacaaactctgccatctcgccagtttcggcaaggcggcgcacaatcagcagaatcgctttctgttcgttttccacctgcgacagacgcaccggaccacggttggcgagatcgtcgcgcagaatatcggcggcacgctgcgacatattgcgcaagaatttctcgcgcagtggctgctcggctcctttcagcgcgatcaacagcgattcggaatccacttcctgcaacagacgctgaatgctgcgatcgtcgacatccaccagattctcgaacaggaacatctcgtcgatgattttctgcgccagctcgccgtcgaattcacgcacggcggtaataacggcttcttcctgctgagttttcatcaggttgataatttcggctgccgttctcacgggggatcctttagagttcgaccactcaggaacacccttgtacacccaggctgcctcccgcacttctggctctcctctctttttcctcatcaccttcttgaacacagcagtactactaatagacttcatttcttcactttcctcagcccctgcaatccagcctttgctgtgttttgaaactgctttactaagatctccagtcccctcaatgtggccacactcattttgccttccaggaatcttccctttcttgaatcttctactgcttctgtcacactcgccagccttctccacaccttctttcttagccctcctcaggacctcgatgtcaggatgttgatgggttggtttgtctggtatcatggcagtagccagttcaaatctaggagtaggaaccat

SEQ ID NO: 144320 - DNA, 3776 bp, Homo sapiens
atgtggtccttcgaattacggtttccccgcgcggtgaccgatgcggcaattgttggtcgtcatgtcggaaccacgttaatggtggcgcgttatgcggtcaacacattgaaagaagtggaaaccagtctgagccgctttgagcaaaacggtattccggtgaaaggggtgattctgaactccatcttccgccgcgccagcgcgtatcaggattatggctattacgaatacgaatatagtcggatgcgaaataacgacgcctgcattcgcaccgccccgccggataaggcgttcacgccgcatccggcaagcaaaccagctcataagccgggagaacaacctatgaaaaacaatccgctgatctcaatctatatgccgacctggaaccgacaacaactggcgattcgggcaataaaatcggttttgcgccaggactacagcaactgggagatgatcatcgtggatgattgctccacctcctgggaacaactgcaacatgcgttcaccgaatacgtgcgcaacaaccgtcttccggagcctgtcatacgcgtaaaacagccagcgctggcgcgatttagccccgacgtatccccactgttcgtccatttccgcgcagacgatgacgtcactgcccggctgtatgcgcgagaagcgatcgaccgtctgcgtgacacctcttcttctcaccagcgtatttccgtggtggaagtgatgggccgttattgtggagatctgacgttggctgcggccattgccggtggctgtgaattcgttgtggttccggaagttgaattcagccgtgaagacctggtaaacgaaatcaaagcgggtatcgcgaaaggtaaaaaacacgcgatcgtggcgattaccgaacatatgtgtgatgttgacgaactggcgcatttcatcgagaaagaaaccggtcgtgaaacccgcgcaactgtgctgggccacatccagcgcggtggttctccggtgccttacgaccgtattctggcttcccgtatgggcgcttacgctatcgatctgctgctggcaggttacggcggtcgttgtgtaggtatccagaacgaacagctggttcaccacgacatcatcgacgctatcgaaaacatgaagcgtccgttcaaagaagtgataaaggaatccaaagttgaagagcccaggaaacgggaaactgtatccataatgctgaccaaatatgcagcctataacacctttcaccactgtgaacagtgccgccagtacatggacttcacctctgcctcccagaacgaactggcgctgcacagcaagaaagagatcgacgagtatttcgcgcatgtctggcaaaccatgcaggcatgtatcgatcgcgggatgaacaccgaaggtgtactgccaggcccgctgcgcgtgccacgtcgtgcgtctgccctgcgccggatgctggtttccagcgataaactgtctaacgatccgatgaatgtcattgactgggtaaacatgtttgcgctggcagttaacgaagaaaacgccgccggtggtcgtgtggtaactgcgccaaccaacggtgcctgcggtatcgttccggcagtgctggcttactatgaccactttattgaatcgaactgctgggcggtagcccggaacagggatgtgatgcgcgatggtcgcattgagcaagacggcacgccgcgtgaaatctacgaagagccgaaaaacctgtttgttgccggcttcattggcgaaatcaatatgtttaacgccactgtcatcgaacgtctagacgagcagcgcgtacgcgccaacgttgaaggccgcgaatgtaatatctacgttaacttcgccgttgaaccggggcaaaaactgcatgttctgctgcgcccggaagacttacgtgttgaagagattaacgacgacaaccacgctgaagggctgattggttacgttcgcgagcgtaactacaaaggcatgacgctggagtcggttgttgaactggaaaatggcaagatggtgatggtcagcgaattcttcaatgaagacgatcctgactttgaccactctctcgaccaaaaaatggccattaattgggtagaaagctgggaggtcgtactggctgatgaagaacacaaaatatgttggacttttatcagagctcctatgaattttcacgtttggtttcgatctcaaaaacctggtttcccaatggttcaacagagccggatagttcccgctttcgtcacacaacaaatggtgtttccagactggaaggtcagcttccttttcaccttcacgcaccctggtcatttcaaacttgttcgccggcctgaccagatccacatcctgcggttcggtactcatttcgacgatttgacgataggcctctttacgctcatctttcaacgacttgatttgcggtgtgtactcggccagccacgccttcgccagtctatcggcctcgccatcgaagtaatcctgcacctccatcaccagccccatgccagcaacggtaacacgagcctccatgattgcttccagatattcctctgcatcctcttctcgatccgcaaccttatcggccagatattcgacatagctgtccctcctgattcagctactgacggggtggtgcgtaacggcaaaagcaccgccggacatcagcgctatctctgctctcactgccgtaaaacatggcaactgcagttcactttacaccgcttctcaaccggaacacttggattcagtgtggttcactgggccggcccatgggtaccctcaaaaacccggcggtagaagaaaataaaaaggcacagcttgagcgtgataaacagcttagcgaacagcaaaaacaagcggcgttggcgaaagaatataaagctcaggtgaagcagcttattgaaatgaaccgaatcaccattgccaatggcgatattggttttaacttcactgacggcaatctgattaagaagatttttgtcgataagctcacacaggcgcagttgattaatggtcgtctggcgattgcccgcttgttggtcgataacaatagcgaaggtgaatacgccattattcccgccagcgttgccgataaaattgctcagcgcgatgccagcagtatagtgttgcacagcgcgctcagcgccgaagagcaggatgaagacgacccgtatgccgacttcaaagtgcctgatgatttgatgtggcctacggtttatgggcgaagtgtagaccggataaggcgttcacgccgcatccggcagtcgtgcgccatgcctgatgcgaagctttgcgcgtcttatcaggcctacggcttacgggcgaagttttattggcgtggtagcatatgttgccgagcagtgctcgagcgtaaccgcgaacagccgatgacccgcaccaaagaactggcggaagtcgtggctgctgcaacgccggtgaaagataagtttaaacatcccgcgacccgtaccttccaggcggtgcgcatttgggtaaacagtgaactggaggagatagagcaggcgctaaaaagctcgctcaacgtgctggccccgggtgggcggctttcgatcatcagcttccactcgctggaagaccgtattgtgaaacgttttatgcgtgaaaacagccgcggtccgcaagttccggcagggttaccgatgactgaagagcagctcaaaaaactgggtggccgtcagctgcgagcactaggcaagttaatgccgggcgaagaagaggtggctgagaaccctcgtgcccgtagttcagttctgcgtattgcagagaggacgaatgcatga

SEQ ID NO: 144321 - DNA, 1284 bp, Homo sapiens
atgattcccgaattcgaatctccagtcaagaactccctctccaaggaccagaaccaggagacatctctgcagggtcttcaagttttaccgttcatggccagcgcagatgccgccaaccatatcgggcgcgtactgcgcatggggccggggcaggcgttgcaattgtttgacggtagcaaccaggtctttgacgccgaaattaccagcgccagcaaaaaaagcgtggaagtgaaggtgctggaaggccagatcgacgatcgcgaatctccgctgcatattcacctcggtcaggtgatgtcgcgtggtgaaaaaatggaatttactatccagaaatcgatcgaactcggtgtaagcctcattacgccacttttttctgagcgctgcggcgttaaactggatagtgaacgtctgaacaagaagcttcagcagtggcagaagattgcaattgctgcctgtgagcagtgtggtcgtaaccgggtgccggaaatccgtccagcgatggatctggaagcctggtgtgcagagcaggatgaaggactgaaactgaatcttcacccgcgcgccagtaacagcatcaatacgttgccgttaccggttgaacgcgtccgcctgctgattggcccggaaggcggtttatcggcagatgaaattgccatgactgcccgctatcaatttactgatatcctgttgggacctcgcgttttgcgtacagagacaactgcgctcaccgccattaccgcgctacaactcggcatcgtgatggaccccatcgcaaacatcaacatcaagaaagattccagttttgctatgttgctggaagcacagcgtcgtggttacgaacttcactatatggagatgggcgatctgtatctgatcaatggtgaagcccgcgcccatacccgcacgctgaacgtgaagcagaactacgaagagtggttttcgttcgtcggtgaacaggatctgccgctggccgatctcgatgtgatcctgatgcgtaaagacccgccgtttgataccgagtttatctacgcgacctatattctggaacgtgccgaagagaaagggacgctgatcgttaacaagccgcagagcctgcgcgactgtaacgagaaactgtttaccgcctggttctctgacttaacgccagaaacgctggttacgcgcaataaagcgcagctaaaagcgttctgggagaaacacagcgacatcattcttaagccgctggacggtatgggcggcgcgtcgattttccgcgtgaaagaaggcggtataagctcgagttga

SEQ ID NO: 144322 - DNA, 1506 bp, Homo sapiens
taaccatgattacgaattcaagcgtccgacccggagatcaatagccgtcgcgagagcgggattcatctgccatatacaacggataaagcgccatcgccgttaacagtcgacggcgcgaaataagaggtaagccgctcatcaataaacaaaactcacaggtgcagcacccgccggatgcggcaaaatacccatcgggatgccataaatcatttcgagggtttcgccgcgcataatttccgcaggcgttccctgagcaatcatttcaccgccgcgcagggcgaccagataatcacagtagcgtgccgccatattgatatcgtgcaacacggcaatgaccgtcaggccacgctcctgacttaaacggtgcaccagcgacagcacatcaacctggtgggcgatatccagcgccgaggtcggttcgtcgagcaacagacaacggctatcctgcgccaccagcatggcgatccacgcccgctgacgttcgccgccagagagactatcgaccagccgatgcgccagcggttttaagccaaccagcgagatagcttcctcgactttttcgcgatctgccgccccaaagcgccccagcgcgccatgccacgggtaacgaccaatcgccaccagttcacgcacggtcatcccttctgccggaggaagctgctgcggcaaataagccactttgcgggcaaacgctttgctgctccagctttccagcggttgggcatcaagaagaatctccccttccgacggcggctgatgacggccaagcattttgagcagagtggatttaccagaaccgttgtgaccaatcagaccgggggtaccgagctcgattcgtatgagtgtaaccatgatacgaatcgagtgtgggaaccactggtcactgattttttgataagtaccgtcagctttaattgctgccagcgcgttattcagtttttccagcagggctttgttatccggacgtacagcgatgcccaggccggtgccaaaatattgcggatcggtcactttctcagtagcaacaccaagttgtggattggttttcagccattcgtttaccaccgctgtgtcaccaaataccccatcaatacgaccatttttcagatcgataaaggcattctgataactgtcataagagacagttttcacttccgggtgctgatcctgaatatatttctggtgcgtagtaccgttttccatcccaatacgtttgcctttcagatcggcaaacgttttgtaggtatcttttttggcaatcacgacggctgagttttcatagtagggcgtggtaaacgatacctgtttgctacgctccggggtgatatccataccggagattacggcgtcatattttctgaatttcagggacgggatcaggctgtcgaacgcgtgattagtaaaagtacattctgcctgcatttgtttcatcagtggtggcacaaacattagactgaagaggtactgttcaaatagagccctccaaggtaaaggaaggtctctcat

SEQ ID NO: 144323 - DNA, 2773 bp, Homo sapiens
aaagaagttcgcgcgggcgacatcgctgctgctatcggtctgaaagacctagcgcactggtgacaccctgtgtgacccggatgcgccgatcattctggaacgtatggaattccctgagccggtaatctccatcgcaggtgaaccgaaaaccaaagctgaccaggaaaaaatgggtctggctctgggccgtctggctaaagaatacccgtttttccgtgtatggactgacgaataatctaaccagaccataatctcggctatgggcgaactgcacctcgacattatctttgaccgtatgaagcgcgaattcaacgctgaagcgaacgcaggtaaaccggaggccgcttaccgtgaaactatccgccagaaagttaccgatgttgaaggtaaacacgcgaaacagtctggtggtcgtggtcagtatggtcatgttgttatcgacatgtacccgctggagccgggttcaaacccgaaaggctacgagttcatcaacgacattaaaggtggtgtaatccctggcgaatacatcccggccgttgataaaggtatccaggaacagctgaaagcaggtccgctggcaggctaccccggtatgagaaatgggtattcgggtggccttgcgctcttaccatgacgttgactcctctgaactgggcgtttaaactggctgcttctatcgcctttaaagaaggctttaagaaagcgaaaccagttctgcttgagccgatcatgaaggttgaagtagaaactccggaagagaacaccggtgacgttatcggtgacttgagccgtcgtcgtggtatgctcaaaggtcaggaatctgaagttactggcgttaagatccacgctgaagtaccgctgtctgaaatgttcggatacgcaactcagctgcgttctctgaccaaaggtcgtgcatcatacactatggaattcctgaagtatgatgaagcgccgagtaacgttgctcaggccgtaattgaagcccgtggggagagcactatagtaaggaatatagccgtgtctaaagaaaaatttgaacgtacaaaaccgcacgttaacgttggtactatcggccacgttgaccacggtaaaactactctgaccgctgcaatcaccaccgtactggctaaaacctacggcggtgctgctcgtgcattcgaccagatcgataacgcgccggaagaaaaagctcgtggtatcaccatcaacacttctcacgttgaatacgacaccccgacccgtcactacgcacacacacctcaccagatcattcagacccgcaacgcccgtgaactggtcgatagcatcaccagcgccggttcggtatttcttggtgactggtcaccggaatcggcaggtgattacgcctccggcaccaaccacgttctaccgacttacggttacaccgccacctgttccagcctcgggctggcagatttccagaagcgcatgaccgtacaggaactgtcgaaagaggggttctccgcgctggcttcaaccatagaaacactggccgccgccgagcgcctgaccgcccacaaaaatgccgttactttgcgagcaagcatgagcaccgtgactattaccgatttagcgcgtgaaaacgtccgcaacctgacgccgtatcagtcggcgcgtcgtctgggcggtaacggcgatgtctggctgaacgccaacgaataccccactgccgtggagtttcagcttactcagcaaacgctcaaccgctacccggaatgccagccgaaagcggtgattgaaaattacgcgcaatatgcaggcgtaaaagcggagcaggtgctggtctaccgtggcgcggacgaaagtattgaactgctgattcgcgctttttgcgaaccgggtctctctggcggcgaacgtcagcgggcgtggatcgccatgctggtggcgcaggatagccgttgtctgttgctcgacgaaccgacctcggcgctggatatcgcccaccaggttgatgtgctgtcgctggtgcaccgtttaagtcaggagcgtggcctgacggtcattgccgtgttgcacgatatcaatatggcggcacgctactgtgattatctggtcgccctgcgcggcggtgaaatgattgctcagggaacgcctgcggaaattatgcgcggcgaaaccctcgaaatgatttatggcatcccgatgggtattttgccgcatccggcgggtgctgcacctatgaataccgcccacgcggcggctattgatcccaatcgtattgtggcgctggagtggttgccggtggaattactgctggcgctcggcatcgtgccttacggcgtggcggataccatcaactatcgcctgtgggtcagcgaaccaccattgccggactcagtgatcgacgtcggtttgcgcacagaacctaaccttgaactgctgaccgaaatgaaaccatcgtttatggtctggtcggcaggatatggcccttcaccagaaatgctggctcgtattgcgccgggtcgcggatttaacttcagtgtacggcaatacgccgttggcgagaaccctgcagttaattttgcgggaaggcccaaggggtcaccctgctttggtccaggtggtggacttattaattgagccgccccaacttcctctcctggtcccctctgttcaaactcgcatccccaggatccagccccaatcacacccagcccatggggtcaatgaggctgtcaggaaccctacggtctgggtggcccccttcatagacgagatcatttcttcaatccacaagtattccatttag

SEQ ID NO: 144324 - DNA, 9561 bp, Homo sapiens
agcgcacagcgccttctggttggtgcaccgcaaggggcccaaagaaagccggcgctgaccatcgtcattatcgccagtacacgggccgcaatatccagcggaaatacgctgactaataatcgcccccgcaaagttttcatcgtgtttcgccagcaaatctttcgcgaggatatgattgcctttttccagttcgccctgcaccacaacgccctgcccttcacggaacagatccggcaaaatgccttcttgcccttcttgtactgtgtcactttgtggggttggtgcttgccacacttcttacagaaagtccagtgggttttagggacattcgccatgtttgtgtgagtgctgtcagcatggaaagcgatagactgttgatggctatgtcagacgaggcgatgtttgccccgccacaaggaataacaattgaagcggtaaacggaatgctcgcggagcggttagcacagaaacacggcaaggcgtctttattacgcgccttcatcccgctgccgccgccgttcagcccggtacaacttgaagaacctgatgattacggatctccagagtccgacctggcagcaccgatcctggcgggaattattaccgcagcgattgtcagctggtggcgtaaccggaaacacttcaagaatagccgcaaaatgttgtcattacaacaaggcggctatatgacgctcgcgcagtttgccatgactttctggcacgacctggcggcaccgacagttacgttattgacccgctgttcttccctggcggtaatatcggcaagctggcgatatgcggcacagccaatgacgttgcgtgacctgcaggaatgaacccaatacctgcgcccagcggcatcaaagatatcgaagaagtttacctgaacggtgacctggaacacggtgcgccgaacattctcaacgtcagcttcaactacgttgaaggtgagtcgctgattatggcgctgaaagacctcgcagtttcttcaggttccgcctgtacgtcagcaagcctcgaaccgtcctacgtgctgcgcgcgctgggtacggcagttttgggatgaacccgacgagagactgatacgtagtccccggggtaccgagtctgagaatcgagacattcccgtcgtgcctcgcgcgggtcgtacgtgcgcgctggtgccgcatgccgagcgtgagaagtggaagtagcaagtcttcaatatcaataccatgagtaaattacctgaccttctggaatattttaccccaactcttcttgggggctggtgctcatggtggccggcgtattccttaataaccttaatattctcccatcgaaccctagagatcccgaccggttactagagtgtcgactactacaatctgacggcaagggttgtggcgctgcatcgtggtataagtgtgtagttctttctggcctctacgacgactccccccgtgtggtgactttacgcgttcacgccgatcgggtgccggtatcgcgctgtacaaagttgcctttacctagtactactgcggtgatgctctggagggcttaccattacgacattaacgggataaaaatacaagcgggggaacacttttggacacgacaagaccacgatggtattaaagctaacttataggatgacccagcgctcgctggtggccgtcacctgctggaacccgcagaacaacaagtggtaccccttggcctcgctgcccttctatgaccgcgagttcttcagtgtagtgagtgcaggggacaacatctacctctcaggtgggatggaatcaggggtgacgctggctgatgtctggtgctacatgtccctgcttgataactggaacctcgtctccagaatgacagtcccccgctgtcggcacaatagcctcgtctacgatgggaagatttacaccctcgggggacttggcgtggcaggcaacgtggaccacgtggagaggtacgacaccatcaccaaccaatgggaggcggtggcccctctgcccaaggcagtacactctgctgcagccacagtgtgtggcggcaagatctacgtgtttggtggggtgaacgaggcaggccgagctgccggcgtcctccagtcttacgttcctcagaccaacacgtggagcttcatcgagtccccaatgattgacaacaagtatgcccccgctgtcacgctcaatggcttcgttttcatcctgggcggggcttatgccagagctaccaccatctacgaccctgagaaaggaaacattaaggcgggcccaaacatgaaccactctcgccagttctgcagtgctgtggtgcttgatggcaagatttatgcaactggaggtattgtcagcagtgaagggcccgcgctgggcaacatggaggcctacgagcccacaaccaacacatggaccctcctcccccacatgccctgccctgtgttcagacacggctgcgtcgtgataaagaaatatattcaaagcggctgatgacgccagacgcccaggccccgggaccgccccgagtccgcgcggcctgcgagcgccgtctggtgggaaagcgcggagcttccgacgcggggcggggcttccaggattgttagggttaaatgagctaatgtggaacagtgcctggcaaatagtaggtaccgtgttagtggaaaaacataaaataaaaagcagtaagaggaaggaagagtcagacaaaaattattttgaaggtacgggctatgctcgagttccaactcaaccacatgctcccatcccaacctttggacagacaattcagaccaccgtggatagaggcttgctgttctttgcagaaaacggggatcgcttcatatctctaaatatagaagatggcaagctcatgattcagatcaaaattggaaaactccaaaagcgtatgtggataaatgtggacgttcaaaacactataattgatggtgaagtatttgatttcagcacatattatctgggaggaattccaattgcaatcagggaaaggattgtatttgctggggctgctattaaaaagtaccgtgaactgagtggcttaaacaccagaaattattctctcacagttctggaggactaataggccatcatcaagggaatgtggacaagaagaacagagacagtgtgcagaagggggccgtctcctgcccaaccttgggaaacctgcctctgaatgggagttccacccagcagtcgaagaaaggagagaaatcctgggttcccatgtcctggatgaagtggattgggtatgaggcctatgtggggactgccagccttgagcagaaggtgccacatgtcagagttgcggtgaatactggtgtagttgtgatgtaggcttaggcatggaagttttgcggcattctggctacacaataacaagggaagacttactcgtggctggaaccctactagctcaaaatttattcacacatgaaacatggatgcaactggaggccattatcctaaatgaattaatggggaaacggaaaatcaaataccgcattttctcacgtataagtgagactggcacactgggtactcatgaacatggagatagaaacaatagatactgcggactcctaaaggaggcaggaagggagcagctgagtccacccaagctggggaaacctggggagcagactttcaccccagccctaagttggagactggttggtgccattttggctcctgtgggcaggagaatgtcccctctgccctccctgccaatatcgggtgaaccaggctttgcctagcggcgtatagttttcatcgtgtttcgccagcacttctttcgcgaggatatgattgcctttttccagttcgccctgcaccacaacgccctgcccttcacggaacagatccggcaaaatgccttccgaattgggatcgcgctgcacactacccggcatcaccatcccgccaacgcgcagacgctgaccgacttccggcatttgctgagtttcacgcttgccgtagagaatttcccccggcgtataaaagagatcgatattcgagcgcagcattatagcaccagaccgataaattgcccgatgttgcatcaccgagtgcacgaccaaaaccaccagcggaataacggtcatcaccaccgccagccagacaaaaaaggcgtaaccgcccattgcgaaaaattcattccaggaagcaaatgccggggtcatttacggcctcttttcagtatcagttcactcacccacggacggcgtttttccatcagcaaaatcatattacgcatccgcattagggttcagttgggcatacagacctttgatgaaaccataaaagagttaagtcgctttaaacaggagtattcacaggcagcctccgttttagtcggcgatattaaaaccttacttatggatagccaggataagtattttgaagcaacccaaacagtgtatgaatggtgtggtgttgcgacgcaattgctcgcagcgtatattttgctatttgatgagtacaatgagaagaaagcatccgcccagaaagacattctcattaaggtactggatgacggcatcacgaagctgaatgaagcgcaaaaatccctgctggtaagctcacaaagtttcaacaacgcttcctgggaaactgctggcgttagatagacatgaaagccagcatccgggccagggtggagcacccatttcgcatcatcaagcgacagttcggcttcgtgaaagccagatacaaggggttgctgaaaaacgataaccaactggcgatgttattcacgctggccaacctgtttcgggcggaccaaatgatacagggagaaggcgtaacgattaccaatctgcgtaatctgtttttcacccctgcggggatcaaagaagagaatatccagaagctcactattgataactaccgcgagcatgatcagaaactggcgcgtgaaggcggactggatttggtggtgctgggattaggtgcagatggtcatttttgtggcaatttgccgaatacgacccatttccatgagcaaaccgtggagttcccgatccagggagagatggttgatattgtggcgcatggcgagttgggcggcgacttttcgttagtgcctgacagctacgtgacgatggggccgaaaagcatcatggcggcgaaaaacttgctgataattgtcagcggcgcgggtaaagcgcaggcactgaaaaatgttctgcaaggtccggttaccgaagatgttccagcttccgtgttgcagctgcatccttcgctgatggtaatcgctgataaagccgctgccgcagaattagcactcggttaaacctggtgccatgtgacgtgcttctgctgcgaggccgctgcatcgtagacgaggccatgctcacgggggagtccgtgccacagatgaaggagcccatcgaagacctcagcccagaccgggtgctggacctccaggctgattcccggctgcacgtcatcttcgggggcaccaaggtggtgcagcacatccccccacagaaagccaccacgggcctgaagccggttgacagcgggtgcgtggcctacgtcctgcggaccggattcaacacatcccagggcaagctgctgcgcaccatcctcttcggggtcaagagggtgactgcgaacaacctggagaccttcatcttcatcctcttcctcctggtgtttgccatcgctgcagctgcctatgtatggattgaaggtaccaaggaccccagccggaaccgctacaagctgtttctggagtgcaccctgatcctcacctcggtcgtgcctcctgagctgcccatcgagctgtccctggccgtcaacacctccctcatcgccctggccaagctctacatgtactgcacagagcccttccggatcccctttgctggcaaggtcgaggtgtgctgctttgacaagacggggacgttgaccagtgacagcctggtggtgcgcggtgtggccgggctgagagacgggaaggaggtgaccccagtgtccagcatccctgtagaaacacaccgggccctggcctcgtgccactcgctcatgcagctggacgacggcaccctcgtgggtgaccctctagagaaggccatgctgacggccgtggactggacgctgaccaaagatgagaaagtattcccccgaagtattaaaactcaggggctgaaaattcaccagcgctttcattttgccagtgccctgaagcgaatgtccgtgcttgcctcgtatgagaagctgggctccaccgacctctgctacatcgcggccgtgaagggggcccccgaaactctgcactccatgttctcccagtgcccgcccgactaccaccacatccacaccgagatctcccgggaaggagcccgcgtcctggcgctggggtacaaggagctgggacacctcactcaccagcaggcccgggaggtcaagcgggaggccctggagtgcagcctcaagttcgtcggcttcattgtggtctcctgcccgctcaaggctgactccaaggccgtgatccgggagatccagaatgcgtcccaccgggtggtcatgatcacgggagacaacccgctcactgcatgccacgtggcccaggagctgcacttcattgaaaaggcccacacgctgatcctgcagcctccctccgagaaaggccggcagtgcgagtggcgctccattgacggcagcatcgtgctgcccctggcccggggctccccaaaggcactggccctggagtacgcactgtgcctcacaggcgacggcttggcccacctgcaggccaccgacccccagcagctgctccgcctcatcccccatgtgcaggtgttcgcccgtgtggctcccaagcagaaggagtttgtcatcaccagcctgaaggagctgggctacgtgaccctcatgtgtggggatggcaccaacgacgtgggcgccctgaagcatgctgacgtgggtgtggcgctcttggccaatgcccctgagcgggttgtcgagcggcgacggcggccccgggacagcccaaccctgagcaacagtggcatcagagccacctccaggacagccaagcagcggtcggggctccctccctccgaggagcagccaacctcccagagggaccgcctgagccaggtgctgcgagacctcgaggacgagagtacgcccattgtgaaactgggggatgccagcatcgcagcacccttcacctccaagctctcatccatccagtgcatctgccacgtgatcaagcagggccgctgcacgctggtgaccacgctacagatgttcaagatcctggcgctcaatgccctcatcctggcctacagccagagcgtcctctacctggagggagtcaagttcagtgacttccaggccaccctacaggggctgctgctggccggctgcttcctcttcatctcccgttccaaggaacggcccctgcccaacatcttcaacctgtacaccatcctcaccgtcatgctccagttctttgtgcacttcctgagccttgtctacctgtaccgtgaggcccaggcccggagccccgagaagcaggagcagttcgtggacttgtacaaggagtttgagccaagcctggtcaacagcaccgtctacatcatggccatggccatgcagatggccaccttcgccatcaattacaaaggcccgcccttcatggagagcctgcccgagaacaagcccctggtgtggagtctggcagtttcactcctggccatcattggcctgctcctcggctcctcgcccgacttcaacagccagtttggcctcgtggacatccctgtggaggtcagtggccctgtggaggtgaccctggggctcagcttgatgggtccctcctatggcagtgaccctgagctgggctgcaggtctccagctcaccatccctccctgccccgacagttcaagctggtcattgcccaggtcctgctcctggacttctgcctggcgctcctggccgaccgcgtcctgcagttcttcctggggaccccgaagctgaaagtgccttcctgaggctttggcggcgaagagagtgcaggggcttccttcatgcgtttcgacggcacgccgtgtcccaccgacaaagacggcatcatcatgtgtctgctggcggcggaaatcaccgctgtcaccggtaagaacccgcaggaacactacaacgaactggcaaaacgctttggtgcgccgagctacaaccgtttgcaggcagctgcgacttccgcacaaaaagcggcgctgtctaagctgtctccggaaatggtgagcgccagcaccctggcaggtgacccgatcaccgcgcgcctgactgctgctccgggcaacggtgcttctattggcggtctgaaagtgatgactgacaacggctggttcgccgcgcgtccgtcaggcacggaagacgcatataagatctactgcgaaagcttcctcggtgaagaacatcgcaagcagattgagaaagaagcggttgagattgttagcgaagttctgaaaaacgcgtaactggttctcagtgggtccctgtaggacacggggcacgggaaatcagcacagttactgctgtcaacagggatacctcagtgatgcatttgacttcttaggagatgtccgctgcggctccaaccatcaagttttggactcaggcaggaagaagaggaaaggatgctccaaggagctgcgcactggccacaccatggtccacctcactactcccctctgcaaggcctattacaggggccacttaacgatctgccttgccctgggtggctgcaccaaccagcccttctaccgcattgtggctgctcacaggtgtcccagggatggccgttttgtagagcagctgggctcctatgatccattgcccaacagtcatagagaaaaacttgctgtcctcaaactggactggatccatcattggattggctgtggggcccacctctctaagcctatggaaaagctacacctgctcagtgccttcttctcatcccaaagggaggccacagccgttgttcaggatgttgatgtcactgatgacaaggaagagcttcagaactgggctcatcaccctctgttccttagtgagatccccaggcacttcgtgtgcatactgacgtctgagaagctccgccgatgggtttactttttgtccaacgtgttctgtggaggaggacttgggttttgacattaatgacacctatcagttcaccagagacctctactctcagttccactgccagagaaaggtggtcacggactagcagctaatcattgttgatgaaggagtaaaacccgccgtcgaacgggtttacaccatcaaaaatacgatcgattattattaatgttgactgaaacgcacagtagatacctgaaggggaagggaagtcctaggcaacagagtgagaccctctctcaaaaacagataaagtggacagaaaataggtcagtaaggactaatcatttaagggacaagcccccagaagagtggctactagagtgggaggaggaaaagcagaaggagaaagagttgaagataggcgaggctgtggtcccagtgctgaattctgccaagcagtga

SEQ ID NO: 144325 - DNA, 822 bp, Homo sapiens
atgcgtggagaagttctattagctggtgtgccgcgccatgttgctgagcgtgaaatcgctacactggcggggagtttttccctgcatgaacagaatattcataacctgccgcgcgaccaggggccgggtaataccgtctcgcttgaagtcgaaagtgaaaatatcaccgaacgcttttttgtcgtcggtgaaaagcgcgtcagtgccgaggtggttgcggcacagttggtgaaagaggtgaaacgctacctggcaagcacggcggcggtgggggaatatcttgctgaccaactggtgctaccgatggcgctggcgggcgcgggggaatttacggtcgcccatccctcatgccatctgctgaccaatatcgcggtggtggagcgtttcttgccggtgcggtttagtttgatagaaacagatggcgtaacgcggagcacggtcagtgaatccactttgattgccctgctggcagcaaggaagaacaaaatcctggaaatgaaaacgtctgagcccgatgctgatgagtcctgcctaaatgcccgactcgtggcctatgcctctgaccaggctcactcctctgtggaaaaggctggtttgatttcccttgtgaagatgaaatttctgcctgtggatgacaacttctcactccgaggggaagctcttcagaaggccatcgaggaagacaagcagcggggcttggtgcccgtctttaagcagtgtgcccagcggacaaagcgcagcggcggcgcgggcgcccaggccgaccccgccgacccccgcggaataagcggggccaggagccccggaaacccggcgccttaa

SEQ ID NO: 144326 - DNA, 2240 bp, Homo sapiens
ttcggtttagaaaggataattttgaccaggtcgatgtatgtaacaggtttatagaaataataaccctgctgaaatgtgatataattttggttcagatagtcaagttgttctttcgtttcgacaccttcagcgacgatactgatcgaaagtttacgcgccagatccaatacacaatccagaattcgggttgattctgggtctgcgtttacgcggccaacgaaactgtgatcaattttgatataatcaatatgcaggtcatgaagataagaaagccctgagtagccagtaccgaaatcatccagtgcgatgacaaaaccattttcatgcagtatgttcaaccgctgaaccagactttcatcaacattcaataggtcacgctcggtgacttccagaacaaggtttaaatcgcggcgggtaaaactgtcacggaaatttaaacactcgtcgacaaacgtcggcgaaataatatgcgaagcgctaaaattaattccaatatgaaaaccttccggcaatttactcgcgatagcgttcatctgtctggcaacctcccacatagataaacccagggggtcgatgtctgagatcggattcaacggatactgataaaaattccatccccctttcagcccaatcggatcctgagtgatatatcgcccctgcagcgggtcataatagcggtggcggttgtaatacaggccggactcctcatcatactgctgccccggcaggcggataagctgctgcagctgatgcgggttctcttcattcagcaggttaccccattcatcgtattctggtaccacgctgttgtcccttccgtgcgggtccatctggttttgcatctgctccacggtcaggccgcacgatgccagccagcggcggctttcctcactcacccggtcagccaggatttcactttccagccggtcgagcatctgcaccagcaccggcgggaacaccacactgccaccgtcttcgccgccggactgctgaagggcatccgccaggctgcggcgctgcgttttcgccagctcaccggtggcagtttcgaccctgatgagtggcgtgaagctccccggctgataaatcgtctggatgcggctcctgtcgttctgtatcgtggtcagccggtcgccgtcccagccgtaccaggtcacttgcggtttccgtgacagcgacatccagcccgtcaggtcccgttcacgccgccacacccgttttgccaccctgcggcccagcgggtcgtaaagatagcgactttcgaccagcggctcttcatattgtgtccgcgtgtagtcgaccagccggtgctgactgtcgtaatggtaccggtgagtccgctcatcatccgtgcggaattgttgcagtagcgctactaccgggtgcaggcgaaccgacacggcacacaccggatgcacgggctggaatagctcatgcagcaggcagattttgcggctgatattttgtttctgctctgtggaaaggatatttccaccgctggtgggttcagctttgtctgactggctgataacaaacagcatcttatgccggtatgcttcgccaatcacctgacggtaaaaatgctcatcagtcgccagtgcccgatcatcagccttaatcagccacagaatcaggtcgagccggggaagttgttcgcggtacagcgcagcatactcggtatcgcgaacgccactttcgcccacgccgggcagatccacgatggtcataaagtgttctccaatctgcaggcgaaagcgtaaaggatcacgtgtacaggccgctacatcgctgaccggcgatacttcaccggcaaacagggcattgcaaaggctactctttcccgccccagttttacccatgatgccgatcactggctcgtagtgggttaactgatttatctgctgcaatatacgttcagatacccatagcggtagaccggaaagggagttctgtagtggctgcagaacttcaaaatttttcatcaccactccttcaggatgattacgtaaagtaaaagtcagtttgctcaggatatgtgtcggaacgtcctgctcatcaataattttggccgtatccagcatgatccggccatatttcatttccagcgtaacgaagcggttccactctggaccgttagcgcacaagaggtcaaaaaggatttcaccagtggtctcactacccagtagggcagaaagtttcgtctcaatttcattaactgaagtatccgggtccgagcgcat

SEQ ID NO: 144327 - DNA, 4770 bp, Homo sapiens; identical to SEQ ID NO: 118283

SEQ ID NO: 144328 - DNA, 2919 bp, Homo sapiens; identical to SEQ ID NO: 136774

SEQ ID NO: 144329 - DNA, 1883 bp, Homo sapiens
ctcaacacgttttcgaacaacaggcctatggccccaccggtaacggctgaaagcgtcagcaccatcaaccactgaccgacgattagcttacgcagttgcgctcgccctgcccccagcgttttgaggatcgccaccagatcgtagcgactgcgacagtaatgattcatcgctaccgtcaccgctgccactgccagcagcaaggtcaaaaagcgccgaaaagcaagcaagaaactgttgcgaagcgttcccatcgaatgccccagcggcgccttcgtccctgttccagaccgtaccagcgttgttcgggtttaagctgaggtaacaaccatttctcatagccgtcgagctggttctcgttgccgccgaatttataacgccagggtgacccgactccccggctgcacggctccggttttatcgacatccgccagattcatcatcagacgcggagccatctggaaggggttaaaaccggaatccggttcctgaatcacttctccggcaatccgcaaggtggcatcgcccacgtcaatggtgtcgcccgttttcaggttaagcagtgccatcaggcgtggggccagcaatacgctgcccgcctgcggtttcaggccagggggattagtttgcagatcgccatacatcgggtagatatcatccaccgctttgacgttcgccagctgcggtgtgtcgcctgcaaaggtcattgtggcgaaagtcagctgcttgccgactttcaggccgcgcttttgcgcttcctccagccacgcttgcggcacttcgcgtgaactgcgcaacgcccgatcgcccgccataaactcacggctttgctggcttaagcccttctccatgcgatcgctgatattgcccagcgccagcacgcaggccaccgccaggtgcccgttcaccagccgtaagcagcggtcgcagcgtgccgccagttgcaggtcgtgggtcaccataatcaacgtggtgccatgttcacggttgaggaaaaacagcaggtcggcaattttatcgcccgtctggcggtcaaggttgccggtgggttcgtcggcaaacagcacatcaggtcgaccattaaaggctcgtgccagcgccactcgttgctgttcaccgccggaaagctgtgccggaagatgatccagacgtttacccagccctaactgttcgagcagcgcttcgccccgtacagcggacgcgataatcagcagattaagcgcagcatctatttgctggcagagcgcggcaagctggcggaactgcgtttgctggtgatccctggccaggtggattatttgcaacacatcgaagaactggcggcgtttatcaagggactcggcgatgttccggtacgcctgaacgcgtttcatgcccacggcgtgtatggcgaggcgcaaagggcctacggttcggcacagacttgtaggcctgataagacgcgtcaagcgtcgcatcaggcattgtgcgccaactgccggatgcggcgtaaacgccttatccggcctacggttcggcacaaacctgtaggcatgataagacgcgacaagcgtcgcatcaggcaacggctgccggatgcggcgtgaacgccctatccgacgcggttggcgcaacacttcgttgatttgcggatcgtccagcggacccgaaatgtgatagcgcaaaatggagactttgctccacagcggccccagcactttactggcggcaaacactgccgcgccaacaataaggttaaccgcaaaagccgcagccacgcccaccgtcgcagaaatctctggtgcgacaaccgcttccatattcaggtcgcgacgtaccagatttaccgaccctttcatggcgatatccgcctccaggccatccaccagcgtgtcgtcggtgtgcat

SEQ ID NO: 144330 - DNA, 1788 bp, Homo sapiens
atggcggttgtaatacaggccggactcctcatcatactgctgccccggcagccggataagctgctgcagctgatgcgggttctcttcattcagcaggttgccccattcatcatattctgcgcaccacgctgttgccccttccgtgctgatgagcgccagcggcaggccgcgatggtcgcagtggtgatgacaggtttcaccctgcgccctgaccgggcggcgctggaaatcgccagccgcgtctataacgggaacgccacgccgcgtcatttcttgtggtgggccaacccggcagtgaaagggggggaagggcatcagagcgtcttcccgccggatgtaacggcggtgtttgatcacggcaaacgggccgtctccgctttccccatcgctaccggcacttactacaaagtggactactccgctggagtggacatttctcgctataaaaatgtgcctgttccaacctcatatatggccgaaaaatcgcagtacgattttgtcggcgcgtggtgtcacgatgaagatggcgagtttgctatgagacgagaacttgccatcgaattttcccgcgtcaccgaatcagcggcgctggctggctacaaatggttaggacgcggcgataaaaacaccgcggacggcgcggcggtaaacgccatgcgtattatgctcaaccaggcgggcagcgtattgctggccccacgcctgatggcactgcttaacctgaaaacgggcgacaccattgacgtgggcgatgccaccttgcggattgccggagaagtgattcaggaaccggattccggttttaaccccttccagatggctccgcgtctgatgatgaatctggcggatgtcgataaaaccggagccgtgcagccggggagtcgggtcacctggcgttataaattcggcggcaacgagaaccagctcgacggctatgagaaatggttaggtggcataggccagtggaggaggcatcagactctagagggtccccgggtgggggaaatagggattaatcagcgaaccacgctgttacgccacggtttttaccctgccggaggcggtgtggtggcaacggaagtctcgcccgtggcatcgtttaacaccttgcaacttggcgagcgcgggaacattgtgcagatgcgtggagaagttctattagctggtgtgccgcgccatgttgctgagcgtgaaatcgctacactggcggggagtttttccctgcatgaacagaatattcataacctgccgcgcgaccaggggccgggtaataccgtctcgcttgaagtcgaaagtgaaaatatcaccgaacgcttttttgtcgtcggtgaaaagcgcgtcagtgccgaggtggttgcggcacagttggtgaaagaggtgaaacgctacctggcaagcacggcggcggtgggggaatatcttgctgaccaactggtgctaccgatggcgctggcgggcgcgggggaatttacggtcgcccatccctcatgccatctgctgaccaatatcgcggtggtggagcgtttcttgccggtgcggtttagtttgatagaaacagatggcgtaacgcggcaattgctgggcgtgttgtaccgcatcctggcgatgggccacgccgagtttctgatacagattgcggatatgcgttttgatggtggttgccgcgacttccagttctccggcaatttgctcattgctgtaaccagagtagatcagccccagtacctgccattcacgttgcgtcagcgggctggtgcggatcagttcaggtacttcaggatgatttag

SEQ ID NO: 144331 - DNA, 1434 bp, Homo sapiens; identical to SEQ ID NO: 142054

SEQ ID NO: 144332 - DNA, 954 bp, Homo sapiens
atgatgctggggcgcgagctggatacccacgcgctacagcgtgccgggcgaacattgttgagcgacaaacccgttgccgcgttcaaaaattacggcaaaaaaggaacgatcgcaccgtttgatctcgaagtacgccccggcgagatcgtcggtctggctggattgctgggatcaggacgtaccgaaaccgccgaagtgatcttcggtatcaaacctgctgacagcggcacggcgttgatcaaaggcaaaccgcaaaacctgcgatcgccacatcaggcttcggtactgggcattggcttctgcccggaagacaggaaaaccgatggcatcatcgctgccgcctcgccgctggttgaagcggtttatttcgatacgccctggctgccgcgggttaatcttatcgccagccaaattcagcgtggctatggtggttgggtattgacgatgcgttgtctgggacatgaaaaggtcgcacaactggagcgcaaaatcggcactccgctgcggctgtacagtggctatagcgacagtaatcaggacaatccgctgctttatttctgtcagcatcgttggcgagtaaccccgcgcgtcgaatttagccacgaatactggatgcgtcacgcgctgacgctggcgaaacgtgcctgggatgagcgggaagtgccggtcggcgcggtattagtgcataaccatcgggtaatcggcgaaggctggaaccgcccgattggtcgccatgatcccaccgcacatgcagaaatcatggccctgcggcagggtggtctggtgatgcaaaattatcgtctgatcgacgccacgttgtatgtcacgcttgaaccatgtgtaatctgtgccggagcgatgatccacagtcgcattgtcgcgtggtctttggtgcgcgtgacgcgaaaactggcgctgcggatcttaatgattctcgatatccggggcctttaa

SEQ ID NO: 144333 - DNA, 3294 bp, Homo sapiens
tcatgggattgctaggtcagatgaagttgcccatttattacgccagtactgtctgtgaaacaccttatgagcatactccgggtaacagtaatgaatcgataggctgatccattcggcaaactcacgtacaaattgttcgaaggtcatgcctggccattcgacatcaggttcccagcactgccattcgggttggtattgtgaaagggaattttgcgtcgtaagcgggagcgcaacccagtaaaactcttcgatgacatcggtgtacaactcgcgcactgacatctggtgtgcttgctgtgcgcctgtcagcgggttgtaattttcctgaattggtccatcggcggttaaccctttggcgtgccggaagaacgtatccgccagcttcagggcatcatcacgataaccgtaacgctccatccctttcagaccaaaccagaactgatccacccatacgcgcccacgccagtagatatcagcgccaaaagccggattggttaacgccgccgttcccagcgggacaaaggtgttgaactctttaggatcgagcatcaccttcaccaccgcgtcggcattggcctgcgttgccgcaccgttaaacagcggcgaccagccttccggccctttaccgcgctcaacaatcggtttgcccgcgcagccgttcgccagtggtttatcttcaatacgtacgtcatagtagaactgggtagtcgggtcgaacatacaggtgttgatgtagtccgcgagctgctgtgccaactggcgatagcgtttggcctcttctggcttaccgaggatggttgccatctccgccagataatggttatcgctgtacatatagctggcctgatccaccgactcctgcaatagcgagtagcccagcaacgttccgtcctgactgcggttttcggcgaatttcaccgtccagtcgctacgtttgccgccattagcgacatatttatccaactgttcgttgaggtccacgaagggcaaatcgttatttgcgatatccatgaagcgtatcggtttatctgcaataacgcggtcaaaaaagtggttctcaaagtcaccatcgaagatggttatttccataacaaataacaacctactcattttcggagatgtgttatgtctgataccaaacgtaatacaatcggcaaattcggcttgctctcgctgacttttgccgccgtttacagctttaacaacgttatcaataataatattgagcttggactggcctcggcaccgatgtttttcctcgcgacgattttttattttattcccttctgtcagagcgaacaggttccgggcatgatcgagcgctacactgctgccatcactggtgcagaaggcaagatccaccgtctggaagactggggccgccgtcagctggcttacccgatcaacaaactgcacaaagcacactacgttctgatgaatgttgaagctccgcaggaagtgatcgatgagctggaaactaccttccgcttcaacgatgccgttatccgcagcatggttatgcgtaccaagcacgctgttaccgaagcatctccgatggttaaagcgaaagacgagcgccgtgagcgtcgcgatgatttcgcaaacgaaaccgctgatgatgctgaagctggggattctgaagagtaatttctggccgttacgtaccacgcacagcccgccgccatcctgaatcacctgattgaccgccagcgccatctcttcggcactgcgaccgatcaccacaatattatggctgtcatggctgaccgtcgcagccagcgcaccttcattcagtccaaagccgccaagcaaaccacaagccggagccagccgttgcccgtaacgctcaagtacggcaataaagctcacatcatcgcgatcaaaaccattttcgctgtagacgctggagtgggagtgcgtaatcaattcgttatggatgacgtcaatgacccgatagcgttttccgggcgtaaattgcagggcaaagtcgctggcggaaactggctggcgggcaatggtgttgccatatggcggagcggattgtgccagtctcgccgactcttccgcctgtaaggtttgcgcatcaatcggctcgcctttcaccagtacctgctgcaccgtgaccttacgcgcatcgctcaacaggacgatatcggcctgcttgccgggtgccagtaagccgaggtgattcagaccaaagtggcgcgccgtcgaccagctggcgacgcgatatgccacatgcagcggcacattgtgttgttcgatcaggcggcgaattaaggcatcgatgtgtccttcatgggcgatctcccacgggttacggtcatcggtacagagcatgcattgcgggctgttaaattcgttgatcaaatcgttgcttgaaccagactttgagcctttagtgagtgacacaaaggagagggcaagatccatgctggtgaggaaagtggcaacagaggcgggggccgaaacagtgggattggccaagagcggagaacaagcggggctgcgggaccgggagagggataccccctgtgctgagcccagcgccccttctccgtgttccaagccgaagttggcttcccggtgacatcccccagcggagaggctggacatgtgctccctttggggccggtgcgctttctccagccccagcttggtgaagatgcccacgagcaccatgacggccaccaccccgcagatgatgtagacgatcaggttggtcttgtccttggtggggtcgtgcaaggggtcgtccttgcgggcggggggcttgccggtgttgagccagagcggcgtgtcgtagttggtgcaggtgctttggttcagtcgccgcttcttaaacgtgcagcagaaccggaagccacaagtcccgcagcagaagatgaagtcgcccgagctgcagttgaacggcgggtcccactggcccatgacatcgaagtagccccggcagaagtccggcgtgggcgcccgggtcgggggcgcgtccgatgcctcagcgccctcgctggcctctccggaggcggccccggagcggttgccccccgccagcagcaacacgccgcccagttgcgccagctgcccgtgtcccgctcgctcctgcgcccggcacacgcgggcgcacagctcggtgaggaagcaaccgaggagcagccgaaggacgcggcgcatggtgtctcccagcccgggctcggccgctcggccgccgctggagcctctgcggccgcctctcgaggcgcggccgaagctgccgaggctgctgccgggagctgcgagccgccgcgggccgcacat

SEQ ID NO: 144334 - DNA, 1392 bp, Homo sapiens
atgaggatcatcgataacttagaacagttccgccagatttacgcctctggcaagaagtggcaacgctgcgttgaagcgattgaaaatatcgacaacattcagcctggcgtcgcccactccatcggtgactcattgacttaccgcgtggagacagactccgcgaccgatgcgctatttaccgggcatcgacgctattttgaagtgcattactacctgcaagggcagcaaaaaattgaatatgcgccgaaagagacattacaggctgcggagaaaccgttgaggtccacgaagggcaaatcgttatttgcgatatccatgaagcgtatcggtttatctgcaataacgcggtcaaaaaagtggttctcaaagtcaccatcgaagatgtgtatttccataacaaataacaactacggcggcaaaaggagtttgcgccaccgctaccctactcattttcggagatgtgttatgtctgataccaaacgtaatacaatcggcaaattcggcttgctctcgctgacttttgccgccgtttacagctttaacaacgttatcaataataatattgagcttggactggctctggttcaggagcgattaaccacctacctgttaagttccgatgctgatatctggttgattaccggctctccgcagccgctggttgaagcggtttatttcgatacgccctggctgccgcgggttaatcttatcgccagccaaattcagcgtggctatggtggttgggtattgacgatgcgttgtctgggacatgaaaaggtcgcacaactggagcgcaaaatcggcactccgctgcggctgtacagtggctatagcgacagtaatcaggacaatccgctgctttatttctgtcagcatcgttggcgagtaaccccgcgcgtcgaatttagccacgaatactggatgcgtcacgcgctgacgctggcgaaacgtgcctgggatgagcgggaagtgccggtcggcgcggtattagtgcataacaatcgggtaatcggcgaaggctggaaccgcccgattggtcgccatgatcccaccgcacatgcagaaatcatggccctgcggcagggtggtctggtgatgcaaaattatcgtctgatcgacgccacgttgtatgtcacgcttgaaccatgtgtaatgtgtgccggagcgatgatccacagtcgcattggtcgcgtggtctttggtgcgcgtgacgcgaaaactggcgctgcgggatctttaatggatgtgctgcatcatccgggtatgaatcaccgagtggaaatttacggaggaatactggcggatgagtgcgcggcgttgctcagtgacttctttcgcatgcgccgccaagaaattaaagcgcagaaaaaagcgcaatcctcgacggattaa

SEQ ID NO: 144335 - DNA, 380 bp, Homo sapiens
atgaaactgttgattgtcgaagatgaaaagaaaaccggagaatacttgaccaaagggttaaccgaagccggttttgtggtcgatttggccgacaacgggctgaatggctaccatctggcgatgaccggtgattatgatctgataatcctcgatattatgctgccggacgtgaacggctgggatatcgtgcgcatgttacgctccgccaataaagggacatcaactgaggatgagaagctgaagagcaattttgttctaagacattggtacaacctgagcgatggcgcgatggaagatgctctgtacgaaatcgcctccatgcgtctgtttgcccggttatccctggatagcgccttgccggaggctctagatgaccaaag

SEQ ID NO: 144336 - DNA, 3258 bp, Homo sapiens; identical to SEQ ID NO: 130057

SEQ ID NO: 144337 - DNA, 2858 bp, Homo sapiens
acaaaaaaaggcgtatatttgcgctgtgaatggttgacaaaagatgaaatagaataccttttgtcagctgacacttcctcttatcttattgataaaatggatttatgttcctacgtgcgcccccagcccgcaacaatgatcaacatgccgcaaagcgcaatcaacgcacccgtccagtcataaagagtcagtttcacgccatccacaacgcgcagccacatcaacgccgtgcagacataaacgccaccataagccgcgtaaacacgcccactcgccgctggatgcaacgttaacaaccagacaaacagcgccagtgaaatccccgccggaagcaacagccagatactggcgtttcgttttaaccacaaccagggcagaaagcatccaataatttcacacagcgcagtagcaaaaaatagtaacgttgttttaatcatctttgtctcttattgacatcatgtatagttatagggcgacataatatcatcaatataaacaccctcctggtacgttttgcgtccgcagtggatggtgtagaatcacctttaatcattcatacagggaatgaattatgaaaatcactctcagcaaacgaatcggcctgctcgctattctgctgccttgcgcactggcattgaacacaactgttcatgccgaaactaacaaactggtgattgatttgggcaacggggcacaaagccgccagcacgccgctatggaaaaagagcaatggaatgacacgcgcaatctgcgccagaaagtgaataaacgcactgaaaaagagtgggataaagccgacgccgcttttgataaccgcgataaatgtgagcaaagcgccaacatcaatgcctactgggagcccaatactttgcgctgcctggaccgtcgaactggccgcctacgcccgctggagcgtgaagatttacgctatgtacatcaactcgacaataacgccagtgtgatgcgttactggtttgaggaaccctacgaagcctttgttgaactctctgatctgtatgataagcatattcacgatcagagcgaacggcgctttgtggtggaatgtgacggcgaaaaagccggtctggtggagctggtggaaattaaccatgttcatcgccgcgcagaatttcagataattatctccccggagtatcaccggaaacgtctggcaacccggttaaccgaagccggttttgtggtcgatttggccgacaacgggctgaatggctaccatctggcgatgaccggtgattatgatctgataatcctcgatattatgctgccggacgtgaacggctgggatatcgtgcgcatgttacgctccgccaataaagggatgccgattctgttgcttaccgcgcttggcaccattgaacatcgcgtcaaggggctggagttgggggcagatgactacctggtgaagccattcgcttttgctgaactgctggcgcgggtgcgcacattactgcggcgcggggcggcggtgattatcgaaagtcagtttcaggttgccgatttgatggtcgatctcgtcagccgcaaagtcacccgcagcggcacgcgcatcactttgaccagtaaagagtttactctgctggagttcttccttcgccatcagggcgaagtgctgccccgctcgcttatcgcctcgcaggtattggacatgaattttgacagcgataccaatgctattgatgtggcggtgaagcggctgcgcggcaaaatcgacaacgactttgagccgaagctaattcagaccgtgcgcggcgtgggttacatgcttgaggtaggcggtaatagaaaagaaatcgaggcaaaaatgagcaaagtcagactcgcaattatcggtaacggtatggtcggccatcgctttatcgaagatcttcttgataaatctgatgcggccaactttgatattaccgttttctgtgaagaaccgcgcatcgcttatgaccgcgtacacctctcgtcttacttctctcaccacaccgccgaagagctgtcgctggtgcgcgaaggcttctacgagaaacacggcatcaaagttctggtcggcgaacgcgctatcaccatcaaccgtcaggagaaggtgattcactccagcgccggacgtaccgttttttatgacaagctgatcatggcaaccggttcctacccgtggatcccgccaatcaaaggttctgatactcaggactgctttgtctatcgcactattgaagacctcaacgccattgaatcctgcgcccgtcgcagcaaacgcggtgccgttgttggtggcggcctgttagctcaagatgacaactcaaaaaggcagccagaagtagacatacccatgcctcaatttccattctcccctcactttccacccactcccaatttctttgcacgtttccccatgaaagagaagaaagggcagacagatgcgtgctgcagaattgccacacgccaaagcccacttgcactctggcaggcacactatgtcaaagacaagttgatggcgaagccatccggtgcctgggtcgttgaactgggtaccgatggttgacgcgcggcgatgtgattcttgatacgccgctgggcgaaagtaggcgggaaaaggcttatttgtaaaagagcttggaagtcgcgctcctcgaaaatcgcgccgatattcgccgtaccactcatgaaagatgtgcccgttgaattcccgcaagggtctgggactgggcaactatttgtgagcgggaagaacctcgcgaagcccttgtttccccaaaactatgacagtctggatgcgttaccggcaggcagtatcgtcgggacgtccagtttacgtcgccagtgcctactggctgaacgccgtccggatctga

SEQ ID NO: 144338 - DNA, 618 bp, Homo sapiens
atgaattgtgatgagaacatgaattctagtgtctgctgcctgcaggtccgcgggccgcacagcctgtatttggtgcaggatgcgcaacttgaacatgcactgcctctcgataccgcaaaagcgctggcggcagcaattgaaaagatcggcttcgatttactgatctttggtgaaggttccggcgacctttatgcccagcaggttggcttgctggtcggagaaattctgcaacttccggtgattaatgcagtgagtgctattcagcgtcagggcaatacactggtgattgaacgcacgcttgaagatgatgttgaagttattgaactctctgttccagccgtgctctgcgtcacctccgatattaacgtgccacgcattccttcgatgaaagccattctcggcgcgggtaaaaaaccggtaaatcagtggcaggcaagtgatattgactggagccagagcgcgccacttgctgaactggtcggcattcgcgtaccgccgcaaacagaacgtaagcacatcattatcgataacgattcgccggaggccattgccgagctggcggaacatctgaagaaagccctgaactgaagcctacggagaagaaacgatgagtcaatt

SEQ ID NO: 144339 - DNA, 1716 bp, Homo sapiens
atgagcacgatcgcgagctttacgcagttcgaaaatagtacgacgggtcaccacttcacggcggtgacgaacaaacgccgcgatgatgtctttcaggttcatgatcttcggctgaccatggtgcaatgccaccatgttgataccgaaagaaacctgcaactgggtctgggagtagaggttgttgagcacaacttcaccgaccgcatcgcgtttcacttcaatcacgatgcgcataccgtctttgtcagactcgtcacgcagcgcgctgatgcctttcacgcgtttttcttttaccagttccgcaatcttctcgatcaggcgcgcttttgttacctgatacggaatttcgtggacgataatggtttcacgaccggttttgggcgtcaactttcactttttgcgccaagcgccggatatacacccttgcccgcgacccgtaccggtaagcttttttcaattcccccaacaaccgttaaagatttgccccccccggggaaaatcccgccccccggaatgttttcctttaaccccttcaaaggggaggggttggatggtcagacgctgaatttacgtgttatcggcggagattatcattacacagcagcggggcaactggctcaacatgaagacacttctacggtgcaacttagcggcgatctgtttagcgggcgctggggcacggatggcgagtggatgcttgggattgttggtggctacagcgataaccagggcgacagccgctcgaatatgaccggaactcgcgccgataaccagaaccacggttatgccgttgggctgacatcaagctggtttcagcacggtaatcagaagcaaggggcctggctggatagctggctgcaatacgcgtggtttagcaatgatgtttccgaacaagaagatggcacagatcattaccactcgtcggggattatcgcctcgctggaggcggggtatcagtggttaccggggcgtgcagccttccgccctccgcctggggcccaagggagcaaagccttgaagacggcaatgacagggtcctcgtgggtggtcaccaccaacacgctgcggaacttgtcaaacagcatgagcagcttggagcgccgcgtgttctcgttgtacataaatctcttcaggcctttgttgaagaagcactgctgggaattaacttctgactttgccacaagcctgaacaaaagctggttgttaaaggccaaggaagcaactaacagtggaccatatacagagtgctctagtcaccatgcggatcgcatccgctgtccggtgcaaatcatctgcgccagtgatgatctgctggtgccaacagcatgttccagtgaacttcatgccgccctgcccgatagccagaaaatggtgatgccctatggcggacacgcctgcaacgtgaccgatcccgaaacgtttaatgctctgttactcaacgggcttgccagcctgttacatcaccgtgaagccgccctagaccctggggtcggtgcaaggatccttggggccaagcagtggccccaagacagcgggggcgccttcttcccgtccgccttccccaagcgcccgccgcccacggacaacagagaccaggtggacgctgctgcgatcaaaggactattggctcataacgcggaaagtggggctggggaacctccaagacgggggaagggccggcagtctgtcatgagggggctacggagcggcaactaa

SEQ ID NO: 144340 - DNA, 1815 bp, Homo sapiens
atgaacaacgccggtgcgatcgaggtgtcgatgccggtggttcagccagccgatttgtggcaagagagtggtcgttgggaacagtacggtccggaactgctgcgttttgttgaccgtggcgagcgtccgttcgtactcggcccaactcatgaagaagttatcactgacctgattcgtaacgagcttagctcttacaaacagctgccgctgaacttctatcagatccagaccaagttccgcgacgaagtgcgtccgcgtttcggcgtcatgcgttcccgcgaattcctgatgaaagatgcttactctttccatacttctcaggaatccctgcaggaaacctacgatgcaatgtatgcggcctacagcaaaatcttcagccgcatggggctggatttccgcgccgtacaagccgacaccggttctatcggcgggagcgcctctcacgaattccaggtgctggcgcagagcggtgaagacgatgtggtcttctccgacacctctgactatgcagcgaacattgaactggcagaagctatcgcgccgaaagaaccgcgcgctgctgctacccaggaaatgacgctggttgatacggacggaggatccccgacaatttataaagcgacggttaatgtggccgatctcgaccgcaaccagtttctcgatgcctctctgacgctggcgcgccatccttcagaaacccaggagcgtatgatgctgcgcttgctggcgtggctgaaatatgctgatgaacgtctgcaatttacccgtggtttgtgtgccgatgatgagccggaagcgtggctgcgtaacgatcacctgggcattgatttgtggattgagctggggctgccggatgagcggcggattaagaaagcctgcacccaggccgcagaagtggcgctgtttacctataatagtcgggcggcgcaaatctggtggcagcaaaatcagagcaaatgtgtgcagtttgccaatctttccgtctggtatctggacgatgaacaactggcgaaagtaagcgcctttgccgatcgtaccatgacgctgcaggcaacgattcatgatggcgtgatctggttatcggatgataaaaataatctggaactgtctgcagtgaactccgttgatcccccggtgcaaatcatctgcgccagtgatgatctgctggtgccaacagcatgttccagtgaacttcatgccgccctgcccgatagccagaaaatggtgatgccctatggcggacacgcctgcaacgtgaccgatcccgaaacgtttaatgctctgttactcaacgggcttgccagcctgttacatcaccgaattgctatgaacgaagccgttagcccaggtgcgcttagcaccctgttcaccgatgcccgcactcacaacggctggcgggagacacccgtcagcgatgagacgttacgggagatttatgccctgatgaaatgggggccgacatcagctaactgttctccggcacggatcgtgtttacccgcacggcagaaggaaaagaacgtctgcgcccggcactttccagcggcaatctgcaaaaaaccctgaccgcgcccgtcaccgctatcgtcgcctgggacagtgaattttatgaacggttaccactactgtttccccacggtgatgcccgcagttggtttacctccagcccacaacttgccgaagaaacagcgtttcgcaacagttccatgcaggcgggctatctgatcgtcgcctgccgggcgctgggacattatacgaactctagctcggtacccggaaaagaagcaggcaagtttaggagagagaagataaactaa

SEQ ID NO: 144341 - DNA, 777 bp, Homo sapiens
atgttcaacacagttgcagaatgtgtggaacgcatagccaaaagtgcccatcacatcgacaaaaactccgacctcatggacatttggttgcttgatgcttatgtgctgggagtagggaatgggaagccaatccgttgttcccgggacggggccactgtaccgattcaccgcctgaaacccgtccacaccaacttgttcagcgtgtttgagcgttacggcctgccggaccggatgaccatggataacggctcaccgtggggcgacaccaccggcacctggacggcgctggagctgtggctgatgcgcctgggtatccgggtggggcactcccggccttatcatccgcagacgcaggggaagctggagcgttttcaccgcagcctgaaggcggaagtgctgcagggaaaatggttcgcagacagcggtgaactgcagcgcgccttcgaccactggcggacggtctataaccttgaacgcccgcacgaggcgctggatatggcggtaccgggctcgcggtatcagccgtcagcgcggcagtacagcggcaacacaacgcccccggaatacgatgaaggggtgatggtcaggaaagtggatatcagcggaaagctgagcgtgaaaggggtaagtctgagcgcaggccaggcgttcaggggagaacgggtcgggctgaaggagatgcaggaagacggcagctacgaggtgtggtggtacagcacgaaagtgggggtgatcgacctgaagaaaaagtcgatcaccatgggtaaaggatgttaa

SEQ ID NO: 144342 - DNA, 2768 bp, Homo sapiens
atggataaattcctcaacacatacaccctcccaagactaaaccgggaagaagttgaatctctgaatagaccagtaacagcctcgggacttgaggtgataattaatagcttaccaatcaaaaaaagtccaggaccagatggattcacagctgcattctatcagaggtacaaggaggacgctggggaaagagaaggagaggggggaaatcagcaggtggctgttagaggcaaaagaaagaccacagagaggaaaaagaaactaggagaagacgtcaaagtaaaagagagcaaaaacagtggtgcatatgaagtcaaacagcatcgattcttccgttctttagactggaacagtttgctgagacagaaggcagaatttattccccaactggaatctgaggatgacacaagttattttgatactcggtctgagaagtatcatcatatggaaacggaggaagaagatgacacaaatgatgaagactttaatgtggaaataaggcagttttcttcatgttcacacaggttttcaaaagctgcagaggtatccactcgattgctttccactcgggttaccgaaatcgaagggtggttgatcgttcagagaaatcagaagctgctgcagagtaatctgaagcaacgtagcggcgaaccattgatactggatgatgattctcacgtgccaccggaattacgtgcggggtatcgcttgctgaagaatgccggttgcttaccgccagaacttgagcaacggagagaagcaattcagcttctggatattctcaaaggtatccgtcacgatgatccgcaatatcaagaggttagccgtcgattgtcattactggaattgaagctgcgacaagctggattgagtaccgattttttacgcggcgattatgctggcgcccagcagggtaatcggcacgcccagtttcaaattgcatgggattataacgctggcgaaggggtggtccaggactataagcaagcgatgtactggtatctgaaggctgccgctcaggggagcgtcggcgcttacgtcaacatcggttatatgtataaacacggacaaggcgttgagaaagattatcaggctgcctttgaatggtttacgaaagccgctgaatgcaatgacgccactgcctggtataacctggccattatgtatcattacggagaaggaagacctgtcgatctccgacaggctctcgacctgtatcgtaaagttcagtcatccggaaccagagatgtcagtcaggaaattcgtgagactgaatatttacggggttatgtggacaataaaggcatctcttttaaatcctgcttactgaacggttctgttgaagtcgccccgcgtgccggactggcggatgcgatttgcgatctggtttccaccggtgccacgctggaagctaacggcctgcgcgaagtcgaagttatctatcgctcgaaagcctgcctgattcaacgcgatggcgaaatggaagaatccaaacagcaactgatcgacaaactgctgacccgtattcagggtgtgatccaggcgcgcgaatcaaaatacatcatgatgcacgcaccgaccgaacgtctggatgaagtcatcgccctgctgccaggtgccgaacgcccaactattctgccgctggcgggtgaccaacagcgcgtagcgatgcacatgcgacgggaaaaagctgataatgatatggctccgctccagcaaaagctggtggtggtgagcaacaagcgggaaaaaccgattaacgatcgccgttcgcgccagcaggaagtgactccggcaggcaccagtatacgctatgaggcaagcttcaaaccgcaaagcggaggaatggagcagacgtttcgcctcgacgcccagcagtaccacgccctgacagtgggcgataaaggccagcagttcaaacacgccgaaaaggaaaatccgtaccttttcggcggtggtcatctgcgggccatctttcggtaaagtggatttcaatagcgccagctgcataccatgcattggggcgcgtcgaacaggccgaacatccatggcgcaaccatctacgcgagcacagttgcgaactcccattcccccgccgattcacacgggctctggtcgggtctggcatgaagcccaggcttaacggtgagcgcgtattgatttgcgctgccgggaaacatcccgctgatgcatttactggtttaattaacgaactggaaagcgccgggcaaacggtagtgctggtagtacgtaacgatgacgtgcttggtgtcattgcgttacaggataccctgcgcgccgatgctgcaactgccatcagtgaactgaacgcgctgggcgtcaaaggggtgatcctcaccggcgataatccacgcgcagcggcggcaattgccggggagctggggctggagtttaaagcgggcctgttgccggaagataaagtcaaagcggtgaccgagctgaatcaacatgcgccgctggcgatggtcggtgacggtattaacgacgcgccagcgatgaaagctgccgccatcgggattgcaatgggtagcggcacagacgtggcgctggaaaccgccgacgcagcattaacccataaccacctgcgcggcctggtgcaaatgattgaactggcacgcgccactcacgccaatatccgccagaacatcactattgcgctggggctgaaagggatcttcctcgtcaccacgctgttagggatgaccgggttgtggctggcagtgctggcagatacgggggcgacggtgctg

SEQ ID NO: 144343 - DNA, 9231 bp, Homo sapiens
ctataagattacgcgatggggggcaacaaattcggtgaccccggcggggaaacaacattggggctcccgaagaagcgtatacggacgttgtaccggcatcgcccacaggtcgatggagaaacctttttccagacccgcttctttcagcaaggctttcgctttttcaggatcgtaggtgtagtcctgaacgtcgtcgttatagccccacatggttggcgggatcaggtttttcgctgatacgcccgcgccctgataaaccgctttgatgatcgcgtctttgttcaccgcgtaggtcagagcctggcgaactttcacgtcatcgagtggtaaacccagctcgcgtaccaaggtgagacgcacctggatggtatcgcctggctttacgggttcgataaaacgcaagctgtccagcccgtagttagcaatgaccggaccgacaccggcatcgacaaacagacccgcagccgcagaaagcacaaaatacccatgcaccacccgctcaccgaaaatagattcggcagcagcaatcttatccatatgtgcatagaaatgatcgccgctgaggcaagcaaagttaacaatatcggcctctgtcattgtgcggcggggagtcaacaggctgtcgcctggttgtagctcctcaaaatatttgcggaacggatgaatacgatcttcttcgactttcgcaccgcgcacccactgtttactgatagcggcaagcatcgtcggactaccctgaacagcggttcgctgcatgtaatgtttcaccgctcgtaaaccgcctaattcttcaccgcctcctgcgcgaccaggcccaccatgtaccagttgtggcagtggggagccatgcccggtggattcttttgccgactcttcattgaggatctgaattcgcccatgcgtacgtgccgcgtcggcaataaactgacgcgcaatttgcggatcagccgtcaccagcgttcccgcaaggctaccgccgcctgcacaagccagttgcagagcatgtcgctggtttagtgctggcatcagcgttgcgacagggccaaaggcttctgttgcatgtaccgccggtgtttcatccggtccagaggtacagagaattccgcgcatcttctccccatatagtgttctacgtggacggtaatgcgcttctcggaagtggagcagaacgacaaactggaatggctgatccgcaaagacggctgtatgcactgttccgatccaggctgcgacgtggacttctcccggcttcacaatgtatcgctgtaccgactcataagtgatgaacgtggcgctgcaattcacgttctgacactggtgataacgctcttttgtcgtgtcagtgatatagcggcttgtacgcgcatgtgcggcatgctcaagctctaatgacgtcgtgaagccgctattattcagaaaatgtgtcaccttagtgattgtccagtcctgctcgtctatgacgcgcttaaagccagacactttgaccggtgtttccgtgtaaatattaccgtattctcggcttaaccgtccatgcaacctcaacacattgctttcaactgccgtcaccacgttctccggaaaatctgtcggtaatgaagtcttcacgttatccagtgctgctggaatcattctggcaaagtcactcaggatttcatgcatctgcacttccgggaatctcagcacctttgtctgccactggatgtggcacaacagatgattagctatccggcggttgatgccgctgtggcgaagtttgagcaggactggcagggagcgtttggcagaacgtcgatttaaccggacgttctgcatcctcataaattgctcacaccccggattacgcatcagtttcatttcgcgaaactgacaggtcatcgcatcgtacatgacgattttcccgctggccggtttgccataacctgccagcattttgatcgcttccattgcctgcaacgaaccaattacgccgatcaacggtgccattacgcctgcttccacgcaggttaatgcattttcaccaaacaaacggctaaggcagcgatagcacggttcaccgtcctgataagtaaagacggtgatttgaccttccatacgaattgccgcgccggaaaccagcggtaccttcgcggcaaaacagcctgcgttcagttgattacgtaccgcaacgttatccgtacagtcgagcaccagatcgtgttcagcaatcaatgctgcaagttctgcgtcatccagcagtgcattgacttcattcagcaccacaaatgctttgatggcttcatcgcgaatcgaatctttaatacccacaaccacgatgtcctgaattttcgggtgcgcggcgataatattttccagctccacgcaggagacattctcgccgccacgtttaatcatattgcagcggcgatcgacgaaataaaaaaagtcctcttcgtcgcggtatccggtatcgccggtatgcagccagccatcggcttccagcactttcgcagtggcttgtgggttgagaaagtactctttgaagatggttttcccaggtatgcctttaatgcagatttcaccgatctcaccagccgggagcgggcgattgtgatcgtcgcggatctccgcttcgtagcaaaaccccacccgaccaatcgacggccagcgtcgtttatcgccaggacgatcgccgataatgcccacaatggtttccgtcatcccataagacgtcagcaagcgaacgccgaagcgttcacaaaacgcatctttttcctgctccgacaagttgagataaaacatcacttcccgcaggcggtgttgctgatcgttcgctgaaggcggctgtaccatcaacgtacggatcatcatcggaatacattcggtaacggtggcgcggtacttctgtacctgccgcaatattattttttgatatgttgaaaggcggatgcaaatccgcacacaacatttcaaaagacaggattgggtaaatggcaaaggtatcgctggccgatcatgatcgacgttgttactacctgatggcgacccgggggctgaaaaaaccacgcggtcgccgagcagcagctcatgcgtcagtgactctagaggatccctgcctgattgcgctgcgcttatcaggcctactgggtgagtggcaatatgttgaatttgcatgatcttgtaggccgtgataaggcgtttacgccgcatccggcatgaaacgatgagcaattctcccagccattcaacagctcgacccccgttctctattacgacaaagacgccggtccatggcgaagttcctcgatttcctctgcgaagccacaaaacgctgcgcgagtgcatcaaaaaccgtgattggccattaggattgcttattttattgtggagcttatagaaccactcagccgtttttcgcttcaggcgtccatcagttgagcggtcagatcttttagcaagaaccatatcagcacctgcttgccatttttcaataagatgaggaataacctcaatcgggtcttgcaggtcaacatcaattgggattatcgcatccccggttgcatggtctaaccctgcaaacaatgctggttctttaccaaagttgcgtgtaaatgacagcggaacaactagaggatctgaaacagccagagcattaatgattgactccgtagcgtctttgctgccgtcatttatgaaaacgatttccacttcatatgacttcaattcttcgaattcacgtaccgttttataaaaaattggtatcgcttcttcttcattgaagacaggaactacaagagatatcttcatttcgcatccaacgcctaaacgcgtgctctgctcgtccgttgcttcctggcgcgaaatgacttcactgaacagctggcgagtgttgaagtggggaactacgccgtgaaaaacaggaaaatgaaacccaggacgaaaccctgactcgctcaattccattttgacttgttgctcaatggggcgaataacatcggttaacacccggcaaagggtggattcaagctcggcaaaacgcagcgtaaagtcgcgactgatggtgttctgcgccgtctgtaacagtgtctcacagcgggtacgaatctcgcttaacggctccgaatcatcctgaaacaaggcggctaactgcaccttcagcgcatcttgctgttgacgcagaaagtggttggcggaggtcagggccagctcgatttcatgtttaatctcgccgctcacctgcgcctgattgagttgcaatagctgcaaactttcttcgatctggtggatattttgccgcaattgttcacaagcgacgtttaacccgtgcgcacgaaaatccaggtattcccgcgcctgctgcgcgtaattcaacagtttatgcgcggcagatcgcagagcatacaacgaggcgttagcgtaagcggcatgaagcaaagcctgaattgggttggggaacacaggtgagtcgctggacaacaccgacgccgttgtctggatgaccaccggcaccacacatgtggcccgcgccgaagagtggccgattatgccgaccgaagtgggtacatactctgctgaaaccatggaacttctttgacgaaacgccaacgctaggggcgcgtacacagcgaccgacttagtttcacaccaaccgtccagccagtcggggccaaaatcacggcccgttcctgactgcttcatcccaccaaacggtaagttagcgtcaattaaggtatggctgtttacccacaccgtccctgcctgtaagcgatcgctatattccagagcctgggagagattttgcgtccagacactggcagttaagccatattccgtgtcgtttgccagttgtaacgcctcttctccatccgctactcgcaccaggtttaccaccggaccaaacacctcttcacgagttaagcgcaatttagcatcgggatttaccaccagcgttggcgcaacataatacccctctccggctggtccattcgacccgcgaatcagctctgcttgctgtgcctgcgcatcgtcggaggaatgaacacatttgtcgcagtgcgcacgagaaaccaaagggttaatctgtgcaacaggtgacatccccggtcccacttgcaacgattttaccgcctgctcaaatccactaaccagcgtgtcaaacaacggcgcttcaatataaattcgcgaactggcggcgcatacttgcccttgattcaggaagcttccggtcatcaagccttcaataacccattgcggatcagcatcttttaatacaattgccgggtttttaccgaccagttccagcgttacacgcgttaagtgatcagcagcagttctggcaataccttttcccgtcgcggttgaaccggtaaaactgattttcgcaacatgaggatgtgacgtcagggccgcgccgcatacagcacctgacccggtgacgacattgaaaacgccatcagggataccagcctcgctgggcagttccgccacgcgcaacatcgtcggcccccccggttccctcacgtggtaccggcctttcccctgggaagttctccgcgtggtttttgtgccggggtagaccgcgctatcagcattgttgaaaacgcgctggccatttacggcgcaccgatatatgtccgtcacgaagtggtacataaccgctatgtggtcgatagcttgcgtgagcgtggggctatctttattgagcagattagcgaagtaccggacggcgcgatcctgattttctccgcacacggtgtttctcaggcggtacgtaacgaagcaaaaagtcgcgatttgacggtgtttgatgccacctgtccgctggtgaccaaagtgcatatggaagtcgcccgcgccagtcgccgtggcgaagaatctattctcatcggtcacgccgggcacccggaagtggaagggacaatgggccagtacagtaacccggaagggggaatgtatctggtcgaatcgccggacgatgtgtggaaactgacggtcaaaaacgaagagaagctctcctttatgacccagatcacgctgtcggtggatgacacgtctgatgtgatcgacgcgctgcgtaagcgcttcccaaaattggcggtccgcgcaagatgactctggtaggcctaataacggcagaacgggtccgccctgtgcaatgccgaactgctgctgcgctggcaggatggtaactcggttaccgaagaggatatccacgcgctggcaggatggctgaaaaatgcccatgctgaccgtgaaattgcctaccgcccggcaagggtgctgatgcaggactttaccggcgtacctgccgttgttgatctggcggcaatgcgcgaagcggttaaacgcctcggcggcgatacggtcgacctggtcattgaccactcggtgaccgtcgatcgtttttgggtatatgtattctcgctcggtatttgtctggtttgtggttggtggcttttttggggacggtttatattttgctattagtaaaatcttcgcctcaaatccaccttgttccgcattcccaaattcaacattcatgccatgcaatttggcgattcgctggacaatcgatagcccaagcccgctgccggtagcggtttgtccgggtgggcgatagaagcgttcgccaattcgcgccagtgcctctggtgtcacaccggggccgttatccctcacgatgaaattatcagcattcagcgtgacgtctaccacgcaggcgatcgtgtaagacttcagaggttcacgctgcgggctatggcaatacgtggaaggtgagtactggctatccaggtggatcaagcgggcgtttgttatcgctacgggaaaactctgtcgcatgttcacaccatgcaacggcgcggttttccagtgtccatgaagtgtcgagcactgacatgttgatgcagacaggttatctggcgtgacatcgacaaaggcgtccagctcctggctgctctccaggtcagaaaggagataaatgtagtcgcgcccaagcttaccccatgaagccaggagcgggttgccgacatcctgttcaccatcgctgttaaagagctgtccggcattttcgctatcacgaaatagcggcaagtcgcgatcttcaaaactgtgtcgacgctgacgggtcagcagtttcgccagataagcaggatcttgaatatcgccccagtaataacggcaggggttggtaaacaggagatggatttcaatatgtttacccagcgcctgtagcgcctggagataaacaggcggtaacgcggaaataccgcatataaagacgcgcgaaggtaaccccggcgggcaggtcgtcgcggactccagcgtttcgataaagcgctgatagagattggcgcggtgccagcgcggttgcccgagttgatgggtatattccaccagcgccttccacaacggggcttgccaggcctgtgcttctcccagcccttcaaccaaatgtcctgtttcccacccgcggtgcaccgccgtcatctgcccgaagcggtcatggtcataacgggttacataaccggaacagtcggtgaagctcagcaactgaccgtaacggctccacgtcatggttttccggctgccggtggcatcttccgttgcgcagggtaagtcactgtgtggattatcataacggtagcgggtgatatcgccgtcaggggcagtttcctgaatcagacggcccaattcatcatattcccggcgcaattccaacccgtcaggcccggtggctgacgttaactggttgtggtggttatagtaaaacgccgatgccctgccatccggcgtggttatgcgcgtgatgaggcccgtcaccacatccgggctgtactctgttgtcctgcctgcggcatccgtctgtgccctgagcctgcccacggcgtcaaactgactctgcgtgacgctgccgtccgcgtgtttctttttcaccacccgcttcagaccggcttcaccctgcgtgtgcagcactttattgtgggccaagctgtcagtgatggtgatgcagtctttctcatactgatacgagtatcttaagcctgcccggtttacatgttctgtcacccgctgcgaagctagtttacgacgataaaggtttttgtgccgatatcgtaaatcgtgggtgatggtttgatacaacgcatcataaacgcgcccgtaatcgcccatctccggcttcatctcttctctgaccgtcacgccctcgtcattgacatactccagcacaccgaccgaatcatccgctgcgaatcccggttcgcccggcataatattagccttcaggctggtttcctgctggtcgataccgtatttaataaacgaacctttcttaccgtgaacgataaatttcggataatcgattttcaccagatggctggttttgacgatggctttcaggtcgccataaaacagttgcgcttcaaaggtgtcgtcaggattggctttattacgcaggctgcggatgtcataagcgacgtgatccgggcgaccgaacagagaaataatctggtccatcgtatgcacaccaagggcataaaacgcgccatcctgcggcagcccaggtttggtttcaggtcgccccgaggctttatcgacaacttcaccatcgccatgcttgatacagagttgcattaattgatattgcgcgaccagcaaactttccagctctcgatccacttcttgtttgatcgatcgcggagaaaagagcaaatccgccataatcgcacacacaataccgataacgatctcgctacaacgttcgacggcaaactgcggcgtaagcaatggttccggctgaatggtgatcacaatgatcagcgcggtataaccggccagcccccacgcatacgagttttctattcgtaccagcgaggatatccaggtacaaaaaccggcccagatacagcacaccagaatcatcaataatggtgcgcggatcatcgcaatgatgatcaccagtccggcaatacagccaataaatgtgccgatgatgcgcaaaaagccacgatagcgaatagcgccagaatacggttcacctcccgcagcaaaggccggaccggcggcaacaatcgccgctgtcagtaccgcccagcgatggcgtttccaggtgaaggaacgaatcctggctttcgtcgcgatctgtttgccagtgaccaccactgtagcagtggtgcccgcaggccagatgttctcttgctggttgtcgagacgatatacgtaacacggaacacagttgcgcaagacgcacgccat

SEQ ID NO: 144344 - DNA, 2488 bp, Homo sapiens
atgagccgattaaccgcaatcatctgcgctgtcgttatctgcctgctggtttccatggcctgggccattaaccactaccgcgacaacgccatcacctacaaagaccagcgcgacaaagccaccaaaagtctccgcctggctaacgacaccatcaaagacatgcagacccgtcagcgtgatgtcgctgcactggatgccaaatacaccggagaactggctgatgcgaaagatgccgtcctgcgtcgcgaaatgcgtcagatggaaggtgcatggctggggagcgatctggtcgatcagggtaaggagcgtctgaatcgtctgggcttctttgaaactgtcgataccgatacccaacgtgttcgggtagcccggaccaggttgatgtcgtctacaagatgcgtaagcctcggtggacgtctcttctataatgacttccaggcagatgacgcagacctgtccgactataccaacaagaagatcgaaattatcgacagccatgccgattacttccacatcgatatcatggacggtcactttgtccccaatctgacactctcaccgttcttcgtaagtcaggttaaaaaactggcaactaaaccgctcgactgtcatctgatggtgacgcggccgcaggattacattgctcaactggcgcgtgcgggagcagatttcatcactctgcatccggaaaccatcaacggccaggcgttccgcctgattgatgaaatccgccgtcatgacatgaaagtggggctgatccttaacccggagacgccagttgaggccatgaaatactatatccataaggccgataaaattacggtcatgactgtcgatcccggctttgccggacaaccgttcattcctgaaatgctggataaacttgccgaactgaaggcatggcgtgaacgagaaggtctggagtacgaaattgaggtggacggttcctgcaaccaagcaacttacgaaaaactgatggcggcaggggcggatgtctttatcgtcggcacttccggcctgtttaatcatgcggaaaatatcgacgaagcatggagagttatgaccgcgcagattctggctgcaaaaagcgagcaatggggccaacaggtgtatgccattgtacaaaataccgaccaggcgcaggcagttatgccttatggtccaaaatgtctttatgttcttgcgcaaaacgacgcgctgcaacgcactgaaaattacgccgaaagcattgctgccctgctgaaagataaacaccccgctatgttgctgttggccgcgacgaaacgtgtcctcttcgcaatcgtggacacgtacgtgacgacgaatgccagtctagctgggatcgcactgaactccatggacttgagcccgggaggcagagtggccgtgaaagaaagcaatcagcgatggtgctctgacgggttcgagttctgctgtgataacggagagagactgcgtgtcacgttcgcgctggactgctgtgatcgtgaggcactgcactgggcggtcactaccggcggcttcaacagtgaaacagtacaggacgtcatgctgggagcggtggaaacgccgcttcggcaacgatcttccgtcgtctccagtggagtggctgacggataatggttcatgctaccgggctaatgaaacacgccagttcgcccggatgttgggacttgaaccgaagaacacggcggtgcggagtccggagagtaacggaatagcagagagcttcgtgaaaacgataaagcgtgactacatcagtatcatgcccaaaccagacgggttaacggcagcaaagaaccttgcagaggcgttcgagcattataacgaatggcatccgcatagtgcgctgggttatcgctcgccacgggaatatctgcggcagcgggcttgtaatgggcgcgccggagttttatccagcgggactctagagatccccgataccgagctccgattcgaatccatccgctgcccggtgcaaatcatctccgccagtgataatctgctggtgccaacagcatgttccagtgaacttcatgccgccctgcccgatagccagaaaatggtgatgccctatgccggacacgcctgcaacgtgaccgatcccgaaacgtttaatgctctgttactcaacgggcttgccagcctgttacatcaccgtgaagccgccctcaccctgttcaccgatgcccgcactcacaacggctggcgggagacacccgtcagcgatgagacgttacgggagatttatgccctgatgaaatgggggccgacatcagctaactgttctccggcacggatcgtgtttacccgcacggcagaaggaaaagaacgtctgcgcccggcactttccagcggcaatctgcaaaaaaccctgaccgcgcccgtcaccgctatcgtcgcctgggacagtgaattttatgaacggttaccactactgtttccccacggtgatgcccgcagttggtttacctccagcccacaactg

SEQ ID NO: 144345 - DNA, 2427 bp, Homo sapiens
  misc_feature (1)...(2427): n = a,t,c or g
ttaacatcctttacccaatgtggtcgactttttcttcaggtcgatcacccccactttcgtgctgtaccaccacacctcgtagctgacgtcttcctgcatctgcttgagcgcgacccgttctccgctgaatgccttgcctgcgctcatgtttaccgcttttacgctcagctttccgctgatatcggctttcgtgaccatcactgcttcatcgtattccgggggcgttgtgttgccgctgtactgccgcgctgacggctgataccgcgagcccggtaccgccatatccagcgcctcgtgcgggcgtttaaggttatagaccgtccgccagtggtcgaaggcgagctgcagttgaacgctgtccncccctttcccaaaatgttggaaaccatcctgcatagtgagcaggcgaagtttgttgatccgaatttgcttgtgggtaatgaaacccgcgacgatgcggcggtgtacgatctgggcaatggcaccagcgttatcagtaccaccgacttctttatgccgatcgttgataatcctttcgattttggccgcattgcggcgactaacgccatcagcgatatcttcgcgatggggggcaaaccgattatggcgattgcgatcctcggctggccgattaacaaactttccccagaaattgcccgcgaagtgaccgaaggtggacgctatgcatgtcgtcaggcgggtattgcgctggctggcggtcactccatcgatgcgccggagccgatttttggtctggcggtaacggggatcgtaccgaccgagcgggtgaagaaaaacagtaccgcacaagccggatgcaaactgttcctgacgaaaccgctggggatcggcgttcttaccacggtgcgtcgacttaacgccctcaaacgcgctgactttagtcaccatgcggatcgcatccgctgcccggtgcaaatcatctgcgccagtgatgatctgctggtgccaacagcatgttccagtgaacttcatgccgccctgcccgatagccagaaaatggtgatgccctatggcggacacgcctttatcgcccactgtcagggcgtggtactgctgggcgtcgaggcgaaacgtctgctccattcctccgctttgcggtttgaagcttgcctcatagcgtatactggtgcctgccggagtcacttcctgctggcgcgaacggcgatcgttaatcggtttttcccgcttgttgctcaccaccaccagcttttgctggagcggagccatatcattatcagctttttcccgtcgcgccacgccatcaattggttgcagcgcaggcgttaacgccacagcactttttacgcctttttcacactcagcgagggtggattcactaatgccgtagatgccataaacagtacgctcttcaccggtaggcccctgtttaaaatctttcagccagtcagcataacgcgccagactgcgctgtaccgggatctgtaacttgttgtagcacttgatatagacatccattttttcgtcgaaaaccgcttgttcatcgaccaccggttgcgcacgtgtttcaggtttagcttctgcttttgcaacaggagcttcagtaggtttcgcttcaggagctggtgcggcaggttgactattggcaggcgggagcgtttctgtttcggcttttttatcatcacaacccgtcagaccgagggagcgagtctgcctgcaggtccagtggcaggcaagtgatattgactggagccagagcgcgccacttgctgaactggtcggcattcgcgtaccgccgcaaacagaacgtaagcacatcattatcgataacgattcgccggacgcattgccgagctggcggaacatctgaagaaagccctgaactgaagccaggcgcaggcagttatgccttatggtccaaaatgtctttatgttcttgcgcaaaacgacgcgctgcaacgcaccttgcacccggtgttcagggaatggcgccataaatgatatgctgaagggcccgttcttcaaatgcacatcatcggccaaacgatcgaaagtcaccgagtggtcaatgaccaggtcgaccggtgagagcgggttaacctttgcagtatcgccgccgaggcgtttaaccgcttcgcgcattgccgccagatcaacaacggcaggtacgccggtaaagtcctgcatcagcacccttgccgggcggtaggcaatttcacggtcagcatgggcatttttcagccatcctgccagcgcgtggatatcctcttcggtaaccgagttaccatcctgccagcgcagcaggttttcgagcaaaactttgagtgacttgggtagacgggtgatatcgcccagtgatttagcagcaagcggcaggctgtagtagtggtaagttttatctttggcctgcaacgtgtccttactggcttctcgtagggttgacgacat

SEQ ID NO: 144346 - DNA, 753 bp, Homo sapiens
ttagcggtattgcttcagcaccgcacgacccagcgtcaggatctgcatttcgtcagatcccccggagacgcggtctacacgcagatcacgccagaagcggctgatgcggtggttgcccgcaatcccgacaccgcccagcacctgcattgcgctatccacaacttcaaatgccgcattggcgcagaagtatttgcacatcgctgcatcgccagaggtgatggtgccgttgtctgctttccacgctgcttcatacagcatgtttttcatggagtttaatttgatcgccatgtgggcgaatttttcctgaatcaactggaaacgaccaatagcctcgccaaactgcacgcgctgattggcgtagcgcgccgcatcttcaaaggcgcacatcgccgtaccgtagttggtgagggctaccaggaaacgttcatggtcgaactcttctttgacgcggttaaagccgttacccggcccgccagagaaaaaggcatacaccgcaaaggccatcactaccagccagatccccatatccgggattagccccaaaagcgccagcgccagcgtcatcatggcaaagctgccaatcaacaatggacgccgtccggcagtgtttaaccacagcatcggcggaatacagccgagcataaagaacaggctaatcaccacattccctagtgccgcgtttttgccaacccccaatcccaacaaaccaacgatttgcgggccaaaggtgtaaatggcgaacattgggatcac

SEQ ID NO: 144347 - DNA, 438 bp, Homo sapiens
gttcagttcagacatggaaaactccccagttttgcagcgatgccagtgcctgctgttcgagttgttgatgatgtgcaatggcctgtggtggacaatgcaacggcatttgcagcgccgaaacgggaagttgcgccagttgataatgctcaagcacctgatgcgccagcgtcccgcgttctcgtggtggtagccaggccatcgccgcgcgtaaatcgggcagggcgttaataaaatcggcttcactcagttgatttaaatgactgctgaaaccggcgataaatgccggctgacaggccagttgatggcgggccagcgccagcaaaccgtgcagcgcctcaccagattgtgccggggataactgcgccagcatcgtcagcgccgcttcggcactggcgttgggatgttccaaacgcattagtgcgccaagaaccgcgccgc

SEQ ID NO: 144348 - DNA, 1873 bp, Homo sapiens
cctccgcttccagcgtgtcgatggcttcaactactgctgggtaacgcgccagcacgtctgccgggatctctggcaggctgatgctttcagcaataatgcggtttttcacgtagcgttcgaaaacttcagacaatccctgaacgcgtgcttcgttgcgggtattacctgcggacataccgttggagacgtacaggttaccaatgatattcatcggaatataaacggtctgattgtcggactgacgcgtaaacggcaggccgcaaataccacgatcttcgttaccggattgtaggtcaatcagcatgctgccggtcagttcattctccggatcataaaacgcgcgcagacggtcatcgagcagcccttctggcacatcgtcattttcggtcagtgggaaccatttttcgttgggataatgcacgaacggaccgttggcgatggtttcgcccagccagaagtccgcaaaaaagtagttggttgagagacgctcgaaatattcaccgagtgcagaagccagcgccgctttcttggttgcgcctttaccgttggtaaaacacagtgcgcactctttgtcgcgaatatgtacagacccagaagttaagcaccgggattcacgcaggaagcgcttttcaatcttgtagttggaggggacattaagaagatcgcgaaaatccttctcggcttcctctgcaacctgaatgaactctttgccacggtgactcacttccatcaccgacgtaccaagaccgttccagtcgcgcagttcctgttgagcctgtttaagcacctctgccggtagcattgccggaccagaacgccgcccgcacagtccccttgccctcatggagccagggcgggatgggggcagcactgtcctctggtgccagcagtcagcacattggaagtatctgcaaggggcgtccctcgtgtcctctggctgtggagaggtcaggagacagtagaagtgttcgtggaggccggctggcagcagcaagcggaggcgtggggggcacagccacgagctgctgtccacggtgtctgtggtaagggcagcagcagagataggcaggcagtggtgaccattatgaggcgtcaaggaagtgactgttgaactgggcctgggcaaacgcactgaggcttgacccagcagtgtcttagagacttgtgagcgggtcagtttgaccagggctggacatttgaagggcatgtggaaggagacgaggaagagaagtggggagtctgtaaaaatactggcgaggtacacgtagcgaggaaggcaggacttcttggcgtcagtcatagacttacttatttcagcaaagttacttccctctctgggctgtagttttctcattagctgctggatccagccatggctgaagctagcccagtccaacacttttacattttgggagccagcaccttctcctttttgttgaagccagtctctcttgtttgtgactgggccaccttgttgagccgattgcctgaatgggcctgtgcagcagggaccggagctcaggccctgggcactcaatgctgtggccttagaagtgtgaaggccatcaggcttgggaaggctcccagcaagcctcagaccttgcaggggactgagggtgattgactgcaccgtccatggtctggatgatgcatccggtgattggtccttattgtacaactgacgattcgacagcacaacaggaccatatggggaagcaccggagtcagtcagggggtggaaggagctggggcatggactcccctcttcagagagcccccgtcctgtctgcagagccatcaagaggaccctcgccgagggaagctgcctgccgctggtgataaccagaatcggtcgtggggaggaggtggccat

SEQ ID NO: 144349 - DNA, 1374 bp, Homo sapiens
atggattttaatttaaatgatgagcaggaactgtttgtcgccggtatccgcgaactgatggccagcgaaaactgggaggcctattttgccgagtgcgaccgtgacagcgtctacccggaacgttttgtcaaagcactggcggatatgggtatcgacagtctgctgatccctgaagagcacggtggtctggacgcggggtttgttactctcgccgccgtgtggatggagctgggacgtctgggggcaccaacctatgtgctgtaccagttgccgggcgggttcaacaccttcctgcgcgaaggcacacaagagcagatcgacaaaattatggctttccgcggcaccggtaagcagatgtggaactcagcgattaccgaaccgggcgcgggctccgacgtgggtagcctgaaaacgacttatacccgtagaaatggtaagatttatcttaatggtagtaagtgttttattaccagcagcgcctacaccccgtacatcgtggtgatggcgcgcgacggggcttctccggacaaacctgtctacaccgaatggtttgttgatatgagcaaaccgggcatcaaagtgaccaaacttgaaaagctcggtctgcgtatggatagctgctgtgaaatcacctttgacgacgtggaactggacgagaaagacatgttcggtcgggaaggtaacggctttaaccgcgtcaaagaagagttcgaccatgaacgtttcctggtagccctcaccaactacggtacggcgatatgcggcgcgtacgccaatcagcgcgtgcagtttggcgaggctattggtcgtttccagttgattcaggaaaaattcgcccacatggcgatcaaattaaactccatgaaaaacatgctgtatgaagcagcgtggaaagcagacaacggcaccatcacctctggcgatgcagcgatgtgcaaatacttctgcgccaatgcggcatttgaagttgtggatagcgcaatgcaggtgctgggcggtgtcgggattgcgggcaaccaccgcatcagccgcttctggcgtgatctgcgtgtagaccgcgtctccgggggatctgacgaaatgcagatcctgacgctgggtcgcctacgggagcacgaatgtaggccggataaagcgtttacgccgcatccggcagtcatgcgctacataaatttttcaggagcaaataatggatcatctacccatgccgaaattcggccgttggccggattgcgcgttgtcttctccggtatcgaaatcgccggaccgtttgccgggcaaatgttcgcaggccccagtatcatcccaatgtatcgaaaatgggccattggcaaccagggaaagatgaacgtgatgatgttcacaatttgctga

SEQ ID NO: 144350 - DNA, 3378 bp, Homo sapiens; identical to SEQ ID NO: 142896

SEQ ID NO: 144351 - DNA, 3132 bp, Homo sapiens; identical to SEQ ID NO: 129248

SEQ ID NO: 144352 - DNA, 3981 bp, Homo sapiens
ttattcgatgcgttcccacggaataaggttatccataagaacagccagtaaaatcccgaccaataagccgttactgagcagaggacgaagcgttaatggaaggtcttgcagatacacaggcggtaatgccattaaaaatatgccgacaaataacggcaatgcgagtcgataaatattgcgagcggtaaacgttatttgctggctaaacaccagcgcggaaaagagtaaaggcagataagaaaccagcatgaccgcactactcacgggtaaagggatactgcaaaacagtcgcgtgagtgcaggaaccagcgccaccagcaggcaaataacgctgccataaataaacgaacgccgcgtgtaatcgccagtctgggttaataaaccaatggatgaaacaaacggtgaaaatggaattaccgccagcggtacggttatcagcgtcataaatccggtcgccacaaagctacgacgataacgcgtattccctgcgccctgctgcggataaaaaacatccgtgccccgaatcgcaccgtaggtattgctgatatttaccagacctgtaatcaccgccgtcagaataattcccggcgacaaagcaccgccactgccgagcgggaaccactgccagtgcaactcaccggagagcgagtgcgaagaaggaaagcaaaagtaccacaacaaccagccggttatggtgccgaccagcaggccataacgggctaaacgttgcggcaggaagataatcatcgccagtaccaggcacatcaccgccaccgagagcgcgaacggcggtaactgaattttaaaattcgggtcggctatgccaaacggcagcccgagcatacctttgaaaaagatagtggtcagctgcgcgcccagcatcaacataaacaagaccatcaccgacggcgtaaataaccgtgccaggcgatggcctaatccgctaaaaccaatcaacatcgtcagcacgccggagagtgcaatccccactgccaggctggtggcgatatcgttgatcggtgtcccgcgcgatgcttcaccaagggtgatagtaaggatggttccccaccacaggccacctggcccttccataatagcgcgacgatgaccgcataacgcctgagcgaagcaggccagtgcggtagcaagaaaagcatattgcgtgagcgtaagcaggctactttgcggcaacataagttctcccacggctgggcttacggtcatggcggcacggcgctgcatggcaaacatttgctgtgggcggtgacgaccggcggcggggaaagccattttgaaattggtgcgcatccgggctttgatgtgctgtcgcagccggtctgctggaatggcaggaggcccatcatggatagccatacgctgattcaggcgctgatttatctcggttcggcagcgctgattgtacccattgcggtacgtcttggtctgggatcggtacttggctacctgatcgccggctgcattattggcccgtgggggctgcgactggtgaccgatgccgaatctattctgcactttgccgagattggggtggtgctgatgctgtttattatcggcctcgaactcgatccacaaaggctgtggaagctgcgtgcggcagtgttcggttgggctgcgctggcaggtcgcggaattgatcggcatgacgctggcgctctcctctacggcgattgccatgcaggcgatgaatgaacgcaatctgatggtgacgccaaatgggtcgcagtggccttgcggggctgctgttccccgatattgcggggaaacggcggtggggaggattcgatcctgcaaaatctggcgcagcgtttgctcggtttgctgtggctgaaaaccacgcaaaccgtcattgccgcccagttcaaccagcacccaacgcggctgatgctgtttcagcagagccggaaggcgcgccagtccttgttgcgaggtgtcgccgctgatgctggcattaactaccgacgttttactctgccacttatcattcaacaaggcaggccaggccgcgctggcagacattcgatacccggcgctcaggctatcacccagaatcaataacgtgtccgcacaccacacgaagacaaccaaaacacacgaacacacagacaacacaagaacgccaccgaccgagcaacaacaaacactaacaccaagccacaacaaaccatccatcagcacggcagcgcggtgcaaaatcgctgcgcgttcagccggaggcgtggcaaaccagattggcgcgttattaaccgcactttccagcgcctgttctacttcacgcggcgtggcttcacgcacatagcccacaatatctttcggttccgcagggttaataacgggcgacatctcacctgccgctaccggttgttccagcattggcaaggcctgccatttttgcagtgcactattgagcagggcagaggagagcgaggccaggcggtgttcgttagcgagatccagccctgccgagttgtcgcgcccgtgaccgtaaagatcgcgcggcaggggaattttcggatgcggtaatccagtttgcccttcctgttgcgccagtttttctacagcagtgaccggatcggcgaccagttcatccagtggcaaagaggtgtcggcaatacggttaacaaacgaggtgttagcaccgttttccagcaggcgacgcaccagatacgccaacagcgtttcatgtgtgccaaccggagcataaatacgacacggacggttaagtttgccgtcggcaactttcccggtgacctgctcatacagtggctcgcccataccatgcaggcactggaactcgtactgacccgggtagtagttctgccccgccagttgataaatcgccgccagcgtatgggcgttgtgcgtcgcgaactgcgggtagattagattcggcaccgccagcagctttttcgcacaggcgagataagaaacgtcggtatacaccttgcgggtataaaccggataaccttcaaggccgtccatctgcgcacgcttaatttcactatcccagtacgcgcctttcaccaggcgaatcatcagacggcgacggctgcgggtggcgagatcaatcaggtaatcgatcaccaacgggcagcgtttttgataagcctgaataacaaaaccgatgccgttccagcctgccagttccggctcgaaacagagtttttccagcagatcgagggagatctccaggcgatcggactcttcggcgtcaatgttgataccaatatcgtactgacgcgccagcagggtgagtgatttcagacgcgggtaaagctcttccattacccggtcatactgggcgcggctataacgcggatgcagcgccgacagtttgattgaaatgcccggcccttcatagatgccacgaccgttagacgctttaccgatggcgtgaatcgcctgctgataggaaaccatatacgcctgtgcatctgaaattctcataaggatcccgtcgctgcttacaaagtggttgttttccgccagcgcctgccagcgtctgtcactcgccttgagcggagcaggaaaccattctggatgctgttttatctgctcccggttgtgctggcgtagcgcccttttgctttcggcattgccttccacaatatagctggcctgctttttcagatgagtttggtactgttttaataaacgcgcacggttttgcatccgctggcgggcggcgtagctgaaagagatatgtgatgtggtggcgccccgtgctgtctctcgggcccctgaggtctctctgcagtccccttccttgtcccccttctcgggcccccagttttggtgggtcccctcttggctgttggcccgtttttccggtaatcggtaccgcccatccgctttagggcctctggaacgtttgggccaactcacggttctccccgtgaaccattcgtgaacccctggccccactgatctcagctcgttacttcccagcgttctggtgaccat

SEQ ID NO: 144353 - DNA, 554 bp, Homo sapiens; identical to SEQ ID NO: 139891

SEQ ID NO: 144354 - DNA, 3670 bp, Homo sapiens
atggggatcgtcaacgccgggcaactggcgatttacgacgacctacccgctgaactgcgcgacgcggtggaagatgtgattcttaatcgtcgcgacgatggcaccgagcgtttactggagcttgccgagaaatatcgcggcagcaaaaccgacgacaccgccaacgcccagcaggcggagtggcgctcgtgggaagtgaataaacgtctggaatactcgctggtcaaaggcattaccgagtttatcgagcaggataccgaagaagcccgccagcaggctacgcgcccgattgaagtgattgaaggcccgttgatggacggcatgaatgtggtcggcgacctgtttggcgaagggaaaatgttcctgccacaggtggtcaaatcggcgcgcgtcatgaaacagggcaaagagcagggcaaaaccaacggcaagatggtgatcgccaccgtgaagggcgacgtccacgacatcggtaaaaatatcgttggtgtggtgctgcaatgtaacaactacgaaattgtcgatctcggcgttatggtgcctgcggagaaaatttctcgctcaaaggccactgccgagcgggaaccactgccagtgcaactcaccggagagcgagtgcgaagaaggaaagcaaaagtaccacaacaaccagccggttatggtgccgaccagcaggccataacgggcaaaacgttgcggcaggaagataatcatcgccagtaccaggcacatcaccgccaccgagagcgcgaacggcgcccgagcatacctttgaaaaagatagtggtcagctgcgcgcccagcatcaacataaacaagaccatcaccgacggcgtaaataaccgtgccaggcgatggcctaatccgctaaaaccaatcaacatcgtcagcacgccggagagtgcaatccccactgccaggctggtggcgatatcgttgatcggtgtcccgcgcgatgcttcaccaagggtgataatccttctcggcttcctctgcaacctgaatgaactctttgccacggtgactcacttccatcaccgacgtaccaagaccgttccagtcgcgcagttcctgttgagcctgtttaagcacctctgccggttcaagacgatatttcctagcttccacataacattgaaaaacgccactgagcactacagctatctcaatagcctacgactggtggcggcaaacagctatacgtcagtggcttttcctgcaatcagtactggggtttatggttaccctcgtgcggcagcggctgaaatcgcagtaaaaaccgtttcagaatttattacccgtcacgctttacccgaacagatgtcatggcataagacccgtggtagaggacgtgccgatgatttcgcctgctactggtatgccaaatcggatatactatgtgacatgtgctctaaagcgcagcacgatcaactgtatcagctgtcgtcatcaggcgtgaccaaagtctcagcattacctgactcgctcaccacgccgttagggagtttgtggaaactgtatgtttacgcctggctggaggatacccatcaaccggagcagccctaccagtgtcgcggaaactccccggaagaggtttattgttgtcaggctggggagagcataacgcgcgataccgcgctggtacgttcctgtgggctctattttgcgccgcagcggttgcatattggcgcagatgtgtgggggcaatactggcaacagcgtcaggcacctgcgtggttagcgtctctgactacgctgaagccagaaacctcggtaacggttaaatcgctgcttgattcattagcgacgttacccgcgcaaaacaaagctcaggaagtcttactggatgtggtgctggacgaggcgaaaatcggtgtcgcatccatgctcggtagtcgggtacgggtgaaaacctggagctggtttgccgatgataaacaggaaatccgtcagggtggttttgctggctggttaaccgatggtctggttgcccgtttcctcgggagtttgctcatcgcgccccgcgtcagcgatccttcccgcctgatttccgccttgcgcgtgctggcactgctgacacttctctttgctgtcgccttctgggcgggggcgcacgtagcgtggctgatgctggtgatgattggctttaaccctctttttctcaccactgtgcgactgtggggctcggtggcgtttgtcattggctcggcgctgacgggcaaactggtcactatgtttgattatcgggtgatcctcgcgctgttgacgttgggcgtggcatccatgctgctcggctttctcatccgtccgacgattcagccacaaggggcaagtcgccagcaggagagcaccggcctgtaccgccagtacgacatgttcgcaaagtgtgccttcaatacaatcacaacgggcgaaacgaatactgctgcgggaataaaaacgcacatcgctcatcggccattgcacatcatcaacaactcgaacagcaggcactggcatcgctgcaaaactggggagttttccatgtctgaactgaacgatcttctgaccacccgtgagctacaacgctggcgattaattcttggcgaagcggcagaaacgacgctttgtgggctggatgacaacgcccggcagatagaccacgcgctggagtggctgtatgggcgcgatcctgaacggctccagcgtggtgaacgttccggtggattaggtggctcaaatctcaccacccctgagtggatcaacagtattcacacgctgtttccgcagcaggtgattgagcggctggaaagcgatgccgtgctgcgctacggcattgaagatgtggtgacgaatctcgacgtgctggaacgtatgcagccttctgaaagcctgctacgcgctgttttgcacaccaaacatctgatgaaccccgaagtactggctgccgcccgccggatagtgtgccaggttgttgaagaaattatggctcgactggcgaaagaagttcggcaggctttttctggtgtccgcgatcggcggcgccggtcatttattccactggcgcgaaactttgatttcaaaagtactttgcgcgccaacctgcaacactggcacccgcaacacgcgaacaagggcgcgcgacggggcttctccggacaaacctgtctacaccgaatggtgtgtagatatgagcaaaccgggcatcaaagtgaccaaacttgaaaagctcggtctgcgtatggatagctgctgtgaaatcacctttgacgacgtggaactggacgagaaagacatgttcggtcgggaaggtaacggctttaaccgcgtcaaagaagagttcgaccatgaacgtttcctggtagccctcaccaactacggtacggcgatgtgcgcctttgaagatgcggcgcgctacgccaatcagcgcgtgcagtttggcgaggctattggtcgtttccagttgattcaggaaaaattcgcccacatggcgatcaaattaaactccatgaaaaacatgctgtatgaagcagcgtggaaagcagacaacggcaccatcacctctggcgatgcagcgatgtgcaaatacttctgcgccaatgcggcatttgaagttgtggatagcgcaatgcaggtgctgggcggtgtcgggattgcgggcaaccaccgcatccagccgcttctggcgtga

SEQ ID NO: 144355 - DNA, 554 bp, Homo sapiens
aacttgctgaaagatggcattaagggagcaaccgcgctatgagccagaacgctacggttaacgtcgacatcaaattaggcgtcaataaattccatgttgatgagggccacccgcatatcattctggcggaaaatcccgatatcaatgaattccataaattaatgaaagcctgccctgccggactttataagcaggatgacgcaggaaacattcattttgattccgccggttgtctggagtgcggcacctgtcgggtgctgtgcggtaacactattctcgaacagtggcaatatcccgcaggcaccttcggtattgattttcgctacggctaatcatgcatcccacaggcccgcatctcgggcctgatgttctgtttcgagagtccaacatgaaagtgacattaacgtttaacgaacaacgtcgtgcggcgtatcgtcagcaagggttatggggcgatgcttcgctggccgattactggcagcagaccgctcgtgcgatgccagacaaaattgccgtggtcgataatcatggtgcatcgtacacctatagcgcgc

SEQ ID NO: 144356 - DNA, 729 bp, Homo sapiens
atagacaaacggcgttgcgccgagcatacaggtgcaacgctgctgctcaagcagcgcgagacacgcatcaggagtgaaaatatgtaacaacacgctgcgagcgccaattaagaatggtgccgttacgccatgcagaaagcccgttgcgtgaccaagtggcgcaggcatcataaagacatcctgccaggtcagattcagtcgcgcgcaataagcccgctcactggcgagaatattgttatgcgttagcatcacgccctttggcagaccctcggttccggaggtaaacagcaccgcagctaattcatcgccgtgggtcgttatcgccgtggtcagtgaggtattgtcggcgataatctgacttaatgagagggaagaggtggcgggagccagtttgtccacgccgacaatttgttgtagttgtggaagctgattttgcagcggcaggattaaatctaccggacgcgtttgtttaaacaacgtcggtgcaaagaacatttttgcctgacacttattgagcacccacaccagttctgcttcccgccaggaaggcaacagcggcacggaaactgcaccgattttcaggcaggcaagatagataacggtaaattcacaccagccaggcagttgaaatgcgatgcgatcgcctgattcaatacccttcgctaacatccagtttgccagacagctcgcggcgtgatcgagcgcgctataggtgtacgatgcaccatg

SEQ ID NO: 144357 - DNA, 1264 bp, Homo sapiens; identical to SEQ ID NO: 138439

SEQ ID NO: 144358 - DNA, 988 bp, Homo sapiens; identical to SEQ ID NO: 131974

SEQ ID NO: 144359 - DNA, 978 bp, Homo sapiens
atgggaagtctccatcgttttgtcttgtgtttaaatacgctaacacctaaacttacttttagtaagtacgtacaaaaaggtaagtatgaaatgagtcaggttagcctgtcgcaacaactgaaagagggtaatctctttgcggaacagtgcccgtcgcgcgaggtgttgaaacacgtcaccagccgttggggggtgttgattctggtggcgctacgcgaaggtactcatcgctttagcgacctgcggcgcaaaatctgtggggtgagtgaaaagatgcttgcgcagtacttacatgcgttagaacatgatgggtttcttaaccgtatcgcgtatccggcggtgcctgcgcatgtggaatataacctcacgccgctgggcgagcatgccttttatgacaacgtccgcagtagtgattatgttttccgctacgggggcgatgaatttatcattgttttgactgaagcttctgaaaacgaaacgttacgtaccgcagaacgtattcgcagtcgggtggagaaaaccaaactgaaagccgcaaacggcgaagatattgccctctcactttccatcggtgccgccatgtttaatggtcatcctgactatgagcgcctcattcaaatagccgatgaagctctgtatatcgccaaaagacgaggcccgcatctcgggcctgatgttctgtttcgagagtccaacatgaaagtgacattaacgtttaacgaacaacgtcgtgcggcgtatcgtcagcaagggttatggggcgatgcttcgctggccgattactggcagcagaccgctcgtgcgatgccagacaaaattgccgtggtcgataatcatggtgcatcgtacacctatagcgctgaagactacgatactagcactgcgtcccccttcgttagcagcccagaacgctctctgcaagaagaaaaatatggctgtttttgcccaaccccgcaggcagtcagcccatatggttga

SEQ ID NO: 144360 - DNA, 765 bp, Homo sapiens
atggtgcgcgatgcagtcagtgctacggagcgcacgtcggacgatgatttcgagcagagatttacgaggagatgccggagaagaggaacagcaccggcagatcgggttattgaggaacggatacgatttcagcgccgacagcagaaagccggtataagcccccaacaacaccgccagcaccagcatcaatgtttccagtccgcgatgaacgggcgtcacgaggctcagaaccttttgcacgatccccagcttcggcaaccagcgttgttgcagggcaagcaaatcatgttcaaagattttcgccagccacagcaccagcaccaccatgtagagctgaaacagcatcacccccatcgacatcaccgaggtaaaactgtagtggaacatcagcttccagaaggtccacggtcttgtcaggctgatgttgctgatgcagctgtgagctgtacgctccctgcgggtaaggaccgtcctgtgttactggaactgctggcaggagctactaatcacagggcaggtgcttcgcagtacgttgaaggccagcccccggacatccggccaacaaccccggtggacgcggccctgacggggctttgtctggctccccgggcattccggtttacgagacagagcctgttgacccggtcttccggggaagcctgccatggtggtcaggaggggtttttcgaccggtcgatcgacccgaaaaccgcggcggaggacgggaaaggggggcctcggtggatacggcctatttttctatag

SEQ ID NO: 144361 - DNA, 733 bp, Homo sapiens
atgctcaacaacagtgccgccaatgccgcagcccgccgtgtcgcgctggatagtctgctgtttaagctggtgggtagcctgattatcctgccgtttgtccatttgctggcagagacaatggggaagttgtcattgccaaaagcggaactggtgatctatttccacgtcttctacaaccttgtacgttgcctggtcatgctgccatttgttgacccgatggcacggttttgcaaaacgattattcgcgatgaaccggaactggatacccagctacggcctaaacatctggatgtcagcgcgctggatacgcccacgcttgctctggcgaacgccgcgcgcgaaaccctgcgcattggcgacgccatggaacagatgatggaagggttgaataaagtgatgcacgcgttttggcatcaacgaagcgggcaaagccgtgaagcgatccatatgtacggcccggattatggttttgataccactatcaataaattcaactgggaaacgttgatcgccagccgtaccgcctatatcgaattccctcaactaaaccaagggctagggagaaatttgggaaacgcctcaactattcgacggtcttgtttggtgtcctttgtgtctaaacctcctatgagtaataaacaggccgaccaaagatctgcggcaagaagaagaagacgctgttgtggtaatcggccccccttttatggtgggaaaggaattaattcccatgaag

SEQ ID NO: 144362 - DNA, 2805 bp, Homo sapiens
  misc_feature (1)...(2805): n = a,t,c or g
ttacacacagtaacttgaataattgcttctctcctcaacagctttgagctctgctagtttagagattttggtcctcatggagaggaatgcttccactgggcacacaacaatggatccaacaactgggagataagacttccacctgaacattttgaggtccttgtgtcgcagcccaagaaacatctcaccaatttcaaatccggtaagcggcctctttttactctcttctccaacctccctatccctcaacctctttctcctttcaatcttggcgccacacttcaatctctccattctcttaatttcaattcctttcattttcttcctgcaaggctttgttgatatgttcccgctggcctgggcagggatctccatgttctttatgcgctttatgctcggcttctcggaagcgccatcattcccggcgaacgcccgaattgtcgccgcctggttcccgacgaaagaacgtggtactgcctccgccatctttaactcggcgcaatatttctcgctggcgctcttttcgccgctgcttggctggctgactttcgcctggggctgggagcacgtctttaccgttatggggctgattggttctgtgctgacggcggtatgtctgcggaagagctgaagtttatctctgaaaatggcgcggtggtcgatatggaccacaaaaagccgggcagtgcggcagcaagcggacccaaactgcattacatcaagcaattgctctctaaccgcatgatgctgggcgtatttttcggacaatattttatcaacaccatcacctggttcttcctcacctggttcccgatttatataggcaatgtcgttagcgataatcgataatacgtcgcgcaaattaccttcataacgtggataaaaacgtacggacgatgccccagttttcaacgcgatggcgacggcttcgtcaatagatgccttatctgaggcgctggtttcaatatgaatatcaaggttcagacggcgggctttatccccaaaggcagagagttctttatcgtccatattaccaagagaaaaacgctcgccatcgagaacatggattttgacgccacgtagattattttcacttgcgatatcaagtaaatcagcaggcaacactctttcagcgaggtacgtcattccccggattataacccattcaccatcggcagtaagccgcgagaaaccagtatcaatcagtccattggtcagcgttaacgtatcgccagaaatggtgatatcactgtcaatgcgaccgaatttttgcccccagaaccagcactctgtgcatcgtatttgggcgtccggccagccacggaagttaatgcgctccgttgtcgggaaaggtgatgacggcgttgaatcaccacgagttttcgccacgctcgggttgtaataaagatatttgatattcgccagccacggcgcgttattacgcatcgctagcgtggcgttgatttcacgcccttgcgcttcaaccagggtgccatttgccgtcggttgcgaaacaatactcaggttattccattgctgatttcccagtgacaacataggcgtacgtaacgttatgtgttgtgggaaactcgctgcaccaccgacactctccgcagcgcctttctggaacagggccagccactcggcaccattcatcggcggcatattgagttcaacgccactttgttccggcaacggcgggagcgttttactgtttaactgattcatctcgtgaatggcatcccaggcgcttttatagctaataccggcatctttctcggcgccgaggcccttttccgggaagcccgttgccagatatcgccgctggaaggatacacctttgagggctatcgcaatgccgatggcagcgtgggcaccaaaaacctgctcggtatccaccaccagcgtccaggtataaacctcgttaaaggtggttacgcccgcattgagatcgatgccgtcggtgcccataaacaatttatcgaaggtgaaatgctcgaaggcattctctgccagttgcccgtgaaatgaggccgattttttgcgaaacgttccgcctggcatcaggatagtttgttcgttatccagttcggatagcgcattgacgatatgcaggctgttggtcatcaccgtgatgttattaaagcgcgagagcaggggaaccatctgcaaaacggtactgccagcatcaagaatgatcgaatcgccatcatggataaaactaacggcagcttctgcaatcagctctttcttgtgggtgttgatgagtgttttatgatcgataggcggatcggattcctctttattcaacaccactccgccataagtacgaatgacggttccggcatgttccagaatgaccagatctttgcgaatggttgtgcctgtggtgtcaaagtattgcggcaattcttcaaccgagcttttacctgcttttgcagatactccagaatggcggcctgacggggatctcggcggccagacgtaaccaaaaatggccgccagcaccaggcagaagaatccggtggcaatcggcacanagcgtttgccgccgaagaagctcaggaagtccggcagtttaatatcggaccaacggttataggctgcgccaccaaccagaccggtaatgatacccgccagtacacccatgttaatttctgggttgatggtcaccatcgctttggttaacacaaagtaacctaccgcacccgccagcgccgccgcaccagcgctgtctttcgaccagctggatgccacaccgatggcgaagattaatgcgaggttatcaaaaatcgcaccgcccgc

SEQ ID NO: 144363 - DNA, 2034 bp, Homo sapiens
atgcgtatcccccgcatttatcatcctgaaccactgaccagccattctcacatcgcgctttgcgaagatgccgccaaccatatcgggcgcgtactgcgcatggggccggggcaggcgttgcaattgtttgacggtagcaaccaagtctttgacgccgaaattaccagcgccagcaaaaaaagcgtggaagtgaaggtgctggaaggccagatcgacgatcgcgaatctccgctgcatattcacctcggtcagagtttaacaatgcagcagttacagaacattattgaaaccgcttttgaacgccgtgccgagatcacgccagccaatgcagacaccgttacccgcgaagcggtaaatcaggtgatcgccctgctggattccggcgcactgcgtgtagcggaaaaaattgacggactccccactaaccaaatgcaagcaagcaggagggcaaaggaggaagaagtacatctgactggtcagccttccagggttcaaagccccccaagacgttgtgaggagaaacagtacatggtactgatgatcgtcagcggacgttcaggttcaggtaaatctgtcgccctgcgtgcgctggaagatatgggtttttactgcgtggataaccttcccgtagtgttgttacccgatctggctcgaaccctggccgatcgcgagatttctgccgccgtcagcattgatgttcgtaatatgccggagtcaccagaaatattcgaacaggcgatgagtaacctgcctgacgctttctcaccgcaactcctgttcctggatgccgaccgtaataccttaattcgtcgttacagtgacacgcgccgactgcatccgctttccagcaaaaacctgtcgctggaaagtgctatcgacaaagaaagcgatttgctggagcctctgcatgggtttccggattacgacactgttggtttttcctgcaaacgacgtattgattatgtatgccgaataaagcattcacgccgcatccggcaagttgtattgctcaacttcgctaaatctggtgctttttcaacaacgcgcggaactgatgataagacccgacgttctctacttgtgactctggtgcgtattttctgtgtgcgcgtaattttcgcgtatgatatccgcgacgggattcatgtgcgcattattcagatcaactcgaaatccggcaaagtgggcagcaaacacaactctggctacagcgcagcgaaatttggtggcgtcgggctgactcaatcactggcgctggatctggcggagtacggcattacggtgcattcactgatgctcggtaacctgctgaaatcgccgatgttccagtcactgttgccacaatacgcgaccaagctgggtatcaaaccggatcaagtcgagcagtattacatcgacaaagtaccgttcaaacgcggctgcgattatcaagatgtgctgaatatgctgctgttctacgccagtcctaaggctgtcgtacttgcaccggacagtcgatcaatgtcaccggcggtcagcgggcgctttaaaccgcgggtcgtggtcgccatcgcgctggacgatcagcagcgcatcgtcgacaccttgtttatgaaaggactgaccgtcttcgcccgaccgcaaaaaattcccgcaattaccggccgccattctggagctactctgcaaaagcagggtaaatgctcggttgaagaattggcgcaatactttgacaccacaggcacaaccatgcgcaaagatctggtcattctggaacatgccggaaccgtcatccgcacttctggcggagtggtccccgactccccccctcatactcggcgagacccccgccggttttctatggccttcccctggttcgacaacattcgatcggcagaattccaccacgtaacgacactgctcgcagaaataccccgccagcagaatgacatccatcgccccgctcacgcagcggcggcaccgaaagtggaaacacgctcaggcgatgaaacaaatcggcgctggaatcgccctgcccagcacctcttcgcgtaa

SEQ ID NO: 144364 - DNA, 3186 bp, Homo sapiens
atgtcaacttctatcagaatctgtagctacctgttgctgccgctgatttatctgctggttaacgtcaaaatcgcccagcttggcgaaagtttccccatcaccatcgtcacttttttacctgtcttgttactgctgtttttagaacgcatcagcgttaaaaaattgatgattgccttagggattggcgcgggactcacggcgtttaactatctgtttggtcagtcgctggatgccagtaaatacgtcacttcaactatgctgtttgtctatattgtgatcattattggcatggtgtggagtattcgttttaaaacaatttcgccacacaaccatcgcaagatattacgtttcttttatctggtggtcgggctggtggtggcgctggcggcggtggagatggcacaaattatcctcaccggtggcagcagtattatggagtcgatttcgaaatatctgatttacagcaacagctatgtgctgaatttcattaaattcggcggcaagcgcacgacagcactttatttcgaaccggcatttttcgctctggcattaatctcaatttggctcagcatcaaacagtttggtatcaaaccgcctaaaacagatgctatgattctcgcagggataatattatccggatcgttttcaggggttatgccctttatcctgttttatttgctggagtgggcatttcaatatctgaataaagaggcgattaagaaaaagttcccgttagcattggcccaggaggcatgcaagagttgcccatgcaaagcccagaccgacgaagtgctggaaaacccggacccgcgagtcgggctggacgctgaaccggcggcggtgccttttcaacaaagcgtgattaccgctgagatagaacgctggccggaaaccgcattaacccgcgagctggcgcgccatccggcctttgtgaaccgcgatgtgttcccgattattgctgaccgtctgactcagaagcagcttttcgataagctccacctgccgactgcaccgtggcagttacttgccgaacgcagcgagtggcctgcggtgtttgatcgtttaggtgagctggcgattgttaagcgtcgcactggtggttatgacggtcgcggtcaatggcgtttacgcgcaaatgaaaccgaacagttaccggcagagtgttacggcgaatgtattgtcgagcagggcattaacttctctggtgaagtgtcgctggttggcgcgcgcggctttgatggcagcaccgtgttttatccgctgacgcataacctgcatcaggacggtattttgcgcaccagcgtcgcttttccgcaggccaacgcacagcagcaggcgcaagccgaagagatgctgtcggcgattatgcaggagctgggctatgtgggcgtgatggcgatggagtgttttgtcaccccgcaaggacactttgtcatgactaaacactatgattacatcgccatcggcggcggcagcggcggtatcgcatccatcaaccgcgcggctatgtacggccagaaatgtgcgctgattgaagccaaagagctgggcggcacctgcgtaaatgttggctgtgtgccgaaaaaagtgatgtggcacgcggcgcaaatccgtgaagcgatccatatgtacggcccggattatggttttgataccactatcaataaattcaactgggaaacgttgatcgccagccgtaccgcctatatcgaccgtattcatacttcctatgaaaacgtgctcggtaaaaataacgttgatgtaatcaaaggctttgcccgcttcgttgatgccaaaacgctggaggtaaacggcgaaaccatcacggccgatcatattctgatcgccacaggcggtcgtccgagccacccggatattccgggcgtggaatacggtattgattctgatggcttcttcgcccttcctgctttgccagagcgcgtggcggttgttggcgcgggttacatcgccgttgagctggcgggcgtgattaacggcctcggcgcgaaaacgcatctgtttgtgcgtaaacatgcgccgctgcgcagctccgacccgatcatttccgaaaggtgtctgaatgctacgcttcgcaaagttgctaaaccggtagaagaagtgaatgcagaaattcagcgtatcgtcgatgatatgttcgagacgatgtacgcagaagaaggtattgctggcggcaacccaggtggcggtgctggtgcatacccccttctcgagcagcagcattacgacaactcccgcgaccgtttcgccaactggccggtacgtatggaaatgatctcccgtttccgcagcgccaaagagcagacgcaaatccttgcggaagtggcggaaggcaaaatcgatattctgatcggtacgcacaaactgctgcaaagtgacgtcaagtttaaagatttaggcgtgctgattgtcgatgaagaacaccgcttcggggtgcgtcataaagagcgcattaaagcgatgcgcgcgaacgtggatattctgacgcttactgcaacgccgatcccacgtacgctgaatatggcaatgagcggaatgcgtgacctgtcgattatcgccacgccgcccgcccgtcgtctggcagttaaaacctttgtccgtgagtatgacagcatggtggtccgggaggcgatcctgcgtgaaattttgcgcggaggacaggtttattatctctacaatgatgtggaaaacattcagaaagccgccgaacggctggcagaactggtgccagaagcgcggatcgccatcggtcacgggcagatgcgcgagcgcgaactggaacgggtgatgaatgatatccatcatcaacgtttcaacgtgctggtttgtacaaccattatcgaaaccgggatcgacatcccgacagccaacactattatcattgaacgcgcggatcacttcggtctggcgcagctgcaccagttacgcggtcgcgtcggacgttcgcatcatcaggcatatgcatggttgctgacaccgcatccaaaagcgatgactaccgatgcacaaaaacgtcttgaagcaattgcctcgctggaagatctcggggcaggttctgcgctggcaccgcacgatctggagattcgcggcgctggtgaactgcttggcgaagaacaaaccggctcaatggaaaccatcggtttctcgctgtgtaccgagttcctgtaa

SEQ ID NO: 144365 - DNA, 2550 bp, Homo sapiens
ctacatcggcaatgttttcaacaatccaaatgcctctttcatccgatcctcactgaccacaaaggcgcgaagctggtcagcatcgtcaacgccgcgcgccaccattccctggcgttcggtattaatttgccagcgtaaatcctgacgctgggtttcgcctgccagatgcagcggtaattccggcgttttgattttcaccagcatcgccgggagtttcagcggcgtgttattgccgagaagattttttgccagcaccatcgcgctaagttgaatcggctggaggaacggcaatacctgaccgttaatttccgcgcaatcgcccagcgcgtaaatatcggtattactggtttgcagataactatcgacgcaaacgccgcgattaatcgtcagcccggcgcgtcgtgccagggcggtttccgggcgcagtccggtggcggcaattaccgcatccacttcgatattgcgctggcggtccagcgttgcctgaatgccagaatccgttttttccagccccagatggacccggtgtacacgccggcgcgaaaaatccacctgtaccactgcgaccatcgcggcctgccgctggcgcttgtcagcacggaaggggcaacagaatggtgcgcagaatacgatgaatggggcaacctgctgaatgaagagaacccgcatcagctgcagcagcttatccgcctgccggggcagcagtatgatgaggagtccggcctgtattacaaccgccaccgctattatgacccgctgcaggggaggtatatcactcaggatccgattgggtgtattgcaggaagtgggtaaaaccaaatctgacttgtacgccacaggatgattcccagtatccagggatggatacaaagacagcaagtgattacctgccacagacaaattggccaacaactcaattaccaccaggatatacttgtgcagaaccatatttattgcccagacattaataaaccctaaggccagcggtcgagtgacggatagcgcattgacgatatgcaggctgttggtcatcaccgtgatgttattaaagcgcgagagcagggaaccatctgcaaaacggtaggcagcttctgcaatcagctctttcttgtgggtgttgatgagtgttttatgatcgataggcggatcggattcctctttattcaacaccactccgccataagtacgaatgacggttccggcatgttccagaatgaccagatctttgcgaatggttgtgccggtaattgcgggaattttttgcggtcgggcgaagacggtcagtcctttcataaacaaggtgtcgacgatgcgctgctgatcgtccagcgcgatggcgaccacgacccgcggtttaaagcgcccgctgaccgccggtgacattgatcgactgtccggtgcagtacgacgccttagactgcggtccgagctacttatgtagtcgtcttcggcgttaaaatagcgttcataggcgaccagcgtcattttggcgtcgatcaccacatcttttccctgcggcaggcgcacgatgacatccggctgcatccgcgagcgggcgtcattttcgatgctgacctgggtttcatattcatacccttcacgcagaccggaagcctccagcacccgcgtcaatactacctcgccccagttgccctgggttttattgtcgcctttcagcgcgcgcgtcaggttgatcgcttcctgggccatttgcgcgttgagttgctggagattgcgaatttcgtgggtcagggtatggcgttcttgtgcttctttaccgaagctgtcctgaacctgacggcggaaccgtccgtgtttagcacgatgacgacgtaaaccagcccgacgaccgcgcttcttatgacgaatacgcgggttcaccacgccgtacagcagatcgaccagcaagttgacgaggataatcatcgtcgccaccagcaatacgccgccctgcactaccggatagtcgcggcgttgcagtgcgtcaatcaaccagcgtcccagaccgggccacgagaagatggtttcggtcagaatcgcccccgccagcaatgttcccacctgcaggccgataacggtcaccaccggcagcatcgcgttacgcagcgcatggacgataatcacccgcatgcgggttagccctttggcgcgcgcggtgcggatgtaatcctcgcccagcacttccagcatcgaggagcgtgtcatacgcacaatgaccgccagcggaatagtacccagcacaatggcaggcaagatcatatgggcgacggcatcgataaagttgccgtcttcaccccagatggcggtgtcgattagcataaaaccggttaacggattggagtcatcgaggaacaccatatcgctcacgcgaccggagacgggcgtcaggttccagtgcaccgaaaccagcatgatcagcatcatgccccaccagaagataggcattgaataacctgtcagcgccaggccaaccgctgtgtgatcgaaaatggaaccgcgtttaaccgcagccagcacgccgaccggaataccgacctcttttttcaacat

SEQ ID NO: 144366 - DNA, 3963 bp, Homo sapiens
tgaaagcgcttccctttccttactgttgccgcgcgttattgcttatgcttcgtatgccttcctcggatacgaatatattatgacgccggttgccaccaccattatcagtatggtgctgttcgccttctccacctgggtttccaccaacggggcgaaaatgttggggccaattacctccgtcacttcaacgctgatgctgctgttaacgctctcctacattttactggcaggtacggcgctggttggcggcgtacagcctgctgacgccatcaccgttgacgcgatgatcccgaacttcaactgggcgttcctcggcgttaccacctggatctttatggccgcaggtggcgcggagtccgtcgctgtgtacgttaacgacgtcaaaggcggttcgaaatcgttcgttaaagtgatcatcctcgccgggatttttatcggcgtactgtattccgtctcctcggtgctgattaacgtcttcgtcagcagcaaagagttgaaatttaccggccgatcggtgcaggtattccactgcatggcggcgtattttggtctaccgaaagcgtccgcgaagtttgcatgcctggcagccacgctggtgctgacgttctccatccctctcgacccggatcaggatttctcacgcgttattcatgtcgtcgataaaaaaagcggcaaagtggatggtgcctgggagctgtcagataatcttaaagagttacgtttacgccacctcgaaccgaaacgtgatttgatcgttactattggcaaggaggtcaaagcactcaacaacgcaaccttcagtaaagattacgaaaaaactataactacccgcgacatccaacccagcgtcggttttgccagccgtggttcgctgctgcctggcaaagtcgttgaagggctgccggtaatggcgctcaacgttaataatgtcgatgttaacttcttccgcgttaagccagaatctctgccagcattcattagccaatgggaataccgcaattcgctggcgaactggcagtcagacaaactgctgcagatggcggatctggtctacaccggacggtttgatctcaatcctgcgcagtccaacatgaaagtgacattaacgtttaacgaacaacgtcgtgcggcgtatcgtcagcaagggttatggggcgatgcttcgctggccgattactggcagcagaccgctcgtgcgatgccagacaaaattgccgtggtcgataatcatggtgcatcgtacacctatagcgcgctcgatcacgccgcgagctgtctggcaaactggatgttagcgaagggtattgaatcaggcgatcgcatcgcatttcaactgcctggctgtcagattatcgccgacaatacctcactgaccacggcgataacgacccacggcgatgaattagctgcggtgctgtttacctccggaaccgagggtctgccaaagggcgtgatgctaacgcataacaatattctcgcaaccaggtttggcacctggtatgctcggggaaacgcttttggtctatggcaacacgccgaccagactggccccacacgccgccagcacgcaggaatgccacgactgcgattgacccacggtttgagcagcattggcacaatcagccccagcccggcgacaccaagccagaaccaccacgtccagaaaccgccacctaatgccgccaccagcgcacgaactttaccgtcatcgcccagcgccagaccgacaaaaaacgccaccagcaggaagatttcaccccataccacagggatttccatacggtgtacaaactgcgcttccgtggaatgcgggttactgcgttggcgtatcgcaatgggcgatcagcgccaccgccgcaccggacgagatgccggagaagaggaacagcaccggcagagtcgggttattgaggaacggatacgatttcagcgccgacagcagaaagccgtaaacgcgtcagcttaacgggtatcgatatcggcaatcgccacgatgttatggcgtttcaggtaagaagagaggtcttcggtattacggaagttgctggcaatcagcggcaggtcgcgaatcaccagaccttgtgcatgtacctgagaagattcttcaacggcgtcattggtgccgacattgccaatatggggataagtaagagtaacgacttgaacgagaataggaaggatcacggcggtatcgcctccatcaaccgcgcggctatgtacggccagaaatgtgcgctgattgaagccaaagagctgggcggcacctgcgtaaatgttggctgtgtgccgaaaaaagtgatgtggcacgcggcgcaaatccgtgaagcgatccatatgtacggcccggattatggttttgataccactatcaataaattcaactgggaaacgttgatcgccagccgtaccgcctatatcgaccgtattcatacttcctatgaaaacgtgctcggtaaaaataacgttgatgtaatcaaaggctttgcccgcttcgttgatgccaaaacgctggaggcggtcgtccgaaccacccggatattccggggcgtggaatacggtattgattctgatggcttcttcgcccttcctgctttgccagaacgcgtggcggttgttggcgcgggttacatcgccgttgagctggcgggcatccctgctgagcaggtattccctggcgcgcaagggttgcttgagggtttaaccaaaaccggtggcgataccgcgaaatatgcactggaaaacaagctggtcgatgcactggcatcgagtgcggaaatcgaaaaagcactgaccaaagaattcggctggagtaagactgataaaaattatcgcgccatcagttattacgattacgcattgaaaacgccggcagataccggtgacagcatcggtgtcgtctttgctaatggcgcaattatggatggcgaggaaactcaggggaatgttggcggtgataccactgcggcacaaatccgcgacgctggccttgacccgaaagtgaaagcgattgtcctgcgtgttaatagcccaggcggcagcgttaccgcgtctgaagtgattcgcgctgaactggcagcagcccgggcagcggaaaatagtctggattcgattggtgttcatactgatggtgtctcaacttcaccgctggcggatgtttctatcaccaggtcattgccgccggaagcccagctgaagatgcatgtaaacattgaaaatggctttaaagctttacaaccgggttgcgaggcgcgcaattcacccggggccttttgtaaatttgccagggcccatttggacggggggggggggggggacatccccggggttgtggcggctttacctgcccacgacgcgaagcctagcagtgtactgtattataattgttcttgtttcccggtaacccaggtaatcacgcccatgaaacctcgtcagcgtcaggccgccattctggagtatctgcaaaagcagggtaaatgctcggttgaagaattggcgcaatactttgacaccacaggcacaaccattcgcaaagatctggtcattctggaacatgccggaaccgtcattcgtacttatggcggagtggtgttgaataaagaggaatccgatccgcctatcgatcataaaacactcatcaacacccacaagaaagagctgattgcagaagctgccgttagttttatccatgatggcgattcgatcattcttgatgctggcagtaccgttttgcagatggttcccctgctctcgcgctttaataacatcacggtgatgaccaacagcctgcatatcgtcaatgcgctatccgaactggataacgaacaaactatcctgatgccaggcggaacgtttcgcaaaaaatcggcctcatttcacgggcaactggcagagaatgccttcgagcatttcaccttcgataaattgtttatgggcacgacggcatcgatctcaatgcgggcgtaa

SEQ ID NO: 144367 - DNA, 516 bp, Homo sapiens
attgatacgcaaggtatcgacatgatcagtgttgatgaaggcattcctgcggatagcctgaaaggactgcgaaaggctggggttgaagtgcttctggtcggggagtgagaaaggatgtccgctggtcaacacgaatgcgttcggcgggcattgtgaacaccatcaatgggtttcttctgtttctcgggtgagggtttcccagtcggcaggaggatgtcctctttttaacattttgctgaatacggtataggcatctgtttttttaccgtaggtgcgcagagtgttttcatcgttcatccatcccagaatgatgactttctctttttcactataacgaaagaagagacgataacgaccagcaccaaattttacccgtgaccagtctttatttttcccagagcctaacgacttgccatgacggaatgccggtgatgatggattgaccgtgatatgctcctcaatcactttatggactaccgccaataactttgtggcggcttttctctgataattttc

SEQ ID NO: 144368 - DNA, 606 bp, Homo sapiens
tcagtcttcagccactaagccaagaagatctggaaaggagtcagtcagagagccttgggccagaattccaggggctctgggagtggctgccaggcaagttggaccatccgatttccagtggggttccacacagatgggacacggcttaggaggaatcccgggatgcaggcattccttggcccagtggccagatttctggcacttgaagcaagatcccttgactgtgcttttagctccagcctcctctttaagaggaaattgtcgggcaggtgggggagggctagtcgcggaacgaaactgtaagccagaccgggtgtgaggagtggaagtgatagaaggattatagggtgggggagcagaggctgagggacttgctgtggccttgcaaggagcagccagatttgaaattggtgagatattccttgggctgcttggtctgaggacctgatgttgtaggtggatctcctcacagaatgagggcaaggacagggggccagtctcctgaaggagtcctcctgtcccgggtctttggcaccaaatgtcacatgtgtcctccaacaggccctgatgtgtgatgttcccgtccttgggtccatgtgttctcat

SEQ ID NO: 144369 - DNA, 1830 bp, Homo sapiens
atgacagaaaaagtaaaacaacagcccgctccggtaacggccagtgatgaaatcgatattggtcgcctggtcggcaccgtcattgaagcgcgctggtgggtgattggcatcaccaccgtattcgccctctgtgccgtggtttacaccttcttcgccacgccgatttatagtgccgacgcactggtacaaatcgagcaaaacagcggcaattcgttagtgcaggacattggttcggcattagccaacaaaccgcctgcatcggacgccgagatccagttgattcgttcgcgtctggtgcttggtaaaacggtggacgatctcgacctcgatattgcagtgagcaaaaacacgttcccgattttcggtgcgggctgggatcgcctgatgggacgtcagaacgagacgcgacgcggctttagcgcccggggcacgggccagatgctgaaaaaagaaggcgtcacgctgatggttgaagccattcacgccagcccgggcagtgagtttaccgtcaccaaatactccacgctggggatgatcaaccaactgcataacagcctgacggtaacggagaacggcaaagacgctggcgttttgagcctgacttataccggtgaagatagatacacaaaccacgcgggtgtagtaaacaccatgataattattgcggctacacacaacttggtttttgagaataactcttgtgaatatgctcatccgatggggaacgcaccggccggtctgacggagtaccagaacgtcttctataagcacgatcgcattcagggtcattatgtctgggagtggcgcgaccacgggatccaggcacaggacgaccacggcaatgtctggtataaattcggcggcgactacggcgactatcccaacaactataacttctgtcttgatggtttgatctattccgatcagacgccgggaccgggcctgaaagagtacaaacaggttatcgcgccggtaaaaatccacgcgcgggatctgactcgcggcgagttgaaagtcgaaaataaactgtggtttaccacgcttgatgactacaccctgcacgcagaggtgcgcgccgaaggtgaaacgctcgcgacgcagcagattaaactgcgcgacgttgcgccgaacagcgaagcccccttgcagatcacgctgccgcagctggacgcccgcgaagcgttcctcaacattacggtgaccaaagattcccgcacccgctacagcgaagccggacaccctatcgccacttatcagttcccgctgaaggaaaacaccgcgcagccagtgcctttcgcaccaaataatgcgcgtccgctgacgctggaagacgatcgtttgagctgcaccgttcgcggctacaacttcgcgatcaccttctcaaaaatgagtggcaaaccgacatcctggcaggtgaatggcgaatcgctgctgactcgcgagccaaagatcaacttcttcaagccgatgatcgacaaccacaagcaggagtacgaagggctgtggcaaccgaatcatttgcagatcatgcaggaacatctgcgcgactttgccgtagaacagagcgatggtgaagtgctgatcatcagccgcacagtaaagccccgcgggcccgcccgttgcccggatagctcagtcggtaccacctactgcaccgaaaacaacccgccgtttgataacggcctgctgaacgcgcagttgctgcaacaggcgaaaccgtttgtcgatgagcgccagagcaaaaccttctggttcgatattcgcaacaccgaccgttctgtcggcgcgtcgctttcaggttcgcatggcacgtggcatgggctgcggtga

SEQ ID NO: 144370 - DNA, 1121 bp, Homo sapiens
atgcccatcctagcctcctggccccaccctcctggtcctttcctgctgctgactctcctgctaggactcacagggcctcccatgtggaccatgctaaaaaacaatattgcagaaaagaacgatattcacagcagggactctcacgccagccagtctggaatggcctcgtacatgctccaccaccttgaagcctctgcattttctcttcagcatctgcgctgcagcagcagtggcagcatgaaggctggtgtggccaactgctacccagagggcatggtcccaatcggaagctgcagcagcaaagacagtggatcttgctttaagtgccagaaattctgccactgggccaaggaatgcctgcagcccaggattcctcctaagctgtgccccatctgtgtgggacttcactggaaatcggactgtccaactcaccaggcagccactcccagagcccctggaactctggcccaaggctctctgactgactccttcccagatcttcttggcttagtgactgaagactgacactgcccgatcgcctcagaagcctcttagtctgggtagacactttcactagatgggtagaggcctttcctacagggtctgacaaggccaccacggtcatttcttcccttctgtcagacataattccttggtttggccttcccacctctatacagtcattttctctatctttacaaggtggtatttcaggaggaaagcagttatgtggcctgaataacattagacttttcacattattagtattcaggctttgggttaaggaacaaagttgccagcagaccttctgctgtgagagatacccgaagcttggcgtccgtgatggtttagggggcttctgaggcgaactggcagcgtcagtcttcagccgctaagccaagacgatctgggaaggagtcagtcagagagccttgggccggagttccaggggctctagaagtggctgccaggaccaacacctacaagttacttccagctccaagaggccgtgcagaggaaggggcctctgtgtgtaatttttctgtcaggataggccatctgttcctggtttgcattaagagtcttgtacgtgttggtgcactcctggcaatttggaccaa

SEQ ID NO: 144371 - DNA, 4427 bp, Homo sapiens
atggaaaacaatcgcaatttccctgccagacaatttcattcgctcacgttctttgccggtctttgtattggcatcacgcctgtggctcaggcactcgccgccgaagggcaaactaacgcggatgacacgctggttgtcgaagcatcaacgccttcgctttatgcgccacaacaatctgccgatccgaaattctcgcgtccggtagcggatactacccgcacgatgacggtaatttctgaacaagtgattaaagatcagggcgcaaccaaccttaccgacgcgctcaaaaacgtccccggcgtgggtgcgttttttgcgggtgagaacggtaactccaccactggcgacgccatttatatgcgtggtgccgatacctctaacagtatttatattgatggcattcgcgatatcggcagcgtctcgcgcgacacctttcaatacgagcagttaggcggcgaatggcatgcttttagcgatctagacgatccccgcagtgatattaccgggcgcttagcgacgtacatcgctgacccgcaggtggacgttaatatcgccgccttccgctcacaaaaggcctatatctccggtcaggtgaataaatccggtcaacaggcgatcaccaacgtgccactgactattctcgacgccatcaacgccgcaggtggcctgaccgacaccgctgactggcgcaacgtggtgctaacacacaatggtcgtgaagagcgcatttctttgcaggcgctgatgcaaaacggcgacctcaaccagaatcgcctgctttaccccggcgatattctctacgtgccacgtaatgatgatctgaaagtatttgtgatgggtgaagtgaagaaacagagcaccctgaaaatggactttagcggcatgaccctgactgaagccctgggcaatgctgaaggcatcgacatgaccacctccaacgccagcggcatctttgtcattcgtccgctgaaagggcgagggcgggcgtaacggcaagattgccaatatctaccagctggatatggtcgatgccacgtcgctggtgatggcgacagaattccgccctgcaacttatgacgtggtgtatgtcaccaccgcccccggtttcccgctggaaccgtctgatcaatcagttgctgccaactattagcggtgtccgttacatgacggatacagccagcgacattcataactggtaatcgtcatgtttaacaacatcttagttgtctgtgtcggcaatatttgccgttccccgacggcggaacgcttactgcaacgttatcacccggagctgaaagtggagtccgctggactcggcgcgctggtcggtaagggcgctgatcctaccgctatcagcgtcgccgcagaacatcaactgtctctggaaggtcactgtgcccgtcaaatcagccgccgtctgtgtcgcaactacgacctgattttgaccatggaaaagcgccatatcgaacgcttatgcgagatggcaccggagatgcgcggcaaagtgatgctgtttggtcactgggataacgaatgtgaaatccccgatccgtatcgcaaaagccggaaaacgtttgcagcggggtacacatttacttgaacggtctgcccgccagtgggcgcaggcatttgaacgcagagcaggtataagaatgacagaaaaagtaaaacaacatgcccgctccggtaacgggcagtgatgaaatcgatattggtcgcctggtcggcaccgtcattgaagcgcgctggtgggtgattggcatcaccaccgtattcgccctctgtgccgtggtttacaccttcttcgccacgccgatttatagtgccgacgcactggtacaaatcgagcaaaacagcggcaattcgttagtgcaggacattggttcggcattagccaacaaaccgcctgcatcggacgccgagatccagttgattcgttcgcgtctggtgcttggtaaaacggtggacgatctcgacctcgatattgcagtgagcaaaaacacgttcccgattttcggtgcgggctgggatcgcctgatgggacgtcagaacgagacggtgaaagtgaccacctttaaccgcccgaaagagatggcggatcaggtgtttacgcttaatgtgctggacaacaaaaactacaccctgagcagcgacggcggctttagcgcccgggggcaagcgggccagatgctgaaaaaagaaggcgtcacgctgatggttgaagccattcacgccagcccgggcaatcgttactgccaggatgtgaaaagagcacttttttggccccggcggcaatatgcgcttcgccatgctcgcgggagccatatacgccggtgcagtcgaggactacatcaacgccaagttcacgccgccaacgggaagagtaatcccaaccggaggccgcccccgcgcgtaaatcgcggtacacctcgttgggcggaggcttctgaggtgattaggcagtgtcagtcttcagccgctaagccaagaatatctgggaaggagtcagtcagagagccttgggctagagttccaggggctctaggagtggctgccaggcgagctggacagtctgattcccagtggggtcccacacagatgggacatggcttaggaggaatcctgggctgcaggcattccttggcccagtggccagatttctggcacttgaagcaagatcctgagggaggcggtcctgtaggaatgcctgaccactgtggcttaggcattttgaagttcttgtgtgctggagaacaaacagaaaaaaaaaaacacaacaaaaaacataacagaggacaggagaagaagcggagagggagaaagagacaacagcagcaagcccgaagcagagaaaggcggaggagggggcatggggtaactggggtaggaaggggtggtcgtgaaagcgggttcgaggattattcacctcattctgacaaaccgattaaagtcgttggttcgagcacacgtggcacggctgcaactaggcacttacagagagttgtaaagagtcgagaaaatggccgacgatgcactcttaacgcaacggccaagatcatcgagcatattggcacggaaacgcacagctctggcgatatcttcgcagccgacgttttagtgatttcaaatttcgccgtcaacatccaggttaatggttgggcgctatatgctcatccctgttttcaggaaacctacgacgctttagttgccgaagtcgagacattaaagggaaaagatcctgaaaattatcagagaaaagccgccacaaagttattggcggtagtccataaagtgattgaggagcatatcacggtcaatccatcatcaccggcattccgtcatggcaagtcgttaggctctgggaaaaataaagactggtcacgggtaaaatttggtgctggtcgttatcgtctcttctttcgttatagtgaaaaagagaaaaaaattcatactggagggaaaccctacaaatgtgaagaatgtggcaaagcctttaaccactcttgtagccttactagacataagaaaattcatactggagagaaaccctacaaatgtgaagaatgtggcaaagcctttaagcactcctccactcttactacacataagagaaatcatactggagagaaaccctacaagtgtgataaatgtggcaaagcctttatgtcatcctcaacccttagtaaacatgagataattcatacggaaaagaaaccctacaaatgtgaagaatgtggcaaagccttcaaccggtcctcaacccttactacacataagataattcatactggagaaaaaccctacaaatgtgaagaatgtgacaaagcctttaagtactcctatacccttactacacataaaagaattcatactgaagacaaaccctacaaatgtgaagaatgtggcaaagcctttaagtactcctctacccttactacacataagagaattcatactggagagaaaccctacaaatgtgaagaatgtggcaaagccttcaagcggtcttcagaccttactacgcataagataattcatactggagagaaaccctacaaatgtgaagaatgtggcaaagcttttaagtactcctctaaccttactacacataagaaaattcatactggagagagaccctacaaatgtgaagaatgtggcaaagccttcaaccagtcctcaatccttactacacataggagaattcatactggagagatattctacaaatgtgaagaatgtggcaaagcttgtaagtgctcctctaaccttactacacataagaaaattcatactggagagaaaccctacaaatgtgaagaatgtggtaaagcctttaaccggtcctcaaaccttactacacataagagaattcatactggagagaaaccctacaaatgtgaagaatgtgggcaaaggctttaagtact

SEQ ID NO: 144372 - DNA, 406 bp, Homo sapiens
ctcaatggcaaagtgtcccctgagaaagaatcagggccccgtcagatcctgcggagcctggtccggctgtctgtggctgccttcgccgagcggaaccccgtggaggagctcactgtggattctcctcctgttcagcaaatctcccagctgctgtccttgctgcatcagggccaattccagcccaaaccaaaccaccgaggaaataagtacttggccaagccaggaggcagcaggagtgcaatcccagacacagatggcccaagtgcaagggctggaggccagacagacccagaacaggaggaagggcctttggatcctgaagaggacctctctgtgaagcaactgctataagaagagctgtcaagtctgctggaccccagcacaggtctggccctggaccggctga

SEQ ID NO: 144373 - DNA, 400 bp, Homo sapiens
tttgaggtgggtgttatttattactctcattttacaaatgaggaaacagagtaagaggagggcgggaatcacatgatccaggttggtctgactctagaggccaggctgtgtatccagttccctatatgggtaaatgaatgcaaacatgaatgggcatgaatgaatgaatctatatgggaatgtccctacccatggactggttggtttcttttgcaggagtgcaatcccagacacagatggcccaagtgcaagggctggaggccagacagacccagaacaggaggaagggcctttggatcctgaagaggacctctctgtgaagcaactgctagaagaagagctgtcaagtctgctggaccccagcacaggtagggaccccctggagttaccttgaccctgc

SEQ ID NO: 144374 - DNA, 954 bp, Homo sapiens
atgtataaggtcccagaacaagtactagaaaaagtcacagtccctaaacaaatatgtctgcttcagtatgtggatgatcttcttatatctggtaaagacataaaagaggtaggtgacttctctacacacattctcaatcacttgcagtgtgaggggttgctggtctcaaaagggaaaattcagtatgtagaacctgaagctaaatacttaggctacctaattagtgcagaaaagccatttcaccttttcattaatgtaaataatggggtagccctaggaatgctaacccaagaacatggaggctgccaacagcccgtggccttcttgtcaaaggtcttagacccactcactcataggtggccccagggtatccaatccattgcagctacagcagtattagtcaaagaaagtaggaaggtaacctttggaggaaagttaacagtgattgagaggaaaagacataacaggtattcagtgattgatggagagacgcttgaagaagtagaatcaggaaggctgcctaatgattggtctgcccaaacatgtgaactgtttgcactcagccaagctttaggacatttacaaagccaagggtatactgactcaattctggcccatattggtaagcccgaagaactgggacctgcaggcatgcggacccctgcaggtctcaatggtgcccaggctggagtgcagtggcgtgatcttggctcgctacaacctccacctcccagccgcctgccttggcttcccaaaatgccgagattgcagcctctgcccggtcgccaccccatctgggaagctcctgaaattcaagctaccctcagtctgagtcaacatacaaccccattttatgtccctcctaagaacatgctgatttcagggtgccctcccctgccacagacaccagcaatttctgctacagaacctgcagagaaaaagagaagaaattaa

SEQ ID NO: 144375 - DNA, 3729 bp, Homo sapiens
atgctgaaggctcagggaattaacgagacgttgtttatggcgttgattacgctggagtctcaggaaaaccacagtattcagccttctgaattaagttgtgctcttggatcatcccgtaccaacgcgacgcgtattgccgatgaactggaaaaacgcggttggatcgaacgtcgtgaaagcgataacgatcgccgctgcctgcatctgcaattaacggaaaaaggtcacgagtttttgcgcgaggttttaccaccgcagcataactgcctgcatcaactctggtccgcgctcagcacaacagaaaaagatcagctcgagcaaatcacccgcaaattgctctcccgtctcgaccagatggaacaagacggaagtgaggagcgtctctgcctggccgcccatcgtctgggatgtgaggagcccctctgccgggctgcccagtctggaaaccattcaccatccatccagccagccatccagccagccatccagccagccaaccaactatccatccacaatttgtggacacaattccggcattcaaccaaaattccagttgaatgggtgaatggtgaatggctgaatggacgaatgccaggggatcatcatgaatggcaatgcaactatcagccagccatccagccagccatccagccagccaaccaactatccatccacaatttgtggacacaattccggcattcaaccaaaattccagttgaatgggtgaatggtgaatggctgaatggacgaatgccaggggatcatcatgaatggcaatgcaactatcagccagccatccagccagccatccagccagccaaccaactatccatccgcaatttgtggacacaattccggcattcatccaaaattccagttgaatgggtgaatggtgaatggctgaatggacgaatgccaggggatcatcatgaatggcaatgcaactatcagccagccatccagccagccatccagccagccaaccaactatccatccacaatttgtggacacaattccggcattcaaccaaaattccagttgaatgggtgaatggtgaatggctgaatggacgaatgccaggggatcatcatgaatggcaatgcaactatcagccagccatccagccagccatccagccagccaaccaactatccatccacaatttgtggacacaattccggcattcaaccaaaattccagttgaatgggtgaatggtgaatggctgaatggacgaatgccaggggatcatcatgaatggcaatgcaactatcagccagccatccagccagccatccagccagccaaccaactatccatccacaatttgtggacacaattccggcattcaaccaaaattccagttgaatgggtgaatggtgaatggctgaatggacgaatgccaggggatcatcatgaatggcaatgcaactatcagccagccatccagccagccatccagccagccaaccaactatccatccacaatttgtggacacaattccggcattcaaccaaaattccagttgaatgggtgaatggtgaatggctgaatggacgaatgccaggggatcatcatgaatggcaatgcaactatcagccagccatccagccagccatccagccagccaaccaactatccatccacaatttgtggacacaattccggcattcaaccaaaattccagttgaatgggtgaatggtgaatggctgaatggacgaatgccaggggatcatcatgaatggcaatgcaactatcagccagccatccagccagccatccagccagccaaccaactatccatccacaatttgtggacacaattccggcattcaaccaaaattccagttgaatgggtgaatggtgaatggctgaatggacgaatgccaggggatcatcatgaatggcaatgcaactatcagccagccatccagccagccatccagccagccaaccaactatccatccacaatttgtggacacaattccggcattcaaccaaaattccagttgaatgggtgaatggtgaatggctgaatggacgaatgccaggggatcatcatgaatggcaatgcaactatcagccagccatccagccagccatccagccagccaaccaactatccatccacaatttgtggacacaattccggcattcaaccaaaattccagttgaatgggtgaatggtgaatggctgaatggacgaatgccaggggatcatcatgaatggcaatgcaactatcagccagccatccagccagccatccagccagccaaccaactatccatccacaatttgtggacacaattccggcattcaaccaaaattccagttgaatgggtgaatggtgaatggctgaatggcgtaatgccaggggatcaaccagaatggcaatgcaactatcagccagccatccagccagccatccagccagccaaccaactatccatccacaatttgtggacacaattccggcattcaaccaaaattccagttgaatgggtgaatggtgaatggctgaatggacgaatgccaggggatcatcaagaatggcaatgcaactatcagccagccatccagccagccatccagccagccaaccaactatccatccacaatttgtggacacaattccggcattcaaccaaaattccagttgaatgggtgaatggtgaatggctgaatggacgaatgccaggggatcataaagaatggcaatgcaactatcagccagccatccagccagccatccagccagccaaccaactatccatccacaatttgtggacacaattccggcattcaaccaaaattccagttgaatgggtgaatggtgaatggctgaatggacgaatgccaggggatcatcaagaatggcaatgcaactatcagccagccatccagccagccatccagccagccaaccaactatccatccacaatttgtggacacaattccggcattcaaccaaaattccagttgaatgggtgaatggtgaatggctgaatggacgaatgccaggggatcataaaaaaatggcaatgcaactatcagccaccccatcaggctttgaggaggggccgccctcatcccaatacccctgggctatcgtgtggggtcccaccgtgtctcgagaggatggaggggaccccaactctgccaatcccggatttctggactatggttttgcagcccctcatgggctcgcaaccccacaccccaactcagactccatgcgaggtgatggagatgggcttatccttggagaggcacctgccacctgcggccattcctgttcgggggccgtggggaaggaactggtaaaaccttttgcctttattggttccctagaacaccttaacgcccctttaagaacactttcaccaccttatccacaaaacactgttactctgaaatttccacacaaaattgcttacaaagtgtgggcattaggtggcaggagcctaaatcatctgctcagctcctggaagactggggcatggaagacattgaccacgtgttctcaagaggaggattatcgaaccctcaccaactacatagccttcagccagtttgtcagacccctcattgctgccaaaaatcccaagattgctgtctccaagatgatgatggttttggatgcaaaatggcgggagttcagtaccaataaccccttcaaaggcagttctggggcatcagtggcagtgcggcagcagcagcggtag

SEQ ID NO: 144376 - DNA, 4707 bp, Homo sapiens
tcacaggcacctgctgctgctgctgctgcctctgctcttgccctcagtccccgtctttccacctgggtccccttgcactttcatgcctgaggctgcactggtggccaagtctaaactgagggtcctcccgcagaccgagagccgccgcagcgcctcggaggcggcctccacgggcatgctggagcgctgttccagcagcatctccagcagtgagctcatctccgagacaaaggtgctggccagcctcgtgcctgttgggctcagctctggtgcctctgccttgccgaacgtctggaaggtccttggctcctccgtggctgcagcatccggggagatcacattgtcacggtagttggtggtgaggggcaaagagagtctcgccatccaggccgggtcaggggcgctcagccggtccagggccagacctgtgctggggtccagcagacttgacagctcttcttctagcagttgcttcacagagaggtcctcttcaggatccaaaggcccttcctcctgttctgggtctgtctggcctccagcccttgcacttgggccatctgtgtctgggattgcactcctgaggggttttaaggcgtaggagtccttctgtttgtttggttttgttcccctgtagccatttctgctgctgctgcctcctggcttggccaagtacttatttcctcggtggtttggtttgggctggaattggccctgatgcagcaaggacagcagctgggagatttgctgaacaggaggagaatccacagtgagctcctccacggggttccgctcggcgaaggcagccacagacagccggaccaggctccgcaggatctgacggggccctgattctttctcaggggacactttgccattgagatgtcgctgccgtctcagggttgcagaggaggctggtggcctctgtggggcttcctcactgccctggtctccagccagcctccctgtggggctgcctgcaaccttcagaggcctggaacgtggctggcctgtggcaggctggggctcgggaaggttcaggttctcccgggaggcattcctctgcctgggatggttgaaaaggaggttgaccgtgtcttgcagcacctctcggctctccgccggtgctccctggttgccttgattacgcagcgtcctgtacagggtcggggtgaggtggaagggggcctgcaggcaggggtcccagcctgcttccatcatcgcctccttgtccacatctttgtgggactgcccgacttcacaaggctcacctgcctgacccctgagcacaggcacgaggtggatgtctgccttctgaatgtgtttctggggcctcttgggctgctggcggtaggtggactcggcctcccgacagttgtaggccctgttgtccttcttttctgtccggcagatggacatgaacaaagccaggatcaacccgaagatgcccaacagtacagccaggcagatcaccgtcagcatcgacatgctcaaggccccaggcttgcgggctgagtccctcaggtggtccacactggtgacaaacatgaccctcaacagggctcgggtctgtaagggggggcttccctggtcctctactactatctccagctcccactcactcccaatgaggctgctggcattggtgacattgacgaacagctgccccgtatgagggttgaggatgaagaggtgggcttcatttccactgcggatgctgtagaggggctctccatttgcccccgagtctgcatctcttgccacaatggttgtcaaaaggaatggccgggagctgtgagtggccagtggaggtgtgtcagtgcccgctgggcccaagccattgggagtctcgatgggcaccagcaggtggcctgtggaggcattcacaagcacggagaggctggcttttccatcgctgagcacaggctggaccacctctggggcattatcattggcatccaagaggctgacccacacagagacactggatgcaagcatgggttgcccgctgtcctctgcgatcacctggaactcaaagccggccatctcttcatagttcagtgacctctgagcagtgacctctcctgtgttggagtcaatagctactaagtgagcaactggggagtcctggatgcggtatgagacttttccattaatgcccaagtctgcatcatgagccttgatggtaatgaggtgaagagagggtaagttgttttcccgcgtggagacttcatacctgcttttctcaaacacaggtgcattgtcgttgatgtcactgatctgaatgctgagctgtttcttggctgataagggctggagtccttggtcttgggctaacagagtgagggtatatttgggccactgctctctgtccagtgtggcattggttagcaacatgtatgtgttgccattagttcttttcagcctgaagtggcccagctcttggctcagccagcagtggaccaaaccattgtgtcctgaatccaagtcatctgccatgacaagagcaataaaactgtccttgggaagagcttctgacaccagtgatggctgggaggcccatgtgacgtggatgcttgggatgttgtcattgacatccagaaccttgatgagaactttgcaatgggctgggataggattgggacccaggtcccttgcctgaacatccacctcgtaggcagggttcttttcatagtctagaggtcgacgcagaatgacctggcctgtcttggcatcaatactgaaggtgtccagcacctctggaggcatgtgcttactgaggaagaactccacctccccattggggccttggtcagggtctgtggcggtcagttttatgagaagcgtaccaggtgcagcatcttcttggatttccagtgccagtgaactctcagcaaacgcagggctattgtcattggagtccaagacgttgaccttgaccaagctggtacctgacttgggggggttcccattgtcataggcagttaacaccagatcaaaaaatgaatggatttccctgtccagctccttcaccactatgagttctgcatgtttggtctcatcagggcccacaatgacatccaaggcaaagtgctcactgctgctgctgctgctgcctctgctcttgccctcagtccccgtctttccacctgggtccccttgcactttcatgcctgaggctgcactggtggccaagtctaaactgagggtcctcccgcagaccgagagccgccgcagcgcctcggaggcggcctccacgggcatgctggagcgctgttccagcagcatctccagcagtgagctcatctccgagacaaaggtgctggccagcctcgtgcctgttgggctcagctctggtgcctctgccttgccgaacgtctggaaggtcctcggctcctccgtggctgcagcatccggggagatcacattgtcacggtagttggtggtgaggggcaaagagagtctcgccatccaggccgggtcaggggcgctcagccggtccagggccagacctgcctgacccctgagcacaggcacgaggtggatgtctgccttctgaatgtgtttctggggcctcttgggctgctggcggtaggtggactcggcctcccgacagttgtaggccctgttgtccttcttttctgtccggcagatggacatgaacaaagccaggatcaacccgaagatgcccaacagtacagccaggcagatcaccgtcagcatcgacatgctcaaggccccaggcttgcgggctgagtccctcaggtggtccacactggtgacaaacatgaccctcaacagggctcgggtctgtaagggggggcttccctggtcctctactactatctccagctcccactcactcccaatgaggctgctggcattggtgacattgacgaacagctgccccgtatgagggttgaggatgaagaggtgggcttcatttccattgcggatgctgtagaggggctctccatttgcccccgagtctgcatctcttgccacaatggttgtcaaaaggaatggccgggagctgtgagtggccagtggaggtgtgtcagtgcccgctgggcccaagccattgggagtctcgatgggcaccagcaggtggcctgtggaggcattcacaagcacggagaggctggcttttccatcgctgagcacaggctggaccacctctggggcattatcattggcatccaagaggctgacccacacagagacactggatgcaagcatgggttgcccgctgtcctctgcgatcacctggaactcaaagccggccatctcttcatagttcagtgacctctgagcagtgacctctcctgtgttggagtcaatagctactaagtgagcaactggggagtcctggatgcggtatgagacttttccattaatgcccaagtctgcatcatgagcttgatggtaatgaggtgaagagagggtaagttgttttcccgcgtggaacttcatacctgcttgtctttttttttgtctttctcgtgcgttggtgtgacccccccccacttccttcccgtacggggtgtctgccggtcggagacgctcctcacttcccagatgggttgttgctagagcaggtgattcaatcttccttaggtaatgccgtggtccaaaggcgatcccacgcagcaccacattaagacgcgtttctgccacaggcacaggttcgggttgttttacctgttccat

SEQ ID NO: 144377 - DNA, 2491 bp, Homo sapiens
atgctgcgctctctccgcctgcagcaggagtggctggaatgggaggaccggcggcgggcggctgcccagcagtgccggagccgcaggtgcccgtcaagtccccgggcccgactcactaggcctcaccgttcctgccgagacccagctgtccaccaagccctcttctccggcaacctgcagcaggtccaagccctgttccaagatgaagaggccgccaacatgattgtggagactgtgagcaaccagctggcctggtcggctgaacaggggttctgggtgctgacccccaagaccaagcagacggcacccctcgccatcgctacagcccgaggctacacagactgtgctcgacacctgatccggcagggagctgagctggatgcccgtgtcgggggtcgcgctgccttgcatgaggcctgtgcccgagcccagtttgactgtgtgcggctgctgctgaccttcggagccaaggctaatgtgctgactgaggagggcacgactcctttgcacctctgcacgatccccgagtccttgcagtgcgccaagttgctgctggaagcaggagcgacggtgaacctggcagcaggcgagagccaggagacgcccctgcacgtggcggcggcgcgcggcctggagcaacatgtggctctgtacctggagcatggcgccgacgtgggcctgcgcaccagccagggcgagactgcgctgaacacggcgtgcgctggggccgagggcccaggtagctgcaggcgacaccaggctgcggcgcgccggctcctggaggctggagctgatgcccgggcggccgggcgcaagcgccacacgccgctgcacaacgcttgtgccaacggctgcgggggcctggccgagctgctgctgcgttacggggcccgcgctgaggtccccaatggggcgggccacacgcccatggactgtgcgctgcaggccgtccaggactcccccaactgggagcctgaagtccttttcgccgcactgctggactacggggcgcagccagtgcgccctgagatgctgaaacactgcgccaacttccctcgggccctggaagtcctgcttaatgcctatccttgtgtcccatcctgtgagacctgggtggaggcggtgctcccagagctgtggaaggagcacgaagccttctacagctcggccctgtgcatggtgaaccagccaaggcagctgcagcacctggcccgactagctgtgcgcgctcggttgggaagccgctgccggcagggtgccacccggctgccactgcccccgctcctcagggactacctgctgctgcatatgaagcggagccgctgccgcgaccgaccgcagccgccgccgcccgaccgccgggaggatggagttcagcgggcagcggagctgtctcagtctttgccgccgcgccggcgagcgccgcccgggaggcagcggctggaggagcggacgggccccgcggggcccgagggcaaggagcagccgcctgccttggcctcccaaagtgccgagattgcagcctctgcccggctgccaccccgtctgggaagtgaggagcgtctctgcctggccgcccatcgtctgggatgtgagccgcccctctgcctggctgcccagtctggaaacctaggggacaatggacttcctgcaggaaggcaagagttgaagcaggggacccatgaggaaaccactgcgctggcccaggtgagagctgaagggctgcctgtgctggtatggatggagacagaggatttgcaggtgatgagcttccgaatcagcctgagtagacatgggccgaagccctcccaccccaagtcagacagtttcagtttggcgggatccaaatccctcctgccctttaaggatctcaagcacacagtgaatgatgaggagggtcggtggagtgcaatcccagacacagatggcccaagtgcaagggctggaggccagacagacccagaacaggaggaagggcctttggatcctgaagaggacctctctgtgaagcaactgctagaagaagagctgtcaagtctgctggaccccagcacaggtctggccctggaccggctgagcgcccctgacccggcctggatggcgagactctctttgcccctcaccaccaactaccgtgacaatgtgatctccccggatgctgcagccacggaggagccgaggaccttccagacgttcggcaaggcagaggcaccagagctgagcccaacaggcacgaggctggccagcacctttgtctcggagatgagcctcactgctggagatgctgctggaacagcgctccagcatgcccgtggaggccgcctccgaggcgctgcggcggctctcggtctgcgggaggaccctcagtttagacttggccaccagtgcagcctcaggcatgaaagtgcaaggggacccaggtggaaagacggggactgagggcaagagcagaggcagcagcagcagcagcagcagcagcaggtgcctgtga

SEQ ID NO: 144378 - DNA, 2633 bp, Homo sapiens
tttttttttttttttttggtatggcatttttgttttgttgttaacagctttattgagctataactcaccccttatatattgagatatagttcactcctttaaagtatacaattcaatgtgttttagtatattcagagttgtgtaaccacgtactatatgatgatttttgaaaatactaacctctcccctctcccctttccctagtctccctctgatgccaagccgaagctggactgtactcccgccatctcggctcactgcaacctccctgtcctgattctcctgcctcagcctgccgagtgcctgcgattgcaggcgcgcgccgccacgcctgactggttttcgtatttttttggtggagacggggtttcgctgtgttggctgggctggtctccagctcctaacccgtgagtgaatccgccaagccttcggccttcccgaggtgccgggattgcaagacggagtcttgttaactcaagtgctcaaatggtgcccaggctggagtgcagtggcgtgatctcggctcgctacaacctcccacttccccagccgcctgtcttggccccccaaagtgccgagattgcagcctctgcccggccgcttaccccgtctgggaaagtgaggaagcgtctctgcctggccgcccatcgtctgggatgtgaggagcccctctgcctggctgcccagtctggaaagtgaaggaagtgtctctgcccggccgcccatcccatctaggaagtgaggagcgcctcttcccacccgccatcccatctaggaagtgagggagcgtctctgcccggccgcccatcgtctgagatgtggggagcgcctctgcccggccgcgaccccgtctgggaggtgaggagcgtctccgcctggccgcccatcgtctgggatgtgaggagcccctccgcccggcagctgcccagtctgagaagtgaggagcgtctcagcccggccgccatcccatctaggaaacatttaattttggcttctgctgctagccggatcttcattgccaaaagaagcacccaaccctctgcagtggctattggccgaccttccgtaccccagtgcactatgcggctttcagttaataactgctctaggccacctggcattttcaaggcatccctgcactcacacagaggtacacaggcactcaccacacagaagaagagcccagcaaagagccccacggccgccacaaccgagaccagggtgatgaggaagatttcccacggcaccagggacccaccaggcttcgcctcactcactgcagtagatgcactatgggaagttgtgtgcattccagtcagagctgctgttccagagcctgcagaggtcacactggacccagagttggtggctgtgttggccccactggaggttgtgctggactcagaattggtggcagtgctggccccactggacactgtgctggactcagagttggtggctgtgctggccccactggaggtcgtgctggactcagaggtggtggctgtgctggccccactggacactgtgctggactcagagttggtggctgtgctggtcccactggaggtcgtgctggacccagagttggtggctgtgctggccccactggaggttgtgctggactcagagttggtggctgtgctggccccactggaggtcgtgctggactcagagttggtggctgtgctggccccactggaggttgtgctggagtcagagttggtggctgtgttggccccactggaggttgtactggactcagagttggtggctgtgttggccccactggagggtgtgctggactcagaattgagttggtggctgtgccggccccactggacactgtgctggactcagagttggtggctgtgccggccccactggaggtcgtgctggactcagagttggtggctgtgccggccccactggagggtgtgctggactcagagttggtggctgtgctggccccactggaggtcgtgctggactcagagttggtggctgtgccagccccattggaggtcgttctggactcagagttggtggctgtgctggccccactggaggttgtgctggactcagagttggtggcagtgctggccctactggacactgtgctggactcagagttggtggctgtgctggccccactggaggttgtgctggactcagagttggtggctgtgctggcctcactggaggttgtgctggagtcagagttggtggctgtgctagccccactggaggttgtgctggagtcagagttggtggctgtgctggccccactggagggtgtgctggactcagagttggtggctgtgctggccccactggaggttgtgctggactcagagttggtggctatgctgatcccactggacgctgtgctgaactcagagttggtggctgtgctgatcccactggaggttgtatggaactcagagttggtgactatgctgaccccattggaggtcacgctggaccctgagatggtggctgtgctgaccccactggaggtcacactggacccagagttggtggctgtgctggctccactggagatcacactggatccagtgttggcagaggtgctagtctcattggaatttgttgctgaagaaatcatataa

SEQ ID NO: 144379 - DNA, 3729 bp, Homo sapiens
tcatccacgggcccccatgggcatgctgatggtgatcatgttgatgtcgctgatgctgctgagcacctctgtcagcatatggtgcatgcacagcatctcatcgccccgctgtacctgctctgcagactcctccatcagcgtgttctggtccccatgcgagtacaggttggatagcagctccaagaagatgaattccttggtctgaaggttggacagactgccgaagtccaaaagcttcagcatttccttagtgtcaggatctacttcaataatctcctgatccaaggctgagacctcaggaacataattgtctctcctttctctctcctcctcctgcagcttgatggagatacctcttactgggcctctctgaattcgcttcatcagatgcgtgacataacctgctatcttgttgcggagctttttgctggggataatggcgatctcctcgcacacgcgcttgttcgtgtggaagtcgttgcccaggcgcgtgtagtacttttctatgatgacccgggccgccttcttcacggttttggtgcgaacgcggccgagccagcgcaaccttctgggaagagtgcggcgccgagccccggccggtgtggttggggaccgccggctgcgctgagccggagagggcccggctaaacagtgccgggcgccgggcttaatgcggaagccgccggcccgttgcgctccagcctgacagggctctgcgccttcccggcccagggcctctctgtgggctgaggaccgcgggaagctgcagatgggggacgattgtggaggatggcggcctcgagccaaaacacctaccatgttggcgggtcctgccagctttgggcgccacaggccactgggcaaggccagctcctctagctggaatctcggttcttctggttccgcatcagggggctgtggtggcgcaggccctccatgctgtgccgccagtgccagcagctccggcagaagtatttgaagcagacctgtgggtacagcccagatgcaaatatcaaagtcgtccagaagttcagatgtaaaggaggacgaggcatcctcctgatctcgacagaagaaaggaccaggctgagaactgcagatatgacacagagaatcttctaggtaggggtcaatctgaaccaggaggctcgataggcgatagaagaagggcacattattggccacacacaggaatgcgggatattggaatgcaggatatttgcctgttttaaaggaggcttggagagaattatgggccttctttgtgaacttggtggttttgatctccacaaaagcagcgctgactgctttcaggtaactccgttggttattgaaagtcacacgaccagaaccaatgggatacttgtgcttatctgtgtcaatcccggcatacaccactccaccaaataggtcgttcaagatggctgccagggcctcagcatttagcattccatgcagagcaccgacaaacaccgtcctgctggggtcaagcctctgagatgggctccggacaaagttactgtcggctaatacccaggggatcacctgcacctccttgcagcgcatccttcggctggacatcttgaaataatattcactcaggccatctgggctcagcgggtcatgagagcaagcctgaagcaaggatcggacagacttctctagttcgaagaccagatacacataccctttgggaggacaccggggatgcttgccatccttaccaggccactccacactcaaagagccaaaaacacggaaggtgttaactaatccagcttctgtaatatcccaaggaacacctcctagaaacaccttgcaagagtagatggggttcttatagttccggggaggaagctggccactccaggtacaggtggcttcattcacagctgcagcttgtcggtgcagcctggcctctctctctatgctgaaggggtctttgggagcttcgaggaggtcccaggacggccacacagaagctcctggccatctctttgaagcactggttggggagggagtgactgcagcaagagcagcttgctcttggtccatccgagaccctacccccatctttaaagggtctctgggaccaccccctgacagagacaggaagggcagaggtggagaaatgcgaaggcttgacttcatctcctcctggtcctgggccagcctgacgatgtcctcctctcccagtgctgcgtctctgacactgccccctggctgatgtactttccttctccttccataaagtcgctgcagcttctccatggccccctgcagggcccggtgggtctccccaaacacagactcacccccactctctggggctggggccgctacctctggctttttctgggacgaggccactgggtgagccaggggctggcagcacaccctttgttcctcctgggcattggctccagcggagttgaaaaatgccaccatggcctcccggctctccaggtcccctgggatgttcggcatgggccgaagcgcctcctgctcactgtccagatgtcctcctccatctccaccctgcttgtccgcacatccaagctccttgtgggactggggctccaggtactggtctggctgctgctgcagactcggagcctcttggctcttcagctccacctgccggaagaccctgtccccaggctgcagctgcctgtggcctggcacctcccctccccagaggctggtgcccgcctcccacatcttcttggatgggtcggaggttacagtctctttcagctcacccgacttctccagctcctttacttgctgctccaactgcagtgtgctcttgttctcgttgttcagctcctcgaagccgctgcgtggctcggcccgctgctcgtacagggcttcccaccccagctccagcatcctctccagctcccgcaacctctccagctcccgcagagtctcctgctgccacagcctctcatcctgttgccgaagcctctcctgctccaggagctcctccacctcgtccagcagcctctccctctccagcagcctctcctgctcctcctgccgcctctcctgttttaacagcttctccacctcttccagcagcctctcctgccctggcagcttctcctgttcacacagcctctcctcctgttcacgtagcctctcctcctgttcacacagcctctcctcctgttcacacagcctctcctcctgttcacgtagcctctcctcctgttcacgtagcctctcctcctgtctcctgttcaggagactcaacatctgattgttttccacctcagcctggagctgtcttcccacactctctagctccttccttaggtggttggtctcatcttgtagctgctccaccttagatggccctgctgggggctgtggggccaggggttcagccgtctggtttttgagtttgaacaagctcctcccaagcttctgtaccagatgtatctcatgcttcttctcctccttagatgtgcgaaccagtgaattgatgttttcagtgagttgactgattattgcggagcttgaatccagggctactgctagttcttggtactggctatccccaggtgagtggtaaccaccagaagtggctgtgtcagggctactgccattgactttctttttcctgttagctcctgctggaatgccagggctcttcctctgccaatatgcttttaactttttcttggctgcggccaatttcccctgttgtgttttttctgacat

SEQ ID NO: 144380 - DNA, 3362 bp, Homo sapiens
acccgacaacatggtaggcgttttggctcgaggccgccatcctccacaatcgtaccgcatctgcagcttcgcggggacctcagtccacagagaggccctgggccgggaaggcgcatagccctgtcaggctggagcgcagcgggccggtggctttcgcattaagccccgcgcccggcactgtttagccgggccctctccggctcagcgcagccggcggtccccaaccacaccggccggggctcggcgccgcactcttcccagaaggatgcgctggctcgtgagtgatactgtcctctgcacccgcagggccgcgttcgcaacaaaacccgtgaagaaggcggccccgggtcatccatagaaaaagtactacacgcgccctgggcaacggacttcccacacgaacaaagcgcgtgtgcgaggagatcgccatttatcccccagcaaaacagtcccgcaacaaggttaccaggttatgtcacgcatctgatgaagcgaattcaaaaagggccaagtaaaaggtatctccatcaagcttgcaggaggaggaaagaaaaaaggagagacaattatgttcctgaggtctcagccttggatcaggagattattgaagtagatcctggacactaaggaaatgctgaagcttttgggacttcggcagtctgtcccaacctttcaggttcacttcaggcctacagttgggggatggaattttcaaaacgccttcgggggacctggtttggaattttttctcgtagtgctgtttagtgaccagatcctggttttgattggcaccaatgacggcaagagagagtccaacaggatcctaccagtgagcagtgacccagcagctcaggccagctgcatgggagcaggtgggcatcacactgtgttctcctagaagcatccattcaggggaaattgggtttgaagtgtccctttagaagacaccgcggtcacccggcctgttgagacccacgagctcattcgcaatgcagccgatatctccatcatcgttatctacttcgtggtagtgatggccgtcggactgtgggctatgttttccaccaatcgtgggactgttggaggcttcttcctggcaggccgaagtatggtgtggtggccgattggagcctccctctttgctagtaacattggaagtggccactttgtggggctggccgggactggggcagcttcaggcatcgccattggaggctttgaatggaatgccctggttttggtggttgtgctgggctggctgtttgtccccatctatattaaggctggggtggtgacaatgccagagtacctgaggaagcggtttggaggccagcggatccaggtctacctttcccttctgtccctgctgctctacattttcaccaagatctcggcagacatcttctcgggggccatattcatcaatctggccttaggcctgaatctgtatttagccatctttctcttattggcaatcactgccctttacacaattacagggggcctggcggcggtgatttacacggacaccttgcagacggtgatcatgctggtggggtctttaatcctgactgggtttgcttttcacgaagtgggaggctatgacgccttcatggaaaagtacatgaaagccattccaaccatagtgtctgatggcaacaccacctttcaggaaaaatgctacactccaagggccgactccttccacatcttccgagatcccctcacgggagacctcccatggcctgggttcatctttgggatgtccatccttaccttgtggtactggtgcacagatcaggtcattgtgcagcgctgcctctcagccaagaatatgtctcacgtgaagggtggctgcatcctgtgtgggtatctaaagctgatgcccatgttcatcatggtgatgccaggaatgatcagccgcattctgtacacagaaaaaattgcctgtgtcgtcccttcagaatgtgagaaatattgcggtaccaaggttggctgtaccaacatcgcctatccaaccttagtggtggagctcatgcccaatggactgcgaggcctgatgctatcagtcatgctggcctccctcatgagctccctgacctccatcttcaacagcgccagcaccctcttcaccatggacatctacgccaaggtccgcaagagagcatctgagaaagagctcatgattgccggaaggttgtttatcctggtgctgattggcatcagcatcgcctgggtgcccattgtgcagtcagcacaaagtgggcaactcttcgattacatccagtccatcaccagttacttgggaccacccattgcggctgtcttcctgcttgctattttctggaagagagtcaatgagccaggagccttttggggactgatcctaggacttctgattgggatttcacgtatgattactgagtttgcttatggaaccgggagctgcatggagcccagcaactgtcccacgattatctgtggggtgcactacttgtactttgccattatcctcttcgccatttctttcatcaccatcgtggtcatctccctcctcaccaaacccattccggatgtgcatctctaccgtctgtgttggagcctgcgcaacagcaaagaggagcgtattgacctggatgcggaagaggagaacatccaagaaggccctaaggagaccattgaaatagaaacacaagttcctgagaagaaaaaaggaatcttcaggagagcctatgacctattttgtgggctagagcagcacggtgcacccaagatgactgaggaagaggagaaagccatgaagatgaagatgacggacacctctgagaagcctttgtggaggacagtgttgaacgtcaatggcatcatcctggtgaccgtggctgtcttttgccatgcatattttgcctgagtcctaccttttgctgtagatttaccatggctggactcttactcaccttcctttagtctcgtcctgtggtgttgaagggaaatcagccagttgtaaattttgcccaggtggataaatgtgtacatgtgtaattataggctagctggaagaaaaccattagtttgctgttaatttatgcatttgaagccagtgtgatacagccatctgtacctactggagctgcagaagggaagtccactcagtcacatccagaaaaaggcagactaagaatcagaagccatgtgattgatgtctgacgtgagtctgtctcaggtagattccgggtgtcagtgtggtttataatccttgaatattgttttagaaactttggtctccctggttcctgccacttttcctgtccgtcctcctccccattttttttttaaaagaaagctgttttcccctcatcaaa

SEQ ID NO: 144381 - DNA, 1491 bp, Homo sapiens
atggcctttcgcatgatgcgttattctatagccgccatgcaccggcatctggaggctgaccacgataagctgccgctggtggtgccgatactgttttatcagggcgaggccacaccttatccgctatcaatgtgctggtttgatatgttttactcgccggagctggcgcgacgcgtctataacagtcctttcccgctggtggatatcaccatcacaccggatgacgaaatcatgcaacatcggcggattgcgattctcgaactactgcaaaaacatattcgccagcgcgacttaatgttattgcttgagcaactggtcacgctgatcgacgaagggtacactagcggaagtcagttagttgccatgcaaaactatatgctgcaacgcggtcatactgaacaagcggatttgttttacggtgtgttgagagacagggaaacgggaggggagtctatgatgacgctggcgcagtggtttgaagagaaagggattgagaaggggattcagcagggaagacaggaagtaagtcaggaattcgcccagcgtcttctgagtaaaggaatgtctcgggaagacgttgcagagatggcaaatttacctcttgctgagattgataaggttaaaaacaatgagcacaaaaccactcttccgttacggaaagcgaaaaaatcatccggtgaacctgacgtcgtcctgtgggcaagcaacgattttgaatcgacctgtgccactctggactacctgatcgttaagtcagcaccagacaacgctcactatcaaggcaatgaagagatgatgatcaaactgtttggcgaaccggtggctttcgatgaagagcagccgcagcaaacccgttttcgcgatctgtttaatcgccgccattttccttttgttctgtttgttgccgccatctggacctgccaggtgatcccaatgttcgccatttacacctttggcccgcaaatcgttggtttgttgggattgggggttggcaaaaacgcggcactagggaatgtggtgattagcctgttctttatgctcggctgtattccgccgatgctgtggttaaacactgccggacggcgtccattgttgattggcagctttgccatgatgacgctggcgctggcggttttggggctaatcccggatatggggatctggctggtagtgatggcctttgcggtgtatgcctttttctctggcgggccgggtaatttgcagtggctctatcctaatgaactcttcccgacagatatccgcgcctctgccgtgggcgtgattatgtccttaagtcgtattggcaccattgtttcgacctgggcactaccgatctttatcaataattacggtatcagtaacacgatgctaatgggggcgggtatctcgctgtttggcttgttgatttccgtagcgtttgccccggagactcgagggatgtcactggcgcagaccagcaatatgacgatccgcgggcagagaatggggtaa

SEQ ID NO: 144382 - DNA, 701 bp, Homo sapiens
ttcccgggtcgacgatttcgttgttgactaagaaaataaaatgtgcttaccacctttgcaaaaaagacgttgaagaaagcaaagctattgaaagaatgcttcacttcatgcacgggattttatcaaaagacgaaccgagaaaatattgcagtgaagcttgtgccgaaaaagaccagatggcacatgaactttaattaattgactattcgaaactgaatttatgccagaaatggcaggtattcgctcaaccctaattaaggagaaaaacatgattaccaattatgaagccactgttgtaactaccgatgacattgttcacgaggtgaatctggaaggaaagcgcattggctatgtaattaaaacagaaaataaagaaaccccattcactgtggttgatatcgatggtccatcaggcaacgtaaaaacacttgatgaaggtgtcaaaaaaatgtgcctggtgcatatcggaaagaatctgcccgcagaaaaaaaagccgaatttctggcaactctaattgcaatgaaattaaaagcgaaaaaatcatccggtgaacctgacgtcgtcctgtgggcaagcaacgattttgaatcgacctgtgccactctggactacctgatcgttaagtcaggtaaaaaactgagcagctattttaaagctgttgccacgaattttcctgtcgttaatgacctgcccgctgaag

SEQ ID NO: 144383 - DNA, 2316 bp, Homo sapiens
tcattctggtgctgtatgtaagctgggttcggctctatagaacccataacctaggggacagggaacctctgcccggtccagggagatgctcattccattcgcagtgccgttggcgttaacgccgttgttctgactgtccagtacgtggaaactatttttctggcgcgatgcttttataacgagatcgctgtaaaaaccgttttgtgccatgtaactggcgtacattcccatgtagtctgaacgtgcggtaccgtcgcctccgctatagtccggcgatgcatgtataacaacacggccggggatctcaacaagggtgaagcaatcggtgttatcgcggcacagtccatcggtgaaccgggtacacagctgaccatgcgtacgttccacatcggtggtgcggcatctcgtgcgggtgctgaatccagcatccataaacaagtgctcaatcatgtaccattgatccgggcacatggttgaaggttgtacggctagagtgaccccggcttcaggcacggcaaagcccggataaccgatcccagaggccagccagggcggaggctgcaaggtggaagctcggagggaaacggcagcgatatgaaggctgctcgcaaagtatccggcaataagcacagcacttcttcccaccagcatgcagtttggtgcccaggagttccgagttaaagtggcaaggcatgggcagctgatcaacggtttgtgccccggatccttggaaaaggcaggggacatgtcgatgctgcatagctcagttggaaatgcagaaatcacctgtcttctgtgtcgctcaatggcgaaaatcagcgttttgttggcgacgcccgctaccgcacgagattgcaacgtggaagtgccaatctcttcaaacgacaacggtgcggaacacttcaccaaaacctggaacttctttagcagttcaccgagtgacggtgaaccgagcggtagaccgaagccgaggaaatcgagcgaggtcaggctggttatcgaactacataaaataaacggtaaaaaggtgagggtcgcgaccatggcattaggcaacatatgacgcaggatgatactgcgatcgctgacgccaagcgcctgtgccgcacgaatgtagtcgaaattacgagtacgtaaaaactccgcccgcaccacgccgaccagactcatccagccaaacaagacagtaattgccagcagccaccagaagttaggctgtacgacgctggaaagtaaaataatcaaaaacagcgtcggcatccccgaccatacttcaataaagcgttgtccccagagatcgactttaccgccgtaatagccttgtagcgcccccgccagcacgcccatcacgctggaacagagagtcagcatcaggccaaacagaaccgagatccgcgtgccatagagaatgcgtgccagcacatcgccgccgttggcatccgttcccagccagttttgccgggagggtggagaagggaagggcttattggtagcaaagttgatactggtagcaccaaagcgaatcggtgcccacagtacccagccgttattttccagccgtcgtctcagccacgggtcctgatcatcagcctgacttgccagcgggccgccaaaatcgctttcgctgtagtttttcaataacgggaaataccaactgccgtcataacgcaccagcaacggtttatcgttggcgataagttcagaacacttactcaaaccgtacaagacgaggaaaatccataacgaccagtagccgcgacggttatgacgaaaacgcgcccaacgggcccctttcgcacgcgcggtcaccacgtattgcttgcgcacttcatcaaggaatgagttttttgtcagcatggtcagcgccgcaaagccaccaatcactgtcgccagcaccggcagcgtgatatgccacagataatcggtgattttctgataccacggcagcgaatcaaagttagcggaaaccaggccgcgtagagggaacaggtcgatagcacatgtgattacgccttctccctctcgttcccccagcgcgtaagtcactgaaactttggccaacttcagtctccccgtgaacccgtggtgaccccgggcccgcggtgtcgcatggttctcccaggatgcacgctggagatctgagaatggacagactgcctcctcaagtggtctctgaccctgagtagtataatagcaagtcccgaatgaggcaaagtctgcttgcttggtccggccattgttaacgttatactcgatgttcgttgagactacgtagggttgaccaatgtaagcttcagtagcattggaaggttccat

SEQ ID NO: 144384 - DNA, 2196 bp, Homo sapiens
atggaattgaatattacttcaaagtctaatccgtttggtgatccgacagcagaaaatgataaaaagatgttgagtaatgctttcattgaaactgctgactttaggactctaattgaaactgatgacaggaccattgttgttggtagacgagggacagtaaatacaacgccccagatagagctgccaggtgcgcgaattttgctggtcgtcggtctggatagtcagcgcatttgccggacaagcacaggcgcaggcaccgcaggcaatacattggctgggcatcagcgtcacacggtcggtacaggagtagcagggatcaaggctaccgataatcagcggtgcgtcagaaacggtattgccgcgcagcatgtaacgcaacaccggccagttggcgtaggtggcggcacggcagcgccagcggaacaatttttggttatcaccgagcatgctccagtgcacgtcttcaccgcgtggcgcttcaacaaagcccagcgcgaatgcgtgaggtttatagctaaagccttcggtcagcagtggggtatccggcatgttgtcgagggcaaattccagcattgccagcgaatcaacgtctctttgacacggaccatcacgcgggagaaaacatcgccgccggtaaagaccaccggtgatgtccttggtaccgccggattcctgcggaatacgcgccagggtgtcaccagagctgatctgtacgccatcttccagctgaacaatcgctttacccggcaggaagtactgcgctggcatatcggtacctgggatcagaacgtcgttaccctgagcatcaacgattttcagtgccggacgcagatctttaccacctgcggtacgttctgcggaatccagaaccaccagcgaagacagaccggtcagttcgtcggtctgacgcgtaatggtctggccgtcgatcatgtcagtaaagcgtacaaaaccgcttacttcggtgataaccggcatggtgtgcgggtcccagtttgcaacggtttcgccgccagcaacctgttcgccatcgcctttcgccagtaccgcaccgtaaggtactttgtagctttctttagtacgaccgaattcgtcgatcagtttcagttcagtattacgggaagtgataaccagtttaccgctggagttcaaaccgacttcacgctgctgagcttgatgctgggtccgagtacggatagtcacttccagtgccgcgagcgcgggctgctggcaccaattactgacgtggttaaacgtggcgctctgtatattggctggagcgcaggcgctaaccttgcttgcccaactattcgtaccaccaacgatatgccgattgtcgatccgcaaggtttcgatgcgctaaatctgttcccgctgcaaatcaacccgcacttcaccaacgcgctgccggaaggccataaaggtgaaacccgtgagcagcgtattcgcgaactgctggtcgtcgcgccagaactgacgattattggtctaccggaaggtaactggatcacatgcctgatgcgacgcttgacgcgtcttatcaggcctacaggattcacaatattaatactcgtcccgtccttcatcttcatccggctgttccagcacactgtaagccaccgaacaaatcaagagttcaggcgctgcatatctcccaggggatcctctagagtggttgaactggaaccgttcgaccgcgaactgtttggcggcattgtgggttggtgtgacagcgaaggtaacggcgaatgggtggtgaccatccgctgcgcgaagctgcgggaaaatcaggtgcgtctgtttgccggagcggggattgtgcctgcgtcgtcaccgttgggagcgaggatgagcattccattcacccgctggccggaagagtttgcccgtcgctatcgggaaaaaggctactggcaggatttgccgctgactgacattctgacgcgacatgctgcgagtgacagcatcgcggttatcgacggcgagcgacagttgagttatcgggagctgaatcaggcggcggataacctcgcgtgtagtttacgccgtcagggcattaaacctggtgaacccgcgctggtacaattgggtaacgtcgatgaattgtctctttcctttttcgcgctgctggaactgggcgttgcgccggtgctggcgttgttcagccatcagcggggtggacaacaaccgggctaa

SEQ ID NO: 144385 - DNA, 3401 bp, Homo sapiens
atgaataaatggagcaggttaaaccattgttcgcttttggtaattaatcccgaaaataataacgataaacaattttcattgttgcttgaggaataccgttcactttttggtcttgccagtttgcgttttcagggtgaccaacatttgctggatattgccttctggtgcaacgaaaaaggggtcagcgcccgtcagcagcttagcgttcagcaacaaaatggtatctggacattagttcaaagcgaagaggcggagatccaaccacgcagcgacgaaaaacgcattctgagtaatgttgctgtactggaaggtgcgccgccgctatcggaacactggcaactgttcaacaataacgaagtcctgttcaatgaagcccgtaccgctcaggcggcgacggtggtcttttctttacagcaaaatgcgcaaatcgagccactggcccgcaacattcataccctgcgtcgccagcgcggtagtgcgatgaataatctcgtgcgggaaaataccgctagcctgcgcgccaccgatgaacgtttgttattggcctgcggtgcaaatatgggtatttcgtggaatgcgccactctccgatggtaatctggcggagctgcggggaattacgctggcggaagatggctcgctacgtatcggctctgcaacgacatttacccagctaatagaagatcctataactcaacgtcatctcccggcgttatgtgctgcggccacgtccattgctggaccgcagatccgtaacgtcgctacctacggtggaaatatttgcaacggtgccaccagcgcagattctgccacgccaacgctaatttatgacgcgaaactggagatccactccccgcgcggtgttcgtttcgtcccgattaatggctttcacaccgggccgggcaaagtgtctcttgagcatgacgaaatcctcgtcgcctttcattttccgccacagccgaaagaacacgcgggcagcgcgcattttaaatatgccatgcgcgacgcaatggatatttcaacgattggctgcgccgcacattgccgactggataacggcaatttcagcgaattacgcctggcatttggtgttgccgcgccaacgccgattcgctgccaacatgccgaacagactgcacaaaatgcgccattaaacctgcaaacgctggaagctatcagcgaatctgtcctgcaagatgtcgccccgcacgccgcgatcggcacacataaccaggaccgcttttttgcccacatgcgggatgccattcaaccccggcattcctggcagcagtatggcaagcacctccagcttatccaagctaccaacaggggcgttagccgcacaccgcgtggtgatgcaaccgtgctgattgttaacgataaaagtcaggttgaagcgcgccctgtcgttgccagtcaggcgattggcgataaatggttgattagtgaaggactgaaatctggcgatcaagtcattgtcagcggcctgcaaaaagcgcgtccgggagagcaggttaaagccactaccgatacccccgcagatactgcatcgaatatccaacaattgcaccggctgcggtttctggttcagcaaactatccgggcggctgagccccaaacgggccaggatccggggacgcaagttatcgaacagaatatgaacgggatcgattacctgatgtatatgttcttcatcagcgatttcggcggtagcgtgacaattacccttaactttcaatgcgggaccgaatctgatatcgcgccagtgccagtgcagaacaaactcagattggcacgcggtggtgtccggagaagttcaccagcagggatcaaggattggaaaacccgtattggtgtgaaccagacgaccctgatcgtcataaaccggaacgcagggcgaatcgtgagcacagcccgccagcaatgcgagggccgaccagctgatcggcccgaggggttatttcacgcgttcttgcgcttctttcagcagttgctcgagcagtgcacctggtttggcgtatttacgggacaggatcatcgcggcgatgatataaggcttccagctggcttctttgtaggtagcgatacggtatttttcgaatacgccttcagtcacttcaccttctttacaggatacgccgctgatatcagctggccagcagtgcatgtacagggcttcgccatcacgggtcagttccatcatctcttcagtacaatgccagtctttgtgttgcgcgttctgtgccagacactgtttttccagtggcttttaagccttcgtgatcgttcgcacgcagcaatacagtacgctcttccatcactttgtaaggtgcccatgactgcggataacgatgtctgcgtctttgaaggcttcttccagccggtgacttcacgaaatctccccgaggcttacatatggtatcccaccttaaccctctcggacaggcaagacttccgatgtgcagggaaatcctacgaagagtgtcacacgcgaagtcgcttcacagtgccagttaaaaagggggaagtttcatgcgcagtacggtccggagagacgtcctctcgagtcaccgttgcgtacccggtaagtgaaggcgataaagtcgtctctctgatcgtgcctcgtggcgatggcgcaatcctcaccgcaacgcaaaacggttacggtaaacgtaccgcagtggcggaatacccaaccaagtcgcgtgcgacgaaaggggttatctccatcaaggttaccgaacgtaacggtttagttgttggcgcggtacaggtagatgactgcgaccagatcatgatgatcaccgatgccggtacgctggtacgtactcgcgtttcggaaatcagcatcgtgggccgtaacacccagggcgtgatcctcatccgtactgcggaagatgaaaacgtagtgggtctgcaacgtgttgctgaaccggttgacgaggagagatctggataccatcgacggcagtgccgcggaaggggacgatgaaatcgctccggaagtggacgttgacgacgagccagaagaagaataattttacttcttcatgccaaaagggagctatctcccttgtttgaattgaaaagtccaggctgcaaagtctgggcttttgtcgtattagggcacggtaaagtttggctgtgcccgtaaaaaatggctggctatacacaaggaatgtggcaatgagtggtgaaaaaaaggcgaaaggctggcggttctatggtcttgtaggttttggcgcaatagcactgctttccgctggcgtctgggcgttgcaatatgctggcagtgggccagaaaaaacgttgtcgccgctggtggtgcacaacaatctgcaaatcgatctcaatgagccggacctctttctcgacagagactctctgagccagcttcccaaa

SEQ ID NO: 144386 - DNA, 2560 bp, Homo sapiens
atgggcggcatggtggagcagcagctttctgatgcaatcaccgcgatgcataaccaggacagcgatctggcgaagcgcgtcatcgaaggcgacaagaacgtcaacatgatggaagtggcgatcgatgaagcctgcgtgcgcattatcgccaaacgtcagccgacggcgagcgacctgcgactggttatggtgatcagtaaaaccattgccgagctggagcgtattggcgacgtggcggacaaaatctgccgtactgcgctggagaaattctcccagcagcatcagccgttgctgatgctgcacgacgtgctggacgggtaccgaatgcgaagtcgcgatccccgtcagcaccgcgccctgcaacaacgaaacaccaagaatgagtttaaaaccgatcgccgcaccaataaattccgccagcttccatacacaacatctgaaagcaggcgatcgcgtagtaataagtgggctgcagaaagtgcgtcctggtgtccaggggggctggcgatcctcaaactgccggtggcgcaatatcctacgattgcaccgccggcagtaacgatctccgcctcctaccccggcgctgatgcgaaaacagtgcaggacacggtgacacaggttatcgaacagaatatgaacggtatcgataacctgatgtacatgtcctctaacagtgactccacgggtaccgtgcagatcaccctgacctttgagtctggtactgatgcggatatcgcgcaggttcaggtgcagaacaaactgcagctggcgatgccgttgctgccgcaagaagttcagcagcaaggggtgagcgttgagaaatcatccagcagcttcctgatggttgtcggcgttatcaacaccgatggcaccatgacgcaggaggatatctccgactacgtggcggcgaatatgaaagatgccatcagccgtacgtcgggcgtgggtgatgttcagtggtaccgagatcgagttgtatcatgccgaaatgacgatctcaatgccgcccaggaggcgctcgaagagcgtgcgcgtaatgaactcagcatgaccagcccgggcgaaactttttatcgtctggtgcctgacgcgtcgaagcgcgcacacccgggaattaacatggcaaccactcatttggatgtttgcgccgtggttccggcggccggatttggccgtcgaatgcaaacggaatgtcctaagcaatatctctcaatcggtaatcaaaccattcttgaacactcggtgcatgcgctgctggcgcatccccgggtgaaacgtgtcgtcattgccataagtcctggcgatagccgttttgcacaacttcctctggcgaatcatccgcaaatcaccgttgtagatggcggtgatgagcgtgccgattccgtgctggcaggtctgaaagcccgctggcgacgcgcagtggggtattggtgcatgacgccgctcgtccttgtttgcatcaggatgacctcgcgcgattbttyggcgttgagcgaaaccagccgcacggggggggatcctcgccgcaccagtgcgcgatactatgaaacgtgccgaaccgggcaaaaatgccattgctcataccgttgatcgcaacggcttatggcacgcgctgacgccgcaatttttccctcgtgagctgttacatgactgtctgacgcgcgctctaaatgaaggcgcgactattaccgacgaagcctcggcgctggaatattgcggattccagtttgatattggtcggatgcccgcccaaatgttgctgagcaaaattaaaaataacgatcacaaccacaacactgttgacctcgggcaggaaactggaggatatctcatgagtgaacccctgttaattgcccgcacgccggacacagaactgtttttactgccgggaatggctaaccgtcatgggctgattaccggcgcaacggggacgggtaaaaccgttacgctgcaaaaactggcggagtcattgtcggaaatcggcgtgccggtgtttatggctgatgtgaaaggcgatctgaccggcgtcgcgcaggcaggaacggtgtcggaaaaactgctcgcaaggcttaaaaatatcggcgtcaatgactggcaaccgcatgccaatccggtggtggtgtgggatatctttggcgagaaaggccatccggtgcgggcgacggtttcggatctggggccgctgttgctggcacgactgttgaatctcaacgatgtgcaatctggcgtgctgaatatcatcttccgcattgctgacgatcaggggctgttactgctcgactttaaagatctgcgggcaattacccagtacatcggcgataacgccaaaccatcagcccacagctactcaatgcgatcgattaagccatccggcaggtgcgggtttagtggcccgacattcaccggccaggcggtggtgatttcatctggtgcagcggcatggacgattttcacgggcgtcaggggctacctggcccgcatcagctgcggcgtttgcctggccgttattagtttgcgctccgctatcggcagccagtgcggcaccgctggcaaggcttag

SEQ ID NO: 144387 - DNA, 2823 bp, Homo sapiens
atggcaaccactcatttggatgtttgcgccgtggttccggcggccggatttggccgtcgaatgcaaacggaatgtcctaagcaatatctctcaatcggtaatcaaaccattcttgaacactcggtgcatgcgctgctggcgcatccccgggtgaaactcgctggcgatagccgttttgcacaacttcctctggcgaatcatccgcaaatcaccgttgtagatggcggtgatgagcgtgccgattccgtgctggcaggtctgaaagccgctggcgacgcgcagtgggtattggtgcatgacgccgctcgtccttgtttgcatcaggatgacctcgcgcgattgttggcgttgagcgaaaccagccgcacgggggggatcctcgccgcaccagagcgcgatagaatttgtggcacatttatgggcggtctggcgatgctggcgcgccagttaggccatgaagtaacgggttcggacgccaatgtgtatccgccgatgagcaccttacttgagaagcaaggcattgagctgattcaggggtacgatgccagccagctcgagccgcagccggatctggtgattattggcaacgccatgacccgtggaaatccgtgtgtggaagcggtactggaaaaaaatatcccttatatgtcaggtccacagtggctgcacgattttgtgctgcgcgaccgctgggtgctggccgttgccggtacacacggcaaaaccaccaccgcgggaatggcgacctggattctggaacagtgtggttacaaaccgggctttgtaatcggcggtgtgccggggaactttgaggtttcggctcatctgggcgaaagcgacttctttgttatcgaagcggatgagtatgactgcgccttcttcgacaaacgctctaaatttgttcattactgcccgcgtacgctgatcctcaacaaccttgagttcgatcacgccgatatctttgacgacctgaaagcgatccagaaacagttccaccatctggtgcgtatcgttccggggcagggccgtattatctggccggaaaatgacatcaacctgaaacagaccatggcgatgggctgctggagcgagcaggagtctgagtttgtgaagtcccgtggggttcccgagttctcggtcctttgtgggaccggtctggtcaccatccatgttggaggctgggagcgtccacctgcgccagatgctgctagttggcccagagacgacaacacatgcccgggttccgaacattcaagtggcccagccggttttgcgggctgtcgtttcccgttcctctccgcgcctgtgacggccagcggccagccccgtgtcctgtccccggttcgttgtattccccgggtctcccgggtattcgtgcgcctcgtccagcggccatgctttacccgccggggttctgcgctggaattcggtccttggatcacgatttccagtgccgatcgcagatcttaccacctgcgggtacgttctgcggaatccggacccgccagcgaagacagcccggtcagttcgttcggtctgacgcgtaatggtctgcccgtcgatcatgtcagtaaagcgtacaagaccgcttacttcggtgataaccggcatggtgtgcgggtcccagtttgcaacggtttcgccgccagcaacctgttcgccatcgcctttcgccagtaccgcaccgtaaggtactttgtagctttctttagtacgaccgaattcgtcgatcagtttcagttcagtattacgggaagtgataaccagtttaccgctggagttcacaaccgacttcacgttgctgagcttgatgctacctttgtttttcacttggatgctggattcagcagccgcacgagatgccgcaccaccgatgtggaacgtacgcatggtcagctgtgtacccggttcaccgatggactgtgccgcgataacaccgattgcttcacccttgttgatgatgtggccacgcgccagagttctcttccagcaggtcacaccactgttcgtgcagcagcgtgttgcgcggaacgaggatatcagcagtacccggcttcagaacgtcttcagcagttacacgacccagtacgcgatcgcgcagcggctctttacgtcaccaccctaataccgagtcaggtccgatacggagatgattggccgacaattcagggacccgctaagcgtttaacgaagcggatattcgctaccacgagtcggtgctccagtcgttgcataacccggtgttacagcaacttagcattgcgatcaggcgaccactgcctggagagcaggcaatcagaagcaggcgtcacgcgcctgaacggaaaatctccggctgcggtgttagcagaagtcacgaccgactggcgtgaagagaaaacgccagtggtaatggcaggaatggttggcagcaacgtcggctggaaagttgcaccgtatttatctgttcctgcctgtttttcgtctattggcgaacaattaacgtcagttggcgacaatatctggattattcccggattatgtgtctctcatgacgataaccacaatgtgatgcgcggcgaagaaacacaattgatcggcgcgcgagctctggctccttcctctctttatgtcatgcccgaacccatgcaaatgcatcgtggccgtaacacccagggcgtgatcctcatccgtactgcggaagatgaaaacgtagtgggtctgcaacgtgttgctgaaccgtttgacgagaaagatctggataccatcgacggcagtgccgcggaaggggacgatgaaatcgctccggaagtggacgttgacgacgagccagaagaagaataa

SEQ ID NO: 144388 - DNA, 476 bp, Homo sapiens; identical to SEQ ID NO: 119066
  misc_feature (1)...(476): n = a,t,c or g

SEQ ID NO: 144389 - DNA, 458 bp, Homo sapiens; identical to SEQ ID NO: 119947
  misc_feature (1)...(458): n = a,t,c or g

SEQ ID NO: 144390 - DNA, 1212 bp, Homo sapiens; identical to SEQ ID NO: 137657

SEQ ID NO: 144391 - DNA, 1443 bp, Homo sapiens; identical to SEQ ID NO: 137656

SEQ ID NO: 144392 - DNA, 570 bp, Homo sapiens; identical to SEQ ID NO: 138201

SEQ ID NO: 144393 - DNA, 2670 bp, Homo sapiens
  misc_feature (1)...(2670): n = a,t,c or g
aatttttggtagagatgaggtctcattctgtcatctaggctggggtccagtgagctgtgattgtgccactgcagccttgacctcctggactcacgtgtagtcctgtagctgggactacaggtgcatgccaccattaataattgccacctggctaattagtttttttatggagacaggtctcactgtgttgccttagctggtctcaaactcctgggctgaagtgatcctcccacttcagactcccaaagtgcttgagattacaggcatgaaccaccacacctggcctgatttttttcttgagtaagatggagttctgtagtgataattcacattgcataaggtgaaaattgggaatttgttaggaaaaggtgagttacatttagaagttaaagtgtttaccaacattgatttagtttagttccttttgagaatctggcttagaaggacaagagtaagttatggttgcattaatatagtagggcacatgaaatgaaaccaagtactgtttgctttcctttgtttcagatggaggagatgtataagaaagctcatgctgctatacgagagaatccagtctatgaaaagaagcccaagaaagaagttaaaaagaagaggtatgtcgtctttttttttgtcttttcaagaaaacggttgggaatggttcccacgtggggcagactgttggtgtaattgtgcaaactcgatcactagctctgcgtgatgtggcagaagcgaagggaaccaggtttgcaaaagtaactgtggggatggaatgtgttacctcagacataacggaggnggttctttctatcttagtacagtctaagtactggttactgcatttttttattggctgacaagttgctttttgttgaattttcatgttttgaatctttaaatggaatagaaagtaataattaatgaacatgtaagcataaagtgatgtgatggcccacaaatacaatgtatagtaattaaatcaatgtatttaacatatcacctcaaatacttaacactttgtggcaacaacatttgaaatttattctcttaattgtgaaatgtacgatattctatattcatcatgctgcgcaatagaactaaaaacaaaatcatactcctccctactcctcctgttggagattttatacttgactatcatctgcccattctttgcacccaccagcctctgtaaccaccattctgctctctgcttctgtgagttccattgttttagattctatatgaatatgaagtatttgtctttttgtgcctggcttatttncactgagcacaatattctccaattcattcatgttgcaaatgacagaatttccatcatttttaaagactgggtaataatccattatgtatatgtataccacatttcctttatccatttatctgttgctattaatatatagtgctgcaatgaacatgggagtgccactctcttggacaaactgatttcaaaacatttgggcaaatacctagaagtggtattactgaatctaacatgtcttctatttgacttttggccctatggtagtaggacatcacagaagttggggtttgggaaagttagcttaagatcatacataagtaaatgtatttgaacttggattatttaaccttctgattgcaaagtcttaaatattctctatcaaaattaaattttattaaaattttaaattaaatattctattctcttcagttatagtttaaaaaatatatattcctatcttttgtaggtggaaccgtcccaaaatgtcccttgctcagaagaaggatcgggtagctcaaaagaaggcaagcttcctcagagctcaggagcgggctgctgagagctaaacccagcaattttctatgattttttcagatatagataataaacttatgaacagcaactatttctgtgttaagctcttattcttatgaaccttataggaaataccctgaaatattttggaaaagcaaaggagttgacaggtttttttctccaagaaaacaagtgtaactaactttttaagaaaaaaagttgttatttcttgggcttctgttttacctgacaggagtcattatcccttatgttgtatgatgaacagctctccctaaaaatttggcaagcaacagaccaaccatcagtgggaaatattcttccatccatttattataaccaggatgatgaatgggaaaagtaccttaaagtaaacaaaactggtgctaatccatggcgttgaagggaagttttgagagaaagctgtccagtgatggtcaacatagatttttaacatgttccactttaggtaggcgaaacctttgagcagaaaatagtggatcttttctccaaaaggtgtttaattttatggagatgttgaaaggtacatgccaaatctgagtatacgtgtgaaaataatatgaaagaggagcaaatactaaaccttgtatatcaagtttacatggggaaaaaaacattagataaataaatacatttacatgcctctttaagaaatagccctttggcccacaggatatactgtttgaaaatggaaagttattactaaaaagtctgctataatttattttagtcttgcacttaacagtcccactttcacatagttcaaaatcaggatatgtggatctggatgggccttaagagtcagtttggagggg

SEQ ID NO: 144394 - DNA, 1298 bp, Homo sapiens
  misc_feature (1)...(1298): n = a,t,c or g
cctagcgccgctgggcctgcaggtctctgtcgagcagcggacgccggtctctgttccgcaggatggggtttgttaaagttgttaagaataaggcctactttaagagataccaagtgaaatttagaagacgacgagagggtaaaactgattattatgctcggaaacgcttggtgatacaagataaaaataaatacaacacacccaaatacaggatgatagttctgtgtgacaaacagagatatcatttgtcagattgcttatgcccgaatagagggggatatgatagtctgcgcaacgtatgcacacggaactgccaaaatatggtgtgaaggttggcctgacaaattatgctgcagcatattgtactggcctgctgctggcccgcaggtttcttcaataggtttgggcatggacaagatctatgaaggccaagttggagttgactggtgatgaatacaatgtggaaagcattgatggtcagccaggtgccttcacctgctatttggatgcaggccttgccagaactaccactggcaataaagtttttggtgccctgaagggagctgtggatggaggcttgtcctatcccctcacagtccccaaacgattcccctggtttatgattcttgaaagccaaggaatttaattgcagaagtacatcggaagccacatccatgggcccagaatgttgccagattacatgcgcctaccttaatggaagaagatggaagatgccttacaagaaacagttcgtgcgtcaatacgtaaagaacagcgtaacttccagacatgatgggaggagatgtattaagaaagctcatgctgctatacgagaggaatccagttctatggaaaagaaggcccaaggaaagaagtttaaaaagaagaggtggaaccgtccccaaaatgtcccttgctcagaagaaggatcgggtagctcaaaagaaggcaagcttcctcagagctcaggagcggggctgctgagaagctaaacccagcaattttctataaagatttttcagatatagataataaacttattgaacagcnnnnnnnnnnnnnggggggggccctttaaaaagatccctgggggggcccaattttaccggggcttgcaaggttatagctctctccttatggggagccttattatatcctatctggggatttttgggaaggacccttactttgggggggggacatcttggtccaaccttcctcgggagattaatcgcttaggggaatcctaaatttttaaaggggttagggggataatatattgattttttctggggggg

SEQ ID NO: 144395 - DNA, 2043 bp, Homo sapiens
atgcaattgagcagcagtgaaccttgcgtggtgatcctgaccgaaaaagaggtagaggtaagcgtcaataaccatgctacgtttacccttccgaaaaactacctggccgccttcgcgtgcaacaataacgtcattgaactctcaacgttaaatcacgtattaatcacccacatcaaccgtaacatcatcaacgattatctgttgtttttaaataagaacttaacctgtgtaaagccctggtcgcggctggcaaccccggttatcgcttgtcatagcccagcgtccgcgacagcgtctgcgcgcattattcaaagcgatataagcattggtggttgcgggagagaatccccacagcagcgtgatgccttagcgttaacgttagactccgtgcggctggtgtttgtcgatgggcgttacgtgcccgcactgagcgatgcaactgaaggcagcggatatgaagtgagcattaacgacgaccgtcagggtttacccgacgctattcaggcggaagtgtttctgcatttgacggaaagcctggcacaaagcgtgacgcatatcgccgtgaagcgcggtcaacggccggcaaagccattgctgttaatgcatatcacccagggcgtggcaggtgaagaggtgaacactgcccattaccgacatcatctggatctggcggaaggtgccgaagcaacggtgatcgaacattttgtcagcctgaatgatgctcgtcattttaccggggcacggttcactatcaacgtcgcagcgaatgcccacttgcagcatatcaagctggcgtttgaaaacccgctcagtcaccactttgctcataacgatttgttgctggctgaggatgccaccgcatttagccacagtttcctgctgggtggcgcagtgttacgacacaacaccagtacgcaactcaatggcgaaaacagcacgctgcggatcaatagcctggcgatgccggtgaaaaaggaggtgtgtgatacccgtacctggctggaacacaataaaggtttttgtaacagccgacagttgcacaaaactatcgtcagcgacaaaggccgcgcggtatttaacggtttgatcaacgtcgcgcagcacgccatcaaaacggatggtcagatgaccaacaacaatctgctgatgggcaaactggcggaagtggatacgaaaccgcagctggaaatctatgcagatgatgtgaaatgcagccacggcgcgacggtggggcgtattgatgatgaacagatattctatctgcgctcgcgcgggatcaatcagcaggatgcccagcagatgatcatttacgccttcgctgccgaactgacggaagcactgcgtgatgaggggcttaaacagcaggtgctggcccgaatcggtcaacggctgccaggagcgactttcgtcttatacgccaccgaatgctggcacctgaaaaaattgggctggacatacaaaagacgcctggaatgcaggaacatgaggcggaaattgcacagttacttcagcatattcatgataaggggccggtacgttcagccgattaagagcatcctcgataaagctactcttagaccggaacagattaacatcatcagcacagcctatactttttttaatgtggaacgtcattctctgttccacatggaaactgtggtcgatgccagccgtatgatttctgatatggcccggttgatgggggctctaaaagctgtcgttatggcgaccggcttcgagaaccctttgtcctcagttaatgaaattgagacgaaactttctgccctactgggtagtgagaccactggtgaaatcctttttgacctcttgtgcgctaacggtccagagtggaaccgcttcgttacgctggaaatgaaatatggccggatcatgctggatacggccaaaattattgatgagcaggacgttccgacacatatcctgagcaaactgacttttactttacgtaatcatcctgagtacctagaagcctctgttttgtctcccgatgatgtacgccaagtcctgtcaatggatttttga

SEQ ID NO: 144396 - DNA, 1180 bp, Homo sapiens
tttcgtcgcatgactgaccgcgccactaccacagcttccttaacgttcgagtcgctttatggcacacatcacggatggctgaaaagctggctgacgcgcaaactccagtctgcttttgatgcacatgacattgcccaggacacttttttgcgggtaatggtcagcgaaacgctctcgacgatccgcgatcctcgctccttcctctgcactatcgccaaacgcgtgatggtggacctggttcaccgaaacgcgctggaaaaagcgtatctggagatgctggcgcttatgccggaggggggagcgccttcacctgaggaacgcgaaagccaactcgaaaccctacaactcctcgacagcatgctggacgggctaaacggcaaaacacgtgaagcgtttctgctttcgcaactggatggtctgacatacagcgagattgcgcacaaactcggtgtttccatcagctccgtgaaaaaatacgtggcgaaagccgtcgagcactgcctgctgttccgtctggagtatgggttatgaatcctttgttaaccgattcccgccgtcaggcgctgcgttcagcttcccactggtatgccgtgctaagcggcgagcgcgtcagcccacaacaggaagcgcgctggcaacagtggtatgaacaggatcaggataaccagtgggcctggcagcaggttgaaaacctgcgcaaccagcttggcggtgtgcctggcgacgttgccagccgggcgttgcacgatacccgcctcacccgccgtcacgtgatgaaaggattactgctgttgctcggcgctggcggaggctggcagctctggcagtcggaaaccggcgaaggtctgcgggcagattaccgcaccgccaaaggcacagtcagccgtcaacaactggaagatggctccctgctcacgcctgatctccggttttacctgcagtccgctgccgtccagcagttgttgcaggccgctctcgacgtcgtaatcgccgtgcaggccgttgctctgcttgccgcgcgtcaggctggcgtcaaccgagagggtaaatccgctgtgtgcggcatactgattgagcgctttatcgagcgatcccggtgcgatattaacctgtgcagcaaaagcggaaaacgagagaccggccagcggcagcaggctcaggcgaatggtgttaaccaaag

SEQ ID NO: 144397 - DNA, 649 bp, Homo sapiens
aggattactgctgttgctcggcgctggcggaggctggcagctctggcagtcggaaaccggcgaaggtctgcgggcagattaccgcaccgccaaaggcacagtcagccgtcagcaactggaagatggctccctgctcacgctgaatacccaaagcgcggcggatgtgcgttttgatgcgcatcagcgcaccgtccggctctggtacggtgaaatcgccattactaccgcgaaagatgccctgcaacgccccttccgtgtcctgacccgtcagggccagctcactgctttagggacagaatttaccgtccgccagcaggataatttcacgcagcttgacgtgcagcagcacgctgtggaagtgcttctcgccagtgcccccgcgcaaaaacgcatcgtgaacgctggtgaaagcctgcagttcagcgcctctgagtttggcgcagtgaaaccgctggatgacgagagtacaagctggacgaaggacatcctgagcttcagcgataaaccgctgggtgaggtgatagccacgctaacccgttaccgcaacggcgtgctgcgctgcgatcccgccgttgccgggctgcgcctgagcgggacgttcccgctgaaaaataccgatgcgatcctgaacgttatcgcgcaaacgctt

SEQ ID NO: 144398 - DNA, 1932 bp, Homo sapiens
atggttggaagaccacacaaagaggcccaaggacacaacaccaggggaccagagagacaagcccgggtcaaacagaacaggggaccagaagatatggccaagcgaccagttaagaatagtccacacgtgcaggggactgcgcaggacgccccacctggaaacagacaggcacattccaacacacaaacaatccagaccggcagagcacaagtctccaagcaaggagtagggccggaaaaacaccaccagaaagaggaccgcgtaagtaacacgacaacacccacaggagcgattataccacacaaccagagaaacaatccccgaaacgctctggaaaaagcgtatctggagatgctggcgcttatgccggaggggggagcgccttcacctgaggaacgcgaaagccaactcgagaccctacaactcctcgacagcatgctggacgggctaaacggcaaaacacgtgaagcgtttctgctttcgcaactggatggtctgacatacagcgagattgcgcacaaactcggtgtttccatcagctccgtgaaaaaatacgtggcgaaagccgtcgagcactgcctgctgttccgtctggacggcgagcgcgtcagcccacaacaggaagcgcgctggcaacagtggtatgaacaggatcaggataaccagtgggcctggcagcaggttgaaaacctgcgcaaccagcttggcggtgtgcctggcgacgttgccagccgggcgttgcacgatacccgcctcacccgccgtcacgtgatgaaaggattactgctgttgctcggcgctggcggaggctggcagctctggcagtcggaaaccggcgaaggtctgcgggcagattaccgcaccgccaaaggcacagtcagccgtcagcaactggaagatggctccctgctcacgctgaatacccaaagcgcggcggatgtgcgttttgatgcgcatcagcgcaccgtccggctctgggccagctcactgcggttagggacagaatttaccgtccgccagcaggataatttcacgcagcttgacgtgcagcagcacgctgtggaagtgcttctcgccagtgcccccgcgcaaaaacgcatcgtgaacgctggtgaaagcctgcagttcagcgcctctgagtttggcgcagtgaaaccgctggatgacgagagtacaagctggacgaaggacatcctgagcttcagcgataaaccgctgggtgaggtgatagccacgctaacccgttaccgcaacggcgtgctgcgctgcgatcccgccgttgccgggctgcgcctgagcgggacgttcccgctgaaaaataccgatgcgatcctgaacgttatcgcgcaaacgcttcccgttaaaattcagtctattacgcggtactggataaacatttcaccactagttttcacgtttaacttggcagccctgcttgatttacagggtttggagaaagtgctaatccgccaggaggatggtaaagctaatattgttcaacaggaggttgcccgcacttacttgcagactgtaatggccgatgcttacccgcatctccacgtgactgccgaaaaattgctcgtttcagggctatgtgttaaactcgccgcccctgatttgcctgactactgtatgttactttatcctgaactacgcaccattgaaggtgtcttaaaaagtaagatgagtgggttaggcatgccagtacagcagccggcaggttttggaacttactttgataaacctgctgctcattacattctgaaaccgcaatttgcagctactcttagaccggaacagattaacatcatcagcacagcctatactttttttaatgtggaacgtcattctctgttccacatggaaactgtggtcgatgccagccgtatgatttctgatatggcccggttgatgggtaaaagccaaccttag

SEQ ID NO: 144399 - DNA, 773 bp, Homo sapiens
atgggacatcatggtctcaacgatcccgcaggagaaagccagaaacttcgccgcatcgctgacagcactgttatggaaggtgcgaataagcggggaaattcatctcggcttagtgatctcgcctcaatccccgttataaggcaggttatccagcgaataagcaaccctgaagcaagcatcgagagcttgcaggaacggcgtttttggttgcagtcaattcgtaatttattgatcaaaaacgatattgaaatcttagcagagttgactgaaggcggaagtgccgttcagcgggtggaaacacttaagcctgatatcgtcatcattgatgtcgatatccccggagttaacggtatccaggtgttagaaacgctgaggaagcgccaatatagcggaattattattatcgtctccgctaaaaatgaccatttttacgggaaacattgtgctgatgctggcgctaatggtttcgtgagtaaaaaagaaggcatgaacaatatcattgcggctattgaagctgcaaaaaatggctactgctatttccccttctctctcaaccggtttgttggaagtttaacgtccgaccagcaaaaactcgactccttatcgaaacaagaaattagtgtcatgcggtatattcttgatggcaaggatagggccccgccgacggccagggcgacccggctcatctgcgtcaagaccatcagcaggatgacgatgccgatgagcggcaggatcaggtgcacgaacagccggggggagccgcgcctgatccg

SEQ ID NO: 144400 - DNA, 912 bp, Homo sapiens
ttaattcttcatgccgagaccctggatatttcccattatcgtgtcccttaattcttcataagggtcactattacaagacatgcctgggccatctaaagtaatatccgaaattttagcaacaagaggagcggtgaacatcacaactgtggcgtacaagtccgcagtcatattgtcttttaccaccgcatccgcagtgtctttatccagtcgcaatgtcatcggcccgctattcgccagccagccatctttcacaatccatttttcattgttcagccataacggcagtgcaccactaaatgccccggacatggcgaattgtttcggattgacggcgctaaccagttcgctggatgagagattattcagccgcaacagcgccgggtcatgttgcggcatacgtaattgtttcatcagtacgttaccgcctaacacatcgacgctaacatcagtcaacagcaagggttcttcttcagtccacggataacgcccttgcaaatcagccgtaatatttttcgctgtcaccagattaatcacttcggcaattcgcaacgtaacggggccgcgagtccccagatgccaggctccatcggcaaaacggaaaggcaggacaaaatcgacaccgttaacctgattatctggcatccaggcactaccgcctttcaacacgccgtgtcctcccgcgcggaatcgtttccgctcctctaccatatccagggctttggtaatggccgcacccattggtgtatcgccctgggcaaacaggatgggcggaaaaaaattagcggcgctggtaaagggttgttccacatgcaccgggccgaacgtcacaatgccgagttccactctttttaaagccagcggatcagcaagcagttcatcacgaaaggtaaccaattccggcgttaagttcat

SEQ ID NO: 144401 - DNA, 2775 bp, Homo sapiens
atggattccgactctggcagatacagggagtggcacagccagttttcatcatcacgatccgggaagtcgaagcggctatgcgcgccacggctctcgagcacgacaggcttctatcgtagccagccagaagtcaatgatgccatcaccaaagcggcaaaagcgaaaggtgcctactctttctacatcgttcgtcaaatcgatgccaaccagggcggcaaccagcgtattactgcattcatctataaaaaagatgctaagaaacgtatcgtccagagcccggatgtgatcccggcagattccgaagcaggacgtgcagctctggctgccggtggcgaagccgcgaagaaagttgagatcccgggtgttgcgactaccgcatcaccaagttctgaagtcggtcgcttctttgaaacccagtcatcaaaaagcgggcgttacaccgtcacgctcccggatggcactaaagtcgaagaactgaacaaagcgaccgcagcgatgatggtcccgttcgacagcatcaaattctctggcaactacggcaacatgaccgaagtctcctatcaagttgcgaaacagttaagtacaagattggcctgctatcaagcgcactcgagcgctaaagctcgaaagcccatcgtctgggtacgtgacgcacagcatccctcctttagcggcgcgctgtcactggacgccgggcaaacgctgttcactggcggcagtgtgttaccgccatcaaccttaaaatttagcgtcgatgggcgcgatcctacctatttcctctttaaaggcgatttacatgctggtgagattggcccggttcgggtaaatggtcgctgggacggtattcgtctgcgcggtaacgcctggtggcctaaacaatcactgaccgtattccagccgctggtgccacccgactggaagatgaacttacgcgatggtgaactgtatgctcaggttgcattttctgctgcgcctgaacaaggattccgcgcgggaggacacggcgtgttgaaaggcggtagtgcctggatgccagataatcaggttaacggtgtcgattttgtcctgcctttccgttttgccgatggagcctggcatctggggactcgcggccccgttacgttgcgaattgccgaagtgattaatctggtgacagcgaaaaatattacggctgatttgcaagggcgttatccgtggactgaagaagaacccttgctgttgactgatgttagcgtcgatgtgttaagcggttgcaaaatcaacctggtcgtcgataacggcaaaatcgtccgggcggaggcagcgcaggggaaaaccaaccagggtaccctgtgtctgaagggttattatggctgggacttcattaacgatacccagatcctgaccccgcgcctgaaaacccccatgatccgtcgccagcgtggcggcaaactcgaacctgtttcctgggatgaggcactgaattacgttgccgagcgcctgagcgccatcaaagagaagtacggtccggatgccatccagacgaccggctcctcgcgtggctctaagttaaccctcggcgaaaccgatttcagttccaatattttcgatggtttttcttataccggcgcggcactggcgagtgacgatcgaatgttaccgtgggagctgcgtggctacgccccacaaattagcggtattgcacagaccaatgccacggtgacgatcagtcaatcaggccgcgtcatttaccagaaaaaagtcccgccaggcccgtttattattgatgacctcaatcagtctgttcagggcacgctggatgtcaaagtgacggaagaagatggtcgggtgaacaatttccaggtttcggcagcatcgaggcccttcctgactcgccagggacaggttcgctataaattggccgcggtgactattggatactcacaggacgagcagggcttaggctacggtctaattatgcaacaagatgatgcgacaacagaacgatttcgttggcgcgtatcgatcgtaggacgcgattttacagttagcgaatgtctggatccaaatccactgcagcgatggtctattgccgcgatgtggtatgtcggcgcgacctgtgccgatctggtcggctactggctttatgatgtggaaggcggctggcgctggatgctgggtagcgcggcgatcccctgtttgttgattttgattggtcgattcgaactgcctgaatctccccgctggttattacgcaaagggcgagtaaaagagtgcgaagagatgatgatcaaactgtttggcgaaccggtggctttcgatgaagagcagccgcagcaaacccgttttcgcgatctgtttaatcgccgccattttccttttgttctgtttgttgccgccatctggacctgccaggtgatcccaatgttcgccatttacacctttggcccgcaaatcgttggtttgttgggattgggggttggcaaaaacgcggcactagggaatgtggtgattagcctgttctttatgctcggctgtattccgccgatgctgtggttaaacactgccggacggcgtccattggtgattggcagctttgccatgatgacgctggcgctcgcggttttggggctaatcccggatatggggatctggctggtagtgatggtctttgcggagtatgcctttttctgtgcgggccgtgtaattggcagagcctctatcctaatgaactcctcccgacagatatcgcgcctctgccgaggcggggattatgtccttagtgtctgtatatag

SEQ ID NO: 144402 - DNA, 1389 bp, Homo sapiens
atgagccaggcatggcggcatgtgcgtgtagtcccagctactggggaggctgaggcggtagtgcctggatgccagataatcaggttaacggtgtcgatttgtcctgcctttccgtttgccgatggagcctggcatctggggactcgcggccccgttacgttgcgaattgccgaagtgattaatctggtgacagcgaaaaatattacggctgatttgcaagggcgttatccgtggactgaagaagaacccttgctgttgactgatgttagcgtcgatgtgttaggcggtaacgtactgatgaaacaattacgtatgccgcaacatgacccggcgctgttgcggctgaataatctctcatccagcgaactggttagcgccgtcaatccgaaacaattcgccatgtccggggcatttagtggtgcactgccgttatggctgaacaatgaaaaatggattgtgaaagatggctggctggcgaatagcgggccgatgacattgcgactggataaagacactgcggatgcggtggtaaaagacaatatgactgcgggttcagcaattaactggttgcgctatatggaaattagccgttcatcgacaaaaattatgactagctcgcaagatcaaattgatgcccagaggttgaaaaacacccacgacacagcggtagggccaggatttgaaccaagtccaaagtcccaatactgggctttcaggaagggagaattatgtacagttttttgcacaattttggcctggaatgagtggggctgggaggagaggccattgcttctaaacaacgacgctgatggaccagcaattcgtaatttattgatcaaaaacgatattgaaatcttagcagagttgactgaaggcggaagtgccgttcagcgggtggaaacacttaagcctgatatcgtcatcattgatgtcgatatccccggagttaacggtatccaggtgttagaaacgctgaggaagcgccaatatagcggaattattattatcgtctccgctaaaaatgaccatttttacgggaaacattgtgctgatgctggcgctaatggtttcgtgagtaaaaaagaaggcatgaacaatatcattgcggctattgaagctgcaaaaaatggctactgctatttccccttctctctcaaccggtttgttggaagtttaacgtccgaccagcaaaaactcgactccttatcgaaacaagaaattagtgtcatgcggtatattcttgatggcaaggataataatgacattgctgaaaaaatgttcatcagcaacaaaactgtcagcacttataaaagtcgcctgatggaaaaattagaatgtaaatcactgatggatctttacacattcgcacaacgtaacaaaatcggctaa

SEQ ID NO: 144403 - DNA, 645 bp, Homo sapiens
gggtaccgggggatccatccgttgctgccgtgcgttattgaaagccgatggcacgcctgctgcgccgttgattagctgccagaatgcacgcgttccacgcccttacgaccacactacccctgacgtggcatatgtcacctctttttcgggttatctgacgcatcgcttaaccggcgagtttaaagacaatatcgccaactattttggtcagtggccggtggattataagagctgggcatggagcgaagatgctgcggtaatggataagtttaatatcccccgtcatatgctgtttgatgtgcaaatgcctggcaccgtcctcggacatatcacaccacaagccgcactggcgacacatttcccggcaggactgccggttgtttgtaccaccagtgataaaccggtagaagctctgggggccggattactggatgatgaaacggcggtaatttctcttggcacttacatcgcattgatgatgaacggcaaagcactgccgaaagatccagtagcgtactggccgattatgtcttctattccgcaaacattgctgtatgaaggttacggtattcgcaaaggcatgtggacggtgagctggctgcgcgacatgctaggcgagtcgttaattcaagatgccagggcgca

SEQ ID NO: 144404 - DNA, 1788 bp, Homo sapiens
atggcatgtctcgccaagggtgcctcagtgactctgctccaccggcccatgacccaggaactaagcatcagtcatagggctgtggagactgagcaggtcatctgcgacacaagtgctgtggaagttgaggcgcaacgaatgaagttaattcttggacacaaatctacacaagtagaaacgtctggattgaaagccagacagcccgtggatcctctcttgttaaccaagtttgtggacttttgtaaccgcctgtgcgaggtcaccaggggaggtctcaaggccacagccattaaagaactatgctttacgctggctgtgataatggtgcccagacaccccagatcaaaccgtggacaaccactggaggcggacccagtaccgaatggattgagcactgagcacatttcgagtgctgagggtcaagttgatgtggccttcgccctggtggagattctggctgagcaatgtgctcctcaccttggggaccagggaggccctgtggaggaaacaaagcctatgctggacctgaaggatgagcaagagtttgctaagagagaacatgtgccaggcaaagtgaacagcaggttcacaggaacaaggccggaaggaaccacgagggccaagtcctttgccttggtgtgtggacttccctctctgggcctcagtttctccatctttacagtgaagggagtgaactatgagttcagatccagagctcacctgagtgcaccagaagtcacagcccgtttggcaggtccaaacccccagaatcctcccaaagtgtttgcagctggcgagctatcccgaggcaaagcctgcctatcgaccggatggggaaatcgccggataattaatctatcgttggagaaaattagaaaagatttcgtgtttatcaatctcagtacggattctttatctgaatttataaaccgtgataatgaatggttatccgcggtaaaggggaaacaggtcgtattgattgcggccagaaagtcagaggccttagcaaattattggtattacaatagcaatattaggggcgtggtatacgctggactgagtcgtgatattagaaaagaactggtctatgtgattaatggcaggttcctgagaaaagatattaagaaagataaaatcacggaccgggaaatggaaattatccgcatgacggcccagggaatgcaacctaaatcgattgccagaattgaaaattgtagtgtgaagacagtgtatacccatcggcgtaatgctgaggccaagctgtactcaaaaatatataaaaatgcaatgaaaaaaaaggttctggcaatagctctggtaacggtgtttaccggcatgggtgtggcgcaggctgctgacgtaacagctcaggctgtagcgacctggtcggcaacagccaaaaaagacaccaccagtaagctggttgtgacgccactcggtagcctggcgttccagtatgcagaaggcagtaaagaagctctgggggccggattactggatgatgaaacggcggtaatttctcttggcacttacatcgcattgatgatgaacggcaaagcactgccgaaagatccagtagcgtactggccgattatgtcttctattccgcaaacattgctgtatgaaggttacggtattcgcaaaggcatgtggacggtgagctggctgcgcgacatgctaggcgagtcgttaattcaggatgccagggcgcaggatctttcaccggaagatttactcaacaaaaaagcttcttgtgatagacgggcgcaactcaaaccagaaaaataa

SEQ ID NO: 144405 - DNA, 488 bp, Homo sapiens
acggtagcggagtggcgcgagtggcaactttccgaagccagaaacgttgtgaggagatcaaccgtcagaatcgtcagttgcgggtggaaaaaattctgaatcgctctggcatccagccattgcaccgcaaatgctcgttttcgaattaccaggtgcagaacgaagggcagcgatacgcgttgagtcaggcgaaatccatcgctgatgaactgatgaccgggtgtacaaattttgcgttcagcggaaaacctggtaccgggaagaaccacttagcggcactatcgggaatcgcctgctggaagacgttcttgatgaatttggcatcagcgcgagacgaaaaacgagcagtggtactgcaccagattgttgatcgccggacagcgtcgatgcgcagcgtggggatgctgacaaacctgaactatgaggccatgaaaacattgctcggcgagcggattatggatcgcatgaccatgaacggcgggcgatgg

SEQ ID NO: 144406 - DNA, 789 bp, Homo sapiens
acttgtaggcctgataagacgcgtcaagcgtcgcatcaggcattgtgcgccaactgccggatgcggcgtaaacgccttatccggcctacggttcggcacaaacctgcaacggctgccggatgcggcgtgaacgccctatccgacctacggttatgttctggctcgttggcctttggcaacgattatcctatgagattggggcaattacgcgccctcgtcaaatcattgcgctttttctttacgcggttggcgcaacacttcgttgatttgcggatcgtccagcggacccgaaatgtgatagcgcaaaatggagactttgctccacagcggccccagcactttactggcggcaaacactgccgcgccaacaataaggttaaccgcaaaagccgcagccacgcccaccgtcgcagaaatctctggtgcgacaaccgcttccatattcaggtcgcgacgtaccagatttaccgaccctttcatggcgatatccgcctccaggccatccaccagcgtgtcgtcggtgtgcataacgccgtctttaatccacgcggtgctgggaatggagtcaaaatagaacccgtcgcttatacagagaagcggggaaggcgacggaagagggcgaaagcgcgagagcagacacagagcgacgcgaaaggaaagagaccaagaacgaagaagaaaagatggcaagagagagggggagaaaagcgcagagagacgacgacagcagaccagagcgcaaacgagcacagtcaagagcgcaagttgacccgggataaaagcaaatga

SEQ ID NO: 144407 - DNA, 291 bp, Homo sapiens
atgaccctgcggggcatgtatttttatatggctgatgcggcgaccttcactgattgcgcgaccggaaaacgtttcatggtagcgaataacgcagagctggagcgtagctacctggctgcgcgcggtcacagtgaaaaaccggtgttactgtcagtagaaggtcactttacgcttgagggtaatccggataccggccggataaggcgtttacgccgcatccggcaatggtgctcaacgcctgatgcgacgctggcgcgtcttatcatgcctacaacccccctcataccttaa

SEQ ID NO: 144408 - DNA, 1059 bp, Homo sapiens
  misc_feature (1)...(1059): n = a,t,c or g
tcaccccatcgcccgccgtttcatggtcatgcgatccataatccgctcgccgagcaatgttttcatggcctcatagttcaggtttgtcagcatccccaccgtgcgcatcgacgctgtccggcgatcaacaatctggtgcagtaccacctgctcgtttttcgtctcgcgctgaatgccaatttcatcaagaaccagcagatccacttcgcacagttcccgcaaaaatttttcgcctgactgcccatcgtcatagctggcgtgcagggcactcataacatcagccacggtaaccacaatcactgtctgaccgtctttcagcaggcgattcccgatagctgccgctaagtggttcttcccggtaccaggttttccgctgaacgcaaaatttgtacacccggtcatcagttcatcagcgatggatttcgcctgactcaacgcgtatcgctgcccttcgttctgcacctggtaattcgaaaacgagcatttgcggtgcaatggctggatgccagagcgattcagaattttttccacccgcaactgacgattctgacggttgatctcctcacaacgtttctggccttcggaaagttgccactcgcgccactccgctaccgtcttgaatggcgcggttacatgtgacggggccagtctgcggatacgttcaagaacatcgccnatattgccaacttgccggagcgcaaccaccctgacgaccaccagagcatctgcatggtgccgccaacgttcaccaacgacttctgtggtgtagcgatcctgaccggattgatcggtccatttacgggtacgcagctgaccttcgatataaacctgagaacctttacgcagatattcgctcgccacttctgccagtttgccgaacagcacaacgcggtgccattcagtctgttctttcatctcgccggtcgctttatcacgccaggattcggaagtagccagcgtaatgttggcaactgcgccaccatttggcatgtagcgtacttccgggtcctgacccagattaccaacgagaataaccttgtttacgcctctgctggccat

SEQ ID NO: 144409 - DNA, 2355 bp, Homo sapiens
atgaaagcaggccagcgtttaacgcttaaacgcccgcagcacgggatgcgcagttatctggcggtcgcgggtggtattgatgttccgccgagatccccggaccggctcgttcatcccttgttgcttaccgaaaaacttctttaccgcccatcgaaacgggcacatacaggcagagtggccctgaaagaaagcaatcagcgatgtcctcctgacgggttcaagttctcttgtgataacggagagagactgcgtgtcacgttcgcgctggactgctgtgatcgtgagccactgcactgggcggtcactaccggcggcttcaacagtgaaacagtacaggacgtcatgctgggagcggtggaacgccgcttcggcaacgatcttccgtcgtctccagtggagtggctgacggataatggttcatgctaccgggctaatgaaacacgccagttcgcccggatgttgggacttgaaccgaagaacacggcggtgcggagtccggagagtaacggaatagcagagagcttcgtgaaaacgataaagcgtgactacatcagtatcatgcccaaaccagacgggttaacggcagcaaagaaccttgcagaggcgttcgagcattataacgaatgcatccgcatagtattcgatctgttcgttaacctcgacgcgaccgacgagcagctggacttcccgatcgtttacgcttctgcgctgaacggtatcgcgggtctggaccacgaagatatggcggaagacatgaccccgctgtaccaggcgattgttgaccacgttcctgcgccggacgttgaccttgacggtccgttccagatgcagatttctcagctcgattacaacagctatgttggcgttatcggcattggccgcatcaagcgcggtaaagtgaagccgaaccagcaggtcactatcatcgatagcgaaggcaaaacccgcaacgcgaaagtcggtaaagtgctgggccacctcggtctggaacgtatcgaaaccgatctggcggaagctggcgatatcgttgcgatcacgggccttggcgaactgaacatttctgacaccgtttgcgacacgcaaaacgttgaagcgctgccggcactctccgttgatgagccgaccgtttctatgttcttctgcgttaacacctcgccgttctgcggtaaagaagggtggcactgccttgaggcttattgcgcgatgagtattttcagcgctgttgctctgactttaatgagcagtatgcaagggcaacgaaatgccatcgagcgaatgcgtaacgagacgctggcattgtggatagcggatacccagcttcagtcacaagattcattcgaactggaaaacacgtccagttctggcaaagagttaataaatggcgaagagtggaactggcgcagcgatatccactcaagcaaagacggcacgcttctggaacgcaccataacggtgacattacccagcggtcagacaacctgcttacgcgttatcaaagcatcgataataaatccgggcaggcacaagatgattaatcgccagcagggtttcacattgctggaggtcatggcggcgctggcgattttctcaatgcttagcgtgctggcgtttatgattttttcgcaagcttccgagttgcatcaacgctcacagaaagaaatccagcagttcaatcagctacagcgcaccatcaccattcttgataacgatctcctgcaactggtcgcccggaggaggagaagtacggacaaaatcatggtgttgggtgaagaagctatttttaccacgcaaaggacctgcagagaattcaagtgcaacgactcggccgcgtcacacctaagcggcgacattttaagaccgttaccggactggcgcgagtgccaactttccgaaggccaggaaacgtctgtgaggagatcaacccgtcagaatcgtcagcttgcgggtggaaaaaattctgcaatccctctggcatccagccattgcaccgcaaatgctcgttttcgaattacccaggtgcagaacgaagggcagcgatacgcgttgagtcaggcgaaatccatcgctgatgaactgatgaccgggtgtacaaattttgcgttcagcggaaaacctggtaccgggaagaaccacttagcggcagctatcgggaatcgcctgctgaaagacggtcagacagtgattgtggttaccgtggctgatgttatgagtgccctgcacgccagctatgacgatgggcagtcaggcgaaaaatttttgcgggaactgtgcgaagtggatctgctcgctcttgatgacattgacatttcttctaaaccactgccagcgcagcagaaaaaacacgccagacattga

SEQ ID NO: 144410 - DNA, 1152 bp, Homo sapiens
atgcgtgatctgatccttcaactcagcaaaagttcgatttattcaacaaagccgccgtcccgtcaagtgttagccggctatccagaaaaattgaaattttggatggtccccggcgtcgacgttctcccatcgttgagaacgataggtttccgggttttattctcggaccatgagatcagcgttcatgaaagcgcaaaatttagcgtaagacgttcagacagcattgcagcacagcattcgagaaataagagtttgatcagccgttcaaaaaatatcccccggaataatcgacgtctttttcctgaagaaattccgccagatgaagttttaaaaaaaatcctccggctgataacaaaggaagccccactactcccggataaaggggctccagataagtccccagtttctgcaatatggggatttgtggacaaggatcctttgcaaggaagcgcgtgtaagaccgcgcacattctcatgagagtaatcgcctctccaaagagtttccgggaagctcccgccaggcattgcgaaaaccgattcgaacggagcagggcgctaacggggcgatacgggagctggaaaaattccgcccagcagggtttttcacctgagcaggtgattcgacacagcatcgccaatgaataccagggcttgttcgcgccgaaaggtgttcgacctgagacgttactccgacaggtgcagaacgaagggcagcgatacgcgttgagtcaggcgaaatccatcgctgatgaactgatgaccgggtgtacaaattttgcgttcagcggaaaacctggtaccgggaagaaccacttagcggcagctatcgggaatcgcctgctgaaagacggtcagacagtgattgtggttaccgtggctgatgttatgagtgccctgcacgccagctatgacgatgggcagtcaggcgaaaaatttttgcgggaactgtgcgaagtggatctgctggttcttgatgaaattggcattcagcgcgagacgaaaaacgagcaggtggtactgcaccagattgttgatcgccggacagcgtcgatgcgcagcgtggggatgctgacaaacctgaactatgaggccatgaaaacattgctcggcgagcggattatggatcgcatgaccatgaacggcgggcgatgg

SEQ ID NO: 144411 - DNA, 1161 bp, Homo sapiens
tcaccgtatgcgcacaacgccaggacgcacagtactgagcaggtggcacaactggtagaaagtattaagcaattcggctggattaatccggtgctgattgacgaaaagggcgaaattattgcgggtcacggtcgtgttatggcggctgaaatgctcataatggattctgttccggtcattgttgtgtgtggcccatcgcccgccgttcatggtcatgcgatccataatccgctcgccgagcaatgttttcatggcctcatagttcaggtttgtcagcatccccacgctgcgcatcgacgctgtccggcgatcaacaatctggtgcagtaccacctgctcgtttttcgtctcgcgctgaatgccaatttcatcaagaaccagcagatccacttcgcacagttcccgcaaaaatttttcgcctgactgcccatcgtcatagctggcgtgcagggcactcataacatcagccacggtaaccacaatcactgtgtgaccgtctttcagcaggcgattcccgatagctgccgctaagtggttcttcccggtaccaggttttccgctgaacgcaaaatttgtacacccggtcatcagttcatcagcgatggatttcgcctgactcaacgcgtatcgctgcccttcgttctgcacctggtaattcgaaaacgagcatttctttctctcccatgcacagctgaggtcaccggtaccgacagtaaacactgactgcaaacctgttctgtgccaggcactgggctcggcaccacgacctgaattatctcctttaatctgcacagcaaaccctggggtcactatgattagcatcagcgccgcaatggcgttcatgatcgccggaacggaaagctctgccagcgggatctccgccacctgtttgcgatcgcgcatgataatcacccgatcggcatagcccaccagctcttccagttcggaggagatcaccagcagcgccagaccatcggcgcatagcgtttcaatcaggcggatgatctcggcgtgggcaccaacatcaatgccgcgggttggctcatcgaggatcagaaattgcggtcgggtcagtagccaacgtgaaagcaacactttttgctgattgccgccggagagaaattcaatcggttgttcagttgaaggtgtgcgaatgccaag

SEQ ID NO: 144412 - DNA, 1740 bp, Homo sapiens
  misc_feature (1)...(1740): n = a,t,c or g
ttattcagaaaaagtgagtaagactttgcagcaatgtttttgatcctgttcaaataaactaatggcatcagcaacatgctggaaatcaaacgtatgggtaattaatttttctggtttaattaaccctttacttaaccagtcgataacgatcgggaatttatttgcatttaagcgtgaagagaaaatagagagttcttttccggtaattccttgctgaatcacttcagacggttcactggagaaccccatcaatacaatacgtgccgctggagaagccagcgttacggcctctttcaggatagaaggatgacaagccgcatcgataattaatgtcggcttgatgcctttttcagtgaaaatctcgccaagcggtgtctggctgttattaatcgcccagtcagccccgctctctttcgctttttccagtcgttcatcaatgcgatcggcaacaatcacatttttaacgttatagacgccttttaatacctgaacgatcgtcaggccgattggaccggcaccataaaccagaacggtatcattttcagtcggttgaccatgtccggttacgttagccgcaatggtaaaaggttcgatcattaccgcatattgatcggccactgcttcaggaattttccacgcatttttgccggaacccactggtatgcctgttcccggcacatgaacgcgaatattttcgttttcatcagccagaccgtgaataccgcttgcggtcgtggcgtccacttcgcccaccataattgacgaacgctcactggtgcccnccgggcttgccaggaaacttaacaccggtttggtccgtttgactatcagtcccgcctcttcaatcgcttcgcgacgggcaacatcttccacactttcaccctcttcaatcatcccggcaaccatctccagtagccaaggggtttcgctggtgtcgtacgcggcaatccgaatctgctcaatcagcacaacttcatcacgcactgggtcaaagggtagcaagactgcggcgtgaccgcgctcaaaaatttcccgccgcacctcatgactcatttgcccgttgaatagacgatgacgaaatctataaagatctaatgaaaaaaagccgcgataaagtgtttctcgtgcaataatttctacatcgtttttgccaaatgtaacgggcaggttgtctgggtcggtctgcgcaacagtgcgatttacacgcagagtgaaaataatcagcgaaccgatgaccgccaccgctgccagcgtcagtaatcccgccgcatcgctggcaaataacgtttctgctttcacgcgcaggatcggggcaataaacccgcccactgcaccaaacaggtttacaaaaccaattcccgcagccagcgccgtaccggaaagcagttgtgtcggcatcgtccagaacactggctgcacggcaataaacccgatagctgcaacacacagcgctacgatcgccattactggagaaagcagcccggacagaccaataccaatgcccgccgccagtaatgtcagcgctgcgacattacgccgttcgccggttttatcggaatagcgcggaataagccaggtcccaaacaaggccgcaacccacggaatggcggtgaccaccgacgctgtaaagcccacttttgttcccagcaatgccgcaacctgggtcggcaggaagaaaattaatccgtaaaccgccacctgaatggtcaggtagataatcgctagttgccagacttccat

SEQ ID NO: 144413 - DNA, 929 bp, Homo sapiens
cgtgctcacaagcgcttaagtgggtacccccaggtttttcccattccgctctagtaaggacggccaaggtctaacagtccaggccgtgggaaacctcggcaagtcccaagctcgcaggcctgcaaaaagactctagatcatggggcacctccattaggtcggccgatgaagtcttcttgcgcaaaccggcgcatattccgtggcaggtggcagaaggggcagaagcctgcgttcagcctgcacactggagtgacgatgtggatacgctggcagatatggtggtgaaaaccgctcagcctggcgaccatattctggtgatgagcaacggcggttttggtgggatccatcagaaactgctggatgggctggcgaagaaggcggaagccgcgcagtaattcggccttagccagatatagtatgcgtaggccggataaggcgttcacgccgcatccggcatttgagcatagtgcctgatgcgacgcttgatgcgtcttatcaggcctacaggtgcaccgtatccggcaaaccatactcacatcaacaacgaaaattacccttcgttctccgctaactcgcgcagatactggaaaatctggcgtgcggatttcggcggcttattcccttctttctctttcttcgcgttgcggatcagagtacgcagttgctgacgatcggcatcgggccacagatttaatacctcagcgatggcgtcatcaccttgatcgatcagacgatcgcgcaggttttccagtttatggaacagcaccacctgctggttgtgacggtttttcagcttatccagcgcctgacgaataggctctacgtcgcgctggcgcagcatcttaccgatgagctgcaactggcggcggcgaccttccatcttaatacgctgggcgagctcaatagccgcgcgcagatccgcatctaac

SEQ ID NO: 144414 - DNA, 1165 bp, Homo sapiens
acggctgggagcaacatattaccgcccgctatctggtcggtgcgatggcgcaaactcgatggtgcggcgacatctctacccggatcatcaaatccgtaaatatgtcgctatccagcagtggttcgcggagaaacatccggtgccgttctactcctgcatctttgataattcgataactaactgttattcatggagtatcagcaaagacggttattttatcttctgcggtgcctatccaatgaaagacggtcagacgcgtttcacgacgctgaaagagaaaatgagcgcctttcagttccagtttggtaagacggtgaaaagcgaaaaatgcacggtgctgtttccctcgcgctggcaggattttgtctgcggtaaggacaacgcctttctgattggtgaagcggcgggatttatcagcgccagctcgctggaggggattagctatgcgctggatagcacagacattctgcgttcggcattgcgaaaaccgattcgaacggagcagggcgctaacggggcgatacgggagctggaaaaattccgccagcagggtttttcacctgagcaggtgattcgacacagcatcgccaatgaataccagggcttgttcgcgccgaaaggtgttcgacctgagacgttactccgacaggtgcagaacgaagggcagcgatacgcgttgagtcaggcgaaatccatcgctgatgaactgatgaccgggtgtacaaattttgcgttcagcggaaaacctggtaccgggaagaaccacttagcggcagctatcgggaatcgcctgctgaaagacggtcagacagtgattgtggttaccgtggctgatgttatgagtgccctgcacgccagctatgacgatgggcagtcaggcgaaaaatttttgcgggaactgtgcgaagtggatctgctggttcttgatgaaattggcattcagcgcgagacgaaaaacgagcaggtggtactgcaccagattgttgatcgccggacagcgtcgatgcgcagcgtggggatgctgacaaacctgaactatgaggccatgaaaacattgctcggcgagcggattatggatcgcatgaccatgaacggcgggcgatgggtgaattttaactgggagagctggcgtccgaatgtcgtccagccaggaattgcgaaataa

SEQ ID NO: 144415 - DNA, 2930 bp, Homo sapiens
atgcttaagccagacaacctgcccgttacatttggcaaaaacgatgtacaaattattgcacgagaaacactttatcgcggctttttttcattagatctttatagatttcgtcatcgtctattcaacgggcaaatgagtcatgaggtgcggcgggaaatttttgagcgcggtcacgccgcagtcttgctaccctttgacccactgcgtgatgaacttgtgctgattgagcagattcggattgccgcgtacgacaccagcgaaaccccttggctactggagatggttgccgggatgattgaagagggtgaaagtgtggaagatgttccccgtcgcgaagcgattgaagaggcgggactgatattcaaacggaccaaaccggtgttaagtttcctggcaagcccgccggccaccaatgagcgttcgtcaattatggtgggcgaaatggacccccccaccgcaagcggtattcacggtctggctgatcaaaaacaagatattcccgtttatgtggtcctttggcgtgagtgggttgaatttcgccaggcattgcgaaaaccaagtcgaacggagcagggcgctaaacgggcgataccgggagctggaaaaattccgccagcagggtttttcacctgagcaggtgattcgacacagcatcgccaatgaataccagggcttgttcgcgccgaaaggtgttcgacctgagacgttactccgacagacggtagcggagtggcgcgagtggcaactttccgaaggccagaaacgttgtgaggagatcaaccgtcagaatcgtcagttgcgggtggaaaaaattctgaatcgctctggcatccagccattgcaccgcaaatgctcgttttcgaattaccaggtgcagaacgaagggcagcgatacgcgttgagtcaggcgaaatccatcgctgatgaactgatgaccgggtgtacaaattttgcgttcagcggaaaacctggtaccgggaagaaccacttagcggcagctatcgggaatcgcctgctgaaagacgctatgacgatgggcagtcaggcgaaaatttttgcggggactgtgcgagtggatctgctggttcttgatgaaattggcattcagcgcgagacgaaaaacgagcaagtggtactgcaccagattgttgatcgccggacagcgtcgatgcgccaacctagagtcggctccgcttcctacggtacatgggcgcgaaccgctgacaagctggtattaaccgacagcaaaggtgaaaagtcatattatcgggcgaaaggcgatgcgctggagatgctcgatcgtgaaggcaatccgattgaatcgcagttcaactatacgctggaagcggcacaatccagtttacctatgacgccgatgaccctgcggggcatgtatttttatatggctgatgcggcgaccttcactgattgcgcgaccggaaaacgtttcatggtagcgaataacgcagagctggagcgtagctacctggctgcgcgcggtcacagtgaaaaaccggtgttattgtcagtagaaggtcactttacgcttgagggtaatccggataccggtgcgccgactaaagtattggcacccgatacggcagggaaattttaccccaaccaggattgcagtagtttggggcagtaacccgtcttgagacagaaacaaacgcaaaacaggccagaaggatatatttcaacattttgaatttgcacgttttttgtaggccggataaggcgtttatgccgcatccggcagttatgcgcagaatgccgtgattgccagacgctggcgcgtcttatcatgcctacaaacttgtgccttaccgctgggtggtgataccgcccgagccgtaggaatggcgctgacgccgacgcgaattgcgctgctgctgttagcggcttgcctgacggcgaccgcgacgatgactattggaccgttgagttttgttggtttaatggcaccgcatattgcgcggatgatgggctttcgacggacgatgccacacatcgtaatttcggcgctggtgggtggtttactgctggtgttcgctgactggtgtgggcggatggtgctgtttccattccagatcccggcggggctgctgtcaacctttatcggcgcgccatattttatgcctggacggataaagcgtttacgcgacaacggatgcccgatgcgacgctggcgcgtcttatcgggcctacaaacggccccgaatcggtaggtcggataaggcgttcacgccgcatccggcagtcggcgcataatgcatgatgcgacgcttgtcgcgtcttatcatgcctacaaacttgtgcctgaacggtaggacggataaggcgttcgcgccgcatccggcagttggagcacaatgcctgatgcgacgcttgacgcgtcttatcaggcctacgtatttccctgcccgatgatgacagcagccggagagattttcgataatcgggcagtcggcgctgtcatcgccagggcaggcattcgccagtgccagcagctggtcgcgcatggattgcagctcctcaatgtgtcgttcgatctccgccaccttctccagcgtgcgccgtttgacgtcggcgctgtgccgctgcgggtcgttaaacagattcaccagctcgccgctctcttccaggttaaagcccacctgccgtgcctggcgcagtaaggtcagttcgttgagatgctgctgcgtgtaggtgcgataaccgttttcgctgcgcatcggcggcgtcaccagccccttctcttcatagaagcgaatggctttgctggtcaggccggtaatttttgctacatcgcttatgtcatcgagcttatcatgcctgcaggtccaggccaggcagtcagcgaacaccagcagtaaaccacccaccagcgccgaaattacgatgtgtggcatcgtccgtcgaaagcccat

SEQ ID NO: 144416 - DNA, 1182 bp, Homo sapiens
atgggggccggccctccagccccacccgtgcccatcagggtcacctgcgcccagtgtgggccagcggcccttgcccagctgtccctgggattctgggctgtggatgacattagcccagggaaggagagcctggggcccgacagctcctctgggggtcaagaggaccccgccagccagcagtgggctggtgaccacgcacaggcaggtcccagtgcacggcgcaacaagcacttggactggctggatgcgtgtctggtgacattcctggctatgtctgtgccccacctacctgagaagtgggccacgagctgcttccaggaggacttcatctccaagcacagtgctggcgcagtgccacgtcctccagcacttcctgatgtgcctcagcagcaccgagagaaggcctggaaacaaggcaagaggaaggccttctgtatggcacagcacctcttgaggaaagaaaataagaaaactgcctccgatccaagcagagcaggtcagcgagaaggtgggcatcacttgggggagtggatgtgggtatcgaagacgaacactggatacgtggcctggtcatgggaggtggttggtgcgagaaaggaggtggagagcatgattgacagcttcatatgctttctcaagaaggtggatgacggcgctgctgctcagccacagggcatggagttcacggcaagcagcccatcaaccttcactggaggtgcctacaataccatcgtcaagctcttcccagattggcccaggcaggacctggattctgtctgggacctgttactgctgtccaagcagcaacgcatcaaattcccagacatcctccacgttcacagaggagctcttaccaaagtcacggggagcaggagactcgtgggaggaggaatgatggagccctctagctgctgctgcagccacaacaagtgccaccaccaggggccttccagctgccagtgcaggctttccagagccggggactggggaacctgcagtcatcacctcagcaattctggtggcagccaggccagccagggcagcgatgatgaccgtaatgaaaagtgggatgacagctccacactggtggatgagttgagaacaccaggcagaggcatgtacctggtctttgatggttcagtggacctgcactaccattgcagtgcaaagtgcaagagttga

SEQ ID NO: 144417 - DNA, 1218 bp, Homo sapiens; identical to SEQ ID NO: 140123

SEQ ID NO: 144418 - DNA, 1657 bp, Homo sapiens
caccaagaaagcccgtgaaatcgcagcggttattttgcttgctttgctcatcgttcgcttcttcatattcttcctgtgccagtcttaaagatagtccagccaggcggaaaatgaggcagcttatagcgccagaaccgccgtattcagcgtttctatcggtgcccgggcgtgaaagaaaccagccttgtgcggcgaatgcgggcgagttctgaacatcacgccactcttccggcgtttctacgccctcgacaatcaccccgcgacaatagcgattcattagatgtaaaagctgagaaaagagtgtgcgtccttccggcgactgacgcagcatcacaaacagttctcgcgcgattttgatgtagtcataacgcacttcacttagcgcagagaaatttgccatcccggtaccaaaatcatccagccacagcgggccaaattcacacatcgaggcaaaggttgaatctttcggcagacggatatgctccaccagttcgaaacgcagccagggaagacgctcaatctggcgcaggatttttggttgctgacgcagggcgatgagcgtagggccatcaatattgaccgatgccagcaggccgtgctctataaagaagtcggctttttgcgccagcaaatcaatctgctctttcacaacctccatccgatggctgacggtgatttcagtaaaatagcgatccggcggcaggcgttggaagggcagatcggtaaacagatattcaaattcactgtccatttctcggccataggcgtggaatgaacttttaatcatattaatgccaccgaacgggtgtagcgcacgtttcaacggcgcatccgttgccaggccaacaattttttccagcggctggttaatatatcccgcatcatgagcggtaattgtggtggcaatattggtatcgaaatcaaccggcgcgtgggttgcattttcgatacggatgccttccattactttttcccacaattccgtggtggcaggcgtcgcttcggcgaggaaagattcatcgccttcatacggtgtatagttatgttgaataaaatcgcggacattaatttcgtttttccagtccgtaccacaggagttagagcgattattcatttctgtatcaatctctaagcctaatacagccaaatgttccatgaccagacgacgaattaagcttgaattctctcctattccgccggtgaatataattccatccaggcgacgtaatgaagctgcgtgtccggcaatatgacgggcaattcggtgaacaaaggttttaattgccagttgcgcgcgttcgtgaccttcatgccaggctttttccagaacacgtaaatccgaagaaagaccggaaatacctaataatcccgactctttattcactacgcgttccaggtcacccaggctctggttggtttggctggcgacccaggacatcgcaccaaagtcgacatcgccactgcgggtacccatcatcaagccttccagcggcgtcattcccattgaggtatcaacactctgaccgttgcgaaccgcgcagattgacgcgccattgccaagatgcgccacaaccaggccggagtcatcttccgtcagattcagcagcgaatgtgcgcgctgggaaacatagcggtgcggacgtgccggggaaaccat

SEQ ID NO: 144419 - DNA, 951 bp, Homo sapiens
tcagcctgcgcgccggttccctgcgtaccattacgcacatcctgctgccgctgctgcgcccggcgatcctctcggcgctgatttacagctttgtgcgcgccattaccaccgtcagcgccattgtgttcctcgtcacgccggatacccgcgtagcgacggcttacatcctcaaccgcgtggaagatggcgaatacggtgtagcgattgcctacgggttccattctgatcgtggtgatgctggcgattattttcatctttgactggctgatcggtgaatcacgtacctcccgttcaaaaagccaaaaaccaggcgtaatggagcgcactgctagtttagatacgaagtttgctgcccaaacgggaatttcttcgcccgttaatgggtgaaccgctttaaagccaggttccacgcttttttttcccattgtccccatttcaggctcgggcaactttggtgttacggcattcgtcaataaaggccgccagttcaggattattttccgccgctttctgcgccagcggatgacccgcagctaccgccaggtaggtacaacccataaaggtgtccgggcgggtagtgtaaacggtcagcgtgttgtcatagtcgttaacgttgaaggtgatctccacgccttcggaacgaccgatccagttacgctgcatggttttaacggtgtctggccagtgatccagtttatccagatcgttgagcagctcgtcagcgtaagcagtgattttgataaaccactgcgggatctctgttacgttcaactttggtatcgcagcgccagcagcagccgtcgataacttgttcgttcgccagtacggtccccagatcttctgattcggcaggtctggggtggtaccccaggatttgctgatgctgctggttgaggccacactttgagaaccactgtttgagcccaggaggttgaggctgcagtgacccat

SEQ ID NO: 144420 - DNA, 1978 bp, Homo sapiens
ttacggcttcaatgtccggacccggacatcgtcgggactggcaatataccgtactgtcccaagttaatcagattgactgtcagatttgctggaaataatgcattaagtggaaagggggagtgagaaatcactccccctggtttttatacagggaacatgatgaaaaatattctcgctatccagtctcacgttgtttatggtcatgcgggtaacagtgcggcagagtttccgatgcgccgcctgggcgcgaacgtctggccgctgaacaccgttcaattttctaatcacacccaatacggcaaatggactggctgcgtgatgccgcccagccatttaaccgaaattgtgcaaggcattgccgccattgataaattacacacctgtgatgccgtattaagtggctatctgggatcggcggagcagggtgaacatatcctcggtatcgtccgtcaggtgaaagccgcgaatccgcaggcgaaatatttttgcgatccggtaatggggcaacctgcttacggattttgtccacccactcctgaacagtttcttcggtgttcagcttacgctcggcagctttgaagctcgggtcgccaatcagacccgtcgcgccgcctaccagcgcaaccggcttgtggcccgcctgtagagctgcaaccagtatgccaggtgctgaatatacactgctacacgagtgccgtatagtgacgaaaactgacacgcaatctagcgcagcacattgcgcacaattgcaaggtctggcagcaacatcgttgcggatagtggcagactcaggtgcgtggcactcattcgcgtatgtacagccagctggacgtgatataaaggtgtccgggcgggtagtgtaaacggtcagcgtgttgtcatagtcgttaacgttgaaggtgatctccacgccttcggaacgaccgatccagttacgctgcatggttttaacggtgtctggccagtgatccagtttatccagatcgttgagcagctcgtcagcgtaagcagtgattttgataaaccactgcgggatctctttacgttcaactttggtatcgcagactctagaggatccccgtatgaaggcgatgaatctttcctcgccgaagcgacgcctgccaccacggaattgtgggaaaaagtaatggaaggcatccgtatcgaaaatgcaacccacgcgccggttgatttcgataccaatattgccaccacaattaccgctcatgatgcgggatatattaaccagccgctggaaaaaattgttggccggatatgctgcgctgccgtaaatctggcgtgctgaccggtttaccagatggcataaccattccacgggcaatatcgacgccagtctgaccataacccgcttccagaaactggtggcgggttcttttttgagaataatctctttctttgcatgacgatcaacccagttgatccgtccccactggaagacccgaaagcttacgctctcagcatcgacttgctggttgagcgttacaaaaatgcgggcattaccaaagttgtcggcaccgaagcgcgtggcttcttgtttggcgctccggtagctctgggtctgggcgttggctttgtaccggtccgtaaaccgggcaaactgccgcgtgaaaccatcagtgaaacttacgacctggaatacggcaccgatcagctggagatccacgttgatgccatcaaaccgggcgacaaagttctggtggtggacgacctgctggcaaccggcggcactatcgaagcgaccgttaaactgatccgtcgtctgggtggggaagtggctgacgctgcgtttattatcaacctgttcgaactcgggggcgaacagcgtctcgaaaaacagggcattaccagctacagtctttgcccgttcccggggccattaattattcgccagtcttgggctgcccacgctacggacaggcacaagatgtgctttcaccccctgccgtttggaaggggg

SEQ ID NO: 144421 - DNA, 1020 bp, Homo sapiens
tcatagagtgtgaggtgtctccgcagctgtggtccccacagcatccacaacctccagccctccccagcctccctgtgccgcatcctccgccatgaatcctgtttcatctaggtttctctttccctctccctcctgccaaatgatgagtgctggcaacactacatgccacaccctgcttttctctctagatcccgtgctctcacaccctgtcagtttcgttactccatcttcatcaccaagcctacccccggtaggcggcccgtcctttgcagagcctctgaaaatgacccgcgccttcctttccacagtgttctttcgtccgagaccgaaaagcgcaaatgactgaagttcccaccgcagcgctggctcccggctccctagctcccgccccctgtctgcaggaaagccctcccccggagcttccgaaactgctggaggttccagagttttgtagctccgaatgggcgacctgagccgaaccgctctctggctgggtggtcggcgggatccttcaggctcctttcgggtccgggacggggcggcggcagaggtggggcgtgcgtgcttggggctgccgagtgagtgcggctccctggtgcgcgcccgagcatctccccgccctctcctgggaccagcagtctgcccgtggagggctaggagcccgcgaccaggcctgccccggccgtcgccaacctgtccttggaagcgtggcggagactggtgcgctctcagcctcgtcgcgccagccgcctcgcgccaccctccactttcagcttcagagcagaggattccgccgacctccacctgtacctgtactcggccgttaggaaatccacttgcatttttaagtcgtgccctccgcagcaataaaaactggagcgggagaagaaatgcaagacatcgctgtctgttttgcaagcctctggccgctctcagcaaactctgcccggcgcggctggtgactttgcggtgtgaacgcagccggtcgtgctcgggataatgggaccgagctggcggcat

SEQ ID NO: 144422 - DNA, 453 bp, Homo sapiens
  misc_feature (1)...(453): n = a,t,c or g
tgtatcacagtccatccacctcctctgtaatccatgtcacacattacctgattagataaataatccaaggaagcttgttgctcatccatcatattccttagtagttttttggtacttcttgtgtaggaaacaatagaattttgcaaatttctacacatgaaatgtttttcttctcgtgtaattttagttttaacatcacatgattcctcacagtcttccttacaaacagtatcattacttttactttcatcttttgcattagatccatcttctacaatgttaactactgaagagtccgtagaatgatgtacacagttaccttgtacagcttctccacaaacaaaaatacatacatttaagaataagagtaaggctagggatggagacatcatatttttcttggatagatgaaaacgggncngcaaatatcagnaatacgggctcntgcgatta

SEQ ID NO: 144423 - DNA, 433 bp, Homo sapiens
  misc_feature (1)...(433): n = a,t,c or g
tcacagtccatccacctcctctgtaatccatgtcacacattacctcaaatgggtagctagatccttctgggtgaattatgtataacccactcggtgttttggtgacagagccaatggtatccttaatatcagtgcaatctaacctacacatgaaatgtttttcttctcgtgtaattttagttttaacatcacataattcctcacagtcttccttacaaccagtatcattacttttactttcatcttttgcattagatccatctttcacaatgttaactactgaagagtccgtagaatgatgtacacagttaccttgtacagcttctccgcaaataagaatacatacatttaagaataagagtgaggcttgggatggaggcatcatatttttcgtggatatatgcnnaacacttcaatgactagtcctggccct

SEQ ID NO: 144424 - DNA, 427 bp, Homo sapiens
aatctttgccagtcagagccaaaattctcgtaaaagatctgcgtatccatgcagataatctcaccgcaccctctggaaatcgattctcccaccaatttttctatgtatcacagtccatccacctcgtctgtaatccatgtctcacattgctacacatgaaatgttgttcttctcgtgtaattttagtttcaacatcgcatgattcctcacagtcttccttacaaacagtatcattacttttcctttcatcttatgcattagatccatcttctacaatgttaattactgaagagtccgtagaatgatgtacacagttaccttgtccagcttctccgcaaataaaaatacatacatttaagaataagagtgaggcttgggatggagacatcatatttttcttggatagatacagcacttcaatagatag

SEQ ID NO: 144425 - DNA, 1042 bp, Homo sapiens
tgaaacagatttattcttgccaggtaagttgtttttggttccccgtgccccattaattcccagttgcaagccattttccaaagaagtgatgaatgccatttagatttgctagcccacactcgttaaaccaccagccggtcttgttatggaggtgactgcagctcttcacagactgaccattgaccaggcatgcagggcgacacccatcattatcaacatctgatgtgctaaaaggcattgcattttgattatcttcttttttgagaccccggaatgcatcacctagaagatctccaaatccatccagataatcacaccacaacctctggaaatcaattatcccatcaattcttttctgtatcacagtccatccacctcctctgtaatccatgtcacacattacctcaaatgggtagctagatccttctgggtgaattatgtataaaccactcggtgttttggtgacagagccaatggtatccttaatatcagtgcaatctaaaccatgtgactgaacaggtctgtgaggaaaaggatccagctgttttctaaaaacttctgtagtcaaaaggagaactctattcatgagctcgttaacctgattagataaataatccaaggaagcttgttgctcatccatcatattccttagtagttttttggtacttcttgtgtaggaaacaatagaattttgcaaatttctacacatgaaatgtttttcttctcgtgtaattttagttttaacatcacatgattcctcacagtcttccttacaaacagtatcattacttttactttcatcttttgcattagatccatcttctacaatgttaactactgaagagtctcctctccactctatagcatcttcatgactacaggccctgctgaccaacagcagccctaggccgaccaccaggcactgggctgcagacctgaagacagtagcttcagaaaagcagagtcgttccacattcggcagtttccatagatttccccagcaagctcccccttcatagttccacttcagcagcttgggcat

SEQ ID NO: 144426 - DNA, 3456 bp, Homo sapiens
tttcccgaaaaccagttcctccattagaagaggccctcaaacaaattcaggaatccaacttaaaatcagaagtaaaccttcccttttcccgtagaccaacaataaactggagagctatagattctgccttgccttccgcattatcaaaaaatgatcacaagcatcagaaacaactcttatccaaaatcaattgtgagaaagaaatgaatgaaaacatgagggcaaccttggctactagcaaaaatgtgttccagcttaaactggaggaaactcagaaactcctcgaagatcaacatctaagcaatttgcaaaaattttgtgatgaagttaatcagataaccaattctgaaaccctctcaagtatagacagtcttgaggctacagagcatgaagaaatatatttaacacttaataaggagcattccacatccatccagcggaataccatttccctcaaaccagcaaatatgcaatcaactaatctcagctgctttgatgaagataaactggcattctctaaaactcaacatataaataattggcttacaaatttagatgcttcaaatactcagaatgtcacagctttctcagatattttaagtaaatctaatgttctgccttcatgggaatattttaatagtaaagaacaaaatccatctcctttgaatggaacagtggaaagagccacaaatactgctaataattcagtaccctttgtatctagcccacccatgtttgtactagataaaaaatgtgaaaagacctctgaaactagcactatgaggacaactgactccacttctggagcattcaaaagaaaaaggccatatagtttctgagagcccaacatttaaatttagcaaatcccaaagcacttcagattctctaacccaggaagtggctacatttccagaccaagagaaatattctgaattaaatcaagaaaatggaactacttcaattcctacttcatgtgtaccagtggcaacgcctttagttttgccatctaatatacagtcagctagaccttcagcaaagaacagtatacacataaaagaaattgatgcagtgcagtgttctgataagttagatgaattgaaagatggtaaagaagaagagataaaatattttaattgcaataaggaagagttgcctttattttcagacagttttcaagatgcctatatacctcacaatcctgattcaaaagatgaaaaacaaaaattagctgaaacatcatccttgtctaatgtaacttctaattatgactttgttggccagcataagaaaatgaaatacaacatccatgagagaaatggtgtgagatttcttaaaagtattttaaagaaagaatctaaatatgaacatggttatcttaaggcattaattataaatcagagctttaagtttggaaatcaaaaagcagcagctatcagagatagtattgaattaacaaaggaaaaaggtgcagaaattccaaagaccattaaaaaactgaggtggtttgatgaaactagcaatatagaaaacaatgctgaaaacagtcattcactgaagaataaaacaggaacaactcaacagcattctcaacaattccacattcaaagtggtgctggaagcaacataattagtgtttctacttgtgctgtaaattctgctgatacaaagaagtccagggaggattctatctctgaaaatgttacgactttaggaggatctggagcagaccatatgcctttgaactgttttataccttcaggttataactttgctaaacatgcctggccagcctcaaaaaaagaagaaagtaaaatccctgtacatgatgattctaaaactaagcaaggtaagccacaaagaggtagagcaaaaataattagaaaaccaggatctgcaaaagtccaatcaggctttatatgtacaaacagaaaaggcgctgtcattcaaccacagtctgcaagcaaagtcaacatatttacacaagctcagggaaaattaattataccttgtcctcctcctcaatctacatcaaatattagaagtggtaaaaatatacaagtgtctcagtgtcaaccagtaactcctgaaaatcctcaaaacattattacacataactcttttaattcaaaacatgtgcttccaacagaacacagtttgaatcagtggaatcaggaaagtagttctccactctcaaatgcttgttctgacctagtcactgtgataccatcactgccatcatattgttcttcagagtgccaaactttcgcaaaaataaatcattcaaatggcactcaagcagttgcccggcaagatgcgacattatattgcacccaaagaagtcctgtttgtgaagaaagttatccgtctgtgactctaagaactgctgaagaagaatcagttcccttatggaaaagaggtcctaatgtcctgcatcaaaataagagggctacagggtctactgttatgagaagaaaacgaattgctgaaactaagcggagaaatattttagagcagaaaagacaaaaccctggatctgtaggacagaagtacagtgagcaaattaatatttgtggtgatcaagcgtctgctgattacaaagcagcagagaaattcattgaagagtttgccaaggtcatcgctgatgaatatctgacaccagaagaagtatatgttactgatgaacatcactgcatgccagcaacagtgaacagagatgtggatgtagaaggttttcaaaacgagtttagcatgaaagatgccatacatgctgttgcaaacacttggaacacagggactaaagacacaattgtgcattcctggcacaacctctggcctgcaactatgttcagtgatgatgaacaagatagtacttctgagtttttgatggctgaaaacttagtgaaagcatcagtgccggaggatgagattctgactgtcttgaatagcaaacagatacagaaatcaaatctacctttaaataaaactcaacaattcaacatctgcacactgtcagctgaagaacagaagatcctagagtcccttaatgatctcagtgaaagactacattttaacattgtagaagatggatctaatgcaaaagatgaaagtaaaagtaatgatactgtttgtaaggaagactgtgaggaatcatgtgatgttaaaactaaaattacacgagaagaaaaacatttcatgtgtagtgatgcattccggggtctcaaaaaagaagataatcaaaatgcaatgccttttagcacatcagatgttgataatgatgggtgtcgccctgcatgcctggtcaatgtgaacaatcctgacaaccacgaaggaactcacagtggactgcccagggttgtctggaacattgtggggatccagcaccttggggccagcatctgccctctgagtccctccaacttcttcgtggttggagacaactgggtgactctcccttga

SEQ ID NO: 144427 - DNA, 209 bp, Homo sapiens
ccagacaggactcctcgtcggcggcatccagacagtcaggatgcccatcgcagagcagggccggcgccaggcagcgtccatcggcacaggccagcaagccggcagagctcctggctacgcagcgcacgtggtgcccatgccgggcacactcatctgcataggtggcaatggccgagcagaggcactcacagtcaccccccgagtcgcag

SEQ ID NO: 144428 - DNA, 412 bp, Homo sapiens
cctgggtccaccggcgctatcgccccccgatgtgagagagcgaagttcttgggccgcgctccctccctacctgggtgccctccccctccgggagcctgggtccccggggcggacgcggcggatgcatcctcaggccaagccgcggggggagggggcggcacggacctaccaaagcggggccatggagcccagagagtcggggaaggtaggactggaaggcccgggggccgcccgctccctcccgaggatcccccagccgggctcgggcgaggcggggcggctcgggcggaggccccgcagatgagccaggcttgcagggaaggactcgccggcccgccctctcttcccgcacttcggcgcccgaccccgggagggtggttgagaggagcggacgcttccgttcggagtccgg

SEQ ID NO: 144429 - DNA, 499 bp, Homo sapiens
cggaactcctgtgtcgacccacgcatccgagatggggtccggagcatcagagacccacctggagatgttctggccagcccggagccgctcttcactgcagattgccccatattctaccccccagggcctctgggaggatttgatagcatggctgagctcctgccaagttcaagagctgaactagaggaccctgggggggatggagcaattcctgcaatgtatctagactgcatttcagatttgaggcaaaaagaaatcactgatggcatccacagctcctcagacattaatattttatataatgatgcagtagaatcctgcattcaggtaatacgtttataatgattgctgtatcttacagagaaggattctatactgagaacgatgtatatccatgctgatgatggaaaaaagaatactagtgataacccactgctaacatcataatgttggcatataccaacatgcttatcatggactaggcattggtttagacgcg

SEQ ID NO: 144430 - DNA, 6443 bp, Homo sapiens
cggacgagggccagagccatggcttggcagcgtccagggccagaggagccttctggagcatcacccaggaaaaaaacagatgggctacatgggagaaatggaggtgcaaggtcccaccagggagagtggacagtccctcccgcctcagaagaaagcctacctttcccacctcagtacaggcagtggacacatcgagggagactgggccggaagaaacaggaaacttctgaagccccggtccatccagaagtcgtggtttgtgcagtttccgtggctgatcatgaatgaggagcagacggctctgttctgctctgcttgccgagaatacccctccatcagggacaaacggtcaagactaatagaaggttatacaggaccattcaaggtggagactctcaaataccacgcgaagagcaaggcccacatgttctgtgtcaatgccttggcagcgagggaccccatctgggcagcccggttccggagcatcagagacccacctggagatgttctggccagcccggagccgctcttcactgcagattgccccatattctaccccccagggcctctgggaggatttgatagcatggctgagctcctgccaagttcaagagctgaactagaggaccctgggggggatggagcaattcctgcaatgtatctagactgcatttcagatttgaggcaaaaagaaatcactgatggcatccacagctcctcagacattaatattttatataatgatgcagtagaatcctgcattcaggacccttctgcagaggggctgtcggaggaggttcctgtggtgtttgaggagctgccggtggtgttcgaggatgtggcagtgtatttcacccgggaggagtggggcatgctagacaagcggcagaaggagctgtacagagacgtgatgcggatgaactacgagctgttggcatccttgggacctgctgctgccaagccagacttgatctccaaactggagcggagggctgcaccctggatcaaggacccaaatgggccaaagtgggggaaaggtcgtcctccagggaacaagaagatggtggcagtgagagaggcagacacacaggcctcggctgcagactccgcgttgcttccaggctctcccgtggaggcccgtgcctcctgctgcagttccagcatttgtgaggaaggagatggacctaggagaatcaagaggacatacaggccccgttccattcagaggtcatggtttgggcagttcccatggttagtaattgaccccaaagagaccaaactcttctgctcagcctgcatagaaagacctaatctccatgataaatcatctcggttagtcagaggttacacggggccttttaaagtggagactttaaaataccatgaagtcagcaaagcgcacaggctctgtgtcaacacggttgaaatcaaggaagacacccctcacactgccctcgttccagagatctccagcgacctcatggccaacatggagcactttttcaatgccgcctactccattgcataccactcaaggcccctgaatgactttgagaagatcctgcagctcctccaaagcacggggaccgtgatattaggcaagtaccgcaatcgcacggcgtgcactcagttcatcaagtacatctcagagaccctgaagagggagatcctggaggacgtgcggaactcgccctgtgtgagcgtgctgctggacagctccaccgacgcctccgagcaggcctgcgtggggatttacatccgctacttcaagcagatggaggtgaaagagtcctacatcactctggcccctctctacagtgagacagcagatgggtacttcgagaccatcgtttctgccctggatgagctggacatccccttccggaagcctggctgggtggtggggctggggacggatggctcagccatgttgagctgcagaggaggccttgtggaaaagttccaggaggtcatcccgcagctgctccctgtccactgcgtggcccaccggctgcacctggctgtggtggacgcctgcgggagcatcgatctggtgaagaagtgtgaccggcacatccgcaccgtcttcaagttttatcagtcctcaaacaagaggctgaacgagctgcaggaaggtgcggcgcctctggagcaggagatcatccgcctgaaggatctgaatgcggtccgctgggtggccagcaggaggcgcacgctgcacgcgctgctcgtgagctggcccgccctggccaggcacctccagagggtggcagaggctgggggccagattgggcaccgggccaaagggatgctgaagctcatgcgcggcttccactttgtcaagttctgccacttcctgttggacttcctgagcatctacaggcctctgtccgaggtgtgccagaaggagatcgtgctgattacagaggtgaacgccacgctgggccgcgcctacgtggcactggagagcctccgtcaccaggcagggcccaaagaggaagaattcaacgccagcttcaaggatgggcggctccacggcatctgcttggacaaactggaggtagcggaacagcggttccaggcggatagggagaggacagtcctgacggggattgagtacctccagcagaggtttgacgcagaccgacccccacagctgaagaacatggaggtgtttgacaccatggcctggccaagtgggattgaacttgccagttttgggaatgatgacattctcaacctggccaggtatttcgagtgctccctcccaacaggatacagtgaggaagctctgctggaggagtggctgggcctgaaaaccattgcccagcacctcccgttctccatgctttgcaaaaacgccctggcccagcactgccgcttccccctgctaagcaagctcatggccgtggtggtctgtgtgcccatctccacctcttgctgtgagcgggggttcaaggccatgaaccgaatcaggaccgatgagaggaccaagctctccaacgaggtgctcaacatgctcatgatgacagctgtgaacggtgtggccgtcacggagtacgacccccagcccgccatccagcactggtacctgacctcctcaggccggcgtttcagccatgtctacacctgtgcccaggtgccagcccgctcccctgcaagcgccaggctcaggaaggaggagatgggagccctctatgtggaggagcccaggacccagaagccacccatcctgccctccagggaagcagcggaggttctgaaggactgcatcatggagcctcccgagagactcctgtatccccacaccagccaggaggcccccgggatgtcctgagggacagggagtccttgggactgccttggagacgcctctgtgatcactgggacaggctctgcagattctaggctgccctaggatcttctgctggtggcgatggtctctaagcaccaggaagtgggcagtggcatcccagagcagcaggggtatcaggaggtgcatgacctgtttcctgaggccccactcagcacagccatgcctcacagcacacaaatgtgccagaaggttctatatctcaagttcatttttaaggtgctgcagaaaataaccccatcatgaaaggtttcagcccctgagttttggtggcaagaggagtgtcctggtaggggagactgttggacatccctggggaatgttccagggaggctgcccacagtctaagtgggaatgggaaagaccaccttgttagagggggaggttgcccctgctctagggacagctggcctggctgcaagagcccccagaggcattgttctgggacttcctaccctggctcccacagcagaagcagtgaggccgtggtctcgtgcggaactctacctcttcccagggcttcctttagggcgaaacaatcacaagccctttgcacagagcacccaagaaagttctcttcctgcagctccagatggtggagctgggctcttctggcagggggtctggtgcttcccggagagccgagccgcgtttaacccgtggcatgcccggcccggtttacccaggagaggatgggacgaagttggagttgggaggcttgggatgcagccccagctctgctgcaggcagtggtctgattaatcccttcctctttgtgcctcagtttccctctccatgaagtggcagcagagatccaagtgcctgctgactccccatctgccctaggattagtgaatgagagcctcgagctccctgaaagacctctggctgcagtgtggacttagctgccatctgccccatcctcgtccttagtgggacaggtaggaatttgtctccaaagtccttgttgtaggagttgctctctgaatgcaccatctgcacgacaggctagtccactcttctctgagctgccctggggactctgcaccaggatctccagggcccactgagacatccccgaatgggcgctcagtgacaagggctttgaacaacctcctccagggactttgggcctgctctagcttcagaaccacagaaccaccgccctagaggcacagaggggcttctggcactgctaggttcacaccctcctcgcccatcttccttccacctaaagtgaagcacttttccttccaagggcagctccgtcttggcaggctcaggaggccgcttatcaggaggaggatgattttgtctaggttctgccttccttaaccatgggcaggaaatgaggcaagtcagcaggcagggtttctctgccctgcctgatacttgttttaaacaggcaggaagtgggcgccatccatcccagcttgcttgctgcctggctcaggcaggtcctgtgctgtgctgcaggcccctgtgggtgggccctttctccatagtctgccgcttcccattcccagggtagatgctggcatctgagcacctgagtacccttcctattcccagggtagaagctgctgtctgagtacccttcccattcccagggtagatgctggcgtccgagcccctccccggtaccgcaggtaccctggtaccccacctgccctttcatccccaccccagtacttagccttagcactgttgctttcgtgtcattttcagttctagtcaggaattcctttcttgctttctgcctttgacctgtggaaatgtctcccagccctgtgggtctggcggtcagagggaccccacaggcctgtggtgcgggagctctgggaggtgttactatctgcgtggctaaggcacacacaggcctccttctccccatcaccgtctccatgggcgttcaggaacttgcccaggtcaggcactgtggatgtgaactcgtggaaagggagggagaaaggcttttttaggtggggctatagcctctgccctacccacagggattccacatcaaggtgctgttccagcacacatgcttcctgcggcctcttcatccttgaagaatccctcagagcaggaggccatcctgtgagcagccgtgagtgggtctctgtgggagtagttctggagctgaggtggaagctaggggaagcaactcgccctctccacgtcagcatcagcgtgctccgaggacaccggccagtgccttccttaggtggtgggaaaggggtgtccctgtgcagcggggccactgagaatgctgtttgtcataaaatttgcactacccgatttctcaaggggcacaggcctgctccgttcccctttgtcagccaatggccaagaaggaagaagatgactgccatcttattcctgaacttcctcattcaggacccccgtggaaacacagtgagcatccttatcagaggccctggcccaggctggcccctttgctttgtttggagaggctggctgagtttcagcccctagtgctggagacccccttgttggagaggcttcctgtttatgcctcacaagaagaaaaaccacagggctctgggaggggaagaagcatgcactcccgctttggctggagtcccagcgcttgtcgccaccctcctccttgcctgtagtcttgacagcatccgtatgtacgtgtcctggcatttcccctccctctccctgatgactgatacccaccgggtctgacattccaagtaaccagtatgtaactggtagtttgatcccaatagccatagcgactccaggtgggagtgagggagcccagccccctgtcctggaagataccttagagtatgtgaccgcgctccagacccttgcttctctctcctgcagaggatgagtttctagggtgctaagtacctatcagaacagtgtggaggggcgggtccctcatacaggtgtgtgcttagccaaatacagtaactgtgactggcccagggatgttctctcctctattttcaaagatgaaaggaggttttaaaaaccatgtttaattcctaaccttttgctacctgaataaagcagagtctatttcaac

SEQ ID NO: 144431 - DNA, 419 bp, Homo sapiens
gctgtccgcactagcgattaggcacgtctgctcgcagagccccagctcccccggggccacctgctgccacgtttctccagggggcactctgccagggaagaccatccaacccagctttcgggtcggccctggatccagcctcgattcctcccctcccaagctgagcacccacacgtccccatcttgccttctcagccacagcagcctccaaccacacctcctgatctttcttatccacccacccaaacactagctggacccaggccaggtctcacctcctccagaaaaggctccctgaccaatcctgtccactcggcctctattctcagcactgatgtctcaccctctgaggttctacctgcctgtcagagacctagagactgtgccctgtctctgcctggtcttggggtggggtggtc

SEQ ID NO: 144432 - DNA, 13686 bp, Homo sapiens
atgctgccaccagggactcgggtcctggtgcaactgtcccctcagttccgtggtcgcgtggctgggctgtgtggtgactttgatggagatgccagtaatgatctgcggagccgccagggcgtcctggagcccacagctgaactggctgcccactcctggcgcctcagccccctctgccctgagccaggagacctgccacacccctgcacgatgaacacacaccgggctggttgggctcgggcccgctgtggggcgctgctgcagccgctcttcacattatgccacgcggaggtccccccgcagcagcactatgagtggtgcctgtatgacgcctgcggctgcgactcggggggtgactgtgagtgcctctgctcggccattgccacctatgcagatgagtgtgcccggcatgggcaccacgtgcgctggcgtagccaggagctctgctccctgcagtgtgaagggggacaggtatatgaggcctgtggccccacgtgtccccccacctgccatgagcagcatcctgagcccgggtggcactgccaggtggtggcctgtgtggagggctgcttctgccccgaggggactctgctgcacggaggagcctgcttggagccagcttcctgcccctgtgagtggggccgcaactccttcccgccggggtctgtgctgcaaaaggactgcgggaactgcacgtgccaggaaggtcaatggcattgtgggggtgacggtggccactgtgaggagcttgtgcctgcctgtgcagagggagaggccctgtgccaagagaatgggcactgtgtgccccatgggtggctttgtgacaaccaggacgactgtggcgatggctctgatgaggagggttgtgccgccccaggctgtggggaggggcagatgacttgcagctccggccactgcctgcccctggccctgctctgtgaccgccaggatgactgtggagatggcacggatgagccgagctatccgtgcccccagggcttgctggcctgtgccgatggacgctgcctgccgccggccctgctctgcgatgggcatcctgactgtctggatgccgccgacgaggagtcctgtctggggcaggtgacctgcgtccccggggaggtgtcctgtgttgatggcacctgcctgggggccatccagctgtgtgacggagtctgggactgcccagatggagccgatgaggggccgggacactgccccctaccttctctgcccacacctcctgccagcaccttgcctggcccctccccaggctccctggacactgcgtcaagtcccctggccagcgccagccctgcgccaccctgcggccccttcgagtttcggtgcggcagcggcgagtgcaccccgcggggctggcgctgcgaccaggaggaagactgcgccgacggcagcgacgagcgcggctgcggagggccctgcgcgccgcaccacgcgccctgcgcccgcggccctcactgcgtgtcccccgagcagctgtgcgacggcgtgcggcagtgtcccgacggctcggacgagggccccgacgcctgcgttgaggctcccgcgcccccggccatgcgcggcccccctggccaagccggcgggcccacctcttcccgagcgccatccccaccttcgcctcctgaggcacagggagagggcaggaagggacaggagcggagcaggacacatctcacagtgcccgcaggctccacccagctgcctctgtgccctggcctctttccctgtggtgtggctccggggctgtgcctgacccctgagcagctctgtgatgggatcccagactgtccccagggcgaggacgagctggactgcggggggctgccagccctgggaggccccaacaggacagggcttccctgcccagaatacacctgccccaatggcacctgcataggcttccagctggtgtgtgatgggcagcctgactgtggaaggccagggcaggtgggcccctccccagaagagcagggttgtggggcctggggcccctggagcccatgggggccctgcagccggacgtgtgggccctggggccagggccggagccgccgctgctccccactcggcctcctggtgctacagaactgcccagggcctgagcaccagtctcaggcctgcttcacggcagcctgcccagtggacggtgaatggagcacctggtccccctggtctgtgtgctctgagccgtgcaggggcaccatgacgcggcaacggcagtgccactcaccccagaatgggggccgcacctgtgctgcactgcccggaggcctgcacagcacccgccagaccaagccttgccctcaggacggctgccccaatgccacttgctctggggagctgatgttccagccctgtgccccctgcccactgacctgtgatgacatctctggccaggtcacgtgcccacctgattggccctgcggcagcccgggctgctggtgcccagaagggcaggtgctgggcagcgaggggtggtgtgtgtggccccggcagtgcccctgcctggtggacggtgcccgctactggcctgggcaacgcatcaaggccgactgccagctctgcatctgccaagacggacggccccgacgctgccgactcaacccggactgcgctgtggactgtggctggtcctcctggtcaccctgggccaagtgcctgggcccctgtggaagccagagcatccagtggtccttccggagctccaacaacccccgcccctccggccgaggtcgccagtgccgtggcatccaccgcaaggcacgcaggtgccagacggagccctgtgaggggtgtgagcatcagggccaggtccaccgtgtcggggaacgctggcatgggggcccctgcagggtgtgccagtgtctgcacaacctcaccgcacactgctcaccctactgcccgctcggcagctgcccccagggctgggtcttggtggaggggacgggagaatcatgctgccactgtgccctacctggagagaaccagacggtccagcccatggccactcctgccgcagctccggctcccagtccccagatcagattccctttggccacttacattctgcctccgtcaggagacccctgctattctcccctggggctggccggactggctgaggggagtctgcatgcatcgtcccagcagctggaacaccccacccaggctgccctcctgggggctcccacccaggggcccagccctcagggatggcacgctggaggggatgcttatgccaagtggcacactcggccccattacctgcagctggacctgcttcagcctcggaacctcactggcatcctagtgccggagactggctcctccaacgcatatgccagcagcttctcactccagttcagcagcaatggtctacactggcatgactatcgtgacctcctgcctggcatcttgcccctgcccaaggtatcacccgcccaaggccgatggggccagcagcccaccatgcccttttgtgggttccatagtctttgtccccaagggccttccagtgtccccgaggggcatggcctgcattcgatgcttgttgaatacctgcttttccccagaaactgggatgacctggaccctgccgtatggactttcggccgcatggtgcaggcgaggtttgtcagggtgtggccccacgatgtccaccacagcgatgtccccctgcaggtggagctgctgggctgcgagccaggggttggactccgctgtgccagtggtgagtgtgtcctgagagggggcccttgtgacggtgttctggactgcgaggatggctcggatgaggagggctgtgtgttgctgcctgagggcactggcagattccattccacagccaagaccctggccctctcctctgcccagccggggcagctgctgcactggcccagggagggcctggcagagactgagcactggccccctgggcaggaatcccccacgtccccgacagagacaaggcccgtgagtcctggcccagcctccggggtgcctcaccatggggaatctgtgcagatggtgaccaccacccccataccccagatggaggccaggaccctgccaccaggtatggcagctgtgacggtggtgcccccacaccctgtgactccagcgacccctgctggccagagcgtcgccccaggacccttcccacctgtgcagtgtggccccggccagacgccctgtgaggtgctgggctgcgtggaacaggcgcaggtgtgtgatggcagggaggattgcctcgacggctccgacgagaggcactgcgcctcaagggccctctgttccccgagccagctgagctgtggcagcggggagtgtctgtctgctgagcggcgctgtgacctgcggcctgactgccaggatggctcggacgaggatggctgtgtggactgcgtgctggccccctggtctgtctggagcagctgcagccgcagctgtggcctgggcctcaccttccagcgccaggagctgctgcggcctcctctgccagggggcagctgcccgcgtgaccggttccgaagccagtcctgctttgtgcaggcctgcccagactgcgagctgggccgtgtgtatgtgagtgccgatctgtgccagaaggggctggtgcccccatgcccaccctcctgcctggatcccaaggccaacagaagctgcagtgggcattgtgtggaaggatgccgctgtcccccggggctccttctgcatgacactcgctgcctgcccctctctgagtgcccctgcctggtgggcgaagagctgaagtggccaggggtgtccttcctcctgggcaactgcagccaatgcgtgtgtgagaagggggagttgctgtgccaaccagggggctgccccctgccctgcggctggtcagcctggtcctcctgggctccctgcgaccgctcctgtggctctggaaggtgttcggctggacgccctggacttcctggtcctcctgctcccaaagctgccttgccccgggagggggccctggctggcgcagtcgttcccgactctgccccagccctggggattcatcctgcccaggagatgccacccaggaggagccctgcagcccccctgtatgcccagatagagtgtacgggcttctgcgcccccggctgcacctgcccccctggtcttttcctgcacaatgctagctgcctgccccgcagccagtgcccctgccagctgcacgggcagctctatgcatcaggagcaatggctcgcctggactcctgcaacaactgctgcaacgtgggcattcggcgccgcttccgggcaggcactgcacccccagctgcctttgggggtgctgagtgccaaggccccaccatggaggctgaattctgcagcctgcggccatgtccagcctcctggggctgctgccaccgagtgccatgcactggggagctagagcagcggcccctgatggtctcacagatcctggaagcccaggatcaaggtgttgctcctgtgtctccgggctcatcgccaactgcagctcctggccttgtgcggagggtgagcccacgtggtcaccctggaccccttggagccagtgttcagcctcctgtggccctgcccggtgccatcggcaccggttctgtgccaggagctgggggatggggtccatgggggccctggtcccactgtagccggagctgtgggggaggcctgcggagccggacccgggcctgtgaccagcccccaccccagggcctgggggattactgcgaggggccacgggcacagggggaggtctgccaggctctgccctgcccagtgaccaactgcactgccattgaaggggccgagtatagcccctgtggccctccgtgccctcgctcctgtgatgacctagtgcactgcgtgtggcgctgccagcctggctgctactgcccaccaggccaggtactgagttccaacggggccatctgcgtgcagccgggtcactgcagctgcctggacctgctgaccgggcagcggcaccatccgggtgctcggctggcaaggcctgacggctgcaaccactgcacctgcctggaggggaggctgaactgcacagacctgccctgcccagactgcgggggtggccagagtctgcatccctgtgggcagccctgcccccgctcctgccaggacctgtcccctgggagtgtgtgccagccaggctctgtgggctgccagcccacttgtgggtgccccctgggccagctctcccaggacgggctgtgcgtgcccccagcccactgccgctgccagtaccagcctggagccatggggatccctgagaaccagagccgctcagcagggtctaggtttagctcctgggagagcctggaacccggagaggtggtcactgggccatgtgacaactgcacctgtgtggcaggcattctgcaatgccaggaggtgcctgactgcccggaccctggggtgtggagctcttggggcccttgggaagactgcagtgtttcgtgtgggggcggggagcagctgcgctcccggcgctgtgctcgtcctccctgcccagggcctgcccgccagagccgcacatgcagcacacaggtctgcagagaggcaggctgcccggctggccgcctgtaccgtgaatgccagcccggcgagggatgccccttctcctgcgcccacgtcacgcagcaggtgggctgcttctctgagggctgcgaggagggctgccactgccccgagggcaccttccagcaccgcctggcctgtgtgcaggagtgcccttgtgtgctgacagcctggctgctgcaggagctgggagccaccataggtgaccctggtcagcccctcgggcctggagatgagctggactcaggccagacacttcgtacaagctgtggcaactgctcgtgtgcacacgggaagctgtcttgctccctggacgactgcttcgaggccgatggtggtttcggtccctggagcccgtggggcccgtgctcccgctcctgtggagggctgggcacccgtacccgcagccgccagtgtgtgctcaccatgcccaccctcagtgagctgcccgtgtgccctggccctggctgtggggctgggaactgttcctggacctcctgggccccgtgggaaccttgctcccgcagctgcggagtgggccagcagcgccgcctgcgggcataccgtccccctgggcccggcgggcactggtgccccaacatccttactgcctaccaagagcgccgcttctgcaacctgcgagcctgcccagaggccggctgcccagcaggcatggaggtggtcacctgtgccaaccgctgcccccgccgctgctcagacctccaggagggaattgtgtgtcaggacgaccaggtctgccagaagggctgccgctgcccaaaggggtccctggagcaggatggtggctgcgtgccaattgggcactgtgactgcaccgatgcccagggccacagctgggccccggggagccagcaccaggatgcctgcaacaactgctcatgccaagctgggcagctctcctgcacggctcagccctgcccgcctcccacccactgtgcctggagccactggtcggcctggagtccctgcagccactcatgcgggcccagagggcagcagagccgcttccggtcctccacgtcgggctcgtgggccccagagtgtcgggaggagcagtcccagagccagccctgccctcagccctcgtgcccacccctgtgcctgcagggcactcgctcccgcaccctgggggacagctggctgcagggggagtgccagcggtgctgcggcccgggcctggcctctcgctctgggtcctgcccctgcctgatggccaaggccgaccccacctgcaacagcaccttcctccacctggacacccagggctgctactcagggccctgcccagaggagtgtgtgtggagcagctggagcagctggacgcgctgctcttgccgggtgctggtgcagcagcgctaccgacaccagggcccggcgtcccgaggggccagggcaggcgccccctgcacgcggctggatggccacttccggccttgccttatcagcaactgctctgaggacagctgcacgcctccctttgagttccatgcctgcggctccccctgtgctgggctctgtgccacacacctgagccatcagctctgccaggacctgccaccctgccagccgggctgctactgccccaaggggctgctggagcaggctgggggctgcattcccccagaggagtgtaactgctggcatacctcagcagcaggagccgggatgaccctggcccctggggaccgcctgcagctgggctgtaaggagtgtgaatgccggcgtggggagctgcactgcaccagccagggctgtcaagggtctctgggcccaggggtggtcactgggaagggcacccacaccctgtccttccagagcagcaccgccaccggctctgtctggatcctgcgacagggaggccctggactggagcccctcacctctgcaccgcacccctcagccagcagcgcctctgccctgaccctggagcctgccctgactcatgccagtggagtctgtgggggccatggagcccctgccaggtgccctgcagtggggggttcaggctacgctggagagaggcagaggccctctgtggaggaggctgccgggagccatgggctcaagacagaaagctgcaacggagggccctgcccaggctgccgctgtccccctggccagctggtccaggatgggcgctgtgtgccgatctcctcttgccgctgtggcctccccagtgccaatgcctcttgggagctggccccggcccaggcggtgcagctggactgccaaaactgcacctgtgtcaacgagtccctggtgtgcccacaccaggagtgtccagtccttgggccttggtcagcctggagcagttgctcggccccctgtggtgggggcactatggagcgacatcggacttgtgaggggggtcctggggtggcaccatgccaggcccaggacacagagcaacggcaggagtgtaacctgcagccctgccctgagtgcccccctggccaggtgcttagtgcctgtgccacctcatgcccgtgcctctgctggcatctgcagcctggtgccatctgtgtgcaggagccctgccagcctggctgtggctgccctggagggcagcattctctgccctggggcctcaccctgaccctggaagagcaggcccaggagctgcccccagggactgtgctcacccggaactgcacccgctgtgtctgccacggtggagccttcagctgctccctcgttgactgtcaggagtgccccctggggaacacgtggcagcaggtggccccgggggagctggggctctgcgagcagacgtgcctggagatgaacgccacaaagacccagagtaactgcagttcagctcgagcctcgggctgcgtgtgccagcccgggcacttccgcagccaggcaggcccctgcgtccccgaagaccactgcgagtgctggcaccttgggcgtccccacctgggcgaggagatggtgctggagccagggagctgctgtccctcttgccgcagggaggctccggaggagcagtcgccctcctgccagctcctcacggagcttcgaaacttcaccaaagggacctgttacctggaccaggtagaagtgagctactgcagtgggtactgcccatccagcacccatgtcatgccagaggagccatacctgcagagccagtgtgactgctgcagctaccgtctagacccggagagccctgtgcggatcctgaacctgcgctgtctgggtggccacacagagcccgtggtgctgccggtcatccacagctgccagtgcagctcctgccagggacctgcgttccgggagccaatagcagcttcgagagccgctcacctagagcggactacacttcccgtcacgccccgccgcctggggctgggcagtgaccgtaaagctgttcgctcggtgcgacgcaagtctcagctcagcgcgcttatcctgggtccaccggcgctaccgccccccgacgtgagagagcgaagttcttgggccgcgctccctccctacctgggtgccctccccctccgggagcctgggtccccggggcggtcgcggcggctgcatcctcaggccaggccgcggggggagggggcggcacgggcctccgaaagcggggccatggagcccagagagtcggggaaggctcctgtgacgtttgatgacatcactgtgtacttactccaggaggaatgggtgctgctgagccagcaacagaaggagctctgtggttccaacaagctggtggcaccactgggaccaactgttgccaatcctgagctgttccgcaagttcggacgagggccagagccatggcttggcagcgtccagggccagaggagccttctggagcatcacccaggaaaaaaacagatgggctacatgggagaaatggaggtgcaaggtcccaccagggagagtggacagtccctcccgcctcagaagaaagcctacctttcccacctcagtacaggcagtggacacatcgagggagactgggccggaagaaacaggaaacttctgaagccccggtccatccagaagtcgtggtttgtgcagtttccgtggctgatcatgaatgaggagcagacggctctgttctgctctgcttgccgagaatacccctccatcagggacaaacggtcaagactaatagaaggttatacaggaccattcaaggtggagactctcaaataccacgcgaagagcaaggcccacatgttctgtgtcaatgccttggcagcgagggaccccatctgggcagcccggttccggagcatcagagacccacctggagatgttctggccagcccggagccgctcttcactgcagattgccccatattctaccccccagggcctctgggaggatttgatagcatggctgagctcctgccaagttcaagagctgaactagaggaccctgggggggatggagcaattcctgcaatgtatctagactgcatttcagatttgaggcaaaaagaaatcactgatggcatccacagctcctcagacattaatattttatataatgatgcagtagaatcctgcattcaggacccttctgcagaggggctgtcggaggaggttcctgtggtgtttgaggagctgccggtggtgttcgaggatgtggcagtgtatttcacccgggaggagtggggcatgctagacaagcggcagaaggagctgtacagagacgtgatgcggatgaactacgagctgttggcatccttgggacctgccgctgccaagccagacttgatctccaaactggagcggagggctgcaccctggatcaaggacccaaatgggccaaagtgggggaaaggtcgtcctccaggctctcccgtggaggcccgtgcctcctgctgcagttccagcatttgtgaggaaggagatggacctaggagaatcaagaggacatacaggccccgttccattcagaggtcatggtttgggcagttcccatggttagtaattgaccccaaagagaccaaactcttctgctcagcctgcatagaaagacctaatctccatgataaatcatctcggttagtcagaggttacacggggccttttaaagtggagactttaaaataccatgaagtcagcaaagcgcacaggctctgtgtcaacacggttgaaatcaaggaagacacccctcacactgccctcgttccagagatctccagcgacctcatggccaacatggagcactttttcaatgccgcctactccattgcataccactcaaggcccctgaatgactttgagaagatcctgcagctcctccaaagcacggggaccgtgatattaggcaagtaccgcaatcgcacggcgtgcactcagttcatcaagtacatctcagagaccctgaagagggagatcctggaggacgtgcggaactcgccctgtgtgagcgtgctgctggacagctccaccgacgcctccgagcaggcctgcgtggggatttacatccgctacttcaagcagatggaggtgaaagagtcctacatcactctggcccctctctacagtgagacagcagatgggtacttcgagaccatcgtttctgccctggatgagctggacatccccttccggaagcctggctgggtggtggggctggggacggatggctcagccatgttgagctgcagaggaggccttgtggaaaagttccaggaggtcatcccgcagctgctgcctgtccactgcgtggcccaccggctgcacctggctgtggtggacgcctgcgggagcatcgatctggtgaagaagtgtgaccggcacatccgcaccgtcttcaagttttatcagtcctcaaacaagaggctgaacgagctgcaggaaggtgcggcgcctctggagcaggagatcatccgcctgaaggatctgaatgcggtccgctgggtggccagcaggaggcgcacgctgcacgcgctgctcgtgagctggcccgccctggccaggcacctccagagggtggcagaggctgggggccagattgggcaccgggccaaagggatgctgaagctcatgcgcggcttccactttgtcaagttctgccacttcctgttggacttcctgagcatctacaggcctctgtccgaggtgtgccagaaggagatcgtgctgattacagaggtgaacgccacgctgggccgcgcctacgtggcactggagagcctccgtcaccaggcagggcccaaagaggaagaattcaacgccagcttcaaggatgggcggctccacggcatctgcttggacaaactggaggtagcggaacagcggttccaggcggatagggagaggacagtcctgacggggattgagtacctccagcagaggtttgacgcagaccgacccccacagctgaagaacatggaggtgtttgacaccatggcctggccaagtgggattgaacttgccagttttgggaatgatgacattctcaacctggccaggtatttcgagtgctccctcccaacaggatacagtgaggaagctctgctggaggagtggctgggcctgaaaaccattgcccagcacctcccgttctccatgctctgcaaaaacgccctggcccagcactgccgcttccccctgctaagcaagctcatggccgtggtggtctgtgtgcccatctccacctcttgctgtgagcgggggttcaaggccatgaaccgaatcaggaccgatgagaggaccaagctctccaacgaggtgctcaacatgctcatgatgacagctgtgaacggcgtggccgtcacggagtacgacccccagcccgccatccagcactggtacctgacctcctcaggccggcgtttcagccatgtctacacctgtgcccaggtgccagcccgctcccctgcaagcgccaggctcaggaaggaggagatgggagccctctatgtggaggagcccaggacccagaagccacccatcctgccctccagggaagcagcggaggttctgaaggactgcatcatggagcctcccgagagactcctgtatccccacaccagccaggaggcccccgggatgtcctga

SEQ ID NO: 144433 - DNA, 454 bp, Homo sapiens
tactcttggaggaagaaaaactgtccttccttctccaaaaaaggaaaaattataataatataaatgacaaaaataaaagaattctgtttcctggaataagcatttcttattcctagttgtagggactcctatttttaccttccgttacagtgttgattcataagaaatattgttacatttgagataacttcatctgtatggggtatttatttgcaatgatgtctgagtactgtattttttctgtgcattaccttagtgtcagaatgttggtctttattttaaagtcatatgcatgttctcctgccaaggaataggaaggagaaattaattgagattttcaggacacagacatatgatgtgaatgcctacaaagccagtgcgcataggaacagtgggcctgggtaaagagtcacattggtaggaccaataaagaataataaaaagccaaagcaaa

SEQ ID NO: 144434 - DNA, 415 bp, Homo sapiens
  misc_feature (1)...(415): n = a,t,c or g
nccatgtgttccaaggaggccccgttggtgggcttttccagtgggctcctggcgagcctggcatccagggaaaaagggtcttcggcccatacagaggcctttccacgcagcagctcgcagcatgctcaacattacagcttgttttcctcccattaagaaacgtggggaatgctattttcaaaagaattgcagtggcatatccaaaaagtttctaagtgggcttttaggttgcccttctttcctccttgtgggcctcgagagggaaggggaaggggctgcagtgtgacagggccgggtggccaagtcctcctgacagctcctccccaggctcggtgtgcctggcttggtcttagggacggctttggcacggccacgccgggtctgctcatnctccgcctcgttcccgtgaatgcat

SEQ ID NO: 144435 - DNA, 1325 bp, Homo sapiens
agtctcgctgtgacaaggacctggatactctcagtggttacgctatgtgccttcctaatttaaccagactccaaacctaccgctttgcagagcaccggccgattctgtgtgtagagattaaggtgacctgtcgaggggcagatggtgtgggtaaaggggaaagggtggaggagagaagggccacagccatcccctactgtgctcagcaggacacccttctcttcgtgttccctggacagagcctctataggcaggcctttggacaagcacacacaaaccacaagaaggtggctgctgacggagagagccgggaggagagcctgatccaggagtcggcctccaaggagcagtactacgtgcggaaggtgctagagctgcagacggagctgaagcagttgcgcaatgtcctcaccaacacgcagtcggagaatgagcgcctggcctctgtggcccaggagctgaaggagaagatagaaacagaggggaaacttcctaacactttctatgaagccagcattgtcctattaccaaaaccagacaaagacattaacagaaaagaaaaggacaaaccagtatttctaatgaacaaagatgcaaaagtcctcaacaaaatattagcaaatcaaatccaaaaatgtgtaaaaagaattatgctctatgaccaaggggaatttatcccaggtctgggacatggagagcacaagatgatcttggaacaatttgcatcagacatcaaggaagtaataacaataataacaaattacgatgttttgaagacatggagccagcttggaggagctcccacgggccaaatctgctaccatttgagcatcaaagcaagtattcccatgaaatgtacgatgagtacaccctattctacagaagcaaaagctgaggctcagagacgccaagaggtttgctggggtctcgcgactaagcggtcccaacacccagacaccctggctacccggggactgccggtcactaccgggcgccgaaaagccgccggctccttccgccagctacacatccggcgccgaggccggaagcttctcttccggctcccaagaccgcgttccggaaatgagtcgctctaccagtacctaagatggccgccggcccatccaccgtcgcgatcggtcggctggttcccagcgaggcgggcggcccccagctcgcgtccccgagtcctagcccgcgaggcgccagggctgcgcctgggcatggaagaggggaagatggacgagaatgaatgggggtaccacggagagggcaataagagcctggtggtggcccacgcgcagaatttgaaggctttcacctga

SEQ ID NO: 144436 - DNA, 3457 bp, Homo sapiens; identical to SEQ ID NO: 117030

SEQ ID NO: 144437 - DNA, 6616 bp, Homo sapiens
catgattacggcttgcttgaatgcgagcttatatatagggaaggctgggaaccacgctggcgtgcccaagctttatgtatttgatgcagaattcgtgatttcccgggtcgacgatttcgttcggccaccatgtcggcgccgtcggaggaggaggagtacgcgcggctggtgatggaggcgcagccggagtggctgcgcgccgaggtgaagcggctgtcccacgagctggccgagaccacgcgtgagaagatccaggcggccgagtacgggctggcggtgctcgaggagaagcaccagctcaagctgcagttcgaggagctcgaggtggactatgaggctatccgcagcgagatggagcagctcaaggaggcctttggacaagcacacacaaaccacaagaaggtggctgctgacggagagagccgggaggagagcctgatccaggagtcggcctccaaggagcagtactacgtgcggaaggtgctagagctgcagacggagctgaagcagttgcgcaatgtcctcaccaacacgcagtcggagaatgagcgcctggcctctgtggcccaggagctgaaggagatcaaccagaatgtggagatccagcgtggccgcctgcgggatgacatcaaggagtacaaattccgggaagctcgtctgctgcaggactactcggaactggaggaggagaacatcagcctgcagaagcaagtgtctgtgctcagacagaaccaggtggagtttgagggcctcaagcatgagatcaagcgtctggaggaggagaccgagtacctcaacagccagctggaggatgccatccgcctcaaggagatctcagagcggcagctggaggaggcgctggagaccctgaagacggagcgcgaacagaagaacagcctgcgcaaggagctgtcacactacatgagcatcaatgactccttctacaccagccacctgcatgtctcgctggatggcctcaagttcagtgacgatgctgccgagcccaacaacgatgccgaggccctggtcaatggctttgagcacggcggcctggccaagctgccactggacaacaagacctccacgcccaagaaggagggcctcgcaccgccctcccccagcctcgtctccgacctactcagtgagctcaacatctctgagatccagaagctgaagcagcagctgatgcagatggagcgggaaaaggcgggcctgctggcaacgctgcaggacacacagaagcagctggagcacacgcggggctccctgtcagaacagcaggagaaggtgacccgcctcacagagaatctgagtgccctgcggcgcctgcaggccagcaaggagcggcagacagccctggacaacgagaaggaccgtgacagccatgaggatggggactactacgaggtggacatcaacgggcctgagatcttggcctgcaagtaccatgtggctgtggctgaggctggcgagctccgcgagcagctcaaggcactgcgcagcacgcacgaggctcgtgaggcccagcacgccgaggagaagggccgctatgaggctgagggccaggcactcacggagaaggtctccctgctagagaaggccagccgccaggaccgcgagctgctggcccggctggagaaggagctaaagaaggtgagcgacgtcgccggcgagacacagggcagcctgagtgtggcccaggatgagctggtgaccttcagtgaggagctggccaatctctaccaccacgtgtgcatgtgcaacaatgagacacccaaccgtgtcatgctggactactaccgcgagggccagggcggggccggccgcaccagtcccgggggccgcaccagccccgaggcgcgtggccggcgctcacccatcctcctacccaaggggctgctggctcctgaggcgggccgagcagatggtgggacgggggacagcagcccctcgcctggctcctcactgccatcacccctgagtgacccacgccgggagcccatgaacatctacaacctgatcgctatcatccgtgaccagatcaagcacctgcaggcagccgtggaccgcaccacggagctgtcacgccagcgcattgcctctcaggagctgggccccgccgtggacaaggacaaggaagcgcttatggaggagatcctcaagctgaagtcgctgctcagcaccaagcgggagcagatcaccacgctgcgcactgtgctcaaggccaacaagcagacggccgaggtggcccttgccaacctgaagagcaagtatgagaatgagaaggccatggttaccgagaccatgatgaagctgcgcaatgagctcaaggccctcaaggaggacgcagccaccttctcctcgctgcgtgctatgtttgccaccaggtgtgacgagtacattacacagctggatgagatgcagcggcagctggcggctgctgaggacgagaagaagacgctgaactcgctgctgcgcatggccatccagcagaagctggcgctgacccagcggctggagctgctcgagctggaccatgagcagacccggcgtggccgtgccaaagccgccccgaagaccaagccagccacaccgagcgtaagtcacacctgtgcctgtgccagcgacagggccgagggcaccgggctggccaaccaggtgttctgcagcgagaagcacagcatttactgtgattaggggctgtggggcgccgcacgctgcagctaacatctgcttcacctcaactaacccagcagcagcgggacggcggtgctaggtcaatcttaacgtgactaatgcacagagggtaggagtctagccgaggcgccatggggcgttgcatcagcaggacacttgtgagagctttgtgtcgcttctcactcctcaaagccccctcaggagcacccagtcctcagctgctctcttaggtgggggtcagaggtggggatagagctgcacattcttgcagcagatgtgtgatgaaagcatcttctaagccctgcgcacccgtggggaaacccaagggaggagtcctggtcctgctccctcagcacccaaaaggggcagaacctgagttgagacttgcatgttcctcgcatgtgtctaatgtcagcactagaaagcagttttaggaggttccagcctgcagcataggtacgacctcagaggatggctctgcacttggcatagtttcatggaaaggagtacgttgtagtttatgcagtatctgactgcaaatcatattcaggaaagaagtgcagaatttcttccccaagcccagagaagagcagccctgagcccctgtattctgctggccagacacacatggcacagacacagctgaccataacccaggaatccagagctcggtttctcatttctgagatcaggatgcttgtatagtggcctgtgaggtgacagattggcagggcccaaggccccaggttttcatttttcatgagaaaagctttccaagtgcctggccagaccttggtccttagtgcagagcccgtccttttgtacttggggtgaccccagcagccaattatccggccttccatagggggttcagtcccaaaagacatgggggcttttgaaaaaccctagcctgaaagtctgaagccaccaaagggcttggcttgggttggacacccacaggtgtatccagagcccagcccggtgctgggaaagctttgcatacggccagggccacttgtcaggattcacaggtaggagatgtttaggtctctttatttagtgcaatctgggggatggcaacagagaaagaggaaaggtagctgtagggttctcccatttccagaggctccatccacacctgccttcccacattctgagcagaacttttctcagtacttttttcccgatcaccctgtgggaccagctggacctgaggctgcagtcttctctcctgcaggctgcttgccttgtctctcatgcggaagaggcattcgagttacctggtgagagaccgtgttgccccctcccacagctctctgccctgcgcgttcttccctttggtgccgagtatgtttcggtcccctccagactccaggacacgcccatgtatgtcccctgcgtgttcatcctgggcccagatccccctgccccagcaagactcgcagtgggatggctgctggcatgcccaccctgcatgcgctttgccctctccttgcaagcctggcacatagcttctctccatactcctaagggactttgcagacacccaagccactgggacccctgctaacacatgcaggtcttctcttctgccaactaacgtgctcgcgccctcccagcacgtggagagcttcaattgtcagataaacaggaagcgacagatgaccgctttctaacgctctcttttctcccgttttcagctgtagagtagctgccaggaggacttggccacccggccctgtcacactgcagccccttccccttccctctcgtggcccacaaggaggaaggaagggcaacctaaaagcccacttagaaactttttggatatgccactgcaattcttttcaaaatagcattccccaggtttttaatgggaggaaaaaaagctttaatgttgagcatgctgcgagctgctgcgtggaaaggcctctgtatgggccgaagacccttcattccctgggctgccaggctcgccagggagcccactggaaacgcccaccacgggggctccttggtaaacatggttcttttttttatccgatcaacctgtgcaactttgatattttgaatattaatatttgcttcccttaaaacccctcgccgtaaaaacggtcctcaggtgcccgtgggtctatggcttcgtgggtcctgtaggctgtccgccttcaggttcccaccgtgttttgtctgggtgttcagcacgagggcagagctgtgtgctccatagcgtgtagctttagactcggagatgagtgctttgacccagcgaggagctcagctaagtgtatccacgctgtggttcagcagcctttagatcatacggcattgtggttcatgtttgaaattacagattttaaatgccatgttcattaagaaatccagggtattcagattctggggtttttcatattgtattattattattcttagggaatagttcaatgtaacaaggaaggaaaacttgacctttgctctggttaaaacagtaataggcacttgaaaaaaaaaagataaattattgaatgagtagtattacctacaaattccagaattttctgggttttaggacgttgtgaagcatgactgattaacagaattttatacaactgtaccaataaaattccaaattggaattgttttgttactctggttgttgtgccaaattgtggtacacttagaaaattctacagtccgtccgatttttagggtgttctctttcaacacctttttgttagtaatcattgccagtactgccttcatcagttaaggtgaggtgtcccagcacagatcattctcaaaagccgagccagggaagagctagtgggcatgctgaaggccagccgtggaccagccagttgaggccaggtgcttcttcccccccagacctgggcatcttcattgagggaaagaaaccagtcattgtgccaaaattctgttagtcagtgattctttacttgcaaattccggggccctagaaaatgaaagcaaacacaaaccccttgagtgtgcctttgggaaccccaaatgggaccttctggggacaaggcttgaggcaagcctgttattgaacgccccacgtttgtgaagagcctgagggtatcaggagggccgacgcctgtgttggcatgcgcagtaggggatgagggttagcccatagtattctttgcaaatgtgaaagcgagacattatatcttctccttgcttgggtgtaactaatcactgttaatttcaggaaacagaactcattaaaactccttagcaaaccaggtctacatcctgttttgtttgctgagtgaggttagtggggagtggtcaaattggtactcctgggaggaagaaaaaactggtcccttccttctccaaaaaaaaggaaaaattataataatataaatgacaaaaataaaagaattctgtttcctggaataagccatttcttattcctagttgtaagggactcctatttttaccttcccgttacagtgttggattcccataaagaaatattggttaccatttgagaataacctccacctgtatgggggtatttaatttgccaatggatggtctggagtaactggtatttttttctggtggcattaaccttaagtgtccagaaatgtttggtctttattttaaagtccatatgccatgttcctcctgcccaaggaaccctttacacagaccccaaacaaaaaaataataatcaaatgccttcaatttctgagtaaaatgaggcagagcgatggaaaaggaataggaaggagaaattaattgagattttcaggacacagacatatcgatgtgaatgcctacaaagccagtgcgcataggaacagtgggcctgggtaaagagtcacattggtaggaccgaataaagaataataaaaagccaaagcccaaaaaaaaaaaaaaaaaa

SEQ ID NO: 144438 - DNA, 544 bp, Homo sapiens
atgagaagtgatgtctattatcctcaccggaagcggcgcagtaccatacagtgtgtgagtagcagtaatcggcaagcagcatcgtgcgcgatttgctggcgttacggggccgtatggaagcggcccagataagccagacattgaacactccacagccaatgattaacgccatgctgcaacaactggaaagtatgggcaaagccgtgcggattcaggaagaacctgacggctgcctctctggcagttgtaaaagctgcccggaaggaaaagcctgtctgcgcgagtggtgggcgctgcgttaaccttactccatcgcctgttttggaaagcccgggtatgcgtctgcatccgggcttttttgcgtgcggctttccataaaaatgcaactcttgcagcacggcagcgttttcgtagttcacaatttgtgcctagtacgatttatgccggccggtacacgactctacattactgtcacacactccgctccagaaagaagttgtcatacattagttgcagcgagataggctctcaattcgatacttag

SEQ ID NO: 144439 - DNA, 954 bp, Homo sapiens
ttaatccgttttattacagggcagggtgcgatgagcagcaatacatttactctcggtacaaaatccgttaaccgtcttggttatggcgcgatgcaactggcaggtcctggagtttttggccccccacgagatcgccacgtcgctataaccgtgctgcgtgaggcgctggcattgggcgtcaatcatattgataccagcgacttttatggtccgcacgtcaccaatcagattatccgcgaagcgctttatccttactctgacgacctgacaattgtcactaaaattggtgcgcggcgtggagaggacgcatcctggttgcccgcattttctccggcagagctgcaaaaagcggtgcacgataatctacgtaatctcgggctggacgtgctggatgtggttaacctgcgcgttatgatgggggatggtcatggcccagcggaaggatcgattgaggccagcctgaccgtgctggcagagatgcaacaacaaggcctggtaaaacatattggcctgagcaacgtcacaccgacgcaggttgcagaggcgcgcaagattgccgaaattgtctttgtgcaaaacgaccacaacttcgcgcttcgcgacgcgctgcatgcattaaagttacgagttcgtcagggcgaaggtaaagacctgaataacgaaagtacgccaatggctttcgaaaatattaaacaagttattgatgacatggcgaccgatgccaccatgtttgacgttaacaaaaagtgtttgctgttgttcaatgtattggcggatgacggatattggcgcacctccgcagctactggcaaaatagccaggactccacaaaacgcctttgtagtaatacctgaatgcaatatctggtcgatctcgtcgcagtcacctacccgatacgcctttgaggctgtttaccagactggatatcgccagtttgggaggatagttaattaa

SEQ ID NO: 144440 - DNA, 4752 bp, Homo sapiens; identical to SEQ ID NO: 123337

SEQ ID NO: 144441 - DNA, 1555 bp, Homo sapiens
ttggaaagcccgggtatgcgtctgcatccgggcttttttgcgtgcggctttccataaaaatgcaactcttgcagcacggcgtaagttcctgtgaaagcatctcgcagggatgaaaactcgataatacacaggtgtggagtggcgcgtagagtcgcggcattcaaacaacaggtgaaggaacgccatgagcaaaaagcagagttcccccccacacgatgcgctgttcaaactctttttacgccaaccggacacggctggtgattttcttgcgtttcatttaccggcacccattcacgcgctttgtgatatgaaaaccctcaagctggagtcgagcagctttattgatgacgatctgcgtgaaagctattccgatgtgctgtggtcggtgaaaacggaacaaggaccaggatacatctattgtctgattgaacatcaaagcacctcaaacaaactgatcgcatttcgcatgatgcgttacgctattgccgcaatgcaaaatcaccttgatgctggatacaaaagcaaattgccggagtggaagaatctcgacccggaactgctgaagctggtcgccaaacacgatcccgacaataaatttgctatgccctatatgtgggcgacgaccgggattggctataacgttgataaagttaaagcggtgctgggcgaaaacgcgcccgtcgatagctgggacttgatcctcaaacctgaaaatctggaaaaactgaaaagctgcggtgtctctttcctggatgcgccagaagaagtttttgctaccgtgttgaattatctcggcaaagatcccaacagcactaaagcggatgattacaccggaccggcaacagatctgctgttaaacgtgcgcccgaacattcgttatttccattcatctcaatacattaacgacctggcaaacggcgatatttgcgtcgctatcggaagcgacgctgttcataacgcggctaccttccagcacgtaggtcaaaatttccatatctttatgcgggtgagtgccgaagccctgccctgcttcaatcacgtcgtcgttaatcacgcgcagcgcggagaagcccataaagttcggatcgtaatagttggcaaaagagaaagtatgccaggagtccagccagccatgatttgcatgaccacgttcatttgctttgctgctaagagtgacctgcaggcatgtaagtttagggccccttgtcgcctgtatcccccccccttcgcggataatctgattggtgacgtgcggaccataaaagtcgctggtatcaatatgattgacgcccaatgccagcgcctcacgcagcacggttatagcgacgtggcgatctcgtggggggccaaaaactccaggacctgccagttgcatcgcgccataaccaagacggttaacggattttgtaccgagagtaaatgtattgctgtcatcgcaccctgccctgtaataaagctttggcaacatgtccggtcaaatgcgtaccttcctcgaccagacgggcggcctgtgggcttccggcgcactatacggaaaactggcgagcgtctttag

SEQ ID NO: 144442 - DNA, 993 bp, Homo sapiens
atggaccagattatttctctgttcggtcgcccggatcacgtcgcttatgacatccgcagcctgcgtaataaagccaatcctgacgacacctttgaagcgcaactgttttatggcgacctgaaagccatcgtcaaaaccagccatctggtgaaaatcgattatccgaaatttatcgttcacggtaagaaaggttcgtttattaaatacggtatcgaccagcaggaaaccagcctgaaggctaatattatgccgggcgaaccgggattcgcagcggatgattcggtcggtgtgctggagtatgtcaatgacgagggcgtgacggtcagagaagagatgaagccggagatgggcgattacgggcgcgtttatgatgcgttgtatcaaaccatcacccacggtgcgccaaattacgtcaaggaatctgaagttcttaccaatctggaaatccttgaacgcggatttgagcaagcctctccctccacagtaactctcgctaagcagatcgggtccacactaagcccatcgaaatcattcagggggcgaatacaaatgatctacttacgcaaagcaaatgaacgtggtcatgcaaatcatggctggctggactcctggcatactttctcttttgccaactattacgatccgaactttatgggcttctccgcgctgcgcgtgattaacgacgacgtgattgaagcagggcagggcttcggcactcacccgcataaagatatggaaattttgacctacgtgctggaaggtactgttgagcatcaggacagcatgggcaataaagagcaggttccggcggtggagatcctcgccctctctgcctcatggggaggccgtctccttaatatcacccgggatggggagcccagaatggggaacggggtccccaccggctttaacgcggcttccaagttcatccgaggcattgaggggtccccttccgtgggcttcaacattgggacaaccaagtcgggactgcac

SEQ ID NO: 144443 - DNA, 4011 bp, Homo sapiens
cgccgtcgcagccactgctgtggttcgccggtcggccgaggggccgcgatactggttgcccgcggtgtaagcagaattcgacgtgtatcgctgccgtcaagatggaggggcctttgtccgtgttcggtgaccgcagcactggggaaacgatccgctcccaaaacgataaagagagttttaatgagcaaaaaacttgcagaatctgaaggaaaaggctggtatagctgtacgaagtggcagagcatgaaattgttatggctgcagcttcgattgccaatattgtaaaaagttctcttggtccagttggcttggataaaatgttgggtggatgatattggtgatgtaaccattactaacgatggtgcaaccatcctgaagttactggaggtagaacatcctgcagctaaagttctttgtgagctggctgatctgcaagacaaagaagttggagatggaactacttcagtggttattattgcagcagaacttctaaaaaatgcagatgaattagtcaaacaggaaattcatcccacatcagttattagtggctatccgacttgctttgcaaggaagcagtgcgttaatatcaatgaaaaccctaatttgttaacacaagatgaactgggaagagattgcctgattaatgctgctaagacatccatgtcttccccaaatcattggaataaatggtgatttctttgctaacatggtagtagatgctgtacttgctattaaatacacagacataagaggccagccacgctatccagtcaactctgttaatattttgaaagcccatgggagaagtcaaatggagagtatgcttcatcagtggctatgcactcaactgtgtggtgggatcccagggcatgcccaagagaatcgtaaatgcaaaaattgcttgccttgacttcagcctgcaaaaaacaaaaatgaagcttggtgtacaggtggtcattacagaccctgaaaaactggaccaaattagacagagagaatcagatatcaccaaggagagaattcagaagatcctggcaactggtgccaatgttattctaaccactggtggaattgatgatatgtgtctgaagtattttgtggaggctggtgctatggcagttagaagagttttaaaaagggaccttaaacgcattgccaaagcttctggagcaactattctgtcaacccctggcccaatttggaaggtgaagaaacttttgaagctgcaatgttgggacaggccagaagaagtggtacaggagagaatttgtgatgatgagctgatcttaatcaaaagtactaaggcttcgtacgtctgcatcgatcatctcacgtgtgccaattgattccatgtgtgatgagatggagcgctctttaccatgatgcactttgctgtagtgaagagcagttctggagtcaaaaatctgtggttccccgttgggggtgctgtagaagcagccctttccatatacccttgaaaactatgccaaccagcatggggtctcgggaacagcttgcgattgccagagtttgcaagatcactctctggttattccccaatacacttagcagttaatgcttgcccagggactccacagatctggtgttgcaaaatttaagagctttttcataatgaggcccaggttaaacccagaacggtaaaaatctaaaatggattggtcttgatttgagcaatggtacccctcgagacaacaaacaggcgggggtgttcgaaccaaccatagttaaagttaggggtttgaattttgcaacagaagctgcaatcacccattcttcgaattgatgatcttattaaattacatccagaaagtaaagatgataaacatgggaagttatgaagatgctgttcactctggagcccttaatgattgatctgatgtttcccttttatttataacaatgttaaatgcaattgtcttgtaccgtgagttgagtattacacattaaagtaaagtacaagctgttaaacttgggtttttgtgatgtaagaaatggtttccatctgtactttggtcctctgatttcacatattgcaacctagtactttattagtttaaaaaagaaattgaggttgttcaaagtttaagcaattcattctctctgaacacacattgtcattctctctgaacacacattgctattcccaatcccaccccccaaatgcacagggctgcaaacaccacgacttctgcccattctctccagtggtgtgtaacagggtcacaaagaattcgacagccagatgctccaagaggggtgggcccaagggcttatagccccctcctttcaatattgaccttctctggggggtaatcccaaaggtctttaactattggcagcagagacagctgccaaggcctcaatttgattcaaaatatgtcaacatctttcagtgaccaacctgcttttgttacagcttgctttatgggctggaattggtcctattcccataatggaaggctccacacccacttgggaccaggaaactatccgtgctaaagggtgtaagcccacgtttatcagcttctgactccttcataagaacgaacagctggaagcaccattcatttattcctgaagcaattggctggggtgactggtcccgttccatcagtaagaaagtaaggctttagcttggacatggcttcctatgttgctcccatggcgaggaaactcatctgttttaacttcaataagacctcttctaagttgacaccaaaactggtacaatctctttgtcaaaatggccagctttctgtgcattctctgtcctgttctgggacagaactgcaaccttgtcctgatcttctctactcacttgccattttttggctacattttcagctgtaatacccatatgacagttgtgaaaatgcatctgtaaagaccatcaacagagtaatactgtcaagtcaagtggcatctcacctatctttactcctgttctcaagtaagccaagtgaggagccttgctcatattttccatggcctcctgcaaccacaatgctgggagtctcctatccctattgactggactgcaaggcacacagcttttaggcctgacccacagatcatctggcagctccatgctggaacagagtagggaattcctgcacccacactggcttgtctaacaggattctgcccacagcctgctgccaagacatgtccaaaagatgacctcaggctcatcttccggagccacagtggccctcttcaaggcttctttgatggcagtggagcccgcggtcctggtcaggcaacagcagttaaggcaccgatgaagatccgtacgatgtgggcgcgccgccgagacgatgaccacaggatctgagcctgcattcatcttgcttctcctgccgccgactgccctgcgctgcctgcaagctaggcaaagctcctcctcgcagcccacaggcctgccgcgggcgggacctgagctcaggactggaatcccacgggcgagaatctcgagtgcgagcccggcccgcagcgggtctcagcacagctctgatgggtccttttgctctcggcggcttcgggaggtcctatgcgtttctcctggcgccagtcattcgctcgcgtgaggggcttgctaggagcgtctcggtgcgagccccctgccttctaagatcaactctggctgtgaacgggtgaggacgccgggagcgtcttagcgtcacaaaagttcctttggttgacgtttggacagtgaaaggagcatgtaacaagtggggtcagttttgtttaaaaccctttctgacttcccagcctcttactgggcaaagttcataatttttctgagctttctagggtttccaggcaagcttatgaggggccaccgttacagcaacttgttgggaacacctggatagtggaacaagaaagctttgtcacaaagtcatgaaggggaaaactgttgacggacctggagaatcttcctgaagaactttaaagttgattgaaagaatcattaaatcctggaaacct

SEQ ID NO: 144444 - DNA, 975 bp, Homo sapiens
atgggcacatgtatagtcctgcgaagagtacgctgtctagtgttctgtacctctcactggattgcggaaaccgacccacgcgtggcggtgaaaattttcaacgtcgcccgaagcgataaaaacgaaatcctgactaatgtcttccgctcaaaaggcgtgctggtcggcacttcgacgatgaataacgtgatgatgccgaaaatcgccgggctggtggaggagatgactggtttacgcttccgtaacaaacgcgccagtgctttcggctctcacggctggagcggcggtgcggtggatcgtctttccacgcgcctgcaggatgcgggtttcgaaatgtcgcttagcctgaaagcgaaatggcgaccagaccaggacgctctgaagttatgccgtgaacacggtcgcgaaatcgcccgtcagtgggcgctcgcgccgctgccgcagagcacggtgaataccgtagttagagaagaaacctctgtcaccacgacgggtgacctcggcccacggatgcagtgcagcgtctgccagtggatttacgatccggcaaaaggcgacccaatgcaggacgttgcgccaggaacgccgtggagtgaagtcccggataacttcctctgcccggaatgctccctcggcaaagactttaatctgcacctgtttccacaaacctgggtgacggatatcgatgccgaagcccgtgtggtgaaaagccagaataatcagtggcaatacgacaagctagtactggcaaccggtgccagtgcctttgtcccgcctgtgcctgggcgtgagttaatgctgacgttaaatagtcagcaagagtatcgcgcctgtgaaacgcaactgcgggatgcccgacgcgtgttgattgttggcggtggtttgattggtagcgaactggcgatggatttttgtcgtgcaggcaaagcggtcacgctaatcagacaacgctgccagtattctggcggtcgttaa

SEQ ID NO: 144445 - DNA, 2577 bp, Homo sapiens; identical to SEQ ID NO: 140261

SEQ ID NO: 144446 - DNA, 3126 bp, Homo sapiens; identical to SEQ ID NO: 132332

SEQ ID NO: 144447 - DNA, 1134 bp, Homo sapiens
atgagtaacggcattgtgatcatcggttcgggcttcgccgcccgccaactggtgaaaaatattcgcaaacaggacgccactattccattaaccctgattgccgccgacagcatggatgagtacaacaaacctgacctcagccatgttatcagtcaggggcaacgtgccgatgaccttacccgccagacggcgggtgaatttgccgagcagtttaatctgcacctgtttccacaaacctgggtgacggatatcgatgccgaagcccgtgtggtgaaaagccagaataatcagtggcaatacgacaagctagtactggcaaccggtgccagtgcctttgtcccgcctgtgcctgggcgtgagttaatgctgacgttaaatagtcagcaagagtatcgcgcctgtgaaacgcaactgcgggatgcccgacgcgtgttgattgttggcggtggtttgattggtagcgaactggcgatggatttttgtcgtgcaggcaaagcggtcacgctaatcgacaacgctgccagtattctggcgtcgttaatgccaccggaagtaagcagccgcttgcagcatcggttgacggagatgggcgttcatctgctgttgaaatctcagttacaggggctggaaaaaacggattctggcattcaggcaacgctggaccgccagcgcaatatcgaagtggatgcggtaattgccgccaccggactgcgcccggaaaccgccctggcacgacgcgccgggctgacgattaatcgcggcgtttgcgtcgatagttatctgcaaaccagtaataccgatatttacgcgctgggcgattgcgcggaaattaacggtcaggtattgccgttcctccagccgattcaacttagcgcgatggtgctggcaaaaaatcttctcggcaataacacgccgctgaaactcccggcgatgctggtgaaaatcaaaacgccggaattaccgctgcatctggcaggcgaaacccagcgtcaggatttacgctggcaaattaataccgaacgccagggaatggtggcgcgcggcgttgacgatgctgaccagcttcgcgcctttgtggtcagtgaggatcggatgaaagaggcatttggattgttgaaaacattgccgatgtag

SEQ ID NO: 144448 - DNA, 2082 bp, Homo sapiens; identical to SEQ ID NO: 140264

SEQ ID NO: 144449 - DNA, 915 bp, Homo sapiens
atggactactatgcagccataaaaaatgatgagttcatgtcctatggtgaacgggacgccgccttcggtaaggaagcgggaagagtaaccgccgccacgctgttgatggtcgatgacttcgcgctgctgtatatcgcgttgatcctcgtggccaccctggcctgcgtcaccctcgcccacgcctacctcggcgaaggcggcacgggttacccgggcaaccgcgaagagctgtacctgctgatcctgctggctgcgaccggcggtatcgtgctggtcagcgcgcagtgcctgggccaagagtatcgcgcctgtgaaacgcaactgcgggatgcccgacgcgtgttgattgttggcggtggtttgattggtagcgaacgtggcggcgtagtcggtgccatcaccaccatgggcgttatcgtcggcgcagacatgccgatgttcctcggttctatgattgcaggtccgctgggcggctggtgcattaagcacttcgaccgctgggtagacggatttagcaataaagagcaggcgatccagttcctgtgcggcaacctcggcgttaacgggcgcactgaacatccgtttgagctggaagaagatgtctggcagcgggaagagattgttaccaccggcgttggttttggcgtagcgatcccgcacaccaaatctcagtggatccgtcattccagtatcagcattgcccggctggcgaaaccgattggctggcagtcagaaatgggcgaagtcgaactggtgatcatgctgacgctgggtgctaacgaagggatgaatcatgtgaaagtcttctcgcagctggcgcgtaaactggtgaataaaaacttccgccagtcgttgtttgccgcgcaagatgcacaaagtatcctgacgctgctggaaacagaattaaccttctga

SEQ ID NO: 144450 - DNA, 2658 bp, Homo sapiens; identical to SEQ ID NO: 123205

SEQ ID NO: 144451 - DNA, 2412 bp, Homo sapiens
atgcgtatggacccaacccgtgggcagtcagccgctgaatggctacaaaccgcagaagaagccgatatcgcctgggtattgaaaacctatggtgaagagcgttttgccaaacgcattgcccgcgccattgtcgagcgtaaccgcgaacagccgatgacccgcaccaaagaactggcggaagtcgtggctgctgcaacgccggtgaaagataagtttaaacatcccgcgacccgtaccttccaggcggtgcgcatttgggtaaacagtgaactggaggagatagagcaggcgctaaaaagctcgctcaacgtgctggccccgggtgggcggctttcgatcatcagcttccactcgctggaagaccgtattgtgaaacgttttatgcgtgaaaacagccgcggtccgcaagttccggcagggttaccgatgactgaagagcagctcaaaaaactgggtggccgtcagctgcgagcactaggcaagttaatgccgggcgaagaagagttcagttctgcgtattgcagagaggacgaatgcatgatcagcagagtgacagaagctctaagcaaagttaaaggatcgatgggaagccacgagcgccatgcattgcctggtgttatcggtgacgatcttttgcgatttgggaagctgccactctgcctgttcatttgcattattttgacggcggtgactgtggtaaccacggcgcaccatacccgtttactgaccgctcagcgcgaacaactggtgctggagcgagatgctttagacattgaatggcgcaacctgatccttgaagagaatgcgctcggcgaccatagccggaaaccaaaacgtcaggaagaacatgccaactttatcagttggcgttttgcgttgttatgcggctgtattctcctggcgctggcttttctgctcggacgcgtagcgtggttacaagttatctccccggatatgctggtgaaagagggcgacatgcgttctcttcgcgttcagcaagtttccacctcccgcggcatgattactgaccgttctggtcgcccgttagcggtgagcgtgccggtaaaagcgatttgggctgacccgaaagaagtgcatgacgctggcggtatcagcgtcggtgaccgctggaaggcgctggctcgagtactactggtccggctgacggcaacgctggaccgccagcgcaatatcgaagtggatgcggtaattgccgccaccggactgcgcccggaaaccgccctggcacgacgcgccgggctgacgattaatcgcggcgtttgcgtcgatagttatctgcaaaccagtaataccgatatttacgcgctgggcgattgcgcggaaattaacggtcaggtattgccgttcctccagccgattcaacttagcgcgatggtgctggcaaaaaatcttctcggcaataacacgccgctgaaactcccggcgatgctggtgaaaatcaaaacgccggaattaccgctgcatctggcaggcgaaacccagcgtcaggatttacgctggcaaattaataccgaacgccagggaatggtggcgcgcggcgttgacgatgctgaccagcttcgcgcctttgtggtcagtgaggatcggatgaaagaggcatttggattgttgaaaacattgccgattcgcgcgaccagactcgatacgctgttggatccagcgtttttcttcggtgctggtaatgtgcatatactcggcaccaatcgggccgcagtaggtttgcttgagggcttccagcagctcgccgagtttcatgcgattatggatggcaccactcctcgcgtgctggagaacgccgaaggcgatcgcaccacgccttctatcattgcctatacccaggatggtgaaactctagttggtcagccggctaaacgtcaggcagtgacgaacccgcaaaacactctgtttgcgattaaacgcctgattggtcgccgcttccaggacgaagaagtacagcgtgatgtttccatcatgccgttcaaaattattgctgctgataacggcgacgcatgggtcgaagttaaaggccagaaaatggcaccgccgcagatttctgctgaagtgctgaaaaaaatgaagaaaaccgctgaagattacctgggtgaaccggtagctgtccctaccctcagtactcttgcttggaatgctgtgagagaagggggtctcattcccactaagtgtgagtacacttatgtccttgattgcagctggcagccatcctatgagaatgagcagaatctgatttacgataaaacagacactttgaatggcagaataaaggaaggaaaccaaatatttaaagacaccatagagcccatagatcaactaattgtaaagcctgaccattccagttatgagtcagtaagtcccctctatgatgaaatcagttag

SEQ ID NO: 144452 - DNA, 2454 bp, Homo sapiens
  misc_feature (1)...(2454): n = a,t,c or g
atgataggggggaccactacgccatttatcctgacgccgttcagccgcctggtaacaccgaaaattaccgagatcctgggctttaacttaccagtcgatatgatagccacttcccacggcgtggtatggcgcgataacccgacgcaaattgtcgagctgtacctgaaatgggcggctgattatcaggaagacagaatcaccattttctacgacaccatgtcgaataacacccgcatgatggctgacgctatcgcccnagggattgcggaaaccgacccacgcgtggcggtgaaaattttcaacgtcgcccgaagcgataaaaacgaaatcctgactaatgtcttccgctcaaaaggcgtgctggtcggcacttcgacgatgaataacgtgatgatgccgaaaatcgccgggctggtggaggagatgactggtttacgcttccgtaacaaacgcgccagtgctttcggctctcacggctggagcggcggtgcggtggatcgtctttccacgcgcctgcaggatgcgggtttcgaaatgtcgcttagcctgaaagcgaaatggcgaccagaccaggacgctctgaagttatgccgtgaacacggtcgcgaaatcgcccgtcagtgggcgctcgcgccgctgccgcagagcacggtgaatacggtagttaaagaagaaacctctgccaccacgacgggtggacttcggcccacggatgcagtgcagcgtctgccagtggatttacgatccggcaaaaggcgagccaatgcaggacgttgcgccaggaacgccgtggaaactggcatcggaggcaaaatgagtaacggcattgtgatcatcggttcgggcttcgccgcccgccaactggtgaaaaatattcgcaaacaggacgccactattccattaaccctgattgccgccgacagcatggatgagtacaacaaacctgacctcagccatgttatcagtcaggggcaacgtgccgatgaccttacccgccagacggcgggtgaatttgccgagcagtttaatctgcacctgtttccacaaacctgggtgacggatatcgatgccgaagcccgtgtggtgaaaagccagaataatcagtggcaatacgacaagctagtactggcaaccggtgccagtgcctttgtcccgcctgtgcctgggcaaaggtttcccgcatcatacacggggaaaaaggcgagattggaccagcatccctatcagttagttccgatcagcccccacgccaaggctataatcaacagcgattataatggaccggccagcatgctgtcgtcatggtgcatcacatgctccccttcgtctcaacggcgaagactcaaactggtttctgttcatattaatgatgagccgtggaccgcctggaaagaagaagagggcgcactggttatcagtaatttgccggagcgttttacgcttaagatcattaatgaaataagcccggcggcgaataccgcgctggaagggctttatcagtcaggcgatgcgctttgcacccagtgtgaagccgaaggtttccgccatattacgtattatctcgaccgcccggacgtgctggcgcgttttaccaccaaaattattgccgataaaatcaaatatcccttcctgctttccaatggtaaccgcgttgcgcaaggcgaactggaaaacggacgccattgggtacagtggcaggacccgttcccgaaaccgtgctacctgtttgcgctggtggcaggcgactttgatgtactgcgcgatacctttaccacgcgttctggtcgcgaagtagcactggagctgtacgtcgatcgcggcaaccttgatcgcgcgccgtgggcgatgacctcgctgaaaaactccatgaaatgggatgaagaacgctttggcctggagtatgacctcgacatctatatgatcgtcgcggtggatttcttcaatatgggcgcaatggagaataaggggctgaatatctttaactccaaatatgtgctggcccgcaccgacaccgccaccgacaaagattacctcgatattgaacgcgttatcggccatgaatatttccataactggaccggtaaccgagtgacctgtcgcgactggttccagctcagcctgaaagaaggtttaaccgtcttccgcgatcaggagttcagctctgaccttggttcccgcgcagttaaccgcatcaataatgtacgcaccatgcgcggattgcagtttgcagaagacgccagcccgatggcgcacccgatccgcccggatatggtcattgagatgaacaacttctacaccctgaccgtttacgagaagggcgcggaagtgattcgcatgatccacaccctgcttggcgaagaaaacttccagacagggatgcagctttatttcgagcgtcatgatggtagtgcagcgacctgtgacaacttgtgccggggaaggaagatgcgctga

SEQ ID NO: 144453 - DNA, 2533 bp, Homo sapiens
tttcgtcgcgcacttgcgctgtcactcagcctggacgcacttcttcgggtcgcgggtgcactccggcccggctcccgcctcggccccgatggacgccgcgttcctcctcgtcctcgggctgttggcccagagcctctgcctgtctttgggggttcctggatggaggaggcccaccaccctgtacccctggcgccgggcgcctgccctgagccgcgtgcggagggcctgggtcatccccccgatcagcgtatccgagaaccacaagcgtctcccctaccccctggttcagatcaagtcggacaagcagcagctgggcagcgtcatctacagcatccagggacccggcgtggatgaggagccccggggcgtcttctctatcgacaagttcacagggaaggtcttcctcaatgccatgctggaccgcgagaagactgatcgcttcaggctaagagcgtttgccctggacctgggaggatccaccctggaggaccccacggacctggagattgtagttgtggatcagaatgacaaccggccagccttcctgcaggaggcgttcactggccgcgtgctggagggtgcagtcccaggcacctatgtgaccagggcagaggccacagatgccgacgaccccgagacggacaacgcagcgctgcggttctccatcctgcagcagggcagccccgagctcttcagcatcgacgagctcacaggagagatccgcacagtgcaagtggggctggaccgcgaggtggtcgcggtgtacaatctgaccctgcaggtggcggacatgtctggagacggcctcacagccactgcctcagccatcatcacccttgatgacatcaatgacaatgcccccgagttcaccagggatgagttcttcatggaggccatagaggccgtcagcggagtggatgtgggacgcctggaagtggaggacagggacctgccaggctccccaaactgggtggccaggttcaccatcctggaaggcgaccccgatgggcagttcaccatccgcacggaccccaagaccaacgagggtgttctgtccattgtgaaggccctggactatgagagctgtgaacactacgaactcaaagtgtcggtgcagaatgaggccccgctgcaggcggctgcccttagggctgagcggggccaggccaaggtccgcgtgcatgtgcaggacaccaacgagccccccgtgttccaggagaacccacttcggaccagcctagcagagggggcacccccaggcactctggtggccaccttctctgcccgggaccctgacacagagcagctgcagaggctcagctactccaaggactacgacccggaagactggctgcaagtggacgcagccactggccggatccagacccagcacgtgctcagcccggcgtcccccttcctcaagggcggctggtacagagccatcgtcctggcccaggatgacgcctcccagccccgcaccgccaccggcaccctgtccatcgagatcctggaggtgaacgaccatgcacctgtgctggccccgccgccgccgggcagcctgtgcagcgagccacaccaaggcccaggcctcctcctgggcgccacggatgaggacctgcccccccacggggcccccttccacttccagctgagccccaggctcccagagctcggccggaactggagcctcagccaggtcaacgtgagccacgcgcgcctgcggccgcgacaccaggtccccgaaggcctgcaccgcctcagcctgctgctccgggactcggggcagccgccccagcagcgcgagcagcctctgaacgtgaccgtgtgccgctgcggcaaggacggcgtctgcctgccgggggccgcagcgctgctggcggggggcacaggcctcagcctgggcgcactggtcatcgtgctggccagcgccctcctgctgctggtgctggtcctgctcgtggcactccgggcgcggttctggaagcagtctcggggcaaggggctgctgcacggcccccaggacgaccttcgagacaatgtcctcaactacgatgagcaaggaggcggggaggaggaccaggacgcctacgacatcagccagctgcgtcacccgacagcgctgagcctgcctctgggaccgccgccacttcgcagagatgccccgcagggccgcctgcacccccagccaccccgagtgctgcccaccagccccctggacatcgccgacttcatcaatgatggcttggaggctgcagatagtgaccccagtgtgccgccttacgacacagccctcatctatgactacgagggtgacggctcggtggcggggacgctgagctccatcctgtccagccagggcgatgaggaccaggactacgactacctcagagactgggggccccgcttcgcccggctggcagacatgtatgggcacccgtgcgggttggagtacggggccagatgggaccaccaggccagggagggtctttctcctggggcactgctacccagacacagaggccggacagcctga

SEQ ID NO: 144454 - DNA, 4083 bp, Homo sapiens
atggccttgaccctagggtcggctctagccacaggctctgagctcatgcttggcctcgctgctcagtgcactgtccgtgctcggaagagagagagagaagctgggtggaggccgtgccgtgtccttgcgctgcgtccccgccccagtagaggcatcaccaggaagaggcgaaaggccgcctgtgatggtcctcttcttatgaaacgcccagaacagaaaaaccacggacgcggacagcagacctggtgccagcccgtcgtgtgccgggcacacacaggtcccctcatcgtggacagccccggggccatcagggcaaggcgccagccctccctggccagcaagtgtgtaaaagtgggaatgacaccagaatctgtgggcagctgttccgtggggaccccactgcctggagtacaggtgcgcattgtctcagaaaacccacagagggaagcctgctcctacaccatccacgcagagggagacgagagggggaccaaggtgaccccagggtttgaagaaaaggagggggagctgctggtgaggggaccctccgtgtttcgagaatactggaataaaccagaagaaactaagagtgcattcaccctagatggctggtttaagacagggggtccttgctcccagagctcccaagatggtagcgggcagcttccaaaatggcggcaggctgcttccaagatggtggcaagcgtcgtgttctctgacctggggttcttggccttatggattccaaggaatggaatcttgggccatgcgcccgcttctgcctcaagatcacacagcgggcttgtgaggccaggggtctccgctgctgctcaaggagatggcaaaggtctgtttcaggtaactcctctgacggccacaacgatgtcttcagacgtcaaaggtctgtctcaggtaactcctctgaccggccactacgatgtcttcagacgtcaaaggtctgtctcaggttacttctttgacggccacaatgatctctgcagatgctttgactccacttgccctcgctcagagacacacgctcacatttgccaccctggggcgagttggaaggtgaccgtggatggttgggctcctcttgccgggcagatgcgggagcagcagcagcagcagcccctcagggcgctcaaacggcgtggggccaacagtgccccatggcagcctttgccgagggagggaccttttcagaagccctggggcctttgtctcattgaccaaaaccctcctggccatgctgccttcacaggacactgggcatctctgtggggcaagggaaggaacacaggcctcctggtggggccccaagacccaaccaaggctcgtctggctggtgccagcctctgcgccaagggtgccgaccaaggggacaccgtggtgtttaaggatggccagtactggatccgaggccggacctcagtggacatcatcaagactggaggctacaaggtcagcgccctggaggtggagtggcacctgctggcccaccccagcatcacaggcaccgccactggcttcttgggggtcatttcccgtgttcaggaccccacgctctccccagccctggctggcccaggggctttccgtgtgcaccgctaccctggcacctggggcgaggctgtgtccccgccgggtgaatctcagagcctctgcctgtctttgggggttcctggatggaggaggcccaccaccctgtacccctggcgccgggcgcctgccctgagccgcgtgcggagggcctgggtcatccccccgatcagcgtatccgagaaccacaagcgtctcccctaccccctggttcagggccccggcgtggatgaggagccccggggcgtcttctctatcgcccagttcacagggaaggtcttcctcaatgccatgctggaccgcgagaagactgatcgcttcagggtgcggagctgcgtggtcggacctgtgcccctcaagcaggcctggtggaaagccagtgcccctcctccccaccaggcttctcctccccgctcggtgggcttcaggccagactgcaagatccaggcacccttaagtgagggggcagctggtgttttcagctggagacaaagtctgaacgtgctgtctctttcgcatgggcctaacgggagccacagaaatttgggggccacaagagccagcccttgctctatgtttgaacagctaagagggtttgccctggacctgggaggatccaccctggaggaccccacggacctggagattgtagttgtggatcagaatgacaaccggccagccttcctgcaggaggcgttcactggccgcgtgctggagggtgcagtcccaggcacctatgtgaccagggcagaggccacagatgccgacgaccccgagacggacaacgcagcgctgcggttctccatcctgcagcagggcagccccgagctcttcagcatcgacgagctcacaggagagatccgcacagtgcaagtggggctggaccgcgagcctcatggcaacggctccccgctggtggtcgcggtgtacaatctgaccctgcaggtggcggacatgtctggagacggcctcacagccactgcttcagccatcatcacctttgatgacatcaatgacaatgcccccgagttcaccagggatgagagcaagtctccctccggcctttgctgtatgggaagggagcacgaagttgagcccacagaggaggaccatgggggcacgtgggggacagtgactcacaaaacagacaaacctgaggacacccagtggttcttcatggaggccatagaggccgtcagcggagtggatgtgggacgcctggaagtggaggacagggacctgccaggctccccaaactgggtggccaggttcaccatcctggaaggcgaccccgatgggcagttcaccatccgcacggaccccaagaccaacgagggtgttctgtccattgtgaaggtgagcggcccccggctggcacacagatgccggcagacgcagatgccgacacacacagatgcccacacacagatgccggcacgcacagcctcccagccccgcaccgccaccggcaccctgtccatcgagatcctggaggtgaacgaccatgcacctgtgctggccccgccgccgccgggcagcctgtgcagcgagccacaccaaggcccaggcctcctcctgggcgccacggatgaggacctgcccccccacggggcccccttccacttccagctgagccccaggctcccagagctcggccggaactggagcctcagccaggtcaacgttccacctgctccgcaacaccacccactcattaccagccacgccgcttgcacccaacccggcccctggatcgccaaccccggccccctcattactaagccaccgcccttttcctccccagtgctggtcctgctcgtggcactccgggcgcggttctggaagcagtctcggggcaaggggctgctgcacggcccccaggacgaccttcgagacaatgtcctcaactacgatgagcaaggaggcggggaggaggaccaggacgcctacgacatcagccagctgcgtcacccgacagcgctgagcctgcctctgggaccgccgccacttcgcagagatgccccgcagggccgcctgcacccccagccaccccgagtgctgcccaccagccccctggacatcgccgacttcatcaatgatgtagaccttcgccccccggacgtgggcagcttccccttcctgagcccgtgccttgagctgactttgccctgggctgtggccacggcgggcttggaggctgcagatagtgaccccagtgtgccgccttacgacacagccctcatctatgactacgagggtgacggctcggtggcggggacgctgagctccatcctgtccagccagggcgatgaggaccaggactacgactacctcagagactgggggccccgcttcgcccggctggcagacatgtatgggcacccgtgcgggttggagtacggggccagatgggaccaccaggccagggagggtctttctcctggggcactgctacccagacacagaggccggacagcctga

SEQ ID NO: 144455 - DNA, 1725 bp, Homo sapiens; identical to SEQ ID NO: 140267

SEQ ID NO: 144456 - DNA, 479 bp, Homo sapiens
  misc_feature (1)...(479): n = a,t,c or g
gcgcaatggcggcaaccgcgtctgcaggggtgccggcgaccgtgtcagaaaagcaagagttttaccagcttctgaagaaccngatcactccaagctgtatggtgcggaggcaagcagaggaaatctatgaanatatcccaggatcctcatccaagggtgagngctgcagcctgtactacacttggacagatggctacagattttgcacctaatttccaaaagaaatttcatganacagtgatngcngctctgttacgtaccatggaaaatcaaggtaatcagcgtgtgcaatcacatgcagcttctgctcttattatttttattgaagactgccctaaatcatagctagttctatatgtggatagtatggtgaaaaatctacattccgtcttggtgattaaacttcaagagttgattcggaatggaactaagttggctttggaacaacttgtgacaaccattgcatcagttgcagatac

SEQ ID NO: 144457 - DNA, 600 bp, Homo sapiens; identical to SEQ ID NO: 119478

SEQ ID NO: 144458 - DNA, 4617 bp, Homo sapiens
gcatgccggcaaccgcgtctgcaggggtgccggcgaccgtgtcagaaaagcaagagttttaccagcttctgaagaacctgatcaatccaagctgtatggtgcggaggcaagcagaggaaatctatgaaaatatcccaggtctgtgtaagactaccttcctcttagatgccgtcagaaatagaagagcaggttatgaggtgagacaaatggctgccgcactgctacgacggcttttgtcctctgggtttgaggaggtttatccaaatctgcctgctgatgttcagagagatgtcaagattgaactgattctggctgttaagttagaaacacatgctagcatgaggaaaaaactttgtgatatttttgcagtgctggcgcaggaatttgatagatgaggatggcactaaccactggccggaaggtctgaagtttcttattgattcaatctactccacaaatgtggctctatgggaagttgcacttcacgttttctggcactttcctgggatttttgggacccaagagcggcatgatttggatatcatcaaacggttgttggaccagtgtattcaagatcaagatcatccagcaatcaagacattatccgctagagctgcagctgcatttgtacttgctaatgagaataatattgctcttttcaaagactttgcagacttgcttcctggaatcttacaggctgtgaatgactcatgctaccaggatgatgattcagtgctagaatcccttgttgagattgcagataccgtacctaagtacttgggtccttatttagaagatactctacagttgagtttgaagttatgtggagactctaggcttagtaatctgcagcgccagctggcccctcgaagttatagtgaccttgtctgaaactgccactccgatgttgaaaaaacatacaaatattattgcacaggcagttcctcatatattagcaatgatggttgatctacaagatgatgaggactgggtaaatgctgatgaaatggaagaagatgattttgacagcaatgcagttgctgcggagagtgcactagacagactggcttgtgggcttggtggaaaagttgttttaccaatgaccaaggagcatatcatgcagatgcttcagagccctgactggaagtatcgacatgctggattaatggccttatctgccattggagaaggatgccatcaacaaatggaatcaattctagatgaaacagttaactccgttttgctttttcttcaggatcctcatccaagggtgagggctgcagcctgtactacacttggacagatggctacagattttgcacctaatttccaaaagaaatttcatgaaacagtgattgcagctctgttacgtaccatggaaaatcaaggtaatcagcgtgtgcaatcacatgcagcttctgctcttattatttttattgaagactgccctaaatcattgctagttctatatgtggatagtatggtgaaaaatctacattccgtcttggtgattaaacttcaagagttgattcggaatggaactaagttggctttggaacaacttgtgacaaccattgcatcagttgcagatacaatagaagaaaaatttgtcccatattatgatatattcatgccctcactaaagcacattgttgagcttgctgttcagaaggaactcaagcttctgagaggaaaaactatcgagtgcattagccatattggtcttgctgttgggaaggaaaaatttatgcaagatgcatcaaatgtgatgcagctgttgttgaagacacaatcagacttaaataatatggaagatgatgaccctcagacctcttacatggtttcagcatgggctagaatgtgtaaaattcttggaaaagattttcaacagtaccttccactggttatcgagcctcttattaagactgcttcagctaaacctgatgttgctctcttagacacacaggatgtggaaaatatgagtgacgatgatggctggcaatttgtaaatcttggagaccagcagagttttggaattaaaacttcaggacttgaagcaaaagcaactgcttgccaaatgttggtttactatgctaaggagttaagggaagggtttgtggaatatacagaacaagttgtgaagctgatggttcctttactgaaattttatttccatgacaatgttcgagtggcagcagcagagtccatgccttttctcctggaatgtgcaagaattcgtggcccagagtatcttgcacagatgtggcaattcatatgtgaccccttaatcaaggctattggtactgaaccagatacagatgtgctctcagaaataatgaattcttttgcaaagtccattgaagttatgggagatggttgccttaatgatgaacacttggaagaactgggaggaatactgaaagcaaaacttgaagggcactttaaaaaccaagaattgagacaggtgaaaagacaggaagaaaactatgatcaacaggttgagatgtctctgcaagatgaggatgaatgtgatgtttatattctgaccaaagtatcagatattttgcactcattatttagtacttataaggaaaagattttaccatggtttgaacaactacttccattaattgtaaatctaatttgttcaagtaggccatggccagacagacagtggggattgtgcatatttgatgacatcatagagcactgcagtccaacttcatttaaatatgtagaatattttcggtggccaatgctactaaatatgcgagataacaaccctgaagtcaggcaagctgctgcttatggcctgggtgtcatggcacagtttggtggagatgattatcgttctttatgttcagaagctgttccactgctggtaaaagttattaagtgtgcaaattccaaaaccaaaaaaaatgtcattgctacagatatactgtttctcagcaatagggaagattttgaagtttaagcctaactgtgtaaatgtagatgaagttcttccacactggttatcatggcttccactgcatgaagataaagaggaagctattcagactttgagttttctctgtgacctaattgaaagtaaccacccagttgtaattggtccaaataattccaatctttccaaaataatcagtataattgccgaaggaaaaattaatgagactattaactatgaggatccttgtgcccaacgcctaactaatgtcgtgcgtcaggtacagacttctgaagatttatgggttgggaatgtgtatccacaacttggatggatggaacagcagggaagcctttacagggagttggctaaattttgcttgaagcactttaatataacttggaatattatctattataaaagtaactacaaataagtgttgtgaatagattttattataaatcagagaactgttttctccctgctaagcagtttatagttcttctccatgtttctccagaattaatcagtgttagtcctctgtttatctcgcatgttttatcttccaaacacagaccttggtgataacctgtgcttcaaactgtcttaaacaatgtttgtcacctttccccctagttgatgtaaagtatataaattgttgctatttgtttgaactattattgatgctagccaagcagtatacttggatgtgaagatgtcatgctatcacaatatgctaaggagctcacaaaaataagatagaatttccaggacaaacatctttggaattgtgagtgaaggatatagtgggcaggcttgtccctctttaattaatactcttggtatttgtggtgatgggaggatgctgttactaggagagttttgagatactgcagtggatgtgggatgtatatgaacttcttcataatgtactcctgggaactgggtaggacatatccatattgtagttcccaaggtgtctggttgagagttagagaacttttaaattctttagcccagaccaggtctctatttttttaagttatccaggactccaagaaccatagttactgaaaagggagtcctgatacatctaatattggtagcatgtaacagtgtttgacaaagagtaagtaagcagtattcttgggagtcagtgttatgtgtttcagcagagtattattttgtatatgtatgccattttctccctgcaaagcagctcaacaagagaaaaagctctagttatagggcttaaattgatttctatttcaaataatttcctaagagattcctagagtagaactgaaagagtattcctattggaaaagtgaaaggaaagaaatgtaattttccttgaacatgaaaaagaaaacaactttgagagtagtcatttagcagtagatgctgcattattatgagaaaacagttctataagtcccagggttaattatattaattggaatgtcagtctttaatgtcgagcttattgtagggtagaaaagagctttctactcagctaacgattactcattgatccaaaacttaaatacatctataatttcctggggctattgtgagtactgtgtatgtatttagcaaatatttaagacctagtaagtgctcaataaattgtagctgttattgctgttgttgtttgtaaaaaaaaa

SEQ ID NO: 144459 - DNA, 1698 bp, Homo sapiens
atggtatctgcagcgttggcgggagcccaccaatggccttccgccacagccagcgcagccttgccccttaaagtcacaggccccctagcgcgaaatcccacgcccccctggacggctgcggccgcactcgccaccagggggcagaggccagagaaagggctatttcccggacccgcccccttcagcttgggaaagcgaaagcgtggcaggggccggacctgggagcggaggaggcgggtctccatagaaacctccacctgtttccggccgggctgtgagagattaggggctgctgcgggggccaatctcagccagctcgcctcttcccagcggcctctgcgggagcggtgggtgttgtacacaatcatcatggcggcggccggggccccggatggcatggaggaacctggcatggacacggaggccgagactgtggctactgaggctcccgcgcggcccgtcaactgcctggaggctgaagccgcggcgggggcggcggccgaggactccggcgccgcacgaggcagcctgcagccggccccggcccagccccctggggaccccgcagcccaggcctcggtcagcaacggcgaagacgcgggcggcggcgcgggcagggagctggtggacttgaagatcatctggaataagaccaagcatgacgtgaagttccccctggacagcacaggctccgagctgaaacagaagatccactcgattacaggcttcttgcacctgggtggcctccgcactgccttgtacaactacatctttgctaagaagtaccaggggagcttcatcctgaggctagaggacacagatcagactcgcgttgtgcctggggcagcggagaatattgaggacatgctggagtgggcagcttggcgagttttgggttcttgtcctgcaaccaagaggaatgaggtgtgcaggtatccccagggtattgctggtcttagaccatggtttatgctaacttttcagtctgggaattcctgggccatgtggaatgtacaaattaaacccatgaccaatgtgaggagagctttccaaggagttaacaactgcagccgtgctgctaatactacagctacctatatatcctgtgcaaacaccctaagagtcaaccacaaggaggttcctggtagagttacacagttgtgccgccagtatagcgacatgcctcctttgacgttagagggcatccaggaccgtgttctttacgtattgaaactctatgacaagattgacccagagaagacacccaggcccattctgggagatagccagcgctaccagtttcatgtatgtttccaaagagtgacagcgcagcacgctgctgttggggttcatccggaactgattttcatcgctaccggttcagaagttgaactggctgttgctgcctacgaaaaactgactgccgaaggcgtgaaagcgcgcgtggtgtccatgccgtctaccgacgcatttgacaagcaggatgctgcttaccgtgaatccgtactgccgaaagcggttactgcacgcgttgctgtagaagcgggtattgctgactactggtacaagtatgttggcctgaacggtgctatcgtcggtatgaccaccttcggtgaatctgctccggcagagctgctgtttgaagagttcggcttcactgttgataacgttgttgcgaaagcaaaagaactgctgtaa

SEQ ID NO: 144460 - DNA, 1355 bp, Homo sapiens
tcaaaaatactgccatttccccagcacagtgtctttgattgcatccacatattgagttggaacccagtacacccaatagtaagaggcttccgtggggcccaactgaaacgcctccagcggctggtgagcaatgagagccagaggcgccagctggtggggaagctgcaggtccttgtggaggaggcctttggttgccagctgcaaaacagggatgtcctcaacccagtctacgtggagaggatcctcctgtggactcgccctgcagtaggtcgagcacagctggacgccatctcggagaaggtggatgtgattgccaagcgtgtgccatgcttttataacgagatcgctgtaaaaaccgttttgtgccatgtaactggcgtacattcccatgtagtctgaacgtgcggtaccgtcgcctccgctatagtccggcgatgcatgtgttgagccaatatacagaccgacatacaacggcattacatcagagagacgtttatccccaccaaactggataccgctgtaacccatgtcaaagccgctcagtttgccactggcaaaggagtccaggcttcccccataactgcgcaaccagatattaccgtctttactctgatttcgcaggtcacccatccgttgcatcagcgtacggctttcaacatagttcaataagtaaccgacattgagataattgccgccagcatctgcggtcgtggtgggtttaggcgtgggagcgggttcaggcgtaggatcggggttgactatgggaggctgctccaggcggaagcggatcgcaggcttggggtctttggccagcttctgggccacctgctcctggctcatgttcctgcaccgattgtcataccggggcgtctggtggttccgcaaggcctccttcttcaggagctccagccgctggggtgagcagaaacaggggtaagcagctccggtcttcagcagcgcttctgtggcctgggcatacagctccaaccgctgagattgcttgtagggcccagcaggaccgccccggcgggggctctcatcaggcgggatgcctgcccactccagcatgtcctcaatattctctgctgccccaggcacaacgcgagtctgatctgtgtcctctagcctcaggatgaagctcccctggtacttcttagcaaagatgtagttgtacaaggcagtgcggaggccacccaggtgcaagaagcctgtggggctgggagcgaaccgcactcgcaccgcaaccccggcatcagtgcccaggttggcctcgcgccgtcctacggggcggccagaggccgccgaaggcctctcgcgctgcagcagtctcctcaggagcgccgccatgtgggatg

SEQ ID NO: 144461 - DNA, 1977 bp, Homo sapiens
atgggctcgcgctgccttaaccctcctccgcccgcccactctgacaccaccggaaaggattcattcgggaacattcgtggggcggagacgggacagggggcctcggcctgtagcgtcacgtccgccagggttacctgtggggctgggagcgaaccgcactcgcaccgcaaccccggcatcagtgcccaggttggcctcgcgccgtcctacggggcggccagaggccgccgaaggcctctcgcgctgcagcagtctcctcaggagcgccgccatgtgggatggaatagcacacgtgggcttctccctgcgtcacttccggggactgcttccagccaatcggcctccgccacagccagcgcagccttgccccttaaagtcacaggccccctagcgcgaaatcccacgcccccctggacggctgcggccgcactcgccaccagggggcagaggccagagaaagggctatttcccggacccgcccccttcagcttgggaaagcgaaagcgtggcaggggccggacctgggagcggaggaggcgggtctccatagaaacctccacctgtttccggccgggctgtgagagattaggggctgctgcgggggccaatctcagccagctcgcctcttcccagcggcctctgcgggagcggtgggtgttgtacacaatcatcatggcggcggccggggccccggatggcatggaggaacctggcatggacacggaggccgagactgtggctactgaggctcccgcgcggcccgtcaactgcctggaggctgaagccgcggcgggggcggcggccgaggactccggcgccgcacgaggcagcctgcagccggccccggcccagccccctggggaccccgcagcccaggcctcggtcagcaacggcgaagacgcgggcggcggcgcgggcagggagctggtggacttgaagatcatctggaataagaccaagcatgacgtgaagttccccctggacagcacaggctccgagctgaaacagaagatccactcgattacaggtctcccgcctgccatgcagaaagtcatgtataagggactcgtccccgaggataaaacattgagagaaataaaagtgaccagtggggccaagatcatggtggttggctccaccatcaatgatgttttagcagtaaacacacccaaagatgctgcgcagcaggatgcaaaggccgaagagaacaagaaggagcctctctgcaggcagaaacaacacaggaaagtgttggataaaggaaaacctgaagatgtgatgccatctgttaagggggcccaggagcgcctgccaacggtaccgctgtccggcatgtacaataaatctggaggaaaagtgagactcacctttaaactagaacaagaccagctgtggattggcactaaagagcggactgagaaattgcccatgggctccataaaaaaatgtggtcaagtgaccctatccgaaggacatgaagactaccacaatgatggccgtttccagttggcccccacggaagccctcttactactgggtgtactgggttccaactcaatatgtggatgcaatcaaaagacactgtgctggggaaatggcagtatttttgaaagcactttcacctcttggccccaggaggactgaccccaaagtgaaggacatttgccgggaagaggcctgcagcatccctggaatttcagagttctggaactttgttcataaaaaatctatattcaatctgaggtgatgtggtgactgaagccagaggtgatgtactttcaccattaagcttaattttaactttaaattaccagttcccttccttgcagtcaagcttcataccatttttaaagtcaatacgatggaaatcaataaatctgaattccgaacatgttgtgtggaatactcttaagtgtgtttgagagtagatctgccaattatgttgacaagggaatgatcaaaagctttgtttttttt

SEQ ID NO: 144462 - DNA, 486 bp, Homo sapiens; identical to SEQ ID NO: 118860

SEQ ID NO: 144463 - DNA, 2535 bp, Homo sapiens
gcagaccgggcgtcgggtgagcccagaagtgagagcagttggctgtgccccagtgctgtgtgacccagaggcgccgctcaccctctctgagctggtggacatcatagcgggtgcagcccaaaactgtcttctgaggaagaggtgctctcctgggcccccactgtccccaggcctcagatgctgcatattgctggcccagctcctgaggctctttggacctccaggaatcggtgtctctatcaggaacccttaaccctgacccggactcccagctgggacccggggtgtcggagtggcaagagcgctgtcaggcctggtgaagggtgtgagctgtccaacggggcagggaggaggcagggcctgttctgcagttggacagacagagccctctagctgctttctggaagactgaagggcagcaaggcaagtgaggtgctgccgtcatccaggctggacagttcagtgatttgcctgaggccccacagcaggagaacgagaaggctgcctgatcagagagtccctgaagaagattctgtggctacaggcttcagcagagtgtgagggagaccccggttatttcctcagctatttccaccaaatcctcctgtctttcgtggccaacaccccaggcaaggcttggggcccccgtctgctgctggacgcagagccatgaagaagaagttagtggtgctgggcctgctggccgtggtcctggtgctggtcattgtcggcctctgtctctggctgccctcagcctccaaggaacctgacaaccatgtgtacaccagggctgccgtggccgcggatgccaagcagtgctcgaagattgggagggatgcactgcgggacggtggctctgcggtggatgcagccattgcagccctgttgtgtgtggggctcatgaatgcccacagcatgggcatcgggggtggcctcttcctcaccatctacaacagcaccacacgaaaagctgaggtcatcaacgcccgcgaggtggcccccaggctggcctttgccaccatgttcaacagctcggagcagtcccagaagggggggctgtcggtggcggtgcctggggagatccgaggctatgagctggcacaccagcggcatgggcggctgccctgggctcgcctcttccagcccagcatccagctggcccgccagggcttccccgtgggcaagggcttggcggcagccctggaaaacaagcggaccgtcatcgagcagcagcctgtcttgtgtgaggtgttctgccgggatagaaaggtgcttcgggagggggagagactgaccctgccgcagctggctgacacctacgagacgctggccatcgagggtgcccaggccttctacaacggcagcctcacggcccagattgtgaaggacatccaggcggccgggggcattgtgacagctgaggacctgaacaactaccgtgctgagctgatcgagcacccgctgaacatcagcctgggagacgcggtgctgtacatgcccagtgcgccgctcagcgggcccgtgctggccctcatcctcaacatcctcaaagggtacaacttctcccgggagagcgtggagagccccgagcagaagggcctgacgtaccaccgcatcgtagaggctttccggtttgcctacgccaagaggaccctgcttggggaccccaagtttgtggatgtgactgaggtggtccgcaacatgacctccgagttcttcgctgcccagctccgggcccagatctctgacgacaccactcacccgatctcctactacaagcccgagttctacacgccggatgacgggggcactgctcacctgtctgtcgtcgcagaggacggcagtgctgtgtccgccaccagcaccatcaacctctactttggctccaaggtccgctccccggtcagcgggatcctgttcaataatgaaatggacgacttcagctctcccagcatcaccaacgagtttggggtacccccctcacctgccaatttcatccagccagggaagcagccgctctcgtccatgtgcccgacgatcatggtgggccaggacggccaggtccggatggtggtgggagctgctgggggcacacagatcaccacggccactgcactggccatcatctacaacctctggttcggctatgacgtgaagcgggccgtggaggagccccggctgcacaaccagcttctgcccaacgtcacgacagtggagagaaacattgaccaggcagtgactgcagccctggagacccggcaccatcacacccagatcgcgtccaccttcatcgctgtggtgcaagccatcgtccgcacggctggtggctgggcagctgcctcggactccaggaaaggcggggagcctgccggctactgagtgctccaggaggacaaggctgacaagcaatccagggacaagatactcaccaggaccaggaaggggactctgggggaccggcttcccctgtgagcagcagagcagcacaataaatgaggccactgtgccaggctcaggtggcctcctggcctttcc

SEQ ID NO: 144464 - DNA, 2633 bp, Homo sapiens
cggcccaccaagcctggggaggtggccacccttccatgatggcatttggatgttccctgtgtgtggggagggcacagggactccattcgtagaccacctctgggacagtgtgtctgcctctgaggtcagacgctctgcactgggacagggtggagtggagggaaatccagcttggggctcattggaggggcttgctggcagacaccgccctttgtgggaaactgactgtgggagaggggaaccccaacctctgtcaccacatccctcttccctgttgtcacacctgtcacctgctgccatagccatgagacttcccaagggtcactgctgccactcactgcacagcctggaagggagtccacaggggacatacagtgagcaagagacctgtgccactcaggcctcctgggggtgtccccagtgcagccatgatgataatcacagctaccattcaccaagccctgcccacagtctaacctactctattcacaacactcccagcagcaaggcaagtgaggtgctgccgtcatccaggctggacagttcagtgatttgcctgaggccccacagcagagttcaactggagacagagaaaccagctagaggcagagggaggtaacacggagtcccccagaaaggtctgggctgcgcgtgcttcagctatttccaccaaatcctcctgtctttcgtggccaacaccccaggcaaggcttggggcccccgtctgctgctggacgcagagccatgaagaagaagttagtggtgctgggcctgctggccgtggtcctggtgctggtcattgtcggcctctgtctctggctgccctcagcctccaaggaacctgacaaccatgtgtacaccagggctgccgtggccgcggatgccaagcagtgctcgaagattgggagggatgcactgcgggacggtggctctgcggtggatgcagccattgcagccctgttgtgtgtggggctcatgaatgcccacagcatgggcatcgggggtggcctcttcctcaccatctacaacagcaccacacgaaaagctgaggtcatcaacgcccgcgaggtggcccccaggctggcctttgccaccatgttcaacagctcggagcagtcccagaagggggggctgtcggtggcggtgcctggggagatcgagggctatgagctggcacaccagcggcatgggcggctgccctgggctcgcctcttccagcccagcatccagctggcccgccagggcttccccgtgggcaagggcttggcggcagccctggaaaacaagcggaccgtcatcgagcagcagcctgtcttgtgtgaggtgttctgccgggatagaaaggtgcttcgggagggggagagactgaccctgccgcagctggctgacacctacgagacgctggccatcgagggtgcccaggccttctacaacggcagcctcacggcccagattgtgaaggacatccaggcggccgggggcattgtgacagctgaggacctgaacaactaccgtgctgagctgatcgagcacccgctgaacatcagcctgggagacgcggtgctgtacatgcccagtgcgccgctcagcgggcccgtgctggccctcatcctcaacatcctcaaagggtacaacttctcccgggagagcgtggagagccccgagcagaagggcctgacgtaccaccgcatcgtagaggctttccggtttgcctacgccaagaggaccctgcttggggaccccaagtttgtggatgtgactgaggccagctctggggtctcggcaggtggtccgcaacatgacctccgagttcttcgctgcccagctccgggcccagatctctgacgacaccactcacccgatctcctactacaagcccgagttctacacgccggatgacgggggcactgctcacctgtctgtcgtcgcagaggacggcagtgctgtgtccgccaccagcaccatcaacctctactttggctccaaggtccgctccccggtcagcgggatcctgttcaataatgaaatggacgacttcagctctcccagcatcaccaacgagtttggggtacccccctcacctgccaatttcatccagccagggaagcagccgctctcgtccatgtgcccgacgatcatggtgggccaggacggccaggtccggatggtggtgggagctgctgggggcacacagatcaccacggccactgcactggccatcatctacaacctctggttcggctatgacgtgaagcgggccgtggaggagccccggctgcacaaccagcttctgcccaacgtcacgacagtggagagaaacattgaccaggcagtgactgcagccctggagacccggcaccatcacacccagatcgcgtccaccttcatcgctgtggtgcaagccatcgtccgcacggctggtggctgggcagctgcctcggactccaggaaaggcggggagcctgccggctactgagtgctccaggaggacaaggctgacaagcaatccagggacaagatactcaccaggaccaggaaggggactctgggggaccggcttcccctgtgagcagcagagcagcacaataaatgaggccactgtgccaggctccaggtggcctccctggcctgtc

SEQ ID NO: 144465 - DNA, 577 bp, Homo sapiens
atgttgcgtgtgtttctctccctcgtaggtgtggtgtcagcacagcggcaggtcaccgttaaggaaggacccttgtaccgcacggagggctcccacatcactatctggtgcaatgtgagtggctcccagggacctcctgagcagaatttccagtggtccatttacctgccttcgtcgccagagcgagaggtgcagatcgtcagcaccatggacccttccttcccctatgccatctacacccagcgcgtccgcggagggaagatcttcatagaaagagtccaggggaacccaaccctattgaacatcacagatcttcaggcccgggatgccggagaatatgaatgccacacacccagcaccgataagcaatactttgggagttacagtgcaaagatgaacctagtgggagttacactctttgtgatatggtatatgacctggtcaatcttaggctctgaagctctccctggtggaaatttatttggattgttaattattttttatagtgccattattgggggaaaaattttacaactcattagaatacctttagtgcctccacttccacctcttcttg

SEQ ID NO: 144466 - DNA, 975 bp, Homo sapiens
atgctcttcaggccagctctggggtctcggcaggtggtccgcaacatgacctctgagttcttcgctgcccagctccgggcccagatctctgacgacaccactcacccgatctcctactacaagcccgagttctacacgccagttgatgggggcactgctcacctgtctgtcgtcgcagaagacggcagtgctgtgtccaccaccagcaccatcaacctctactttggctccaaggtccgctccccggtcagcgagatcctgttcaatgatgaaatggatgacttcagctctcccaacatcaccaacgagtttggggtgcccccctcacctgccaatttcatccagccaggtatggggtggagggaagcagccgctctcgtccatgtgcccgacgatcatggtgggccaggacggccaggtccggatggttgtgggagctgctgggggcacacagatcaccacagccactgcactgatatgtgtcacagcttttctccctggccgtgcccaccctgcacagcccccaagccacgctgatcacactcccatgccccaggccatcatctacaacctctggttcggctatgacgtgaagcgggccgtggaggagccccggctgcacaaccagcttctgcccaacgtcacgacagtggagagaaacattgaccaggcagtgactgcagccctggagacccggcaccatcacacccagatcgcatccactttcatcgctgtggtgcaagccatcgtccacacggctggtggctgggcagctgcctcggactccaggaaaggcggggcctaccggatactgagtgctctccaggaggacaaggctgacaagcaatccagggacaagatactcaccaggaccaggaaggggactctgggggactggcttcccatgtgagcagcagagcagcacaataaattgaggccactgtgccaggctccaggtggcctccctgccctgtc

SEQ ID NO: 144467 - DNA, 1053 bp, Homo sapiens
  misc_feature (1)...(1053): n = a,t,c or g
gtcagactggtcatgcaaggtcctgggcctgcccttgggtcctggggagccacggaaggttgtgggtgccagagggttgcggtcagagtcacagtcaagggccttctgagacctgtgccccctccccacccttcctccccacctcctcaggccagctctggggtctcggcaggtggtccgcaacatgacctccgagttcttctctgcccagctccgggcccagatctctgacgacaccactcacccgatctcctactacaagcccgagttctacatgccggatgacgggggcactgctcacctgtctgtggtcgcagaggacggcagtgctgtgtccgccaccagcaccatcaacctctactttggctccaaggtgcgctccccagtcagcgggatcctgctcaataatgaaatggatgacttcagctctaccagcatcaccaacgagtntgggggtacccccctcacctgccaatttcatccagccagggaagcagccgctctcgtccatgtgcccgacgatcatggtgggccaggacggccaggtccggatggtggtgggagctgccgggggcacgcagatcaccatggccactgcactggccatcatctaccaaccttcttggttcggctatgacgtgaagcgggccgtggaggagccccggctgcacaaccagctttctgcccaacgtcacgacagtggagagaaacattgaccaggcagtgactgcagcccttggagacccggcaccatcacacccagatcgcgtccaccttcatcgctgtggtgcaagccatcgtccgcacggctggtggctgggcagctgcctcggactccaggaaaggcggggagcctgccggctactgagtgctccaggaggacaaggctgacaagcaatccagggacaagatactcaccaggaccaggaaggggactctgggggaccggcttcccctgtgaagcagcagatcagcacaataaatgaggccactgtgccaggcttccaggtggcctccctggcctgtctccccactcaaaaaaaaaaaaaaaaa

SEQ ID NO: 144468 - DNA, 1629 bp, Homo sapiens
atgaagaagaagttagtggtgctgggcctgctggccgtggtcctggtgctggtcattgtcagcctctgtctctggctgccctcggcctccaaggaacctgacaaccatgtgtacaccagggctgccgtggccgcggatgccaagcagtgcttggagattgggagggttttggtgggtgggcctgcctacctgcttcttctaggaaaagctgaggtcatcaatgcccgcgaggtggcccccaggctggcctttgccagcatgttcaacagctcggagcagtcccagaagggagggctgtcggtggcggtgcctggggagatccgaggctatgagctggcacaccagcggcatgggcggctgccctgggctcgcctcttccagcccagcatccagctggcccgccagggcttccccgtgggcaagggcttggcggcagtcctggaaaacaagcggaccgtcatcgagcagcagcctgtcttgtggtatgtctgtggaaaggtgctttgggagggggagagactgaccctgccgcggctggctgacacctacgagatgctggccatcgagggtgcccaggccttctacaacggcagcctcatggcccagattgtgaaggacatccaggcggctgggggcattgtgacagctgaggacctgaacaactaccgtgctgagctgatcgagcacccgctgaacatcagcctgggagacgcggtgctgtacatgcccagtgcgcggctcagcgggcccgtgctggccctcatcctcaacatcctcaaagggtacaacttctcccgggagagcgtggagacccccgagcagaagggcctgacgtaccaccgcatcgtagaggctttccggtttgcctacgccaagaggaccctgcttggggaccccaagtttgtggatgtgactgagaatttgattgcgggcctactgtgtgctcggatggactcgccagctctggggtctcagcaggtggtccgcaacatgacctctgagttcttcgctgcccagctccggtcccagatctctgaccacaccactcacccgatctcctacgacaagcccgagttctacacgccggatgacgggggcactgctcacctgtctgtcgtcgcagaggacggcagtgctgtgtccgccaccagcaccatcaacctctacatcaccaatgagtttggggcacccccctcacctgccaatttcatccagccagggaagcagccgctcttgtccatgtgcccgacgatcatggtgggccaggacggccaggtccggatggtggtgggagctgctgggggcacgcagatcaccacagacactgcactgcccccaagccacgctgatcacactcccatgccccaggccatcatctacaacctctggttcggctatgacgtgaagagggccgtggaggagccccggctgcacaacaagcttctgcccaacgtcacgacagtggagagaaacattgaccaggcagtgactgcagccctggagacccggcaccatcacacccagatcgcgtccaccttcatcgctgtggtgcaagccatcgtccgcacggctggtggctgggcagctgcctcggactccaggaaaggcggggaacctgctggctactga

SEQ ID NO: 144469 - DNA, 2265 bp, Homo sapiens
cggggcaagtgaggtgctgccgtcatccaggctggacagttcagtgatttgcctgaggccccacagcagagttcaactggagacagagaaaccagctagaggcagagggaggtaacacggagtcccccagaaaggtctgggctgcgcgtgcttcaggtaacctcccttgaccttcaggagaacgagaaggctgcctgatcagagagtccctgaagaagattctgtggctacaggcttcagcagagtgtgagggagaccccggttatttcctcagctatttccaccaaatcctcctgtctttcgtggccaacacccccaggcaaggcttggggcccccgtctgctgctggacgcagagccatgaaaaaaaagttagtggtgctgggcctgctggccgtggtcctggagctggtcattgtcggcctctgtctctggctgccctcagcctccaaggaacctgacaaccatgtgtacaccagggctgccgtggccgcggatgccaattttgtgctcgaagattgggagggatgcactgcgggacggtggctctgcggtggatgcagccattgcagccctgttgtgtgtggggctcatgaatgcccacagcatgggcatcgggggtggcctcttcctcaccatctacaacagcaccacacggaaaagctgaggtcatcaacgcccgcgaggtggcccccaggctggcctttgccaccatgttcaacagctcggagcagtcccagaagggggggctgtcggtggcggtgcctggggagatccgagggctatgagctggcacaccagcggcatgggcggctgccctgggctcgcctcttccagcccagcatccagctggcccgccagggctttcccgtgggcaagggcttggcggcagccctggaaaacaagcggaccgtcatcgagcagcagcctgtcttgtgtgaggtgttctgccgggatagaaaggtgcttcgggagggggagagactgaccctgccgcagctggctgacacctacgagacgctggccatcgagggtgcccaggccttctacaacggcagcctcacggcccagattgtgaaggacatccaggcggccgggggcattgtgacagctgaggacctgaacaactaccgtgctgagctgatcgagcacccgctgaacatcagcctgggagacgcggtgctgtacatgcccagtgcgccgctcagcgggcccgtgctggcccttcatcctcaacatcctcaaagggtacaacttctcccgggagagcgtggagagccccgagcagaagggcctgacgtaccaccgcatccgtagaggttttccggtttgcctacgccaagaggaccctgcttggggaccccaagtttgtggatgtgactgaggccagctctggggtctcggcaggtggtccgcaacatgacctccgagttcttcgctgcccagctccgggcccagatctctgacgacaccactcacccgatctcctactacaagcccgagttctacacgccggatgacgggggcactgctcacctgtctgtcgtcgcagaggacggcagtgctgtgtccgccaccagcatccatcaacctctactttggctccaaggtccgctccccggtcagcggcactcctgttcaataatgaaatgggcgacttaagctctcccagcattcaccaatgagtttggggcacccccctcacctgccaatttcatccagccagggaagcagccgctcttgtccatgtgcctgacgatcatggtgggccaggacggccaggtccggatggtggtgggagctgctgggggcacgcagatcaccacagacactgcactggccatcatctacaacactgtgcttcggctatgacgtgaagagggccgtggaggagccccggctgcacaacaagcttctgcccaacgtcacgacagtggagagaaacattgaccaggcagtgactgcagccctggagacccggcaccatcacacccagatcgcgtccaccttcatcgctgtggtgcaagccatcgtccgcacggctggtggctgggcagctgcctcggactccaggaaaggcggggagcctgccggctactgagtgctccaggaggacaaggctgacaagcaatccagggacaagatactcaccaggaccaggaaggggactctgggggaccggcttcccctgtgagcagcagagcagcataataaatgaggccactgtgcaaggctccaggtggcctccctggcctgtctccccact

SEQ ID NO: 144470 - DNA, 2571 bp, Homo sapiens
atggtcacattgcaaaagagcgtgtgggaaggagatattgttactgctgtgtctggagaatacaacctgccacggttctgcatccgtaaagtgaggtcactaggagtatttacctcagagggctgttgcaaggttaaagctggttatacaagcagagtacttggaacagtgtcagttacctggctggggctcagtgtggtgtcagcacagcggcaggtcaccgttcaggaaggacccttgtaccgcacggagggctcccacatcactatctggtgcaatgtgagtggctaccagggaccttctgaacagaatttccagtggtccatttacctgccttcgtcgccagagcgagaggtgcagatcgtcagcaccatggactcttccttcccctatgccatctacacccagcgcgtccgcggagggaagatcttcatagaaagagtccaggggaacccaaccctattgcacatcacagatcttcaggcccgggatgccggagaatatgaatgccacacacccagcaccgataagcaatactttgggagttacagtgcaaagatgaacctagtgggagaacgagaaggctgcctgatcagagagtctctgaagaagattctgtggctacaggcttcagcagagtgtgagggagaccccggttatttcctcagctgtttccaccaaatcctcctgtctttcgtggccaacaccccaggcaaggcttggggcccccgtctgctgctggacgcagagccatgaagaagaagttagtggtgctgggcctgctggccgtggtcctggtgctggtcattgtcggcctctgtctctggctgccctcggcctccaaggaacctgacaaccatgtgtacacccagggctgccgtggccgcggatgccaagcagtgctcggagattgggagggttttggtgggtgggcctgcctacctgcttcttctaggaaaagctgaggtcatcaatgcccgcgaggtggcccccaggctggcctttgccagcatgttcaacagctcggagcagtcccagaagggagggctgtcggtggcggtgcctggggagatccgaggctatgagctggcacaccagcggcatgggcggctgccctgggctcgcctcttccagcccagcatccagctggcccgccagggcttccccgtgggcaagggcttggcggcagtcctggaaaacaagcggactgtcatcgagcagcagcctgtcttgtggtatgtctgtggaaaggtgcttcgggagggggagagactgaccctgccgcggctggctgacacctacgagatgctggccatcgagggtgcccaggccttctacaacggcagcctcatggcccagattgtgaaggacatccaggcggctgggggcattgtgacagctgaggacctgaacaactaccgtgctgagctgatcgagcacccgctgaacatcagcctgggagacgcggtgctgtacatgcccagtgcgcggctcagcgggcccgtgctggccctcatcctcaacatcctcaaagggtacaacttctcccgggagagcgtggagacccccgagcagaagggcctgacgtaccaccgcatcgtagaggctttccggtttgcctacgccaagaggaccctgcttggggaccccaagtttgtggatgtgactgagaattcgattgcgggcctactgtgtgctcggatggactcgccagctctggggtctcggcaggtggtccgcaacatgacctctgagttcttcgctgcccagctccggtcccagatctctgaccacaccactcacccgatctcctactacaagcccgagttctacacgccggatgacgggggcactgctcacctgtctgtcgtcgcagaggacggcagtgctgtgtccgccaccagcaccatcaacctctactttggctccaaggtctgctccccggtcagtgggatcctgttcaataatgaaatggatgacttcagctctaccagcattcaccaatgagtttggggcacccccctcacctgccaatttcatccagccagggaagcagccgctcttgtccatgtgcctgacgatcatggtgggccaggacggccaggtccggatggtggtgggagctgctgggggcacgcagatcaccacagacactgcactgcccccaagccacgctgatcacactcccatgccccaggccatcatctacaacctctggttcggctatgacgtgaagagggccgtggaggagccccggctgcacaacaagcttctgcccaacgtcacgacagtggagagaaacattgaccaggcagtgactgcagccctggagacccggcaccatcacacccagatcgcgtccaccttcatcgctgtggtgcaagccatcgtccgcacggctggtggctgggcagctgccttggactccaggaaagttccaacacctggggcagggttctgggaagggctggtggaggtgggctggtgggaggcggtgatcacagcccagcacctggatatcaccaggggcactggggccaggggccagggaccttcctggctgtgcctcag

SEQ ID NO: 144471 - DNA, 732 bp, Homo sapiens
ctagctccttctcctcccagagcctttatcctcatattgggtctggggacacacatgccgtctcttgattcctaaggatccattacccatttctctgcacagatcttcgggtatccaacctatctgtgcctccttcagccaggagcctccggatctttccagacttctttgcaatactgcctcatgcactgaatccatttctcgcatagcctggcgcttggcaggcaggctggcgttccctggctctgccttccccatctccctgtcttttctcccacggcccatctgcccctcctttcctccacccccttctcctctctgctcccctttatttccactccccacccgcgtggctttgctctccctctcccccctcagctcgtctgtatttggagctccggaagctgccggcgactctcccctggagcagcgtgactgacaccggctcctattcagtgctttgggtagaggggtgttcgtggaagtagccgccgtatcatcacttttagggccaaaaatcaacctgcagatggccttttctttattctcatcagagtggtgttcgctgcaagttgtagcaatatttgaatggatgcattctatgagtgagaacatggggtatttggttttctgttcctgtgttagtttgctgaggatgatggcttctagtttcttccatgtccctgcaaaggacatgatctcattcctttttacggctgcatagtattccat

SEQ ID NO: 144472 - DNA, 426 bp, Homo sapiens; identical to SEQ ID NO: 121344

SEQ ID NO: 144473 - DNA, 3333 bp, Homo sapiens
tgatgcatgaactttacctttttctgttttttaagcagtattacttttccacatgagaccattagatctagataactggtgggtctcaagatctgatgggctgatgaggaaacctggctctgccttccccatctccctgtattttctcccacggcccatctgccccttctttcctccacccccttctcctctctgctcccctttatttccactccccacccgcgtggctttgctctccctctccccccctcagctcgtttgtatttggagctccggaagctgccggcgactctcccctggagcagcgtgactgacaccggctcctatttatctgggaggagggagaggggaggagaaggggagggccccgggaggagggtacgagtggccgaccacggatttgcattgccgaggacgggaccccagggcagcgaagaggaattggccaacatgcagggacttggtggaaagactggaacgagctgtcagccgcctggagtcgctgttctgcagagtcccacaggccccctgggaacttgcggggaagtcaatggtgtcattgccaggtgtggcaccctcccgtgggaagcctttgcacaagctgatggacagtatggtggccgagttttttaaagaacagtaggatcctttctggggacgtggagacccttgcagaaattgtgcacagtgctttccaggcccagcgggctttccttctgatggcctctcagtaccaacaaccccacgagaatgacgtgggccgcacttctgaaaccccatatcggaaaagatttaaggaaatccaaacttttcaaagagagaaacccgggggagtaacatgtttaatcatctttcggccgtcagcgaatagattccctgccctttggatgggatagctgtgtctcccaaacctgggtccttatggtcaaggagatgaatgacggctgccaccttttacactaaacagggtgttaaaggactaaaaacaaagtgatttgcgtcatgtggattgggtgaagtcatatttgaacatttggagtgaacttcaagcatacatcaaggaacaccacaccacgggcctcacatgggaggcaaaacaggtcctgtaggcatccacagtatcaggcgttttctgtcctctcctctggggcctggggctttcctccaccccctcctcctctgcctcctccaggggccaccttccactttttcggaggaatggaagggcaaaaaagaggaatcttctccttcacgcttcagctttatttgcccaacttaaccaggggagaaggcaattacaaaagggctccgccatgtcacaagatgaccagaagacatacaaaaatcccagcctgcgggctcaaggagggcaaactcaatctcccaccaaaagtcacactccaagtcccacatctcctaaatcttatccttctcaaaaacatgccccagtgttggagttggaaggaaagaaatggagagtggagtaccaagaggacaggattgacctcgtgatttcagagactgagctgaaacaagtggcttacattttcaaatgcgaaaaatcaactattcagataaaagggaaagtaaactccattataattgacaactgtaagaaactcggcctggtgtttgacaatgtggtgggcattgtggaagtgatcaactcccaggacattcaaatccaggtaatgggggagagtgccaacaatttccatttaataagacagaaggttgccacatatacctcagtgaagatgcattagactgtgagatccgtgagcgccaagtccatctggaaatggaacatactttatccccctcagggatgggtggattaatagagaatttccccatttccctggaacagttcaagaccagccatgggatggatcccaagttaatcactgaaccctgcagaaattatggccctaacttccctgagagaccgaaccccctcacctgaatccccctctatcaaaacaaacaaaaaagcagcagtaaagagctagaagttgcagtagcccctactggctttagcttttggcctccaacggttctgtgctattaggatacaggcactgtttctggcacgcctcgcgggcattttgaaatatttaacgtttcctcatgatttgcctttgtgtgtgatttctagttccacatgatgacttgtgaacattagggatttaaaggaaaaaaaaaaagaattctgttcccctcatatcatgaacacagtaactgataggtaaaaagactgcatgattcacttttacacttatatttcattgctagttaaaaaataaaacctttgagaatctaagatgtacatttttaccttttaggcaatttcaatataatgtagaagctcgtagtgtgccctgaaaaatgtacacgttttttcttattgttaccacatgttcacctttatcagcgtggatactgtcagcatgagtacatatttcaacccacgcttgtaaaagacataagagtttatattaaggaccaaattcagttccttggtccttggaagacctatattctctgtagttactgaaaaccgaaagtcaattctaattattcatcttacatatttttccaccatgtcatttgaaaacttgcttttcttctgcataagagattcttatgccaaaaacattaaacagaagaaatcattttttttgctatgtaatacctcgcaactttgctctaaaatcaaagctcagttattattttccaagtttgaacatgttaaatatcagatgccttgtaaattatgtctttaacgttttcttataggactaatttcctcttttcccacctggccagacttggcttaaccaggctcggaaaatggaacatggaaaaagcccataccatgtattatttctcctaaaacctaaaggcattatctgttggtttgggcttggctgctccctattttgtagtcttgatagtagatgcctcctccagccgtaagagtagcctatgatatcccctttttatccttttccagtaccatagtgcctgaaaaatcctgcaacttccttggatcatatttaatgaattatagtataatgccttgcaggcccagtacaagcatatatattgtgcctcttacagcctttggaatacattgtttaccatttttttaaatatcttctatatccatatagtattcaaattattaatgctcatgtaccaaggttttgctataaaagttttgtctgtatgaataatgtggctttagtaaataatcatttttcaactgtaaacttattctgaaataaagtaaaattcctaattgtttaaatactgtgatgaaaaaaaaaa

SEQ ID NO: 144474 - DNA, 549 bp, Homo sapiens
atgaccgacacgcgcatggaagggatgaacttccagcagatgattcagcaagcggtagagcgtaatggcggtgatgtgaaggccgctgaaaactttgataacgtgacgcggcttgaccgctttaccaccgatttgacgttgaaggatggcgtcgtgacgttaaacgacatgcaaggtcaatcgcctgtgctggcgctgacaggggaaggcatgttgaatctggcagatcaaacctgcgacacccagtttgatattcgggtcgtgggtggctggaacggggaaagcaaactgattgatttcctgaaagaaacgccagtaccgctgcgggtttatggcaactggcagcaactcaattacagcctgcaagtggatcagttactgcgcaaacatctacaggacgaagcgaaacgtcgcctgaatgactgggccgagcggaataaagattcccgtaatggcaaagatgtgaagaagttgctggagaagatgcctgataagacgcgtaaagcgtcgcatcaggcgttcgtggcggcatcattatattctgaatat

SEQ ID NO: 144475 - DNA, 874 bp, Homo sapiens
ggtgtaggagagttaggattattcgaaatgagtctgagacgatacgacgaggtggtctacgtggtactgatgaggctagtcttcctaccggtctgcatacgccaagagggcgtgatgagtgtgtagacgtgaagaacagctcgagtcggctggggagacgaatggccaactgatggtggtcaccgcggaatgtccagcctgcgcgaaggctaggtatcagttgaggatccactgtgaacgagttatcggggagggcgagtgtcctgcctgcgcatagtggtcggtcactaaataaaagcggggggaatgacttccaagcacggctggaaaacgtggagattggtgccattctaaaggcgtataactatccgatttcgttgtccggaaaaatgtcactggctggtgatttctccggtaatggcatagatgccgacgcattccgcctcacctggcaaggacaggcacatgtcgaaatgtccgacacgcgcatggaagggatgatcttccagcagatgattcagcaagcggtagagcgtaatggcggtgatgtgaaggccgctgaaaactttgataacgtgacgcggcttgaccgctttaccaccgatttgacgttgaaggatggcgtcgtgacgttaaacgacatgcaaggtcaatcgcctgtgctggcgctgacaggggaaggcatgttgaatctggcagatcaaacctgccacacccagtttgatattcgggtcgtgggtggctggaacgggaaaagcaaactgattgatttcctgaaagcaacgccagtaccgctgcgggtttatggcaactggcagcaactcaattacagcctgcaagtggatccccgggtgggagtgaaaatgtaatcggt

SEQ ID NO: 144476 - DNA, 634 bp, Homo sapiens
tccgcgatttccggttcgacccacgcgtccggatagctcactctctggtacagtgatggcggagattaattttgtgaagaggagaaggaatattttgatgatagcacagaagaaaggttttacaagcagtcttccatgtctgaagatagtgatagcggtgacgacttcttcattgggaaagtcagacggacacgaaagaaggaaagtagttgtcattcttcagttaaggaacaaaaaccactagaaaaagtgtttcttaaagaagatacaggtgaaactcatggggatacaagaaatgacaaaatcaagccaagtacagaaaccagaaagttagaatcagtgtttttccactctttatctggatctaaaagctctagaagaaatttcaaagaacaggctccaaaaacaagatccctagattttccacagaatgagcctcagatcaagaatcagtttaataagaagctatcaggaagacttgaaaatacaaaacagcaattgcagctgcctcttcatccttcatgggaagcaagcagaaggcgaaaagaacagcaatctaatattgctgtgtttcaggggaaaaaaattacgtttgatgattgattagtgcctctttctgcaaacttttccatct

SEQ ID NO: 144477 - DNA, 2234 bp, Homo sapiens
  misc_feature (1)...(2234): n = a,t,c or g
atggaaggtaatttacagcgtgaagcaactgtcatcagtgagcaaaaagtcaaagaaaccgaaatattggcgaagaaaccaatacataattcaaaggaaaaaatagcaaagatggaacatggacctaaagcagtgactattgcaaattctccatcaaagccttcagaaaaggattctgtagtttcccttgagtcccagaagacacctgctgacccaaaactgaaaactctaagtcaaaccaaaaaaaacaaaggatctgatagctcactctctggtaacagtgatggcggagaagaattttnttgtgaagaggagaaggaatattttgatgatagcacagaagaaaggttttacaagcagtcttccatgtctgaagatagtgatagcggtgacgacttcttcattgggaaagtcagacggacacgaaagaaggaaagtagttgtcattcttcagttaaggaacaaaaaccactagaaaaagtgtttcttaaagaagatacaggtgaaactcatggggatacaagaaatgacaaaatcaagccaagtacagaaaccagaaagttagaatcagtgtttttccactctttatctggatctaaaagctctagaagggattgcccactttgtcacggcgcagcagcaacctggagctgggcatttggcatcgcactggccgtcgcgttgcacaatatccctgcacagagcgataaacaaaaagatgaacagaaaacggaaagaataactaaaagaaacgatgggaaaacggaatgtgaagaaaaagagaaaaaagtaacaaaaagtgaaaggcttaacttttcccgtctgctaaaaagaaaagcaaaacgaaaaaacaacctgattgacgtgaaacaaaatctcgaatatctactagaagggactcacacatccaagagtctcaatgacaatgataatactgatgaaaacactttcatgagtagagctaaaactacttggtggacaatcaactcgttgactctagaggatccccaaactgtcgacacccagtttgatattcgggtcgtgggtggctggaacggggaaagcaaactgattgatttcctgaaagaaacgccagtaccgctgcgggtttatggcaactggcagcaactcaattacagcctgcaagtggatcagttactgcgcaaacatctacaggacgaagcgaaacgtcgcctgaatgactgggccgagcggaataaagattcccgtaatggcaaagatgtgaagaagttgctggagaagatgttttggaatacgctgcaaatactccatcaacagcccggcaatggtgtgatattcacgtttttcatccagcggcagcggcacatattgcaccagaatctccagcgggatatgaccatttcgcgtccaggaaccgtccgcattcttctgaatatcctggcgggcgtgactcttcacttcggtcggaagtacggcccggttcgtgggcctaaagcgtgttttgacgacccgctctttgtgaactcaccgctgggtctgtcgcccacaccgctgatggtcagcatggagcaaaatctggcggagtggatgcaaatgagcaacctgctgctggataaaccgcaccaccagacaccgcgcggcctgaagtttgagctggcggcggaatcaccgctgatgatgatcatgcttaatgcgctgtcgaaacagatctaccaacgttaaccgcaaggcgcccatcaaattacgtaactgggattacgattccttagacggccaatactagtgggaaagtggatatcggtttttccggtcgcgaaagccatcctcgctcgcgggagctgttaagctcgctaccgttagccattgattatgaagtgctgtttagtgatgtgccctgcgtctggttacgcaaagatcatccggcactgcatcaaacgtggaatctggacaccttcttacgttatccgcatatcagcatttgctgggaacagagcgatacctgggcgctggacaatgtgttacaggagctgggacgcgaacgcacgattgctatgagcctgccggaattcgagcagtcactgtttatggcagcgcaacccgacaatctgctactggcgaccgcgccgcgctactgtcagtactacaatcaactccatcaactgccgttggttgctcttcctctcccgtttgacgaaagccagcaaaaaaagctggaagttccttttaccctagcaagatggcataaacggtaa

SEQ ID NO: 144478 - DNA, 242 bp, Homo sapiens
gccctcactcccggctaggcggcacccccccgccgggaggaggaggaggagccgagaggagctgagcgagcgcggaagtagctgctgctggtggtgacaatgtcaaataccagcactatgattggagccggcagcaaagatgctggaaccctaaaccatggttctaaacctctgcctccaaacccagaggagaagaaaaagaaggaccgattttaccgatccattttacctggagataaaac

SEQ ID NO: 144479 - DNA, 333 bp, Homo sapiens
atgatagctgcaaataaaaagaaagagaaagagcggccagagatttctctcccttcagattttgaacacacaattcatgtcggttttgatgctgtcacaggggagtttacggtggccattaagcagatgaatcttcagcagcagcccaagaaagagctgattattaatgagatcctggtcatgagggaaaacaagaacccaaacattgtgaattacttggacaggtatggagtggtgggtcccatcagagggaaagggcctttgggactgattggtggtgaagctgttagagaagagggcagtgccagccctcagaactgcctccatttatga

SEQ ID NO: 144480 - DNA, 3324 bp, Homo sapiens
  misc_feature (1)...(3324): n = a,t,c or g
tttcgtcttcgctgtcgcgatttcgtcctgcgagagcgcgagcgtgctgcacctcgggagctggcggctgagctgccaggagcccagcccagctgaatcgagcggagccggtggagcaggggccttgtgggtacccggttgggcagggagaggtgcggctctgcgacggaaacaatcgccaggagatgccggggctagccttccccaccagtagctgctgctggtggtgacaatgtcaaataacggcctagacattcaagacaaacccccagcccctccgatgagaaataccagcactatgattggagccggcagtaaagatgctggaaccctaaaccatggttctaaacctctgcctccaaacccagaggagaagaaaaagaaggaccgattttaccgatccattttacctggagataaaacaaataaaaagaaagagaaagagcggccagagatttctctcccttcagattttgaacacacaattcatgtcggttttgatgctgtcacaggggagtttacgggaatgccagagcagtgggcccgcttgcttcagacatcaaatatcactaagtcggagcagaagaaaaacccgcaggctgttctggatgtgttggagttttacaactcgaagaagacatccaacagccagaaatacatgagctttacatcaggagataaaagtgcacatggatacatagcagcccatccttcgagtacaaaaacagcatctgagcctccattggcccctcctgtgtctgaagaagaagatgaagaggaagaagaagaagaagatgaaaatgagccaccaccagttatcgcaccaagaccagagcatacaaaatcaatctatactcgttctgtggttgaatccattgcttcaccagcagtaccaaataaagaggtcacaccaccctctgctgaaaatgccaattccagtactttgtacaggaacacagatcggcaaagaaaaaaatccaagatgacagatgaggagatcttagagaagctaagaagcattgtgagtgtgggcgatcctaagaagaaatatacacggtttgagaagattggacaagggccaatcaggcaccgtgtacacagcaatggatgtggccacaggacaggaggtggccattaagcagatgaatcttcagcagcagcccaagaaagagctgattattaatgagatcctggtcatgagggaaaacaagaacccaaacattgtgaattacttggacagttacctcgtgggagatgagctgtgggttgttatggaatacttggctggaggctccttgacagatgtggtgacagaaacttgcatggatgaaggccaaattgcagctgtgtgccgtgagtgtctgcaggctctggagttcttgcattcgaaccaggtcattcacagagacatcaagagtgacaaatatcctgttgggaatggatggctctgtcaagctaactgactttggattctgtgcacagataaccccagagcagagcaaactgagcacccatgggtagggaaccccatactgggatgggcaccagaggttgtggacacggaaagggcctatgggcccaaaggttggacatctgggtccctgggcatcatggccatcgaaatgattgaaggggagcctccatacctcaatgaaaaccctctgagagccttgtacctcattgccaccaatgggaccccagaacttcagaacccagagaagcttgtcagctatcttccggggactttctggaaccgctgtctcgagatggatgtggagaagagaggtttcagctaaaagagctgctacagcatcaattcctgaagattggcnaagccccctctcccagcctcactccccactgattgctgcagcctaaggaggcaacaaaggaacaatcacctaaaacccacactcacccccagcctcattgtgcccaagccttctgtgagataaatgcacatttcagaaattccaactcctgatgccctcttctccttgccttgcttctcccatttcctgatctagcactcctcaagactttgatccttggaaaccgtgtgtccagcattgaagagaactgcaactgaatgacctaatcagatgatggcccatttctaaataaggaatttcctcccaattcatggatatgagggtgagtttatgattaagggtttatataaataaatgtttctagtcttccgtgtgtcaaaatcctcacctccttcataaccatctcccacaattaattcttgactatataaatttatggtttgataatattatcaatttgtaatcaattgagatttctttagtgcttgcttttctgtgactcaacttgccagacacctcattgtacttgaaaactggaacagcttgggaatgccatggggtttgataatctgccagggacatgaagaggctcagcttcctggaccatgactttggctcagctgatcctgacatgggagaacaaccacatttttctttgtgtgtgcttctagcagctgttcgggaggaccttgacccaatagtggtncccatgctgtttcttgtgaaatgctctcggctatgtagcagcttttgattccctgcataccctaggctgctgcccctatcctgtcccttgtttataacattgagaggttttctaggggcacatactgagtgagagcagtgttgagaagtcggggaaaatggtgactactttttaggagcaaggctgggcattcagcacctgtccagctctacttgtgtgatgtttccaggaaactccagccccctttttctgcctagggataagggagctgaaaagattaacttggaatcttcttaatggtccaaaatcttttggtcacaataaagagtctcccaaattagagactgcatgttagttcctggatggatttggtggcctgacatgataccctgcccagctgtgaaggggaccccgtttttaaagatgcatggccaagctctctgcaaatggaaatgcttacactgggtgttggggatgtttgctacctcctgctatttttgtggatatggatcatcccactatggaaagacccctggccaagcattgtggcttgtcatgtcaagccccattgactaccttctcatgctctgaggtactactgcctctgcagcacaaatttctatttctgtcaataaaaggagatgaaaatattctattggagcatgcccttcttttttctcttgcgtttttctttcctttactgattgtttatatgaaataatgacgtatttctttcttgaccatttgagagtgggtaagttgagaatgaatgcccctttaacactt

SEQ ID NO: 144481 - DNA, 337 bp, Homo sapiens
cagccaacccggccaacatctctgtggccctgagagcccagggcagcagctacacggagtcctggagatggagcgcttacactacatccaccacaacgagaccgtgtcccagcagattggggaggtcctgtacaacgcggcaccactgtccatctggtggcagatccctcagtacctgctcattgggatcagtgagatctttgccagcatcccaggcctggagtttgcctactcagaggccccgcgctccatgcagggcgccatcatgggcatcttcttctgcctgtcgggggtgggctcactgttgggctccagcatagtggcactgctgtccttg

SEQ ID NO: 144482 - DNA, 1647 bp, Homo sapiens
atgagcaaaccccagcctctcagagctcggactctggccacactgcttttagaagcctttcccttcatctaccacccgctgaacatcaccgatggcaggccagcactctctcagctctctggggcaggagtggggggcagcagctctcagggagaaagagcacctggaactaagaacttcctcaaccactttctgtggaactcagccaacccggccaacatctctgtggccctgagagcccagggcagcagctacacgatcccggaagcctggctcctcctggccaatgttgtggtggtgctgattctggtccctctgaaggaccgcttgatcgaccctttactgctgcggtgcaagctgcttccctctgctctgcagaagatggcgctggggatgttctttggttttacctccgtcattgtggcagctcctttccaccctcaggtgcgttccccactgtctgactccatcctgggggagcaggcgctggctgtgacggacgacaaggtctcagtgctggagctgagggtgcagccagtgatgggcatctcgctgaccttgagccggggcactgcccaccccggggaggaggtggccctctccctatggctgtccttctctgatcacactgtggccccagctgagctctacgaccaccgtgacctgggactgtccgtctcagccgaggagcctggtgccatcctgccagctgaggagcagggtgcccagctcggggtggtgtggggctgcggcaaggatcaatgttctgaaggttcagagacagggcaagaaaagggcagggggctggcaggagggctgcatggccccgaagcagctcagctctttgtggactgtggccaggctcccctggaccctgtctacctgccggcagccctggagctcctagacgcccctgaacacttccgtgtgcagcaggtgggccactacccacctgccaactcctctctgagctcccgatctgagacctttctgctcctacagccctggcccagggcccagccacttctccgggcctcctacccaccttttgccactcagcaggtggtcccccctcgagtcactgagccccaccaacggccagtcccatgggacgtgcgggccgtttcagtggaagcggctgtgactccagcagagccctacgcccgggttctcttccacctcaaagggcaggattggccaccagggtctggcagcctgccctgtgcccggctccatgccacacaccctgcaggcactgctcaccaagcctgccgcttccagcagagcgatgtggagagagaagccagatggaaaaggaagagcccaaggcgggatctaggggtcgctggatctgggggtcgctggatctgggggtcacaggatctgagggttgtgggatctgggggtccctggatctgggggttgtggtacctgggggtcgctggatctggggtcactggatctgggggtcatgggatctgggggtcactggagcccactccacacctcctccaccagaacagcctcacggaagaccttcacacttcccagagcagcaccgtgctcatggaaagatcagggcacaagatgtggcaactgattctgtcagatgcaatttgtgggccatgcctggatcctggatcctga

SEQ ID NO: 144483 - DNA, 330 bp, Homo sapiens
atcccggaagcctggctcctcctggccaatgttgtggtggtgctgattctggtccctctgaaggaccgcttgatcgaccctttactgctgcggtgcaagctgcttccctctgctctgcagaagatggcgctggggatgttctttggttttacctccgtcattgtggcagctcctttccaccctcaggtgcgttccccactgtctgactccatcctgggggagcaggcgctggctgtgacggacgacaaggtctcagtgctggagctgagggtgcagccagtgatgggcatctcgctgaccttgagccggggcactgcccaccccggggag

SEQ ID NO: 144484 - DNA, 515 bp, Homo sapiens
cggccgccgtccatcgggtgggccgcgaagggggcgaggaagcgcacaccggcccgctggtactgcaggtggcagccacgggcgcgccgctcggcctcatccgacgcctctgcagcgggttccgcaggcctgcagggcggggaggccgggactggccgtcagcgctgagcggacccagcctgcccagggcccagctgctggagacccgcagctcgtccccggcggctcctaatcaccagcagctcctgtttctcaaacgcacacatccgcccctcttggggtcaggcccttccacctgcaagcgagccgccccagcccactcccgactggcgctgtgcctcgatcaccgctcttgctcccaagtggaccgcaggggagacgctctcttacggggaccctgggggcgctcactctctgaagggcctggaagctagattctagaggcgtgggccacctctccctgggttttggggagccccccccgagggtgttcatttcctgagctctgtgtcatc

SEQ ID NO: 144485 - DNA, 1692 bp, Homo sapiens
atggatacaccgttaaggcgcagccgacggctgggaggcctaaggcccgaatcccccgagagcctcacctcagtttcgcggacgagacgggcccttgtggagttcgagtcgaacccagaagaaacgagggagcccgggtctcctccgagtgtgcagcgggctggcctggggtcccccgaaaggccgccgaagacaagcccaggatcaccccgtctgcagcagggtgcaggcttggagtcaccccaagggcagccagagccaggcgcagcgtccccccagcgtcagcaagacctacacctggagtcgcctcaaagacagccagagtacagtcctgaatccccacgatgtcagccgaagccaagtgaggaggcaccaaagtgttctcaggaccagggagtactggcctcggagttggcccagaataaggaggagctgaccccgggggccccccagcatcagctaccgccggtcccaggatcaccagagccttaccccggtcagcaagctcccggtccggagccctctcagccactactggagctgacacccagggcacctggctccccccggggtcagcatgagccgagcaagccacctccagctggggagacggtgacaggcggcttcggggcaaagaagcgaaaaggttcttcatcccaggccccagcgtccaagaagttgaataaagaggagcttcctgtaatcccgaaggggaagcccaaatcggggcgagtgtggaaggaccgctccaagaaaagggggtcacaggagaatggcagggccgttgatggccatgtggaactggaggaggctggttcagcaagggcagagggccagcgtgacagcttttgtatccgcactcgtggctcccgagctcttgtccagcgtccaagaaaaataaagctgcacgaacaaattaaaggacaaatgcctgggattttattgctgatcaaagtggatttcagagggaaggtgatggatctcggccgcgacgccacccgccgcttcttcaactggttttactggagcatcaacctgggtgctgtgctgtcgctgctggtggtggcgtttattcagcagaacatcagcttcctgctgggctacagcatccctgtgggctgtgtgggcctggcatttttcatcttcctctttgccacccccgtcttcatcaccaagcccccgatgggcagccaagtgtcctctatgcttaagctcgctctccaaaactgctgcccccagctgtggcaacgacactcggccaggtcaaagctgtcacaaggccagcagggaaacaatggcagtgaaagtaaactccacctgttggtggcaaaatggcagcacacgctgggaagggtggagttgacagtggctgtctttggagatgactacactaatattgtcccttttggaatctcaaaggacagtgcaaggctcttggacaaaaagagagaccgtcaatgtgcccgcgtgctggccgacgagaggtctccccagccaggggcttccccgcaagaggacatcgccaacttccaggtgctggtgaagatcttgcccgtcatggtgaccctggtgccctactggatggtctacttccagctctctgcagccgcccggaggaaccgcggggccccgcgcgtctcctcggctggctgctgggcagctgcgcagcgtccccgcagacgggccccctga

SEQ ID NO: 144486 - DNA, 1032 bp, Homo sapiens
atgcaggaagtgctgaggccatgcctggcagctagcaagcatttggcttctctgtctcctttggccagcagtccccttgaactgtctgagttcctatgggtggactttgtggtggagaatagcactggtgggggcgtagcggtcactcgccccgtcacgtggcagctggagtacccaggccaggcccctgaagcagagaaggacaaaatggtgtgggaaatcctggtgtctgagcgggacatcagagcccttatcccactggccaaggctgaggagctggtgaatacagcaccactgactggagtgccccagcatgtccccgtgcgccttgtcactgtggacggcgggggggccttggtggaggtgacagagcatgtcggctgcgagtctgccaacacacaggtcctgcaggtgtctgaggcctgtgatgccgtgttcgtggctggcaaggagagccggggcgcccggggggtgcgagtggacttctggtggcgccggctccgcgcctcgctgcggctgaccgtgtgggccccgctgctaccgctgcgtatcgagctcaccgacaccaccctcgagcaggtccgcggctggagggtacctggccctgctgaagggatcaaggtgaagaaggggctgcatgtgacagccgcccgcccagcccagcccacactctggactgccaagctggaccgcttcaagggctccaggcaccacaccaccctcatcacctgccaccgtgctgggctcacagagccagattccagaaaagtacaaggtgaagcagcagatgctgttgtagaagctgcagcaagttatccggaagacctagctaagatcattgacggtgggtacactcaacaacagattttcaatgtagacggaatagccttctattggaagaaagtgacatctggaacttgcacagctagagagaagtcaatgcctggtttccaagatgcaaagatcagagtgattcccttgttagggactaatgcagctggtgattttacattgaagccaaagctcatttag

SEQ ID NO: 144487 - DNA, 1034 bp, Homo sapiens
cagtcaactgattagcgtacagacacttatcacctggaagattccaaggagcaaagtggcaatcgcgcagggtcaggaggctggctgtgaagttgtgccgaagcaggagggtagcactaaagagctggccgggccgcactggcatgtcaggcacccgcagagtcacagcctcgtccagaggtacctcctggtactgcggggggtctgctgggcgcagctccacaccccccactgggagggcctgctccccagggtcgttctcctcgccggagccacaacccccagggccctcagctgcaggctcaagcgtgtcaggccagctcggcccgtgtggtggaggcctgtgagaaccagtgcgagggaagctccagctccaccacgcaggcgcccagggatggctggaagcggcaggcttggtgagcagtgcctgcagggtgtgtggcatggagccgggcacagggcaggctgccagaccctggtggccaatcctgccctttgaggtggaagagaacccgggcgtagggctctgctggagtcacagccgcttccactgaaacggcccgcacgtcccatgggactggccgttggtggggctcagtgactcgaggggggaccacctgctgagtggcaaaaggtgggtaggaggcccggagaagtggctgggccctgggccagggctgtaggagcagaaaggtctcagatcgggagctcagagaggagttggcaggtgggtagtggcccacctgctgcacacggaagtgttcaggggcgtctaggagctccagggcatctttccaagcttgctcccttcttccctgaaccgactggtatcgagtgcaagtgtgggatgggcgggcgcggaaggtgctgaagaggtctgtgaaggcacttgcttgccctgggggtggggtggggaccaggagcctttggtcattcgtggactgtatatggaaacaagtggaggtatagatatacatggactcctgggcaggggctaagtacccgtcagcattaaactttcccacgtgccacat

SEQ ID NO: 144488 - DNA, 1772 bp, Homo sapiens
atgggttctggaccactgacaggggagctctatatgaatgaagtggatagatctgaatatcaggtgatggatctcggccgcgacgccacccgccgcttcttcaactggttttactggagcatcaacctgggtgctgtgctgtcgctgctggtggtggcgtttattcagcagaacatcagcttcctgctgggctacagcatccctgtgggctgtgtgggcctggcatttttcatcttcctctttgccacccccgtcttcatcaccaagcccccgatgggcagccaagtgtcctctatgcttaagctcgctctccaaaactgctgcccccagctgtggcaacgacactcggccaggaagtgtgaggatgatcagggtcttgacagtgaagatggtagtaaggataaggatgatggtgttggtatctacactgaagacacaaacattggcaatgcggatgacagtggcattaaaggagaggatgatggggatgatgtttccaatgaaggctttctgagtgactgggctcagtcgggccgttctgcttctcgtgatggcgctggggttgcagtcatttgggacctggaaagggctagaacttctgagtctgctcacttacatggctggcagtcaatgtgggctgttggctgtgagctcagatgggactgtgtggaccagagcaccttggttcccattcgtgtggtcttaccatgtggcttgaacttctcacagcgtcgtgtcaagctgtcacaaggccagcagggaaacaatggcagtgaaagtaaactccacctgttggtggcaaaatggcagcacacgctgggaagggtggagttgacagtggctgtctttggagatgactacactaatattgtcccttttggaatctcaaaggacagtgcaaggctcttggacaaaaagagagaccgtcaatgtgcccgcgtgctggccgacgagaggtctccccagccaggggcttccccgcaagaggacatcgccaacttccaggtgctggtgaagatcttgcccgtcatggtgaccctggtgccctactggatggtctacttccagatgcagtccacctatgtcctgcagggtcttcacctccacatcccaaacattttcccagccaacccggccaacatctctgtggccctgagagcccagggcagcagctacacgatcccggaagcctggctcctcctggccaatgttgtggtggtgctgattctggtccctctgaaggaccgcttgatcgaccctttactgctgcggtgcaagctgcttccctctgctctgcagaagatggcgctggggatgttctttggttttacctccgtcattgtggcaggagtcctggagatggagcgcttacactacatccaccacaacgagaccgtgtcccagcagattggggaggtcctgtacaacgcggcaccactgtccatctggtggcagatccctcagtacctgctcattgggatcagtgagatctttgccagcatcccaggcctggagtttgcctactcagaggccccgcgctccatgcagggcgccgatgggcaagccaagtgtcctctatgcttaagctcgctctccaaaactgctgcccccagctgtggcaacgacactcggccagagaccgtcaatgtgcccgcgtgctggccgacgagaggtctccccagccagggcttccccgcaagaggacatcgccaacttccaggtgctggtgaagatcttgcccgtcatggtgaccctggtgccctactggatgg

SEQ ID NO: 144489 - DNA, 6397 bp, Homo sapiens
atgcccgcgccgcgcgcccgggagcagccccgcgtgcccggggagcgccagccgctgctgcctcgcggtgcgcggggccctcgacggtggcggcgggcggcgggcgcggccgtgctgctggtggagatgctggagcgcgccgccttcttcggcgtcaccgccaacctcgtgctgtacctcaacagcaccaacttcaactggaccggcgagcaggcgacgcgcgccgcgctggtattcctgggcgcctcctacctgctggcgcccgtgggcggctggctggccgacgtgtacctgggccgctaccgcgcggtcgcgctcagcctgctgctctacctggccgcctcgggcctgctgcccgccaccgccttccccgacggccgcagctccttctgcggagagatgcccgcgtcgccgctgggacctgcctgcccctcggccggctgcccgcgctcctcgcccagcccctactgcgcgcccgtcctctacgcgggcctgctgctactcggcctggccgccagctccgtccggagcaacctcacctccttcggtgccgacgcaggtgatggatctcggccgcgacgccacccgccgcttcttcaactggttttactggagcatcaacctgggtgctgtgctgtcgctgctggtggtggcgtttattcagcagaacatcagcttcctgctgggctacagcatccctgtgggctgtgtgggcctggcatttttcatcttcctctttgccacccccgtcttcatcaccaagcccccgatgggcagccaagtgtcctctatgcttaagctcgctctccaaaactgctgcccccagctgtggcaacgacactcggccaggtcaaagctgtcacaaggccagcagggaaacaatggcagtgaaagtaaactccacctgttggtggcaaaatggcagcacacgctgggaagggtggagttgacagtggctgtctttggagatgactacactaatattgtcccttttggaatctcaaaggacagtgcaaggctcttggacaaaaagagagaccgtcaatgtgcccgcgtgctggccgacgagaggtctccccagccaggggcttccccgcaagaggacatcgccaacttccaggtgctggtgaagatcttgcccgtcatggtgaccctggtgccctactggatggtctacttccagatgcagtccacctatgtcctgcagggtcttcacctccacatcccaaacattttcccagccaacccggccaacatctctgtggccctgagagcccagggcagcagctacacgatcccggaagcctggctcctcctggccaatgttgtggtggtgctgattctggtccctctgaaggaccgcttgatcgaccctttactgctgcggtgcaagctgcttccctctgctctgcagaagatggcgctggggatgttctttggttttacctccgtcattgtggcaggagtcctggagatggagcgcttacactacatccaccacaacgagaccgtgtcccagcagattggggaggtcctgtacaacgcggcaccactgtccatctggtggcagatccctcagtacctgctcattgggatcagtgagatctttgccagcatcccaggcctgggagtttgcctactcagaggccccgcgctccatgcagggcgccatcatggggcatcttcttcttgcctgtcgggggtgggctcactgttgggctccagcttagtgggcactgctgttcctttgcccgggggctggctgcactgccccaaggactttgggaacatcaacaattgccggatggacctctacttcttcctgctggctggcattcaggccgtcacggctctcctatttgtctggactcgctggacgctatgagagggcgtcccagggcccagcctcccacagccgtttcagcagggacaggggctgaacaggccctattccagcccccttgcttcactctaccggacagacggcagcagtcccagctctggtttcctttctcggtttattctgttagaatgaaatggttcccataaaataaagggcatgagcccttcctcacgaccatggtccatgacaaggggcagggcagagggggccttggatgggagtccttgtgggggaccaggcaggggacttggatcaacaagcaccagacgagtggcgggggcaggcgagaggctcagtgggacctccaccctcgttgccccagctggtggctgaccaggtggctgtggagggtcaggagctgccccggttcctctccatgtagttgcgaagctcctcagggtccttcagccccatgtcctcacacacccagcggatgtcctcctcgcctgccacaaggatggactgcacagcaggggcccctacaggctcctcaggtgactgggctggaggggctggcgcaaatgtcacaaactctactcgcttccgccgccccccagcctcctttcgggccagggtgcttgaggagctggtggtgcccccaggagggccaggggccagggtaggggcctcccctcctcccccactctcacaggggcagctcccctcccccttgggcgggccaggggactgccggtccagctggcggctcagttcctcctggtcagtgcccagccagacccagttgtggggctggggggaggtggggtcagtggcactgtcgggaggttctttgcgctgatagcgcaggacgaagaccacaccattgaccaagaagatgaagatggccacgcagaagactcccagcagggcgtacatgcccagctctagctcagtgacatgctgaggggcagggaccatctcctcctcctcttcctcctcctcctccctggcttcggtctcctccttcctggcctcctcctctgcccgctcaaacttgcccctcacacctgtgttgcccccgacactgcctgccacctgccgtttaccacccatggtggcttctgtggctggtgggctccaagcagggctggatgggagagcaggggctggagtggaggcagggggcagccccagccaggcggtgccagaggccagaggcacacggtggcggccccggcggcagggctcgggcgggtgcagagccacatgcagcggcagcccctcggcgcctgccccactcaccaccaccccgagctgggcaccctgctcctcagctggcaggatggcaccaggctcctcggctgagacggacagtcccaggtcacggcggtcgtagagctcagctggggccacagtgtgatcagagaaggacagccatagggagagggccacctcctgctttggggcgggaagggctgactgtgcccagcacgtagctgtgacctccccggggtgggcagtgccccggctcaagggtcagcaagattgcccatcactggctgcaccctcagctccagcactgagaccttgtcgtccgtcacagccagcgcctgctcccccaggatggagtcagacagtggggaacgcacctcaatggaggtgacaccgggctcccggcccaccacgacacggccaccctccagagaggctacacgcgagtccagcacgcgggcgtgtggcgccacgaggtgggacacgtctagcagccagtcggggccaagcaggtgcgtgaggcggcggccgccgtccagcgggtgggccgcgaagggggcgaggaagcgcacaccggcccgctggtactgcaggtggcagccacgggcgcgccgctcggcctcatccgacgcctctgcagcgggttccgcaggcccttcagcagggccaggtaccctccagccgcggacctgctcgagggtggtgtcggtgagctcgatacgcagcggtagcaggggggcccacacggtcagccgcagcgaggcgcggagccggccgccaccagaagtccacttcgcaccccccgggcgccccggctctccttgccagccacgaacacggcatcacaggcctcaagacacctgcaggacctgtgtgttggcagattcgcagccgacatgctctgtcacctccaccaaggcccccccgccgttccacagtggacaaggcgcacggggacatgctggggcactccagtcaagtggtgctgtattcaccagctcctcagccttggccagtgggataagggctctgatgtcccgctcagacaccaggatttcccacaccgattttgtccttctctgcttcaggggcctggcctgggtactccagctgccacgtgacggggcgagtgaccgctacgcccccaccagtgctattctccaccacaaagtccacccataggaactcagacagttcaaggggactgctggaatctggctctgtgagcccagcacggtggcaggtgatgagggtggtgtggtgcctggagcccttgaagcggtccagcttggcagtccagagtgtgggctgggctgggcgggcggctgtcacatgcagccccttcttcaccttgatccgcagggtcaggaggctggctgtgaagttgtgccgaagcaggagggtagcactaaagagctggccgggccgcactggcatgtcaggcacccgcagagtcacagcctcgtccagaggtacctcctggtactgcggggggtctgctgggcgcagctccacaccccccactgggagggcctgctccccagggtcgttctcctcgccggagccacagcccccagggccctcagctgcaggctcaagcgtgtaggccagctcggcccgtgtggtggaggcctgtgagaaccagtgcgagggaagctccagctccaccacgcaggcgcccagggatggctggaagcggcaggcttggtgagcagtgccggcagggtgtgtggcatggagccgggcacagggcaggctgccagaccctggtggccaatcctgccctttgaggtggaagagaacccgggcgtagggctctgctggagtcacagccgcttccactgaaacggcccgcacgtcccatgggactggccgttggtggggctcagtgactcgaggggggaccacctgctgagtggcaaaaggtgggtaggaggcccggagaagtggctgggccctgggccagggctgtaggagcagaaaggtctcagatcgggagctcagagaggagttggcaggtgggtagtggcccacctgctgcacacggaagtgttcaggggcgtctaggagctccagggctgccggcaggtagacagggtccaggggagcctggccacagtccacccgaagcacagggaagttgctgccctttcccgcagtgacaggaatcctctcaaaggttctggaaggcaaggatgcggccatccctctcacgacgtccagggcgagggccaccaggaggcagagccaggggccgtagggcccccgaggggccgctgttgtgcgaccggccatccgcgcgcacatctcctcctccacactgcgggcccccttggccgctcgcctctggcgccagcgcagctcctccacctggcgttccagccctcgcaccttggcctcgagttgggccccagaggctcgggagccagtgagccggctcagcagggcgtagaggatcagcaaggccaggagtagcagggcccgggtggaagggtcaggcaccgacctcatcagggccacgaagccggccaggaagatgacaagcttcaggccccacaggatccgccccagcaaggccaagaccaagccgaggagcagagacagcagccagtagacgaccagggcccctgctccccacagcaggaaggtctggacctggccagggctgagcttcaggccctgggcgaggtaatcaccagctagtcccaaggcattcagcagctgtgcggcgatcccagacagagcaaagaaggccacagaaatggctgatgagatggcccacaacacttgggacgaagactctgacaccaggtgcatggtctctggcccaatccaggcatccagtgtccctcgcacagatcgacctatctgggtcaagacatcaactggggcttctctcttctgttggcctggtggtgcaaagtctcgacgggactgggccaatgctgagtggaggaggataagggccactaggaccatcagaatggctttgaacacatgctttccccatggtgaactgatgctggaggctgccatgactgggtccaggatctcaatcttgcctttttgcttgtcccatacccgcatgctgccttgatagtggacatagtccctgccctcatggagctgaagttcaccaacaagctcaaagtggaaggacatccagactcctgccaggaggagcagggcttttgcaacgggctccatgaagccatgagcctgaggctcggggtgccttcccagcatgccagccccaccaatccactgccgaggttcagacat

SEQ ID NO: 144490 - DNA, 2607 bp, Homo sapiens
atgttaaccatgagcgtgacactttcccccctgaggtcacaggacctggatcccatggctactgatgcttcacccatggccatcaacatgacacccactgtggagcagggtgagggagaagaggcaatgaaggacatggactctgaccagcagtatgaaaagccacccccactacacacaggggctgactggaagattgtcctccacttacctgaaattgagacctggctccggatgacctcagagagggtccgagacctaacctattcagtccagcaggattcggacagcaagcatgtggatgtacatctagttcaactaaaggacatttgtgaagatatttctgatcatgttgagcaaatccatgccctccttgaaacagagttctccctaaagctgctgtcttactctgtcaacgtgatagtggacatccacgcagtgcagctcctctggcaccagcttcgagtctcagtgctggttctgcgggagcgcattctgcaaggtctgcaggacgccaatggcaactacactaggcagacggacattctgcaagctttctctgaagagacaaaagagggccggcttgattctctaacagaagtggatgactcaggacaattaaccatcaaatgttctcaaaattacttgtctctggattgtggcattactgcattcgaactgtctgactacagtccaagtgaggatttgctcagtgggctaggtgacatgacctctagccaagtcaaaaccaaaccctttgactcttggagctacagtgagatggaaaaggagtttcctgagcttatccgaagtgttggtttacttacggtagctgctgactctatctctaccaatggcagtgaagcagttactgaggaggtatctcaagtatctctctcagtagacgacaaaggtggatgtgaggaagacaatgcttctgcagtcgaagagcaaccaggcttaacactgggggtgtcatcatcttcaggagaagctctgacaaatgctgctcaaccctcctctgagactgtgcagcaagaatccagttcctcctcccatcatgatgcaaagaatcagcagcctgttccttgtgaaaatgcaacccccaaacgaaccatcagagattgctttaattataacgaggactctcccacgcagcctacattgccaaaaagaggactttttcttaaagaggaaacttttaagaatgatctgaaaggcaatggtggaaagaggcaaatggttgatctaaagcctgagatgagcagaagcaccccttcgctagtagatcctcctgacagatccaaactttgcctggtattgcagtcttcttaccccaacagcccttctgctgccagccagtcttatgagtgtttacacaaggtggggaatgggaaccttgaaaacacagtcaaatttcacattaaagaaatttcttccagcctgggaaggcttaacgactgctataaagagaaatctcgacttaaaaagccacacaagacctcagaagaggtgcctccatgccgaacacctaaacgggggactggttcaggcaaacaagctaaaaatacaaagagctcagcagtgccaaatggagagctttcttatacttccaaggccatagaggggccacaaacaaattctgcttccacatcctcacttgagccttgtaatcagagaagttggaatgccaaattgcaattgcagtcagaaacatccagttcaccagcttttactcagagcagtgaatcctctgttggctcagacaacatcatgtctccggtgccacttctttcaaaacacaaaagcaaaaaaggtcaagcctcctctccaagtcacgtcactaggaatggtgaggttgtggaggcctggtatggctctgatgaatacctagcactgccctctcaccttaagcagacagaagtattggctttgaagttggaaaacctaacaaagcttctgcctcagaaacccagaggagaaaccatccagaatattgatgactgggaactgtctgaaatgaattcagattctgaaatctatccaacctatcatgtcaaaaagaagcatacaaggctaggcagggtgtctccaagctcatctagtgacatagcctcttcactaggggagagcattgaatctgggcccctgagtgacattctttctgatgaggagtccagtatgcctctcgctggcatgaaaaagtatgctgatgagaagtcagaaagagcttcatcctctgagaaaaatgagagccattctgccactaaatcagctttatttcagattactgatgcaagatattcagcaccaagacaactatgaagccttatgggaaaaaatagaggggcttgtaaacaaactggatgaattcattcaatggttaaatgaagccatggaaactacagaaaattggactccccctatagcagagatggatgaccttaaactgtatctggagacacacttgagttttaagttgaatgtagacagtcattgtgctctcaaggaagctgtggaggaggaaggacaccaacttcttgagcttattgcatctcacaaagcaggactgaaggacatgctgcggatgattgcaagtcaatggag

SEQ ID NO: 144491 - DNA, 1986 bp, Homo sapiens
ggccggcttgattctctaacagaagtggatgactcaggacaattaaccatcaaatgttctcaaaattacttgtctctggattgtggcattactgcattcgaactgtctgactacagtccaagtgaggatttgctcagtgggctaggtgacatgacctctagccaagtcaaaaccaaaccctttgactcttggagctacagtgagatggaaaaggagtttcctgagcttatccgaagtgttggtttacttacggtagctgctgactctatctctaccaatggcagtgaagcagttactgaggaggtatctcaagtatctctctcagtagacgacaaaggtggatgtgaggaagacaatgcttctgcagtcgaagagcaaccaggcttaacactgggggtgtcatcatcttcaggagaagctctgacaaatgctgctcaaccctcctctgagactgtgcagcaagaatccagttcctcctcccatcatgatgcaaagaatcagcagcctgttccttgtgaaaatgcaacccccaaacgaaccatcagagattgctttaattataacgaggactctcccacgcagcctacattgccaaaaagaggactttttcttaaagaggaaacttttaagaatgatctgaaaggcaatggtggaaagaggcaaatggttgatctaaagcctgagatgagcagaagcaccccttcgctagtagatcctcctgacagatccaaactttgcctggtattgcagtcttcttaccccaacagcccttctgctgccagccagtcttatgagtgtttacacaaggtggggaatgggaaccttgaaaacacagtcaaatttcacattaaagaaatttcttccagcctgggaaggcttaacgactgctataaagagaaatctcgacttaaaaagccacacaagacctcagaagaggtgcctccatgccgaacacctaaacgggggactggttcaggcaaacaagctaaaaatacaaagagctcagcagtgccaaatggagagctttcttatacttccaaggccatagaggggccacaaacaaattctgcttccacatcctcacttgagccttgtaatcagagaagttggaatgccaaattgcaattgcagtcagaaacatccagttcaccagcttttactcagagcagtgaatcctctgttggctcagacaacatcatgtctccggtgccacttctttcaaaacacaaaagcaaaaaaggtcaagcctcctctccaagtcacgtcactaggaatggtgaggttgtggaggcctggtatggctctgatgaatacctagcactgccctctcaccttaagcagacagaagtattggctttgaagttggaaaacctaacaaagcttctgcctcagaaacccagaggagaaaccatccagaatattgatgactgggaactgtctgaaatgaattcagattctgaaatctatccaacctatcatgtcaaaaagaagcatacaaggctaggcagggtgtctccaagctcatctagtgacatagcctcttcactaggggagagcattgaatctgggcccctgagtgacattctttctgatgaggagtccagtatgcctctcgctggcatgaaaaagtatgctgatgagaagtcagaaagagcttcatcctctgagaaaaatgagagccattctgccactaaatcagctttaattcagaaactgatgcaagatattcagcaccaagacaactatgaagccatatgggaaaaaatagagtattttacgtggcttaccctacttaagtcccggaagggaggattttttcagatgaagaaactaaggcagtatgtgattaggaaacttgctcaagtcctcacagctactcacaagaaggggaaaatggagggcagccacctttcttcttatggatacgacttagaagttacacatgccacttttgctcgcatcccactggcccactttgtcacatag

SEQ ID NO: 144492 - DNA, 702 bp, Homo sapiens
atgattgatgaagcggtgcagacggcgaaacaatctgatgtggtggtggctgtagtcggtgaagcacaggggatggcgcacgaagcctccagccggaccgatatcactattccgcaaagccaacgtgacttgattgcggcgctgaaagccaccggtaaaccgctggtgctggtgctgatgaacgggcgtccgctggcgctggtgaaagaagatcagcaggctgatgcgattctggaaacctggtttgcggggactgaaggcggtaatgcaattgccgatgtattgtttggcgattacaacccgtccggcaagctgccaatgtccttcccgcgttctgtcgggcagatcccggtgtactacagccatctgaataccggtcgcccgtataatgccgacaagccgaacaaatacacttcgcgttattttgatgaagctaacggggcgttgtatccgttcggctatgggctgagctacaccactttcaccgtctctgatgtgaaactttctgcgccgaccatgaagcgtgacggcaaagtgactgccagcgtgcaggtgacgaacaccggtaagcgcgagggtgccacggtagtgcagatgtacttgcaggatgtgacggcttccatgagtcgccctgtgaaacagctgaaaggctttgagaaaatcagaataatgacctggcgtattcgtaaccgggttgggtaa

SEQ ID NO: 144493 - DNA, 936 bp, Homo sapiens
atggagaatggcagctctaaaaggtgccgcagggacccagccacagacagaatgtgctgcaaaggtaccagtgactgtcactctagaggatccccgggattatggtgcgcagcatctcccgcgaaggggcgattggatgtgctgccggttggcaacgtacgcatggctgcccgccagctgcagccggtgcgcatcaccacccgtgaagagtgcaaaattccaggcctgcttgacggcgaccggcaggggaatgacgtcagcgccatgcgcgtggacattggtgcgcgctcctatgacgaagtgatgcaggcgggaattcgtcccggcgatcgcgtcacgtttgataccacttttcaggttctccctcaccagcgagtgatggggaaagcctttgatgaccgcctcggttgctatctgctggtgacgttactgcgcgaactgcacgacgccgaactacctgcggaagtgtggctggtggcaagttccagcgaagaggtgggattacgcggcgggcaaactgccacccgcgcggtgtcgccggacgtcgccattgtgcttgataccgcctgctgggcgaaaaactttgattatggcgcggctaaccatcgccagattggtaacgggccgatgctggtgttaagcgacaagtcgctgattgcgccgccaaaacttaccgcctgggtcgaaaccgtggcggcagaaattggcgtgccgttgcaggcagatatgttcagcaacggcggcacggacggcggggcggtgcacttaaccggcaccggcgtgcccacagtggtgatggggccagcaacccgccatggacattgcgccgcatcgattgccgattgccgcgacattttgcagatgcagcaacttttatctgcccttattcaacgtcttacgcgtgagacggttgttcaactgacggatttcagatga

SEQ ID NO: 144494 - DNA, 1494 bp, Homo sapiens
atggcacttaccgtgcagaaagtgtacattctctacctctatggtgcattaccaatgctagctctttcactgagtcttaagagccagcagaacgaccagcagcaaaccgcagaagacgcatcaaacgacagccacaacgacagcgactactggaccttgatggtcttgggatcggtgctgatccgcctgaatgaatcgacaggtccgaaggtgatgatctgtgcgcatatggacgaagtgggatttatggtgcgcagcatctcccgcgaaggggcgattgatgtgctgccggttggcaacgtacgcatggctgcccgccagctgcagccggtgcgcatcaccacccgtgaagagtgcaaaattccaggcctgcttgacggcgaccggcaggggaatgacgtcagcgccatgcgcgtggacattggtgcgcgctcctatgacgaagtgatgcaggcgggaattcgtcccggcgatcgcgtcacgtttgataccacttttcaggttctccctcaccagcgagtgatggggaaagcctttgatgaccgcctcggttgctatctgctggtgacgttactgcgcgaactgcacgacgccgaactacctgcggaagtgtggctggtggcaagttccagcgaagaggtgggattacgcggcgggcaaactggcacccgcgcggtgtcgccggacgtcgccattgtgcttgataccgactgctgggcgaaaaactttgattatggcgcggctaaccatcgccagattggtaccgggccgatgctggtgttaagcgacaagtcgctgattgcgccggcaaaacttaccgcctgggtcgaaacgtggcggcaaaattggcgtgccgttgcaggcagatatgttcagcaacggcggacggacggcgggcggtgccttaacggcacgggacgagagacacgacagcagcgacagcaggcagagacccgagacgcgacacacaagccgacggagccagtatcgaggagacaacacacagaacccaagcagagcgccgggagctcagaacgacgaaccgccgggacgcgaatcacctgcgcaccccttatgttcaagtggccacaagctgtacatttcttggtccaggcaggtatcacactgatactccctggccctcaaactcccaagcaacgtgtgggatacaccaggttgttgcccaccaaacgccccagcagtcaagactacccaagaaacacactgggcagacacaccaacgatgacaacatgacttacaccacgcactgtagtagcaaccacccgagcccaccgcgcccaacacggagaagggaaaacagcgaaacgaacgacaacacaagcagcacggcaagataccggaggcaagacaagaagaggagcagagaagcgagagaggagaaagaaaacagagggagggaggacgaacagacgccgacggaagaccgatacgggagcgaacaagagcgcgaagccatgctggtagtcaagtaa

SEQ ID NO: 144495 - DNA, 921 bp, Homo sapiens
atgctcgacgactacggcggtagcctgagcgaactggcacgggagcaactgcccgctgcggaacaggcggcgctggcgcagcttgctgcgcgttcgcttgcgccagtaccggatgacacaggaggagcagggatgagcaacgacacgccatttgatgcgttgtggcaacgaatgctggcgcgcggctggacgccagtcagtgaatcccgtcttgacgactggcttacgcaagcgccagacggcgtggtgttattaagcagtgacccgaaacgcacgccagaggtcagcgataatccggtaatgattggcgaattactgcgcgagtttcccgactatacatggcaggtggcgattgctgaccttgagcagagcggacgcatcggcgatcgctttggcgtctttcgctttcctgccactttagtgtttaccggcggaaactatcgcggcgtgctgaatggtattcacccgttggcggaactgataaacctgatgcgctggcttgtcgaaccgcagcaggagcttcatcaaccgctaaccacggtacagaacgccaacgactgttgctgcgacggcgcatgttccagcacgccaactctctctgaaaacgtctccggcacccgctatagctggaaagtcagcggcatggactgcgccgcctgtgcgcgcaaggtagaaaatgccgtgcgccagcttgcaggcgtgaatcaggtgcaggtgttgttcgccaccgaaaaactggtggtcgatgccgacaatgacattcgtgcacaagttgaatctgcgctgcaaaaagcaggctattccctgcgcgatgaacaggccgccgaagaaccgcaagcatcacgcctgaaagagaatctgccgctgattacgctaatcgattcttcttatttcccacatggcacagagcttgccttctag

SEQ ID NO: 144496 - DNA, 3342 bp, Homo sapiens; identical to SEQ ID NO: 140052

SEQ ID NO: 144497 - DNA, 1147 bp, Homo sapiens; identical to SEQ ID NO: 135720

SEQ ID NO: 144498 - DNA, 3711 bp, Homo sapiens
atgcctgcagcaggagcacggatcacccgtcggtgggtaccgactggggagttgctgcccccgctgcctttggcagaggttaagcgcttgctttgcgcgcacgttcgggaactgcatgacttttatggtccggcaaaagggtaccgaattgcacgtaaacacgtttcctggtatctccaggaacacgctccaaatgaccagtttcggcgcacattcaacgccattgaggatgccagcgaacagctggaggcgttggaggcatacttcgaaaattttgcacacagtgtggcctataccaattcggttgaaaatgcactggggattgaggtgccgcaacgagcacatactattcgctcgattctgctggaagtcgaacggctacacagtcatttgcttaaccttggcctctcctgccatttcgttggttttgataccggctttatgcaatttttccgcgtgcgggaaaagtcgatgacgatggcggaattgctgatcgggtcgcgtaaaacctacggtctgaatctgattggtggtgttcgccgcgatattctcaaagagcaacgtctgcaaacgctgaaactggtgcgcgagatgcgcgccgacgttgccacccatccgagcgatatggcggtcgcaatgcggttgctggatgcggtggtggaaaccatcacgccggagggaaagactcgcagtatcacactggctgatttttatcaccctccgggaaaaacgccgcacattgaaaccgcaacctgctccagcgttgacaatttcagaatgcggcttaacgaagccgtcgccaagcggtttcatttgctcgcctatttcaggatagaaatggccaaggagaataccaatggctatcgctgtcaggacctgaaagtaaaggcttttaaacagagagtaattccgattaacgcttgcaccctccgtattaccgcggctgcatggctgtcgtcagctcgtgttgtgaaatgttgggttaagtcccgcaacgagcgcaacccttatcctttgttgccagcggtccggccgggaactcaaaggagactgccagtgataaactggaggaaggcgatacgccaaccaccggtatctaccgtgaaaaaggggacaccgttgccacacagtgatgaacttgatgccggtaatgtgctggcggttgaaaatctgaatattgcctttatgcaggaccagcagaaaatagctgcggtccgcaatctctcttttagtctgcaacgcggtgagaacgctggcaattgttggcgaatccggctccgagggtgggcaaacacccggagggggacctatacaatcattccccggggtgttttccccccgggaaaagctccccggggggccccccccgggggtacgaaccttgagcggaaaccgaaaaaccagattgaggataccatgagacgatttctgacgacgctgatgatactcctggtcgtgctggtggccgggttatctgcgttagtgttgctggtgaatccgaatgatttccgcgactatatggtcaagcaagttgctgcacgtagcggttatcaattgcagctcgacgggccactgcgttggcacgtctggccgcagcttagtatcctctccgggcgaatgtctctcaccgcccagggcgcaagccagccactggttcgcgccgacaacatgcgtctggacgtggcgcttttaccactactgagtcatcaactgagcgttaagcaggtgatgctaaaaggggcagtgatccaactgacgccgcagacggaagcggtgcgcagtgaagacgctccggttgcaccgcgcgacaataccttgccggatctgtcagacgatcgcggatggtcgtttgatatatccagtcttaaggtggcggacagcgtgctggtgttccagcatgaagatgacgagcaggtgacaatccgcaatattcgcctgcaaatggaacaagatccccaacatcgtggttcatttgagttctccgggcgggttaatcgcgatcagcgcgatctcacgatatcccttaacggtacggtagatgcttctgattatccgcatgatttaacggcggctattgaacaaattaactggcagttgcagggtgccgatttaccaaaacaaggtattcaggggcaggggagtttccaggcccagtggcaggagtcacataaacgcctttcatttaaccaaattagtttgaccgccaatgatagtacgctaagcgggcaagcacaggttacgctgacagagaaaccggaatggcagctgaggctgcaattcccgcaactgaatcttgacaacctcatcccgcttaatgaaaccgcgaatggtgaaaacggtgccgcgcagcaggggcagagccaatcaacgttgccgcgcccggtcatttcttcgcgtattgatgaaccggcctatcagggactgcaaggctttacggctgatattttgttgcaggccagtaacgtgcgctggcgctggaatgaattttacagatgtgccacgcaaatgaccaacagtcggggtccggctaagccgcccctgtggaccgtgtctcgttttgtcgttacgcggtatcctgttgttccagaaccgctatttcgccagtcagatgacgctcgcgttcttctggcctctaccactggtgctgctggttctggttgcgctgttactggcgattatctggacgcgcctggaagagtaccgttggcctatctgcacgtttatcggcatgacgctggtgatggtgtggctggcagcacgccaactctctctgaaaacgtctccggcacccgctatagctggaaagtcagcggcatggactgcgccgcctgtgcgcgcaaggtagaaaatgccgtgcgccagcttgcaggcgtgaatcaggtgcaggtgttgttcgccaccgaaaaactggtggtcgatgccgacaatgacattcgtgcacaagttgaatctgcgctgcaaaaagcaggctattccctgcgcgatgaacaggccgccgaagaaccgcaaggcattcacgcctgaaagagaatctgccgctgattacgctaatcgtgatgatggcaatcagctggggtctggagcagttcaatcatccgttcgggcaactggcgtttatcgcgaccacgctggttgggctgtacccgattgctcgatcaggcattacggttgatcaaatccggcagctacttcgccattgaaaccttaatgagcgtagccgctattggtgcactgtttattggcgcaacggctgaagctgcgatggtgttgctgctgtttttgattggtgaacgactggaaggctgggccgccagccgcgcgcgtcagggcgttagcgcgttaatggcgctgaaaccagaaaccgccacgcgcctgcgtaagggtgagcgggaagagtatcaagccaccggcggtacgctgagctcgattgatcatgcctgtcattcacatgcccaagtcttggggacccgtagcggtcgatatcatccgtatcttgatgagtatctgatacagcgttggagggtaattgaggatattgtcgctatccgtcttctcctgcctgctgtgatggcttggtggtgggaatgtagtggacgcgggatgaacaatggtgtcaacaacaagcacgttacaataattgaccactcgctgttaattgatgatgacatctatgttctgtatacgagaccaatgcgcgattctagtcaatag

SEQ ID NO: 144499 - DNA, 855 bp, Homo sapiens
ttcgttatcggttgatgcccagcgtcaaccattttcccgcctccggcgcggtaaaagccggtaaagagtccacccccgtcaatatgagtccccagcgcctgtttaatgattatatgcccccgtacaaagcggggctggacgcaggcagcggcgcggtgatggtggcgctgaactcgctgaacggcacgccagccacctccgattcctggctgctgaaagatgttctgcgcgaccagtggggctttaaaggcatcaccgtttccgatcacggtgcaatcaaagagctgattaaacatggcacggcggcagacccggaagatgcggtgcgcgtggcgctgaaatccggaatctacatgagcatgagcgacgagtactactcgaagtatctgcctgggttgattaaatccggcaaagtgacgatggcagagctggacgatgctgcccgccatgtactgaacgttaaatatgatatggggttgtttaacgacccatgcagccatttggggccgaaagagtctgacccggtggataccaatgccgaaagccgcctgctccgtaaagaagcgcgtgaagtggcgcgcgaaagcttggtgttgatgaaaaaccgtctcgaaacgttaccgctgaaacacccgccccaccattgcggtggttgggccactggcggacagtaaacgtgacgtgatgggcagctggtccgcagccggtgttgccgatcaatccgtgaccgttctgaccgggattaaaaatgccgtcggtgaaaacggtaaagtgctgtatgccaaaggggcgaacgtttccagtgacaaaggcattatcgatttcctgaatcagtatgaagaagcggtcaaagtc

SEQ ID NO: 144500 - DNA, 2127 bp, Homo sapiens; identical to SEQ ID NO: 132352

SEQ ID NO: 144501 - DNA, 3144 bp, Homo sapiens; identical to SEQ ID NO: 138819

SEQ ID NO: 144502 - DNA, 438 bp, Homo sapiens
atgattacgaattcgagctcggtacccacgagtgactggtttgaacgtgcaagcccacgtattatcctcgctgcacaacagctctgtaatgcgctttcacaggtgctcaagtggggattgaacaatgctcgtctattggctggatatagtcggcacagcggtatttgccatctccggcgttttgttagccggaaaattgcgtatggacccttttggtgttctggtactgggcgtggtaaccgcagtaggcggcgggacaattcgcgacatggcgctggatcacggcccggattttgggtgaaagatcccaccgatctggtcgttgcaatggtcaccagcatgctgaccatcgtgctggtttttgatttcttaggaaaactgaacggggatcttctagagtccccaaagcaggcattcaagcctgagtggctgtgctag

SEQ ID NO: 144503 - DNA, 3042 bp, Homo sapiens
atgaaaccgttacattatacagcttcagcactggcgctcggactggcgttaatggggaatgcacagccagtgacgaccattccgttctggcattctatggaaggggaactgggtaaagaggtggattctctggcccaacgtttttacgccgaaaacccggattacaaaattgtaccgacctataaaggcaactacgaacagaatttaagcgcggggattgccgcatttcgtaccggcaacgcgccggctattttgcaggtttatgaagttggcaccgccaccatgatggcgtcgaaagccattaaaccggtgtatgacgtgtttaaagaggcagggattcagttcgatgagtcgcagtttgtgccgacggtttcaggttactactccgacagcaaaacgggccacttactctcccagccattcaacagctcgacccccgttctctattacaacaaagacgccttcaagaaagcaggattagacccggaacagccgccgaaaacctggcaggatctggcggactatgccgcgaaactgaaagcctccggcatgaagtgcggctacgccagcggctggcagggctggatccaactggaaaactttagcgcctggaacggtctgccgtttgccagcaaaaacaacggctttgacggcacggacgcggtgctggagttcaataagccggagcaggtgaaacacatcgccatgctcgaggagatgaacaagaagggcgacttcagctacgtcgaggatgcgcttgtggaaaaagccaaacaagttacctggcggctgttggctgccggtgtctgtctgctgacggtcagcagcgtggcgcgagccgactcactggatgagcagcgtagtcgttacgcgcaaatcaagcaggcctgggataatcgacaaatggatgtggtcgaacaaatgatgcctggactgaaggattatccgctttatccctacctggaataccgccagatcaccgatgatctgatgaatcaaccggcggtgacggtcactaactttgttcgcgctaaccccacgcttcctcccgctcgcacgctgcaatctcgtttcgtcaatgaactggcgcggcgtgaagactggcgtggcttgttagcctttagcccggaaaagcccggaactaccgaagcgcaatgtaattactactatgcgaaatggaacaccgggcagagtgaagaagcctggcaaggggcgaaagagctgtggctaaccggcaagagccagcctaacgcctgtgacaagttatttagcgtctggcgtgcgtcaggtaaacaagatccgctggcgtatttagagcgtatccgtctggcgatgaaagcgggtaacacaggcctggtaacagtgctggcagggcagatgcctgccgattaccagactatcgcctcggcaatcatttcactggcgaacaaccctaatacggtactgaccttcgcgcgtacaactggcgcgaacgattttacccgtcaaatggcggcggtggcgtttgccagtgtggcgcggcaggatgctgagaatgcacggctgatgatcccatcgcttgcccaggcgcagcagcttaatgaagatcagattcaggagctgcgcgatatcgtcgcctggcgtctgatgggcaacgatgtcaccgacgagcaggcgaactggcgcgatgacgccattatgcgctcgcaatctacttcgcttattgaacgccgtgtatatcagcacaacattacgtttgcgctggatgactttggtacgggttatgcgacctatcgttacttgcaggcgttcccggtcgattttattaagaatcgatttagcgcaacgctcctggccacgctgattgccgccagtgtgaatgcagcgacggtcgatctgcgtatcatggaaaccactgatctgcatagcaacatgatggatttcgattattacaaagacaccgccacggaaaaattcggactggtacgtacggcaagcctgattaacgatgcccgcaatgaagtgaaaaacagcgtactggttgataacggcgatttgattcaggggagtccgctggccgattacatgtcggcgaaaggattaaaagcaggtgatattcacccggtctataaggcattaaatacgctggactataccgtcggaacgcttggcaaccacgagtttaactacggtctggattacctgaaaaatgcgctggcaggagcgaaattcccttatgtaaatgccaacgtcattgacgccagaaccaaacagccaatgtttacaccgtatttaattaaagacaccgaagtggtcgataaagacggaaaaaaacagacgctgaagattggctatattggcgtcgtgccaccacaaatcatgggctgggataaagctaatttatccgggaaagtgacggtgaatgatattaccgaaaccgtgcgcaaatacgtgcctgaaatgcgcgagaaaggtgccgatgttgttgtcgttctggcacattccgggctatctgccgatccgtataaagtgatggcggaaaactcagtttattacctcagtgaaattccgggcgttaacgccattatgtttggccatgctcacgccgttttcccaggtaaagattttgctgatatcgaaggggctgatatcgccaaaggcacgctgaatggtgttccggcggtcatgcccggcatgtggggcgatcatcttggtgtggtcgacttaccactcagttatgcaccgcggtcaatggccgctacccaggctaaagcgcgagcccgaacgctctccgccttcgctctctccactccctcgcggcgcaaaccacccgcggcttacacctctccacccatcccgtcgcccacacaaatgccccaacacacccgacactccccacacttcaaccaacacccacacaacaccacccacacaaccaccacccccatcactctttctccatctaagcaccgtcaccacaacactaaccaccccccacacctgcaccacaccacctccatgaagcaaccctcccttggtagacttaccaggactccttactga

SEQ ID NO: 144504 - DNA, 1764 bp, Homo sapiens
atgttgccgctgggcgagtgtaaggtttacagcgatttagacctctatctcggtgttcaggcgatcaactggacagagatgtttaatcctggcgcgaccttcgctgtccacttcagtggtttgaatgacaccatccgcaacagtcagtacggcgcgatgaaagtgaaagacgcgatcgtcgatgctttcacgcggaaaaatctgccgcgtccaaatgttgatcgcgatgcgccggatatccgcgttaacgtctggctgcataaagaaaccgccagtatcgctcttgatctgagtggtgatggtttacatctgcgtggctatcgcgatcgtgctggtattgcgccgatcaaagaaaccctggcagccgctattgtgatgcgatccggctggcagccaggaacaccgctgctcgatccgatgtgtggttccggtacgttgctgattgaagcagcgatgctggcgaccgatcgcgcaccaggcttgcaccgtgggcgttggggctttagcggctgggcgcagcatgatgaagctatctggcaggaagtgaaagcggaagcgcaaactcgcgcccgtaaaggcctggctgagtatagctctcatttttacggttcggacagcgacgcacgggtgattcaacgtgcacgcactaacgcccgtcttgcggggattggtgaactgatcacctttgaggtgaaagatgtcgcgcaactgaccaatccgctgccgaaagggccgtacggcacagtgttgagcaacccgccatacggggaacgtctggacagcgaaccggcgctgattgcgctgcatagcctgctgggtcggatcatgaaaaaccagtttggtggctggaatctctctttgtttagtgcctcgccggatctgctaagctgcttgcagctgcgtgcagacaaacagtacaaggcgaaaaacggcccgctggactgcgtacagaaaaattaccacgttgccgaaagcactccagacagcaaaccggcgatggtagcggaagactacaccaaccgcctgcgtaagaacctcaaaaaattcgagaagtgggctcgccagaagggattgattgggagaataagagggaaggggacgcggcccaggcgacccggaatagaaacccgcttaagaaacatccggcacttttctatttctgcccttcagaaatccttaaagtggaccgatgctcagacctgcagaccatgcaagcatccgtcccggctggtgcgcagtcccgcgcccggcggtcaggcgcaggcaaaatgcgcgatgccatccaaccagtgtaccggtgcacgattcggtaaactccagtgccggattccacatcaacgatccatagccgaagatccacaccggtccctcatcaggtcgacaagccagcgtcgccgccagcgaagccgcccgttgttctgctgaccataagagtgattcttcaatggcaccaaatgccgttttacaatcggcattcatcaagaaatcacgcgttatcaccttacacttccgccactgcatacttccctgcgacaactttttggtgtcttccggacatttttactgctcattttgaaaccactaacgggacaatatgcaatccacggaccacttgcaaggcaacaccgcacgaatagctttaactaagcgaccggttttacgattttttatgccatttatcatcatcccctttggcatattcatgcttcacagcagcccaggccactttatgcgcggtttcttcgcgactggcgtcatcacgcc

SEQ ID NO: 144505 - DNA, 1954 bp, Homo sapiens
gctcccgtttcacgcaagaaaaacatcagcaaacccactccacttttcaaaacttgttgccaccaaaggcggcaggcattgcgatggcgctaaatgtactgggtaaacaattcgataaactgcttaatgttacgctgtgttatccggacaataaccgtcagccgttcttcgatatgttaagcggtaaactgacgcggattgtcgtacatgtggatttacagcctattgccgatgagttacatggcgactacatcaatgacaaaagctttaagcgccattttcagcaatggctgaactcattgtggcaggaaaaagaccggcttctgacgtctctcatgtcatcacagcgtcagaataacagtaaaaattctgactatacctggaggttttcatggcgtgtcgctgccaacaaacgttcggtaatgacgctgttttccggtcctactgacatctatagccatcaggtccgcattgtgctggctgagaaaggtgtaagtttcgagatcgaacacgtggaaaaggacaatccgcctcaggatctgattgacctcaacccgaatcagagcgttccgaccctggtggatcgtgagctgaccctgtgggaatctcgcatcattatggaatatctggatgagcgtttcccgcatccgccactgatgcctgtttacccggtagctcgcggtgaaagccgtctgtacatgcatcgcatcgaaaaagactggtacacgctgatgaacaccatcatcaacggttcagcttctgaagcagatgccgcacgtaagcaactgcgcgaagaactgctggcgattgcgccggtcttcggtcagaagccgtacttcctgagcgatgagttcagcctggtcgattgctatcttgctccgctgctgtggcgtctgccgcaactgggcatcgagttcagcggcccgggtgcgaaaagagcttgaaaggggctatattgacccgcctaacaccacgtcgtccctatctgctgcgtgcattctatgagtggttgctggataaccagctcacgccgcacctggtggtggatgtgacgctccctggcgtgcaggttcctatggaatatgcgcgtgacgggcaaatcgtactcaacattgcgccgcgtgctgtcggcaatctggaactggcgaatgatgaggtgcgctttaacgcgcgctttggtggcattccgcgtcaggtttctgtgccgctggctgccgtgctggctatctacgcccagtcgacctgcaggcatgcaagcttggcactggccgtcgttttacaacgtcgtgactgggaaaaccctggcgttacccaacttaatcgccttgcagcacatccccctttcgccagctggcgtaatagcgaagaggcccgcaccgatcgcccttcccaacagttgcgcagcctgaatggcgaatggcgcctgatgcgacaatacaaatcagcgacactgaatacggggcaacctcatgtccgagctcgcgagctcgtcgacagcgacacacttgcatcggatgcagcccggttaacgtgccggcacggcctgggtaaccagattattacccgctgtatcaacaccgccaaattgcctaaatcagttgttgctcttttttctcaccccggtgaactatctgcccggtcaggtgatgcacttcaaaaagcctttacagataaagaggaattacttaagcagcaggcatctaaccttcatgagcagaaaaaagctggggtgatatttgaagctgaagaagttatcactcttttaacttctgtgcttaaaacgtcatctgcatcaagaactagtttaagctcacgacatcagtttgctcctggagcgacagtattgtataagggcgataaaatggtgcttaacctggacaggtctcgtgttccaactgagtgtatagagaaaattgaggccattcttaaggaacttgaaaagccagcaccctga

SEQ ID NO: 144506 - DNA, 1419 bp, Homo sapiens
atgccttattcaggggccgaaaaatggccgcgcgtcccaaaatttaatgcacgggattccaaaataatcccgcgcgtagcaagtgggccaattctgttgaagaacaaatcaaaaccagaccgggctcacctgccggggtatgcttccaccacccaatggtggattttgagcgttcagccacgattcgccggaaaccttggggatcatctgaaagagcgattcccgttggctaacaacgatctttcaaaacgctacacaagcggtaagaagatcccgcaaagctatgcgatggcgattgctcgtcagaagagcgcttggaatccgaaagtgaaatcaccggtaggggccagcggcttgatgcagattatgcctggtacagcgacccatacggtgaagatgttctctattcccggttatagcagtcctgggcaattgctggatccggaaacgaatatcaacattggcaccagttacctgcaatatgtttatcagcagtttggcaataatcgtattttctcctcagcagcttataacgccggaccagggcgggtgcgaacctggcttggcaacagcgccgggcgtatcgacgcagtggcatttgtcgagagtattccattctccgagacgcgcggttatgtgaagaacgtgctggcttatgacgcttactaccgctatttcatgggggataaaccgacgttgatgagcgccacggaatggggacaggcgaagtccaacgtggctcaattcgtttataccatgcatcgtgtcggcaaagttgttccgccgaaacgtcatattttgaaaaacatctctctgagtttcttccctggggcaaaaattggtgtcctgggtctgaatggcgcgggtaagtccaccctgctgcgcattatggcgggcattgataaagacatcgaaggtgaagcgcgtccgcagccagacatcaagattggttatctgccgcaggaaccgcagctgaacccggaacacaccgtgcgtgagtccattgaagaagcggtttcagaagtggttaacgccctgaaacgcctggatgaagtgtatgcgctgtacgccgatccggatgccgattttgacaagctggccgctgaacaaggccgtctggaagagatcattcaggctcacgacggtcataatctgaacgtacagctggagcgtgcggcggatgcgctacgtctgccggactgggacgcgaaaatcgctaacctctccggtggtgaacgtcgtcgcgtagcgttgtgccgcctgctgctggaaaaaccagacatgctgctgctcgacgaaccgaccaaccacctggatgccgaatccgtggcctggctggaacgcttcctgcacgacttcgaaggcaccgttgtggcgattacccacgggggatcctctagagtcgactgcagacagtag

SEQ ID NO: 144507 - DNA, 1630 bp, Homo sapiens
ggtgtacatcttcacctgacccaccctctggccttcctccaggttttgctaagctaacctcccttatcgtgacacttgttgaggtgggagtttcccctgaacctgatgaaggctggctgtatctggcagtggtcattgacctgtggtcacgtgccgttattggctggtcaatgtcgccacgcatgacggcgcaactggcctgcgatgccctgcagatggcgctgtggcggcgtaagaagccccggaacgttatcgttcacacggaccgtggaggccagttcggtgaccgctggaagggctggctaacgcgctcaatattccgctggatcagctttcagcccgcattagcgccaacccgaaaggcggctttatgttatctggcgcgtgaggtgaaccctgacatggcggactacatcaaaaaactgaaactgccggggattcatgtgcgtgaagaatctcgccgttattatccatccggcgaagtgactgctcacctcattggctttactaacgtcgatagtcaagggattgagggcgttgagaagagtttcgataaatggcttaccgggcagccgggtgagcgcattgtgcgtaaagaccgctatggtcgcgtaattgaagatatttcttctactgacagccaggctgcgcacaacctggcgctgagtattgatgaacgcctgcaggcgctggtttatcgcgaactgaacaatgcggtggcctttaacaaggctgaatctggtagcgccgtgctggtggatgtcaacaccggtgaagtgctggcgatggctaacagcccgtcatacaaccctaacaatctgagcggcacgccgaaagaggcgatgcgtaaccgtaccatcaccgacgtgtttgaacctggctcaacggttaaaccgatggtggtgatgaccgcgttgcaacgtggcgtggtgcgggaaaactcggtactcaataccattccttatcgaattaacggccacgaaatcaaagacgtggcacgcatcacgaccgaggaagactttaatcatgcgagtgcagctcgattcgtatgcgctgccgccgaaagagcgttgcaaaaccaccattaacctggtgccggaaaacgaagtgctgaacgtgctggaaggcgaaaatgctgaaaccaacgcgctgcgcgcaaaacgtagttgcccgaaatgcggcacggcgatggacagatatctcatcgatccgaaacgtatgttgcgtggatgaggcaataacccaacctgcgacggttaccagatcgaacagggcgaattccgcattaaaggttatgacggcccgatcgttgagtgtgaaaaatgtggctctgaaatgcacctgaaaatggggcgtttcggtaaatacatggcctgcaccaacgaagagtgtaaaaacacacgtaagattttacgtaacggcgaagtggcaccaccgaaagaagatccggtgccattacctgagctgccgtgcgaaaaatcagatgcttatttcgtgctgcgtgacggtgctgccgttgccgcaaggttcaacgatgatcgccaccgacgtggcctcgccgttctttacgccgatcaagctgacctttatggtgtcgctgattctgtcagcgccggtgattctctatcag

SEQ ID NO: 144508 - DNA, 1794 bp, Homo sapiens
atgcgccgcaacgcttgccagtaccgcactccggcggttgtggccagccggcagaagcgctggcacggcgatctggggatgatcggaagccgcgatgtgatgctgtttatctcggactccgttggcgcgaaggaactggatctgattattccgcgtctggaagataaatctatcgcgctgctggcgatgaccggcaaaccgacgtcaccgctgggcctggcggcaaaagcggtgctggatatctccgtagaacgcgaagcctgcccgatgcaccttgcgccgacctccagcaccgtcaataccctgatgatgggtgacgcgctggcgatggcggtcatgcaggcgcgcggatttaatgaagaagattttgcccgctcccacccagccggggcactgggcgctcgcttgctgaataaagtgcatcatctgatgcgccgtgacgatgccatcccacaggtggcgttaaccgccagcgtgatggatgcgatgctggaactcagccgcaccggtctggggctggtggcggtatgtgacgctcaacaacaggtacaaggcgtctttaccgacggcgatttacgtcgctggctggttggcggcggcgcactcaccacgccagtcaatgaagcgatgacggtcggcggcaccacgttgcaatcgcaaagtcgcgccatcgacgccaaagagatcctgatgaagcgcaaaatcactgccgcaccggtggtggatgaaaacgggaaactcaccggcgcaataaaactgcaggatttctatcaagggcggggattatttaatccttcaatccccagagtttcgacagccgatgcaggtttggctaacagggcacgccgcaattgggttggaagttcctggaagcaagttggccagattatactccagggggggccacaaaacgccgagaagtctgggcagcgctacacggtgtcacatgaccgacaccgggacgcagagcgccagcgcgtgaagtcgggactacctcggtacgccgaatgcagcacgtatccgtcatgcccagtggcgctggatctggcgttcgcttcccacggcattcatatgcacgccccgggagaagctttacggatgctcgttacggcgatggataaagcggcggatgcacgcaccaaactggcgcgcctgctggcgaccaaaggcatcacccatgaaatccagatcccggatatctcaaccaaagagaaagcccagcagcccattggcctgaacatggaacaaatcaagcccgagaagcaggacttcatcaaaccggtgatcccgcaggccggaaaacacaatggagtgaatatgagcgtattacgttcgttattaactgccggggtgctggcgtcgggcctgttgtggagcctgaacggaattaccgctacccctgcggcgcaggcatctgatgatcgctacgaagttacccagcagcgtaacccggatgccgcctgtctggactgtcataaaccagataccgaagctgtccctcctgttcagctactgacggggtggtgcgtaacggcaaaagcaccgccggacatcagcgctatctctgctctcactgccgtaaaacatggcaactgcagttcacttacaccgcttctcaacccgccgggcagtgacgtcatcgtctgcgcggaactggacgaacagtggggctatgtcggggctaaatcgcgccagcgctggctgttttacgcgtatgcacagtctccgcgcacgacgcgttgttgcgcacgtattcggctgcacgcactatggcgacgctggggcgtcttatga

SEQ ID NO: 144509 - DNA, 3255 bp, Homo sapiens; identical to SEQ ID NO: 129878

SEQ ID NO: 144510 - DNA, 945 bp, Homo sapiens
atggtggcgctggcggcacgcgagctgtgggccggtatgacgccgccgctgctgtcatcgtttgagattgatgctttagaagctgcacaacaggcggcaccggaactgccgcgcggtttgttgctggatgagtggcgcgacgactggcgcgaactgaccgcgcggctgggctgcgtctctattcatctcaatcataagttactcaataaagcgcgagtgatgcagttgaaagacgccggactgcggattctggtttataccgtcaataaaccccagcgcgcagcagagttgctgcgctggggtgtggattgcatctgtaccgatgcgattgacgtgattgcatatgctgctgattcaacgaactatccggattacggttgctgtttaacatcccgccgttggtgttgggcagcatttgctgccgggcgggatttcgctcccccggctgtgactgcaacacccgctgagaattattgtttatctggttttctaaatgctgctgttgcaactgagtttgcgttttcagttgctgattcagcatccctttttgctggatttgctgagtctgcatctgggtttgcatccgctgctggctgggtatctgataccccggctggaagttgttttagcgccgccgccgcgcctcctgcgccgcccgtctcgtatggtgtggaggaagatgtcttccacccggtacgcgcgaaacagggaatggtagcgtctgtggacgccactgccactcaggtgggggtggatattctcaaggagggcgggaatgccgttgatgccgccgtggcggtgggctacgcgctggcggtaacgcatccgcaggcagggaatctgggcggtggtggttttatgttaatccgctcgaaaaatggcataccacggctatcgatttccgcgaaatggaacctgcaagcgacccggatatgtcctcgatga

SEQ ID NO: 144511 - DNA, 7437 bp, Homo sapiens
atgaacatcgacgaaacgctgattgaagcggcgatcaccgacaaaacgcgcgttatcgtgccggtccattacgcgggtgtggcctgcgaaatggacaccattatggcgttggcgaaaaagcataatttgtttgtggtagaagatgccgctcaggtcgcagacatgagggcagtgccatgcttgcatgccctgacaggggggggcagggggcagcagcccactgatgtacacacagcagagctatattattctctcgccgaaggagagcgatcgaaacaggcagcagagacagcgaccgtggggcgggaacgttggaacaccccgttgagtaaaagccacacccacataccaatgatatggtacaccgtgaggcgccggcaaaagttgtcaggggcacagagtctcacagaaaggtacgataaaaccatcgcgtgccagtttaaacgcgggctgcacgactttgttcagcggcatggtgccgtatttatccagcgccagcgagaaccgctccgtacccgattccgcctgcggatgcgttaccgccagcgcgtagcccccgcacacgcggcatcaacggcattcaccgccctccttgagaatatccacccccacctgagtggcagtggcgtccacagacgctaccattccctgtttcgcgcgtaccggcgagtaaacttaaaggatatcttcagaggaggatacgcgatgaaacgacttctgattcttacggcactcctgccgtttgtcggctttgcacagcccattaatactctgaacaaccctaaccagccggggtatcagatacccagccagcagcggatgcaaacccagatgcagactcagcaaatccagcaaaaagggatgctgaatcagcaactgaaaacgcaaactcagttgcaacagcagcatttagaaaaccagataaacaataattctcagcgggtgttgcagtcacagccgggggagcgaaatcccgcccggcagcaaatgctgcccaacaccaacggcgggatgttaaacagcaaccgtaatccggatagttcgttgaatcagcagcatatgctgccggagaggagaaacggcgacatgctgaatcagcccagcacgccgcagcctgacattccgttgaaaactattgggcccaacaaaccgcgcggcagttccggtgccgcctgttgtgcagcttctaaagcatcaatctcaaacgatgacagcagcggcggcgtcataccggcccacagctcgcgtgccgccagcgccaccattttgcccgttaatggcccggtgccggtggtgggtttgatttcgatattcgccatcatcccgtgttcgcggcaacgttccgccacctgcgaaagcaacggtagcggctcacctttaaacattttgctgtaccaactgcccgcatccacgcgcagtaaatcctgccagttcagttcacccgcgacgccccagccgttgctccgtgccggtggctctatatgcgcagggcggcagggggatttacccccgttgaaggtaatgcccgtccctacaaagacttttggcgtccacatccgtgtttctccctactgcctgccctcaaacgatttgcgcttaggatgcccacgtcttcagccacgtgatgccttctgcgatcgtcttaaagttcatccgacccacgcggatgccgtgcgcagaagcttgattcagatatggatgttccgcacggcaggtcgaacaccaggtcgcccagacgttaagcagtactggtttgccctgagtcagcacatccgcctgataaaactgccccggattgtccatgattcgagacgaaacttcggcacaggcttgccaatgagcgccgattccagattggtcggatcatccccttcggcattacgcgccagctgccacagcagcgccgcggcaatcgccaggaagataatcaacggaattaacaatactttgcgcttcatacggcctccggcgcagttttttgcggactcacgcgcttacgatagcgaggatcaaacagacacagcagtccgcccaacgccatcatcagcccgcccgcccaaatccagcgaacaaatgctcttcaccgagggccgcgtacaggtcacgcgtgatgccgccgtcaattgccgcttcggtcatcatcgacccggcagtgttgtaataacgtttttccgcatacagcaccgtttccggcttgccatcgcgcgttacgccgatagtcgccacaccgccacgccagttcgggccagtcacctctttgacatcacggaagcgaccggtttcccgattgctaaagtggcggcgaaactggcggtgggttacaccctcgacgaactgatgaacgacatcactggcggacgtactccggcctccttcgagccgtccatcgactatgtggttactaaaattcctcgcttcaacttcgaaaaattcgccggtgctaacgaccgtctgaccactcagatgaaatcggttggcgaagtgatggcgattggtcgcacgcagcaggaatccctgcaaaaagcgctgcgcggcctggaagtcggtgcgactggattcgacccgaaagtgagcctggatgacccggaagcgttaaccaaaatccgtcgcgaactgaaagacgcaggcgcagatcgtatctggtacatcgccgatgcgttccgtgcgggcctgtctgtggacggcgtcttcaacctgaccaacattgaccgctggttcctggtacagattgaagagctggtgcgtctggaagagaaagtggcggaagtgggcatcactggcctgaacgctgacttcctgcgccagctgaaacgcaaaggctttgccgatgcgcgcttggcaaaactggcgggcgtacgcgaagcggaaatccagttcgccaccgacaccgcttacatgtactccacttatgaagaagagtgcgaagcgaatccgtctaccgaccgtgaaaaaatcatggtgcttggcggcggcccgaaccgtatcggtcagggtatcgaattcgactactgttgcgtacacgcctcgctggcgctgcgcgaagacggttacgaaaccattatggttaactgtaacccggaaaccgtctccaccgactacgacacttccgaccgcctctacttcgagccggtaactctggaagatgtgctggaaatcgtgcgtatcgagaagccgaaaggcgttatcgtccagtacggcgctgctggcgtaccggttatcggcaccagcccggatgctatcgaccgtgcagaagaccgtgaacgcttccagcatgcggttgagcgtctgaaactgacacaaccggcgaacgccaccgttaccgctattgaaatggcgcgtagagaagggcgaacgagattggctacccgctggtggtcacgtccgtcttacgtcctccgcggtcgggcgatggcaatcgtctatgacgaagctgacctgcgtcgctacttccagacggcggtcacggtgtatacgatgcgccgtgtgccgcacccgtcctcgatacgcggcgccgttaccatatgtcactcctcccttgtttctgagctccccttcgcctcatcgggcatattcttttcatcccagtttctaaagtgttctcgtgccgtccgggcccttgtccctgttgcgcacaccgccctttgcctggccagttgccacacggtccgccgtctgtatccttttacgtcgtttaaccgaaaacccctgtggagtcccagagtccagcaacatagacttgggggttataaacaccaaactgaagtgtttactgtaattgctcctattaaaactcggggtaccacatgtgacgtccagctgctagcgtcagagaggtggctcccgcggagaacgaccgtcgcgggaaacattggcaagcggttggacccgaaaacgcgcgcggccgtaacaaacgggaccaccagaatttccgcaggacgctggccacggagccgtaaccagggtggaagaaaggccctgcgccgggacacgcaaattccgggcacggctggggtatgctccggcgtcacgtatcccgaggaaaccgagtcggcaagggaacgctggcccagattcaccaatgggcctgacggcgaagtgatcgccattgatgtcaatgatgagcagttaaaactggcacccgaaatgggcgcagatttagcgattaactcacacaccgaagacgccgccaaaattgtgcagaaaacttacggcggtttgttccgcctcgaggtggtgtgtaccgccgttgtcggatatggcgcctgggtatttaggggcgccatcgccgcccccgcttgttatcacccgcccgtgctggtggcccggggacatgccggacgtaagctcactgctgagatggcacgaaattacgatctgattctggcaatggagtcggaacatattgctcaggttaccgcaattgctcccgaggtccgcgggaagacaatgctgtttgggcaatggctggaacagaaagagatcccggatccctatcgtaaaagtcaggacgcatttgaacatgtctacgccgtccactcccacagcttagcaggcgtcttggcattatcttcgcttttctcaagcccggcaggtcgtagtctaggccgtagcagccctaaagcagtatcagcagtcccgcccgacgtcccaccagtcccgttcgccagatggtcaccccgggggataaccatgtcggtggcgatgccaactgtggcatctggcttgacgacccatcggcaaggttatctctattcgcccattgatccgcaaacaaataaaccgtggcccgccatgccacagagttttcataatttatgtcaacgtgcggctacggcggcgggctatccagatttccagccagatgcttgtcttatcaaccgctacgctcctggcgcgaaactgtcgctgcatcaggataaagacgaaccggatctgcgcgcgccaattgtttctgtttctctgggcttacccgcgatttttcaatttggcggcctgaaacgaaatgatccgctcaaacgtttgttgttggaacatggcgatgtggtggtatggggcggtgaatcgcggctgttttatcacggtattcaaccgttgaaagcggggtttcatccactcaccatcgactgccgctacaacctgacattccgtcaggcaggcgcttatgacgatcgtatctggacccgcagcattgttgcctggcctggcgtgcgtcatctggacggtgatgatttctctccggttatcacccaggcgcaacagatgccaggcttcccgtacagcgaaattccgcaccttatcaccgtggattttgttcgccagacgctgcttggcgctgctaatacgctgattagatctgagaaactgggctgcggtgtcaacgatctgccgctgtcgctggtgctctcctggtttgaacagaaagcgatcgtcattctgctgacgctgctttctctgggcgtgaaaaatatcgtcaccggcccgactgcacctggtttcctgacaccagacctgctggcggtgctgaacgagaaattcggcctgcgttctatcaccactgttgaagaagacatgaagcaactgttgagcgcgagtttgtcgatgacgatgccaacgaatcaatgcccgtggcggatgcaggttcatcacattacgcaagaaacgccggatgtgtggacgatttccctgatttgccacgattactacccatatcgcgccgggcaatatgcactggtcagcgtgcgaaactcagcggaaacgctgcgtgcttacaccatttcctccacgccaggcgtgagtgaatatatcaccctgaccgtgcggcggattgatgacggtgtcggctcccagtggctgacgcgcgatgtaaaacgcggtgattatctctggctttcggacgcgatgggggaatttacctgcgacgataaagcagaagataaattcctgttgctggcggcaggctgcggcgtcacgccgattatgtcgatgcgtcgctggcttgcgaagaaccgtcgggatcctctagagtcacctacagcaggcactcccctcgcgcgcccgtgtgcgtcccaactgacggtgctgacgccgggaacacacttctgtgcggacctgagtagaaatatgaccaacagcaaaggccatcgtcagaacggtcagaccgaacgccaacgccacgccggcaaaaccgatgcctattccggaagcctgagtcatgacgtccccgtcaagccggtccaggagctctggtattccgcaaaagcagagtacctggcgggagcgagatatgccgccaacaatatcaatcatatacttgaagaagcgtcacaagcgactcaaacagcggttaacattgccgggaaggaatgcaacctcgaggagcaatatcagcttggcactgaagcagctctgaaacctcacctgcgcacaatcatcattctcaaacagggaatagtctggtgtacatccctgcctgggaatcgggtcctgttgtctcgtattcctgttttcccggacagtaatttactgttggctccagcaatcgacaccgttaatagattacctatcctgctctatcagaaccaatttgcagatacgcgcattttggttacgataagcgatcagcatattcgtggggcacttaatgtacccttgaaaggggtaaggtatgtattacgcgtggcggatgacattattggaccaacgggtgatgtgatgacgcttaatggacattatccctataccgagaagttcatggacgtcacatgtggtaccccaccttgtgttataactagtgcatttcgtagcattgaacctgaattaacagtttatacgtgcttaaaaaaaatagaagcatctttcgaattaatcgaagaaaatggagatcctaaaataacgtctgaaatacagttgttaaaggcaagtggaattctccaaagtttgtatagtgtaggatttgttggtattcgtgataaaaacacctcatcctattcattttgccatgacgggcgaactccagataaaggttttgaaagtaatgagaaattattaattcatccatgttactggcttggtttgaatctaaatcgtaatgcacttgctccagaggaagcagaggagataaatgacgaatatgatattaatattatttcagataattcagccattagaaataaaacaataggtcaaataactactcatctagatcagataccgataggaaatgaaggtgccactgaatttgaacaatggtgtttagacgcactaagaatagtatttgcatcccacctaacagacatcaagtcccatccaaatggtaacgcagttcagagacgagatattataggcaccaatggtggcaaatctgatttttggaaacgagtattggaggactataaaacagacaagttgtttttgatgctaaaaattttgaagaattag

SEQ ID NO: 144512 - DNA, 1122 bp, Homo sapiens
atggactacccaaccacacagattgtcgtcgcgaaggaacaacatcaatgtcggcggctaatccacatcggttattcagtcacctacaacctgtgcggggcggggttaattatcgcattactggtttacatcgccatgttcgtggaatggtgaaagacattggttctgaacccgacttccggccaatgagcttcagcaaactgttgtacgtgttacttggcagcgtggtgatgatcttcgtatgcgcatggctgatgcacaacgtagaagtcgccaatctggtgctgattgttctctccatcgtcgtcaccatcatcttctttcgtcaggcattcaagctggataaaaccgcggcgcaataaaatgtttgtcgcctttgtcctgatgctcgaagcggtggtgttttacattctctacgcccagatgccaacatcgctgaacttctttgccatcaacaacgtgcatcatgaaattctcggtttttccatcaacccggtcagcttccaggcgcttaacccgttctgggtggtactcgccagcccaatactggcaggcatttacacgcatctgggtaacaaaggcaaagacctctcgatgccgatgaaatttactctcggcatgtttatgtgctcactgggctttttgacggcggcagctgcgggaatgtggtttgcggatgcacaagggctgacatcgccatggtttatcgtgctggtgtacttattccagagcttaggtgaactgtttattagcgcccttggcctggcgatgattgctgccctggtgccgcagcatttgatgggctttattctcgggatgtggttcctgacgcaggctgccgcgttcttgctgggcggctatgtggcaacatttaccgcggtgccggacaacattaccgatccgcttgagacgttgcccgtctataccaacgtgtttgttttacactggcgtacctgcatagatatcaaagcgatgccctttagtgactaccgcgtttggcgtggcgacattcgccagcggtggcgcgtagtccgggcgctttaccaccacgcgtttgtcgccagcaagcgtgcaggctccagtaatccatcggcatcaagatccggtcccaccagcgactga

SEQ ID NO: 144513 - DNA, 1630 bp, Homo sapiens
atgaaacgacttctgattcttacggcactcctgccgtttgtcggctttgcacagcccattaatactctgaacaaccctaaccagccggggtatcagatacccagccagcagcggatgcaaacccagatgcagactcagcaaatccagcaaaaagggatgctgaatcagcaactgaaaacgcaaactcagttgcaacagcagcatttagaaaaccagataaacaataattctcagcggaggatcccagagcaggcttttgtcacttttggtgcttttgctgcgctggtctatggcctcattttcccattggcggcctatgtcggcgaaccacctgctggggaccaaacgcaccattgttcttggagcacttgtgctggcgattggttacttcatgaccggcatgtcgatacttaagcctgtcctgattttcatcgccctggggactatcgctgtcggtaccggcctgtttaaagctaacccagccagattgctttcgaagtgctatccgccgaaagatccgcggcttgatggcgcattcaccctgttctatatgtcgatcaacatcggctcgttgatagcgttatcgctggcccctgtgatcgctgatagattcggttattcagtcacctacaacctgtgcggggcggggttaattatcgcattactggtttacatcgcctgtcgtggaatggtgaaagacattggttctgaacccgacttccggccaatgagcttcagcaaactgttgtacgtgttacttggcagcgtggtgatgatcttcgtatgcgcatggctgatgcacaacgtagaagtcgccaatctggtgctgattgttctctccatcgtcgtcaccatcatcttctttcgtcaggcattcaagctggataaaaccgggcgcaataaaatgtttgtcgcctttgtcctgatgctcgaagcggtggtgttttacattctctacgcccagatgccaacatcgctgaacttctttgccatcaacaacgtgcatcatgaaattctcggtttttccatcaacccggtcagcttccaggcgcttaacccgttctgggtggtactcgccagcccaatactggcaggcatttacacgcatctgggtaacaaaggcaaagacctctcgatgccgatgaaatttactctcggcatgtttatgtgctcactgggctttttgacggcggcagctgcgggaatgtggtttgcggatgcacaagggctgacatcgccatggtttatcgtgctggtgtacttattccagagcttagcatttgatgggctttattctcgggatgtggtcctgacgcagctgcgggtcttgctggcgcatgtgcacattacgggtgcggaacatacgatcgtgaaagtgccgctaccacggttggaaatgtcgtaccgggctgaaaaagtcggcacagcaccagaagacgcgcagagaagcaaccacgaacacaagcccacaagaggcggcacaaccaaacagagagaaaccacagctggaccagtttttatagactcattttctcatctgcaaaatggcattgacatcaccctgcttctctgtggaggtgctcgtgagacaaccgagggctttgcaaagttgcagaaactcaaggcatga

SEQ ID NO: 144514 - DNA, 1716 bp, Homo sapiens; identical to SEQ ID NO: 144339

SEQ ID NO: 144515 - DNA, 915 bp, Homo sapiens
ctgtaccagtccgaaggtggtaaaggcgtagaaccgctgatgaagatgagctggaactacaagcagccgcacgaaccgcaatctgacgaagtggctaaagagaacaacggctacgcgctggaagatctctatgacgctaatggcgtgcttattgcgaagaaaggtaagcctgttctaccttccaactggaaccgtaacaacatgcgtactagccaatacctgctctccactctcaaggagacacctgccgacgccgaggtgatcagccatcagctgatgctgcgcgccgggatgatccgcaagctggcctccgggttatatacctggctgccgaccggcgtgcgcgttctgaaaaaagtcgaaaacatcgtgcgtgaagagatgaacaacgccggtgcgatcgaggtgtcgatgctggaagatggtcagtgcgccgctgacggtttgaccgcagacttcctgcgtgccgcctgcgccgacaaggcccatcaccagcgaggagataattggtacgaagcgcgtaccgccgaagaatgccagcgcatccggcaggcggatattatggaaacgctcatgcagcatccagacgataataccggcgatcaccgcaccgaggatcccggtatcgatcgactggatcccaagaatgctctggatgttattggctttcagaaccgcggcatccgtggttggcagaatgcctttattggtcaaccagaagtttaccgcgaggttcattaccgcataaccgatgaagccagcgaatgccgctacgcctttattttcgcgtgccaggcccagcgggatggcgatacagaacatgacaggcaggaaactaaaagctgtcggtatctttttcccgcgagcccatcacccagccctttagcgccgtggagatccagaccaggatactga

SEQ ID NO: 144516 - DNA, 624 bp, Homo sapiens; identical to SEQ ID NO: 132341

SEQ ID NO: 144517 - DNA, 2988 bp, Homo sapiens
tggcgtgtttttaccggcagaaggagagaagctggcgcaggaaagccgcgagcgacatcagatagtcgaaaatttcttgttggtgttgggcgtcagtccggaaatcgcccgtcgcgacgcggaaggcatggagcaccatgttagtgaagagacgctcgacgcttttcgtttgtttacccagaaacacggtgccaaatgagcctgccttttttacgcacgctgcaaggcgatcgtttttttcagttattaattcttgttggtatcggattaagctttttcgtgccctttgcaccgaaatcctggcctgctgctatcgactggcacaccatcatcaccttaagcggcctgatgctgctgaccaaaggtgtggagttaagcggttattttgatgtgctggggcgcaaaatggtgcgccgctttgctacggagcgtcggctggcgatgtttatggtgctggcggcggcgctgctttctacctttctgaccaacgatgtcgcgctgtttattgttgttccgctgactatcacgctaaaaagactgtgtgagatcccggttaatcggctgattatttttgaggcgctggcagtcaacgctggttcgctactgacgccaattggcaacccgcaaaatattcttatctggggacgttctggtctttcgtttgccggatttattgcccaaatggcaccgctggctggcgcaatgatgctgacgctcctgctcctgtgctggtgttgtttccctggaaaggcgatgcaataccatacgggggtgcaaacaccggagtggaaaccgcggctggtgtggagttgtctgggggctgtatatcgtctttctgacggcgctggagttcaaacaagagctgtggggactggtgattgtggcggcaggctttgcgctgctggcacgtcgcgtggtgctcagtgtggactggacgctgctgctggtgtttatggcgatgtttatcgacgtccatttactgacccagcttccagcgttgcaaggcgtgttggcgtaacgagacacctgccgacgccgaggtgatcagccatcagctgatgctgcgcgccgggatgatccgcaagctggcctccgggttatatacctggctgccgaccggcgtgcgcgttctgaaaaaagtcgaaaacatcgtgcgtgaagagatgaacaacgccggtgcgatcgaggtgtcgatgccggtggttcagccagccgatttgtggcaagagagtggtcgttgggaacagtacggtccggaactgctgcgttttgttgaccgtggcgagcgtccgttcgtactcggcccaactcatgaagaagttatcactgacctgattcgtaacgagcttagctcttacaaacagctgccgctgaacttctatcagatccagaccaaggtccgagaccatggcgcgaccgagtttagtcgtcatgcggtccagcgaattcctgatgaaagatgcttactctttccatacttctcaggaatccctgcaggaaacctacgatgcaatgtatgcggcctacagcaaaatcttcagccgcatggggctggatttccgcgccgtacaagccgacaccggttctatcggcggcagcgcctctcacgaattccaggtgctggcgcagagcggtgaagacgatgtggtcttctccgacacctctgactatgcagcgaacattgaactggcagaagctatcgcgccgaaagaaccgcgcgctgctgctacccaggaaatgacgctggttgatacctcggtacctacatggctggctattgacgctgttgtttttcaacctagagtaaaggaacaaggatccccgacaatttataaagcgacggttaatgtggccgatctcgaccgcaaccagtttctcgatgcctctctgacgctggcgcgccatccttcagaaacccaggagcgtatgatgctgcgcttgctggcgtggctgaaatatgctgatgaacgtctgcaatttacccgtggtttgtgtgccgatgatgagccggaagcgtggctgcgtaacgatcacctgggcattgatttgtggattgagctggggctgccggatgagcggcggattaagaaagcctgcacccaggccgcagaagtggcgctgtttacctataatagtcgggcggcgcaaatctggtggcagcaaaatcagagcaaatgtgtgcagtttgccaatctttccgtctggtatctggacgatgaacaactggcgaaagtaagcgcctttgccgatcgtaccatgacgctgcaggcaacgattcatgatggcgtgatctggttatcggatgataaaaataatctggaactgtctgcagtgaactccgttgatcccccggtgcaaatcatctgcgccagtgatgatctgctggtgccaacagcatgttccagtgaacttcatgccgccctgcccgatagccagaaaatggtgatgccctatggcggacacgcctgcaacgtgaccgatcccgaaacgtttaatgctctgttactcaacgggcttgccagcctgttacatcaccgaattgctatgaacgaagccgttagcccaggtgcgcttagcaccctgttcaccgatgcccgcactcacaacggctggcgggagacacccgtcagcgatgagacgttacgggagatttatgccctgatgaaatgggggccgacatcagctaactgttctccggcacggatcgtgtttacccgcacggcagaaggaaaagaacgtctgcgcccggcactttccagcggcaatctgcaaaaaaccctgaccgcgcccgtcaccgctatcgtcgcctgggacagtgaattttatgaacggttaccactactgtttccccacggtgatgcccgcagttggtttacctccagcccacaacttgccgaagaaacagcgtttcgcaacagttccatgcaggcgggctatctgatcgtcgcctgccgggcgctgggacgccggccggcaagtttcctctga

SEQ ID NO: 144518 - DNA, 804 bp, Homo sapiens
atggtcatatcatgccgccacagcgccagcgttgaaagtccggcaaagaatccaacttcaacgccagtgttccggaataatacgcgaggcaagtgccgcaaccacccacgcacggcaattttagttaccaccagcgtaccggatttacgcagtaccgttccgtcgcgcttaattttattgacgcccccatgcaaaaaaaccacaccgccgaatgggcaccgtaccgctggtccgtttggtgatcagctcttcaaccggcaggttggcaaattctggcaggcttccagcgccgcgttggcgttgtttacagtactctgccgcaacacctatatttacccaccaaaaccgtcaatgcgcattatgccgacatcatcgcctggtgttccggacaacatgccgcgatctaatacctcagtatcagcggttaccacatgggtgaagcgggtgccaactgcgtgcacaggcttggtttgcctaccgatttctcagcacgcattgcccgcaacacccagtcatcatccaggaagaatcagaactctgccgcaccgtcgatccactggcggatcctattacattgagtcgctgaccgatcaaatcgtcaaacaagccaagctattatccaacagatcgacgaagccggtggcatggcgaaagcgatcaagcaggtctggcaaaacgaatgatcgaagaggcctcagcgcgcgaacatcgctgatcgaccagggcaagcgtgtcatcgttggtgtcaacaagtacaactggatcccgaagacgaaaccgatgtacttgagatcgacaacgtga

SEQ ID NO: 144519 - DNA, 1547 bp, Homo sapiens
atgccaagaaggccagggtaccagtacggcgttatatcgtcgcgagaaagcaagagtagtactgccgcaacactaatattaacccaccacaaccgtcaatgcgcattatcgccgacatcatcgcctggtgttccggcaacatgccgcgatttaataccatcagtatcagcggttaccacatggttgaagcgggtgccaaactgcgtgcagcaggtagcatttacgctcgctgatgggattgagtacatcaaagcagcaatctctgccggactgaaaattgatgacttcgctcctcgcctgtcgttcttcttcggcatcggcatggatctgtttatgaacgtcgccatgttgcgtgcggcacgttatttatggagcgaagcggtcagtggatttggcgcacaggacccgaaatcactggcgctgcgtacccactgccagacctcaggctggagcctgactgaacaggatccgtataacaacgttatccgcaccaccattgaagcgctggctgcgacgctgggcggtactcagtcactgcataccaacgtctttgacgaagcgcttggtttgcctaccgatttctcagcacgcattgcccgcaacacccagatcatcatccaggaagaatcagaactctgccgcaccgtcgatccactggccggatcctattacattgagtcgctgaccgatcaaatcgtcaaacaagccagagctattatccaacagatcgacgaagccggtggcatggcgaaagcgatcgaagcaggtctgccaaaacgaatgatcgaagaggcctcagcgcgcgaacagtcgctgatcgaccagggcaagcgtgtcatcgttggtgtcaacaagtacaaactggatcacgaagacgaaaccgatgtacttgagatcgacaacgtgatggtgcgtaacgagcaaattgcttcgctggaacgcattcgcgccacccgtgatgatgccgccgtaaccgccgcgttgaacgccctgactcacgccgcacagcataacgaaaacctgctggctgccgctgttaatgccgctcgcgttcgcgccaccctgggtgaaatttccgatgcgctggaagtcgctttcgaccgttatctggtgccaagccagtgtgttaccggcgtgattgcgcaaagctatcatcagtctgagaaatcggcctccgagttcgatgccattgttgcgcaaacgagcggtaccgagctgatgtcgagttggcttaccagcccgcccagcaggtgcagcaaggtacttttaccggaaccagagctaccgacgatcgccatcatttcaccttcgccgacgctgaaactgacattgtgcagcacatcggtttgcacactgccttcctgatagcgtttgcacaggttgtcgcattgcaacaggatcttattcataacgtaaagcctcagcgggttgagtggcggcagcgcgccatgaagggtaaagcgtagacagcagcgcgatagccatcgccaccagcgcaataacaatgacctgtaaaggttcgatagccaccggcagcgccgcgccat

SEQ ID NO: 144520 - DNA, 732 bp, Homo sapiens
  misc_feature (1)...(732): n = a,t,c or g
atgnaaagcgaagttgacagtcgactggtcagtcaccaggatggcaaatggcaggtcagccacggcccgttcgaaagctacgatcatctcggtgaaaccaactggtcattactggtacaggcagtgaaccactggcatgagccgaccgccgcgctgatgcgaccgttccgtgaactaccggactggcgtattgatgatctgatgatttctttttctgtacccggcggcggcgtcggcccgcatctcgatcagtacgacgtgtttatcattcagggtaccggacgtcgtcgctggcgagtgggcgaaaagctgcaaatgaaacagcactgcccacatccggatctgttacaggtcgatccgttcgaagccatcatcgatgaagagctggagcctggtgatattctttatattccgccaggattcccgcatgaaggctacgcgctggaaaatgcgatgaactattccgtgggctttcgcgcgccaaatacgcgggaactgattagtggatttgccgattatgtgctgcaacgtgaactgggcggcaactactacagcgatccggatgttccacctcgcgctcatcctgcggatgttctgccgcaagagatggataaactgcgtgagatgatgctcgaattgatcaaccagccggaacactttaagcaatggtttggcgagtttatatcccagtcacgtcatgaactggatatcgcgccgccagagccgccttaa

SEQ ID NO: 144521 - DNA, 777 bp, Homo sapiens
tttgtgttgcaattcattctccgacacgccattttctttctctcgcaaattcgttttggatgcacttatgtcattcacaaatacccctgaacgctatggtgttatatctgcggccttccattggctaagcgcaattattgtctacggcatgtttgctttaggtctgtggatggtcacgctcagttattacgatggctggtatcacaaagcacccgaactgcataaaagcatcggtattttgttaatgatggggctggttattcgcgttctgtggcgtgtcatatctccaccgccgggtccgctgccgagttattcgcccatgactcgtcttgccgcaagagctggacatctcgcattgtaccattgcttttcgccatcggcatcagcggctatctgatctcaactgccgatgtaaaccgatcagcgtttttggctggtcagtggtttatccgtaagatcaacggtcgcaggaagaaatccagcgtttcgtcgatggtttcctgcatatcaatttcggctcccagtccaggcagcggtgggcattgcggatgctcggtttacgagctctacgtcctgatatcctttgccgtagtagctgctactttcgacaaccgaaagcccgcaaacgtaaggatatgcgcacatattcttcggaatccagtcaaataccccaacgggatcgggatattcatcggcggggcttcccacagcggcagacgaatcccattttggcgtgatctcatccatcggagtgatatggatcgcatcaccaagtaa

SEQ ID NO: 144522 - DNA, 737 bp, Homo sapiens
atggcgtttggtcttggcgctatctggggcgtgttgatccttacttgcctgttgccagtaaaccagctgctgaccgcgctgccggtggatgtattaggtagcctgggggaattaagctcgccggtggtttcagcttttgcactgttcccgctggtggcgattttctaccagtttggctggaagcaaagtctgatcgccgccgtggtggtactgatgacccgtgtggtagtcgtgcgctatttcccacatcttaaccctgaatccatcgaaatctttattggcatggtgatgctgctggggatcgcgataactcacgacctgcgtcatcgtgatgaaaatgacattgatgccagcgggctttcggtgtttgaagaacgcacgtcacggattatcaaaaacttaccctatatcgccatcgtgggagcattgattgccgccgttgccagcatgaagatttttgctggcagtgaagtgtcgatcttcacactggagaaagcatattccgcaggcgtaacgccggaacaatcgcaaacgctgattaatcaggcggctttggcagaatttatgcgcggactggggtttgtgccgttgattgccaccaccgcgttagcaacgggtgtgtatgcagttgcgggctttacctttgtttatgcggtggactatctctcgccgaatccgatggttgcagcggtattaggcgcagtggttatttagaaggaagtcttgctgcttcgttc

SEQ ID NO: 144523 - DNA, 1337 bp, Homo sapiens
gtgcaaaagaagttgtctttgccagtattgataccggactccggcgaagttttattacaattgcgcacccgcgatacgacgtatccaccaaaaaagtcacaccggacgaagtatctccagtcacgttaggcgatacctcaccagtaaccgtcgcacgattaacagatattttgtcccggatgtatggaaacctgccaattgagtatggggctgacggagctggctcgggtaactgtggaacaccatgccgtgtcacacccacggagcgccggatggaagtttattccatttcaatatggatgatgacgccctgcgttttccacatgatgggcagcgccagaaacgcgtcatattgtgatggcataacgagcaggcgcttataccttatctggggcatggtcggtgaaaaccaggtctttgatgatatggaccagtggccgttaaagatttgcgctagttgtgggcataaacgaataaggtatgttatgattttaagtgcattttctctcgaaggtaaagttgcggtcgtcatggttgtgatactggactggaaagtggttaacgtcgatttcgtgatgctgaccgaatacgccgctgactcaaaactgcggttgcttacccacccgcttccctggttaacaccttcgggagtggatggcgaaaaacgacaaaactcagttgcgtatttccgaaaccgaaaatatgcccacaagagtcgtcaaaggcgaagatcgcattctgatcaactcaccgaaagtggctacctagatctgcaaccggaaatgagctccgcagagctgaccgaaaaactggttgggccatcaagagcggcaaatacgacaccatcatctgtaactatccgaacgcgacatgatgatcaggtgcttacgcaactcatagtcgtatggaaactgccagccagaatctggagtttgaagaagctgcactattcgcgaccaaattcaggcggtgcgacgcgtcaccgaaaaacaattctttccaataccggcgacgacctcgacgttattggtgtggcgttcgatgcggcatggcttgtgtccacgtattgttcattcgtcagggcaaagtgctcgcagccgcagctatttcccgaaagtgcctggcggtacggaactgagcgagtggtagaaaccttcgtaggccagttctatttacaaggcagccagatgcgaccttaccggaactggcgggacgcaagattaatgttcaaccaaactcgcggcgatagggcgcgttatctgaaactcgcgcgcaccaacgcggcgacggccttaaccagcaaactttcgcagcaatctaccgtacaccgcgactga

SEQ ID NO: 144524 - DNA, 617 bp, Homo sapiens
caataattcctgggatagtcaaccaattggcagatgatcatatggactggggagatatttccatgaacatcatgggccccaatgtttcgggaaatccagttatcaagtattttaattacctgtatacctacaaaatgcctggggatatcaagaactgggtagatgctcatatgaactgtgaagatattgccatgaacttcctggtggccaacgtcacgggaaaagcagttatcaaggaggctggggtgaagaagccccaggaccggtccagctcagacctccccagcccattggagaaggccgactcagagagcaacaagggcaagaagcggcggaaccggaccaccttcaccagctaccagctggaggagctggagaaggtcttccagaagacccactacccagacgtgtatgcgcgggaacagctggccatgaggacagacctcactgaggcccgcgtgcaggctgttattcgccagcgggcagggaacgccaggaaagagacgaaccgggcgcaggttgacgtactggtcgaattcacgacgaaatttcagcagcgaaccccacaacgaaatatggtccggaacggtatccggccaccgacggcaccaaaatag

SEQ ID NO: 144525 - DNA, 1002 bp, Homo sapiens
atgtcagcgctaataacatcctccaccccggcccttggtggacgcagcctgcctctctgcgcaggcccggcgggatacaccgctgctgtctacgcggcgcgcgccaacctgcaacctgtgctgattaccggcatggaaaaaggcggccaactgaccaccaccacggaagtggaaaactggcctggcgatccaaacgatctgaccggtccgttattaatggagcgcatgcacgaacatgccaccaagtttgaaactgagatcatttttgatcatatcaacaagaagcctttaaaggccgtgggggtttctgcttgtgcaacctgcgacggtttcttctatcgcaaccagaaaagttcgggtcatcggccggcggcaataccgcgggttaaagaggcgctgtatctgtctaacatcgcttcggaagtgcatctgattcaccgccgtgacggtttccgcgcggaaaaaatcctcattaagcgcctgatggataaagtggagaacggcaacatcattctgcacaccaaccgtacgctggaagaagtgaccggcgatcaaatgggtgtcactggcgttcgtctgcgcgatacgcaaaacagcgataacatcgagtcactcgacgttgccggtctgtttgttgctatcggtcacagcccgaatactgcgattttcgaagggcagctggaactggaaacaatcttaaggaatccccggcccagccccaaattcaaaaacgggctaagctgtttccctgggaaaattgttaccgttccatttccaacaaatataaaccggaaaataaaagacagtctaaaggcagcccccaagtcccagaaagctgactcccctagcatcgactacgcagagctgctgcagcactttgagaaggtccagaacaagcacctggaagtgcggcaccagcggagcgggcgtggggaccacctggaccggagggttgtcttgacaggcctggcacggaggagggcccaccgagtggtcccatga

SEQ ID NO: 144526 - DNA, 4173 bp, Homo sapiens; identical to SEQ ID NO: 115215

SEQ ID NO: 144527 - DNA, 4488 bp, Homo sapiens
atggccgtggctgctgctgcgctgtcgttgctgttgttattattaatcttgagtcgaacaaacgagttcgatctcagggtctttatccaaccacagcatgattctggggaagacacttacccctattggtcccagattatcgtcaccatcattattacttgggatcagatggcacctacctcaaagggctaccatgagcagtcaatgatatcatatgcttctcctgagaaggccattagacagctgaatcaatcctacaatgttggcaaaggtccagattaccctgcaggcaaagaaggcctgcatcacatcaaggccgagaatcggctctcgaatgccgttacgtccgctaccagtccgccactaaagaaactgccgctggcgagaaccgcgaacgtggacgtagcggaatatcggcgtgattgcgggtccagatttcgttcctacgccatttttacaggtcacttttttcacttcatcgcccggcatccaacgccaccctggcgcacaaactggcgctgtaactggttttgcagacgaagcccagcacggaaggcggcagcgttggcaaaagcatcagtgaacaaggtgtttttcattcaaccaacgccacagtttgtcatcggccagaccgaagcagcgggcatcaggatcatttcgcagttaccgcttcgcactcacataccaggctacggtgcagcggccttcgctcagccaggcaggcgtgcgatcgccatgacgataaaccgagaaccgcagcggggcaggcagggagatgactttacgcaagcccattcagccatcgccgatagtcatcagtttgccaccggtgatggtgataaatccgtccagacatcgcgttcagcatggtcgagcagcacgatgccacggctgacgttacgccgctcgggtcgtcatcgctggcaaccagcgggcgcacgcagaataggccgcaaaatgcgcgttttcgccatcacgggggccagtttttccccttcaccagcagaatatcaacctcttctgccgtcactcgattatcgtcaatctcgtgtaatcaatacggatggggtggccgccgtgtggtcgtactatggtgcactggtggtcgcgaaagaacgtggcggcattgtgtcagtgtggaactggttaggtactcgggccaccgaacgcgacgggaagcgcgactgcggctcagcaaggactaagttagcaacaagacactcctactgtgcacgacatggtcgcgagcacggccatcatggaattgtgtctgacggcttggttagattcagtttatacatctttagcggaataatccttggttgctgccatcctagttcatattggagtacatctcaggcatgtacggcctggcttttccgatgtgggaaagtttgttcacttgcagctcgaattacgagagtaatgcctgcaggtccagttttcagcgatgcagaaagtcgtattgcagcagccacagaccatcatctggacatttgcggcggtggcacgacccgttcagaaatggcagcgtcaggagatagcgccttgccggaccgcaccaccatcatgaatttcgccacatgctggagcagcatcaactggcccgccaattgttcaagaccacaatcgctggctggccgaagcaggcgtcatgatgactcaaggcaccttgtcgatgccaccatcattgaggcacccagctcgaccaagaacaaagagcacaacgcgatccggagatgcatcagaccaagaaaggcaatcagtggcacttggcatgaaggcccacattggtgtcgatgccaagagtggcctgacccacgcctggtcaccaccgcggccaacgagcatgacttcaatcagctgggtaactgctgcatggagaggagcaatttgtctcagccgatgccggctaccaagggcgccacagcgcgaggagctggccgaggtggatgtggactggctgatcccgagcgccccggcaagcatcgcgtgctggtacacgacatccgcaacgcagagcgagtgtgtccacgcacacccgtgagcgcgtcccacttcgtcgtaccacactcggccctggacgatcccagctcacccgagcttgatatcgccacacggtctcgctactccccacgctgttcctggtgctcgacaacggtccacgccccggtccagtctcttccgtcactgcgacgtgcgaccaacgcatccacctgcatcccggccatcgggtcagctctcggagctggcactactgcccctcgagagctccgcgccctcactgacggccgacgacttctaatgtcgcactcgcggcggccacggcggaacacatcggcacgttccgcgcttcatacggccccagacctaaactttccagtgccagacgcccggtttcagcgcaccttcgaaggtttcacgctccggcttttcaacgcctgccgacgcaaacgaattagaagattgctcaaggcgattgaggatcaccgcagaatcggcgttgctgccatcgacagcgccaccgccaggtgcttgccagcggtacaccgcaggaactggttgagaaacgcggagccccagtctggaagaggcatttatcgcctatttgcaggaagcggcagggcaagcaacgaagccgaagcgccgcccgtggtacacgacaccacccacgcgcgcgtcagggatttagcctgcgccgtctgtttagctacagccgccgcgaacgctggaactgcgacgcgatccagtacgttcgacgctggcgctgatgggacggtgatcctgatgctgataatgggttacggcatcagtatggatgtggaaacctgcgctttgcggtgctcgaccgcgaccagaccgtcagtagccagcgtggacactcaacctctccggttcccgttactttatcgaacagccgccctcaccagttatgacgagcttgatcgtcggatgcgtgcgggcgatatcaggtggcgattgagatcccgcccaatttcgggcgcgatatcgcgcgtggtcgcctgtggaactcggcgtctggatcgacggagcgatgccgagccgtgcgaaacggtaaaaggttacgtgcaggccatgcaccagagctggttacaggttgacgccaaatacccggtcagaaaggtactgggtaaaaagaccattgccatcaacgacatttataggtacgacgagctaaattttcctgcatcacctgagcgatttcatcgccatcacgccagtccgtgctatacaggcgtcgatttcgtcaaggccgccccaaggcgatcggcaatatcctgcatccgacggcgttggtgttttcggcccgtgagcaatacttcttcaattgctgccagaataccgttatgcgcttgctggaaacgctatcgccattgccgagaaaatcgagcatcattgccccggcccaaatcgtgcgatagggttagcaatatttttcccgtagatatccggcgcggaaccgtgacaggctcgaagagcgacgggaaagtgcgttccggattcaggttggcggtggggcaatgccaatggtgccggtgcaggccgggccaagatcggaaaggtatcgccaaacaaattggacgccaccaccacatcgaatcgttccggctgatcacaaaacgcgcgcagagaatatcaatatgctgcttgtcccagcggactccggtacggctgctgatggctaaaccgttcgatttagtggcagaagtcagtgtcttacggacgggctttgcgcaagttcgaaggcataacgcaaaatgcgatcgacacacggcgggtaaataccgattcttgaatgacgacttcatgctctgtacctcattcactctaccgccgagcgaggaatattcgccttcggtgttttccctaccacgtaaaaatcgatgtcgccaggctgttttcccgccagcgggcaggaacgccaggaaagagacgaaccgggcgcaggttgacgtactggtcgaatcacgacgaaatttcagcagcgaaccccacaacgaaatatgcagttttgccatgcggcacaccaacccttcacctaaggcggtcgggccaaggctttcacggcgatacactcttccagaaattgctcagtactggaaattttccccagagcagcaagacttgagtcaacgcgtggatggcctcttcacggctggtaaagcgcgcattcgacacaacgcatcgcggatgaatttatcgggcataatggttaaattcgtattaatgagtactaaaaatgggacacaagcccttataccggcagattgccgatcgcatcgtgaacaaattgcgcgtggcagcttaaacctggcgatgcgttacccacgaatcagcgctacaaacagagtttggcgtcacgggttacggctttcgcgaagcaacgcaagggatcgtatgaacatcctgcgtcgcaagatgcctgccgagaagattaacgaaaatctgttcagcgcggcatcatga

SEQ ID NO: 144528 - DNA, 3822 bp, Homo sapiens
atgaaaataccatctttagtgggtcctgacgggaaaacatccctccgggaatacgcggggtatcatggcggcggcggagggtttggtggtcagttgcggggctggaatccaccaagcgaaagtgctgatgcggctcttctgcctaacttctcgcgcggaaatgcccgtgctgacgatctggtcagaaataatggctatgcggcaaacgccgtgcagctccaccaggaccacatcgtcgggtcatttttcagactcagctatcgaccgagctggcgctatcttggcatcaatgaggaggattcacgcgcattttcgcgggatgtagaagccgcctggaacgagtatgccgaggacgacttttgcgggattgatgccgagcgtaagcgaacgtttacgatgatgatccgagaaggtgtggccatgcacgcgtttaacggtgaattatgcacgcaggcgacctgggacagcgattcaacgcgtcttttccgtactcagttcaaaatggtcagtccgaagcgcgtcagcaatccgaataatatcggtgatacccggaactgtcgcgccggtgtgaaaataaatgatagcggtgctgcgctgggatattacgtcagcgacgatggttatcccggctggatggcgcagaactggacctacattcctcgcgaactacccggcggtcgaccttcatttatccatgtattcgaaccgatggaggatggacagacccgtggggccaatgcgttttacagcgtgatggagcagatgaaaatgctcgataccctgcaaaattaccagctccagagcgcgatagtgaaggctatgtatgccgctaccatcgagagtgaactggatacccatcggcgatggacttattctcggcgcggatatacaggagcagagagcaactatcgggctggcccggcgggatacaccgctgctgtctacgcggcgcgcgccaacctgcaacctgtgctgattaccggcatggaaaaaggcggccaactgaccaccaccacggaagtggaaaactggcctggcgatccaaacgatctgaccggtccgttattactggagcgcatgcacgaacatgccaccaagtttgaaactgagatcatttttgatcatatcaacaaggtggatctgcaaaaccgtccgttccgtctgaatggcgataacggcgaatacacttgcgacgcgctgattattgccaccggagcttctgcacgctatctcggcctgacctctgaagaagcctttaaaggccgcggaaaaaatccccttaaacgctggaggctaacgggacacgggacatattctgcaaaccaacgacaccggagcactccgggatcactgatgtacggctgtgagaacggtggaagtacgctccgtcagttagacaaactgaattccttgctggatggcgcgctgaaggcgggtcttaacgaaattcgttctgtgtcgctgggcgtggcgcagccggatgcctataaagacaaagcgcgtaaggcagcgattgataacgcgattcatcaggcgcaggaactggcgaacggctttcatcgtaaactggggccggtatatagcgtgcgctaccatgtttccaactatcagcccagcccaatggtgcggatgatgaaagccgatgccgcgccggtgtccgcccaggaaacttacgagcaggccgctattcagtttgatgatcaggataggctgactgaaacggttaagcggacaaggatgcgggggagggggatggacatttttatttcgaaaaagatgcgcaatttcattttattagcgcaaaccaataatattgcccgggcggcagaaaaaatccatatgacggcttcgccatttggtaaaagcattgccgcgctggaagaacaaattggctatacgctatttacccgcaaagataataatatcagcctcaataaagccggacaggaactgtatcaaaaactgttcccggtttatcaacggctttctgcgattgataatgaaatccataactcagggcgtcgttcacgagaaattgtgatcggcatagataatacttatccgacaattattttcgatcagtcgattagtctcggagataagtatcaaggcgtgaccgcccagccagttgagttcagcgaaaatggcgttatcgataatctttttgaccgccacatgtatctgcacgagttcaggacctggaaacccgactatcatgagtacagcgctgcgataggcttctcgatccacgcccgtcatttcgttatctgcgtggcggcctgcaaaatactgatgataaggcccgtgaccaacgctaccaacaatagcggggcagccagtgccagcgcgactttcatcgcttcagtccccatcatcatgaccgattcaggtgtcattttgcctctcctagctgtaaaagctctgcgccagcgaaccgaccagcaattgccagccatccaccagtacaaacagcatcagtttaaagggcagagcaatggtggctgggggaaccatcatcatccccaatgccatcaacacgctggctatcaccaggtcgataatcaaaaaagggatgaaaatcgtgaagcctatctgaaatgcggttttcaactcgctggtcacgaaaggtgtgcgggaaaccggcattgccaagcaagggatagcggaagaggtggcgaaaaacaggcgagattctacttatataacgtttcgcgagaaaactgggagaaccccggcacggagatccaaattacgcggaccccgggttattaccctttcgcgaaggaatatacacgggactcaccgcgaagccccggtaccggcggatatcttctacaaagcgaaaaatcgctaaccgacttctttgcgccattacgctctgtcccgtcgttgcagattggtcgcctggaagtgatcgatgctcgtttgcaaggtccggactgggcggtgaccgacctcgatctcagcttgcgcaacatgaccttcagtaaagatgactggcagacacaggaaggcaaactgtcgatgaacgctagcgagttcatttatggttcgctgcatttatttgacccgattataaacacggaattttccccgcagggcgtagcgctgcgccagttcaccagccgctgggaagggggtatggtcagaacgtcagggaactggctgcgtgacgggaaaacgttgatccttgatgatgcggcaattgccgggctggaatataccttgccgaaaaactggcaacagttgtggatggaaacgacacccggttggttaaacagcctgcaactgaagagatttagcgccagccgcaatctgatcattgatatcgaccctgacttcccgtggcagctcaccgcgctcgatggttacggtgccaacctgacgctggttaccgatcataaatggggcgtctggagtggctcggcgaatctgaatgccgccgccgcgacattcaatcgtgttgatgttcgtcgcccgtcgctggcgctgaccgccaacagcagcacggtgaatatcagcgaactgagtgcatttactgaaaaaggcattcgggaagccaccgccagtgtatcacaaacgcccacacgtcagacacatatcagcctgaatggacgcggtgtgccggtgacatatttgcaccagtgggatggcctgattaccgtgactgcgaagggatatcagctaccgccaagggaattaagccagtccgttaaccatcgtgggccttcttccgcctccgcccgcccgtgtgtcacacatgtggggtgttcggggaagaatcaggcgcgggagaacatcgcggagaacaccggagcataa

SEQ ID NO: 144529 - DNA, 1866 bp, Homo sapiens; identical to SEQ ID NO: 132505

SEQ ID NO: 144530 - DNA, 1002 bp, Homo sapiens
  misc_feature (1)...(1002): n = a,t,c or g
atgaatgctagcttttcaggtaccggtaccgcgatcgcgctgcgccataagcgtgggtttaatgttggaaggctgcgccagcctacgctttcgcccaacaccaacgcggcaactgcgcgagtgctggatcgtctggggatcagcgtcatgccagctaacgaagcaggctgttgtggcgcggtggactatcatcttaatgcgcaggagaaagggctggcacgggcgcgcaataatattgatgcctggtggcccgcgattgaagcaggtgccgaggcaattttgcaaaccgccagcggctgcggcgcgtttgtcaaagagtatgggcagatgctgaaaaacgatgcgttatatgccgataaagcacgtcaggtcagtgaactggcggtcgatttagtcgaacttctgcgcgaggaaccgctggaaaaactggcaattcgcggcgataaaaagctggccttccactgtccgtgtaccctacaacatgcgcaaaagctgaacggcgaagtggaaaaagtgttgcttcgtcttggatttaccttaacggacgttcccgacagccatctgtgctgcggttcagcgggaacatatgcgtnaacgcatcccgatctggcacgccagctgcgggataacaaaatgaatgcgctggaaagcggcaaaccggaaatgatcgtcaccgccaacattggttgccagacgcatctggcgagcgccgaagaagaagaaggaggaggagaaggaacaggagaaagaagaggacgggtcggcaccaagacagaacccccactgcaccaccgaaacccaacccaaccaaaccacccccaacgacaagaccggaccgaacagacagacacgacacgcaacaaacagcaccggacaccgcacatggacacggaacaagcaaaaggaaaacgcgaaaacggacacccccggcaccacctgtgcaatacacggcacccactggcaaaaagatcagctagttcacatctatattgctttagataa

SEQ ID NO: 144531 - DNA, 1407 bp, Homo sapiens
atgatcctcggtttcggggccatgttaggcaagctgatttctgatacgggtgcggcacaacgtatcgccactacgctgattgctacttttggtaaaaaacgcgtgcaatgggcgctagtgatcaccggtctggttgtgggcctcgccatgttttttgaagtgggttttgtcctgctgttgccgttggtatttaccatcgtagcatcatcaggattacccctgttgtatgttggcgtaccaatggtagcagcgctctctgtaacccactgttttctgccgccacatccagggcctactgccatcgcgactatctttgaggctaatctcggaacgactttactgtatggatttatcattaccattccgacagttattgtcgcaggaccgctgttttctaaactgctaactcgctttgagaaagcaccaccggaaggcttatttaatcctcatctgtttagcgaagaggagatgccctccttctggaacagtattttcgctgccgtgatcccggtcatcctgatggctatcgccgccgtttgtgaaattacgttaccgaaaactaacaccgtgcgcctcttctttgaatttgtcggattttcctggcgtaaccaagaagttgaatgccatgttcagttaacagtttgttgcgaccgtgacgagcgaacagttctttcccaacgagttgttccagacgctgcatttgctgacttacggcggactgagtacgacacacagcggcagctgcggcagcaaaagtgttcagatcggcaacagcaacaaatgttctccagcagatcgagctggtcacgccttcgatttattgcaatgcgccggttgacgcccgctggtaagcggaaaatactcgacacattagcgacttatcatgagcaacatcgcgatgaacctggccctgggcgcgaacgtctgcgacgtatggcgttgccaatggaagatgaagcgctggtactgttgctgattgaaaagatgcgcgaaagcggcgacatccacagccatcacggctggctgcatctgccagatcacaagcgggcttcagcgaagagcagcaggccatctggcaaaaagcagagccactgtttggtgacgcaacgtggtgggggtcggcagcgtaccgtgtccccggccctggcccacacaggcacgctagcgccccctccgctccagtgcctcgtgctcgacttccccgcctggcctacccggtccccctgcacgctcctgtggtgcactggcccgaaccacggcaacgcgactgtaacggtcgatgaaccaaccgccggtgaagcgtccaacggtcatccccagggtaaaaccggcataaatcagcgaacaatgggtacatcaatggattcacaggggaatctgagatacagccgaaaagtttcaagttaa

SEQ ID NO: 144532 - DNA, 1046 bp, Homo sapiens
accacttttgcctgcgcaccctggtccggttgccaccgcgttacggggaccgcttggggggcccacggactcagacagtggttgccgtgactcctcgaatggtgccgcaccggaacgcggttgatggaactgcgggcatagccttcttgctccattcgtgcgtccagtaccagagaggcgaggtcatctgctacggcttcgatttttggatctttttcctgatagagaattttcaggtaagtgtcgcagtcatcgcagctttcgacttaatcgcggcctgttcgtcatccacgaacagtaatttgcgttataccggttttcttaaggaaaaattacctttacagttaatgggctatggccccatccgcattccccttgctctgataaggcagttcaccaatgagcggtgccggaagttttttacccagcacatcaatgatttccgcataatgcgccagtcctgggttgattcggttagccacccagccaatgagcggcagccgcagctatttcccgaaagtgcctggcggtacggaactgagcgaggtgaactggcgggacgcaagattaatgttcaaaccaaacctcgcggcgatagggcgcgttatctgaaactcgcgcgcaccaatgcggcgacggccttaaccagcaaactttcgcagcaatctaccgttcaccagcgactgaccgcgcttgccagcgtgttgaaattgccggaagtgaagcggatggagtgctttgacatcagccataccatgggcgaacaaaccgtcgcttcctgtgtggtgtttgatgctaacggcccgctgcgtgcggagtatcggcgctataacattacaggcatcacgccgggcgatgattattgctctggcggctgccttatttttggtgctaccgtaacggtgctgaatctggattctgacgaagaacagacttatcgcatcgttggcgatgacgaagctgactttaaacaaaacctgatttctgtaaactcgcctattgctcgtggcctgatcggcaaagaagaagatgatgttgtggcctga

SEQ ID NO: 144533 - DNA, 1483 bp, Homo sapiens
atgaatccgaggaaagagactgttaaagatagtcccccttcaccaggggagacagcacttgcttttctctcaccattcttttgcaacaatcctcctgccaaatctggtcccttccccacaggcctgccggatcagcgtcgcctggtgttgcccgatgactggccggaagatatgcatccgctgcgcaaagatgcgatggattatcgactgcgccctgaaccgacgactgattccgaaacgtatccgtttatcaatgagggcaacagcgatgcgcgggtgatccctgtcggcccgctgcatatcacctccgatgaaccgggtcacttccgcttgtttgtggatggcgagcaaattgtcgatgctgattaccgcctgttttatgtccatcgcggcatggagaaactggcagaaacgcggatgggctacaacgaagtgaccttcttatcggaccgcgtgtgtgggatttgcggttttgcccacagtgtggcctataccaattcggttgaaaatgcactggggattgagtttggctggaagcaaagtctgatcgccgccgtggtggtactgatgacccgtgtggtagtcgtgcgctatttcccacatcttaaccctgaatccatcgaaatctttattggcatggtgatgctgctggggatcgcgataactcacgacctgcgtcatcgtgatgaaaatgacattgatgccagcgggctttcggtgtttgaagaacgcacgtcacggattatcaaaaacttaccctatatcgccatcgtgggagcattgattgccgccgttgccagcataacgatcatttgctgtcagagaagtgtcgatcttcacactggagaaagcatattccgcaggcgtaacgccggaacaatcgcaaacgctgattaatcaggcggctctggcagaatttatgcgcggactggggtttgtgccgttgattgccaccaccgcgttagcaacgggtgtgtatgcagttgcgggctttacctttgtttatgcggtggactatctctcgccgaatccgatggttgcagcggtattaggcgcagtggttatttcggcggaagtcttgctgcttcgttcgatcggcaaatggctggacgctacccatcgtgcgctgatatgtcagcgtcggccaggaaccggcttgtgtgaaaacctgtccgaccggggctatccacttcggcaccaagaaggagatgctggagctggcggaacagcgcgtggcgaaactgaaagcgcgtggttacgaacatgctggcgtctacaacccggaaggggtcggtggtacgcacgttatgtacgtgctgcatcacgccgatcagccggagctgtatcacggtctgccgaaagatccgaagatcgacacctcggtaagcctgtggaaaggcgcgttgaaaccgctggcagcggctggctttattgccacttttgccgggttgattttccactacatcggtattggcccgaataa

SEQ ID NO: 144534 - DNA, 4145 bp, Homo sapiens
atgatctcagtttcaacttggtggcatgttcgtgcatgcgctccattaataacggaccggtcagtcgtttggatcgccaggccagttttccacttccgtggtggtgccgttcagcatagtcataatctcgccttttgtattgtgaacgttcggcaatctcctcataaaacgggtgaaacgggaggtatcgccgcattgcagcagataattaaaagtgtttgtagctggctgtcattagtgaagcctctaaccgaaagcgtgggatcctgtcgaccatgccgattaaatcgcggtcgcgaatatgcttttgaatcagttccagcagagctatacgccgatgttgcatgatctcatcgtcaggtacgatggtgatatccaccaacagaaaagcttcggctgtacaactgccggccaagttgcggatcggcaaatgtacaggttgaggggtggcaatcaccggaatgcggtaccagagctcgagttcgtaatctgtcgcacagaaagccgattcggggaaaaaacccggccgcgccacaacaacctgtcgggacctacgacggtacaaagtcgagcacagataaccattaagatcggaacccataacccggaccggaacaataaaggtgatgacgcagcaatcacttcttcaattgctgccagaataccgttatgccttgctggaaacgctcatcgccattgccgagaaaatcgagcatcattgcccggcccaaatcgtggcgatagggttagcaatatttttcccgtagatatcggcgcggaaccgtggacaggctcgaagagcgacgggaaagtgcgttccgattcaggttggcggatggggcaatgccaatggtgccggtgcaggccggccaagatcggaaaggatatcgccaaacaaattggacgccaccaccacatgaatcgttccggctgcatcacaaaacgcgcgcagagaatatcaatatgcgcttgtcccagcggatctccgggtaattctcggccattgcttccactcgtcatcccatacggcatgctgatggctaaaccgttcgatttagtggcagagttagtgtcttacgtggacggctttgcgcaagttcgaaggcataacgcaaatgcgatcgacaccacggcggcgaggaatattcgccttcggtgttttccctgaccacgtaaaaatcgatgtcgccaggctgttttcccgccagcgggcagggaacgcctaggaaagagacgaaccgggcgcaggttgacgtactggtcgaattcacgagcgaagatttcagcagcgaaccccacaacgaaatatggtccggaacggtatccggccagccgacggcaccaaaatagatggcgtcgaaacggctaagttgctcatgccagtcgtccggcatcattttaccgtgatggctgtaatactcgcagtctcgcccactccatttgctcaaaactcaaggcgaagccccagcgctcagcggcagcctgtaacaggcgaatccctcaggaaggaccttctattggcaaatcccggtctcccggcgatcgcagcaatacgcatcgtttgcatcattggtaaacagctgctgaccgcgctgccggtggatgtattaggtagcctgggggaattagctcgccggtggtttcagcttttgcactgttcccgctggtggcgatttctaccagtttggctggaagcaaagtctgatcgccgccgtggtggtactgtgacccgtgtgtcgtgcgctatttcccacatcttaaccctgaatcatcgaaatctttattggcatggtgatgctgctggggatcgcgataactccgacctgcgtcatcgtgatgaaaatgacattgatgccagcgggctttcgtgtttgaagaacgcacgtcacggattatcaaaaacttaccctatatcgcatcgtgggagcattgattgccgccgttgccagcatgaagatttttgctgcagtgaagtggtaccagagctcgagttcgatactgtcttcgtgtctggtccccggagtttttccgccgccgcacaacaccctgtaaagcggctctacgctgatcattcggctttaccgcccctgctgccgtcgtcggatttgccgaagggtggatgcacaggccgtcctgcactctatacaaaatggtatcggcagcacctcggcgggctggcaatgatcctcggtttcggggccatgttaggcaagcgatttctgatacggggcctactgccatcgcgactatctttgaggctaatctcggaacgatttactgtatggatttatcattaccattccgacagttattgtcgcaggacgctgttttctaaactgctaactcgctttgagaaagcaccaccggaaggttatttaatcctcatctgtttagcgaagaggagatgccctccttctggacagtattttcgctgccgtgatcccggtcatcctgatggctatcgccgcccatatggttggctttatagtgcgtccgcatgtttgttccatcgctgcacgtcagtcagtgaactggcggtcgatttagtcgaacttctgcgcgaggaaccgcggaaaaactggcaattcgcggcgataaaaagctggccttccactgtccggtaccctacaacatgcgcaaaagctgaacggcgaagtggaaaaaccatctgtgctcggttcagcgggaacatatgcgttaacgcatcccgatctggcacgccagtgcgggataacaaaatgaatgcgctggaaagcggcaaaccggaaatgatgtcaccgccaacattggttgccagacgcatctggcgagcgccggtcgtactctgcgggacgggtgtgggggtgggcactattggtgccggggggttctggtttacgcggcaagatgccagtcctaaacgggggcagggtttggaacaaccgaacagcggacctgacgtcttgatggttgatggcatcagaagtggaagaacgcaagatagggatttataccggtcaggtgattttctaccagccaaacgggaagttagcgagtcaggtttcaggcgcactggcaaagcagctggttggctaataatctcgggtccggaaagcaccaaaccgggtactctggttccagcggcgtgccagaaaacatcgaaccagtcagtcaccgcgcgcgacgcagaaaatgagcgcggcggcaacggtgaccaggacatcaatgtttcaaagaacagaagatctatttctggcagaccttgcgaaatacccggcacttttgcaatttcctcgacgctggcgttacgtaaaccttgcaaaccgcccatatatttcaacaacatttgccgacgttttggcccgacgccttcaatggtttccagggaactggtatttttgaccttcgcccgtttttacggtgcccgccaatcgcgtgatcatgtgattcatcgcgaatatgctgcgccgatactccgcacgcagcgggccgttagcatcaaacacacacaggaagcgacggtttgttcgcccatggtatggctgatgtcaaagcctccatccgcttcacttccggcaatttcaacacgctggcaagcgcggtcgtcgctggtgaacggtagattcgctgcgaaagtttgctggttaaggccgcgccgcattggtgcgcgcgagtttcagataacgcgccctatcgccgcgaagtatacaactcgagctggtaccggagctgtatctgaaacgttggttgtaggcggttttgaacgggtattcgaaatcaaccgtaacttccgaatgaaggcgagcatgtgtttgatttcggcaaaccgtttgaaaaactcaccatgccgaagcaatcaaaaaatatcgtccagaaaccgatatggccgacctggatattttgatgctgctaaagcattagctgaatctatcggtattacggtagaaaaagctgggggttgggacgtattgtcacagagatctttgatgaagtggagaagcacatctgattcagccaacctttattacggaatatccggcagaatgtccccgctggcacgccgtaatgatgttaacccggaaatcaccgaccgtttgaattcttcatcggtggtcgtgaaatcggtaatggttttagcgaataaacgacgcagaagatcaggctga

SEQ ID NO: 144535 - DNA, 669 bp, Homo sapiens
atggggatcaaaaccgttctcgatttggcggatacagatatccggtttatccgtaaacattttaatgtcgtgctcgaaagaacggtgcgtgaactgcgcggcgaaccctgtttgcaactggaagagtttgcaccgacgaagcaggaaattatctgttcccgctcgtttggtgaacgcatcacggattatccgtcgatgcggcaggccatttgtagttacgctgcccgggcggcggaaaaacttcgcagcgagcatcaatattgtcggtttatctccacgtttattaagacgtcaccatttgcgctcaatgaaccttattacggcaatagcgcgtcggtaaaactgctgacgcccactcaggacagcagggatatcattaacgctgctacgcgatctctggatgccatctggcaagcgggccatcgttaccaaaaagcgggcgtgatgctgggggatttcttcagtcagggagtcgcgcagctcaatttattcgatgacaacgcaccgcgccccgggagtgagcaattgatgacggtcatggatacactgaatgctaaagagggcagaggaacactctattttgccgggcaggggatccagcaacaatggcagatgaagcgagccatgctttcaccacgtgtagtacaacgcgaagttctgatttactga

SEQ ID NO: 144536 - DNA, 933 bp, Homo sapiens; identical to SEQ ID NO: 142722

SEQ ID NO: 144537 - DNA, 2136 bp, Homo sapiens
atggtgggctcgcaaatgccgattgctgtctctcatggtgaagggcgcgtggaagtgcgtgatgcggcgcatctggcggcactggaaagcaaagggctggtggcactgcgctatgtcgataacttcggcaaagtcactgaaacctacccggctaacccgaacggttcaccgaacggtattacggcagtcacgactgaaagtggtcgagtcaccattatgatgccgcacccggaacgtgttttccgtactgtcagcaactcctggcatccggaaaactggggcgaggatggcccatggatgcgcattttccgcaatgcgcgtaagcagttgggcatcaggctattcgcgtctgacgagagtaacaccttgaaacgctggcccgtttttccccgctcattacgactactggtaatgctggcatttttgctgattctgctgcccctgttggtgctggcatggcaagcctggcaaagcctgaatgcgcttagcgatcaggcggcgctggttaaccgcactacgcttattgatgcccggcgcagtgaagcgatgaccaacgcggcgctggagatggagcgtagttccgaaaagatcgcaattgttcagcagagctttgaaccggggatgacggtctccctcgttgcccggcaacatggtgtagcagccagccagttatttctctggcgtaagcaataccaggaaggaagtcttactgctgtcgccgccggagaacaggttgttcctgcctctgaacttgctgccgccatgaagcagattaaagaactccagcgcctgctcggcaagaaaacgatggaaaatgaactcctcaaagaagccgttgaatatggacgggcaaaaaagtggatagcgcacgcgcccttattgcccggggatggggaacgaaccgatgactggatggatggccgccgcagtcgtcacactgatgatacggatgtgcttctccgtatacaccatgttatcggagagctgccaacgtatggttatcgtcgggtatgggcgctgcttcgcagacaggcagaacttgatggtatgcctgcgatcaatgccaaacgtgtttaccggatcatgcgccagaatgcgctgttgcttgagcgaaaacctgctgtaccgccatcgaaacgggcacatacaggcagagtggccgtgaaagaaagcaatcagcgatggtgctctgacgggttcgagttctgctgtgataacggagagagactgcgtgtcacgttcgcgctggactgctgtgatcgtgaggcactgcactgggcggtcactaccggcggcttcaacagtgaaacagtacaggacgtcatgctgggagcggtggaacgccgcttcggcaacgatcttccgtcgtctccagtggagtggctgacggataatggttcatgctaccgggctaatgaaacacgccagttcgcccgggatgttggggacttgaaaccgaaagaacacgggcggttgcggagtccggacgaacagagcatccacagtgcgcacgcaaaaacgctggatacccaagggctgcgcaatgaatttttggttgaaaaggtatttgtcgccgatgagtacaccatggtttacagccacattgaccgaattattgttggcggcattatgccgataactaaaacggtttccgttggcggggaagttggtaaacaactcggcgtaagctatttccttgaacgtcgcgagttaggtgttatcaatattggcggtgccggtacgattactgtcgatggccaatgctatgaaatcggtcaccgcgacgccctgtatgttggtaaaggtgcaaaagaagttgtctttgccagtattgataccggcactccggcgaagttttattacaattgcgcacccgcgcatacgacgtatcccaccaaaaaagtcacaccggacgaagtatctccagtcacgttaggcgataacctcaccagtaaccgtcgcacgattaacaaatattttgtcccggatgtactggaaacctgccaattgagtatggggctgacggagctggctccgggtaacttgtggaacaccatgccgtgtcacacccacgagcgccggatggaagtttatttctatttcaatatggatgatgacgcctgcgtgtccacatga

SEQ ID NO: 144538 - DNA, 4017 bp, Homo sapiens; identical to SEQ ID NO: 129922

SEQ ID NO: 144539 - DNA, 1335 bp, Homo sapiens
atgctggcatttttgctgattctgctgcccctgttggtgctggcatggcaagcctggcaaagcctgaatgcgcttagcgatcaggcggcgctggttaaccgcactacgcttattgatgcccggcgcagtgaagcgatgaccaacgcggcgctggagatggagcgtagttaccgtcagtattgcgtgctggacgacccaaccctggcgaaggtttatcaaagccagcgcaagcgttacagcgaaatgctcgatgcccacgcaggcgtgctgccggacgataaactctaccaggcattacgtcaggatttgcacaatctggctcaacttcagtgtaacaacagcggtcccgatgctgccgccgccgcacgtcttgaagcctttgccagtgccaataccgaaatggtacaggccacgcgcacagtggtgttctctcgtgggcagcagcttcagcgtgaaatcgccgaacgtgggcaatattttggttggcaatcgctggtgctatttctggtgagtctggtaatggtactgcttttcacgcggatgataatcgggccggtgaaaaatatcgagcgcatgatcaaccgtctgggggaagggcgttctctgggcaatagcgtctcgttcagtggaccgagcgagttacgctcggttgggcaacgtattctttggttaagtgagcgcctgtcatggctggaatcccaacgccatcaatttttaagacatttatctcatgaattaaaaacgccactggcgagtatgcgcgagggcactgaattactggctgaccaggttgtcggcccgcttacgccagagcaaaaagaggtggtgagcattcttgatagcagcagccgcaatttgcaaaaactgatcgaacaactgcttgattacaaccgtaaacaggcggacacaatggcgaatctacgcaaggttcagcgactggcgcaaagtggcgttctggtggtcagcgatcgcttcccgcaggctgaaatttcgggcttttattatgatggaccggggattggcgtcgaacgtgcgaccgggaaaatcagcatgtttctggcgcagcgcgaacggcgtttataccaacaaatggcgcaatatcgcccggaatcaattattcgcctgggcattgatattgagactgccatctcccgcaagcctgaccatgactatgccgagctgcaggacaaaatcggtgtcatgtcgaagattggctataacggcacaaaaattcttgagattgattccagagcgccctacagcgaagtgctggaacaggcacagaaggcggtttctctggtcgccatcgtttctgaccgccgaagtttaacttaa

SEQ ID NO: 144540 - DNA, 1095 bp, Homo sapiens
  misc_feature (1)...(1095): n = a,t,c or g
atgggcaaaagacatgaacggccacctcacattaaaagcaacaccagtgtcctcatcgtgaaactagacgcccgatcttatcctcgaagcaatgaatctcaacaggaactggtgctccgcaggatggcaggacgcggagacgtggtgctgtcaggctgcccacgcagacagcaagccatgcaggacaccacccacgtcagtacgcatagatccacgcacgcagacatcctaccgagcagaaggcacagacccatgcacgcagcgacgcgacgcatccagggacgcgcactgctgcctactcatcccacacaggtctgcaacgatagctctgggcaccgagtgatcagccaagaatatacacgtatggttactctcttcatggttcagagagcaaagaaaactgtggcctatcctctcgctagtgtactagcagataatgacggacaaggaccatgtttggcccgaagcaaaagcgatgatgaaacgcgggcgaacgatgcggttaaccgctacaaattgctgaaaaaagatgcgcgtaccatcgccgcccagcaggtagcaaggctggaatccgccatgtgcctgcgccgccgctggtcgctggaaaacttccagctcttcctggttgagcatccgctggttcgtcacttaacccgccgtctgatttggggcgtttatagcgccgaaaaccagctactggcttgctttcgcgtagcagaagataacagctccagcaccgctgacgatgatcttttcaccctgccggaaggcgatatctctatcggcactcctcacgttctggaaatatcaccaacggatgctgccgcctttggtcagctttttgccgactacgaactgctaccaccgttccgccagctcgaccgtaacagctacgccctgacagaagccgagcgcaatgcccagtgtaacgntgaccccgctgtggcaggcagaaaatgcccgagtggtcgggtcatggggctggcgaataaaggctggataagggcgaaccacaggatggacctggatccggaggatgatcaacctttgggtcgctggtcgttatcatggaaatcgatgaaggctttgcggtag

SEQ ID NO: 144541 - DNA, 2895 bp, Homo sapiens
atgaacatcaacgaccgagcatgctcattatacgccttacaaggctcccccgacgaaagaagcacagtgccccacggcagcaacaggaaccgggcacgggcctgcagcccgccacagccaacggcgcaaccacgacacaacagagacacaccacgacaagcgatgcagaacccgaaccgacagaaagagctcagtggtaccaacgctgggttttggctggcgagtgagctggctcctgccgtcgcccgtgccttcaacaaactgaaaacgctacgcgaaaacgcccgtagctggctgttgaaatacccggaacatgcccttaccggcctgctgcctgcggcgctcggcaaagccggtgaagcacaggataacgcccgcgctgccttgcgtatgcttaccgaaaacggtcatcagccattactgcaagaaatcgcccgacgttataaccagccggaagtaaccgatgcggtgaacgctctgcttgcgctcgatcccttagataatcacccgacaaaaatccccactcttccggccttttatcagccatcgctctggacgcgcccggtattaaaagcaaatgcccaatcactgccagatagcgccctcctccacctcggtgaaatgctccgcttccctcaggaagaggctctgtatccgggattattgcaggtgaaagacgtctgttccgccgactcactggcgggatttgcctgggatctgtttaccgcctggcagaccgctggcgcgccgtcgaaagagagttgggcgttcactgcgttaggcgttctcggtaacgatgacaccgcccgcaaactgacgccattaatacgcgcctggcctggtgaatcccagcataaacgcgccaccgttgggttggatattctcgctgctatcggtagtgatatcgcccttatgcagcttaacggcatcgcccagaaactgaaattcaaagcattacaggagcgggcaaaagaaaaaattgccgacattgccgagagccgcgaactcacggtggcggagcttgaagatcggttcaccgtcagctttgatgaaaccttaaaaccgtttgtgcgtgatgtttccggcagccgcctgaaagacctgcccaaaccgaacaaaagcgatgatgaaacgcgggcgaacgatgcggttaaccgctacaaattgctgaaaaaagatgcgcgtaccatcgccgcaacagcaggtctcggggaagtgtttgccttcctgggctttcggtgccagtggcgtacccggaggcgtggcgaaggcgatgccgccacggataaactggttaaaggtgccggttttcactacgccgccccaatgggtaaagtctggtttatcgttggtttagttgtcagcaggtattatatcgccatagatgctacgaatattattggattctccttatattgctgcgcttttttacataccggaggtaccgagctgagctcagtattatgtcgagatcctgattccacttacggcaaccctggacgatttggacgactggtgacgcagtcaaattcgcgcgggattcgtatcattctcgatatggtgtttaaccatacctctacccaacatgcctggtttcgcgaggcgctgaacaaagaaagcccttaccgccagttttatatctggcgcgatggagaaccagaaacgccaccgaacaactggcgttcaaaatttggcggtagtgcgtggcgctggcatgcggaaagcgaacagtactatttgcatctctttgcaccagaacaggcggatctcaactgggagaatccagcggtacgcgcagagctgaaaaaagtctgtgagttctgggccgatcgtggggtcgacgggttgcgcctggatgtggtgaatctgatctccaaagacccgcgtttccctgaagacctggacggcgacgggcgtcgcttctacaccgacgggccacgagcacacgagtttttgcacgagatgaaccgcgatgtgtttacgccacgcgggttaatgaccgtaggtgaaatgtcctccaccagccttgagcattgccagcgatacgcggctctgacaggcagtgaattgtcgatgacctttaattttcatcacctgaaggtcgattatcccggtggaagaagccctactatgactcaattcccgaagaaaattctggtgacgtgcgcactgccgtacgctaacggctcaatccacctcggccatatgctggagcacatccaggctgatgtctgggtccgttaccagcgaatgcgcggccacgaggtcaacttcatctgcgccgacgatgcccacggtacaccgatcatgctgaaagctcagcagcttggtatcaccccggagcagatgattggcgaaatgagtcaggagcatcagactgatttcgcaggctttaacatcagctatgacaactatcactcgacgcacagcgaagagaaccgccagttgtcagaacttatctactctcgcctgaaagaaaacggttttattaaaaaccgcaccatctctcagctgtacgatccggaaaaaggcatgttcctgccggaccgttttgtgaaaggcacctgcccgaaatgtaaatccccggatcaatacggcgataactgcgaagtctgcggcgcgacctacagcccgactgaactgatcgagccgaaatcggtggtttctggcgctacgccggtaatgcgtgattctgaacacttcttctttgatctgccctctttcagcgaaatgttgcaggcatggacccgcagcggtgcgttgcaggagcaggtggcaaataaaatgcaggagtggtttgaatctggcctgcaacagtgggatatctcccgcgacgccccttacttcggttttgaaattccgaacgcgccgggcaaatattttacgtctggctga

SEQ ID NO: 144542 - DNA, 1215 bp, Homo sapiens; identical to SEQ ID NO: 129097

SEQ ID NO: 144543 - DNA, 2001 bp, Homo sapiens
atggcacagcttgtgccactgtgcctgtctgtatttaccaaccggtacgttgacttgggcaaacagcctgtgctgtataccccaagctataacatcgcctttggcaggcaccatcccccctattatcgccaagactgtgcgtcaatcagctgcaagcagggccctgccacctgcatctggccctatccaccaacgagtttggcgccagaccttgacattgggcgaactgggctgccgtggattgcgggtacatttatacctaccctttacggcattcttggtgccgggtattaccagcacccggtcatacttggttgcaactcttcaaggaagagcctatatcttcacacattccggagtcgccatactcccgttaatgtattgcaggtgaaagacgtctgttccgccgactcactggcgggatttgcctgggatctgtttaccgcctggcagaccgctggcgcgccgtcgaaagagagttgggcgttcactgcgttaggcgttctcggtaacgatgacaccgcccgcaaactgacgccattaatacgcgcctggcctggtgaatcccagcataaacgcgccaccgttgggttggatattctcgctgctatcggtagtgatatcgcccttatgcagcttaacggcatcgcccagaaactgaaattcaaagcattacaggagcgggcaaaagaaaaaattgccgacattgccgagagccgcgaactcacggtggcggagcttgaagatcggttcaccgtcagctttgatgaaaccttaaaaccgtttgtgcgtgatgtttccggcagccgcctgaaagacctgcccaaaccgaacaaaagcgatgatgaaacgcgggcgaacgatgcggttaaccgctacaaattgctgaaaaaagatgcgcgtaccatcgccgcccagcaggtagcaaggctggaatccgccatgtgcctgcgccgccgctggtcgctggaaaacttccagctcttcctggttgagcatccgctggttcgtcacttaacccgccgtctgatttggggcgtttatagcgccgaaaaccagctactggcttgctttcgcgtagcagaagataacagctccagcaccgctgacgatgatcttttcaccctgccggaaggcgatatctctatcggcactcctcacgttctggaaatatcaccaacggatgctgccgcctttggtcagctttttgccgactacgaactggtaccaccgttccgccagctcgaccgtaacagctacgccctgacagaagccgagcgcaatgccagtgaactgagccgctgggcaggcagaaaatgccgagtggtcgggtcaggggctgggaatacggtggagaagatgatgaaaaagactgccgcaattatttctgcctgtatgctgacttttgccctgagcgcctgttccggttcgaactatgtgatgcacaccaatgacggacgtaccatcgtctctgacggcaaaccacagactgataacgataccgagcctcgccaagttgatcgtcatcaaatcaagtctcttgaggattttttggggctaaaactgttccgccgccgtaatcgttcactcctgctgaccgaggaagggcaaagctatttcctcgatatcaaagagatattttcgcaattaaccgaagcgacgcgtaaactccaggcccgtagcgccaagggggcgttgacggtcagtttactccccagtttcgccattcattggttggttccgcgactttccagctttaattcagcttatccgggaattgacgttcgaatccaggcggttgatcgtcaggaagataagctggcggatgatgttgatgtggcgatattttatggtcggggcaactggccggggctacgggtggaaaaactgtacgccgaatatttattgccggtgtgttcgccgctactgctgactggcgaaaaacccttgaagacgcccacgcgcatgccgcggaaaaaaaaaacagcaaaaacaaagtag

SEQ ID NO: 144544 - DNA, 1281 bp, Homo sapiens
  misc_feature (1)...(1281): n = a,t,c or g
atgcttaaacggagcgaaaagccccttaccgtttgctatattcggtgtcccaccctcgtcagtcagtgctgggctaaatatcagattgaagcgtggcaacttatttttgaagtcaccgaaagtaatgctctgaccaatgttaagcaggcgcaaatcaccttgcagcatcttcaggaattaggctgccagattgcgattgatgatttcggcaccggctacgccagctatgcgcggcttaaaaatgtgaatgccgatctgcttaaaattgacggcagttttatccgcaatattgtgtcaaatagtctggattatcagatagtggcatcgatttgccacctggcgcgaatgaagaaaatgctggtagtggcagagtacgttgaaaacgaagagatccgcgaggcggtgctctctttggggatcgattatatgcagggttatcttattgtattaagcggcgatttctggtgtactttcttcttcaattttcaaccgccagccagccacgccttcccagtattcttgctccttttccagatcaagcagtaccagcgcattctgactaaaccagtcatgcgggaaacgcagtgtccagtgactgtcatcagtaatcagcgtcaatgttggcgtgatatcgcccttatgcagcttaacggcatcgcccagaaactgaaattcaaagcattacaggagcgggcaaaagaaaaaattgccgacattgccgagagccgcgaactcacggtggcggagcttgaagatcggttcaccgtcagctttgatgaaaccttaaaaccgtttgtgcgtgatgtttccggcagccgcctgaaagacctgcccaaaccgaacaaaagcgatgatgaaacgcgggcgaacgatgcggttaaccgctacaaattgctgaaaaaagatgcgcgtaccatcgccgcccagcaggtagcaaggctggaatccgccatgtgcctgcgccgccgctggtcgctggaaaacttccagctcttcctggttgagcatccgctggttcgtcacttaacccgccgtctgatttggggcgtttatagcgccgaaaaccagctactggcttgctttcgcgtagcagaagataacagctccagcaccgctgacgatgatcttttcannccctgccggaaggcgatatctctatcggcactcctcacgttctggaaatatcaccaacggatgctgccgcctttgtcagcttttgccgactacgaactgctagcgagctggctcacaattgtgtctgtgtgtgctcgaaacaattga

SEQ ID NO: 144545 - DNA, 780 bp, Homo sapiens
atggcttctgtgaccaaagacttatatcacagcacccaagttctttcaaatacttggaaagccttccaaagaaaaatgagtccaaacaaccccaagagtgcggaatcgaagaaagcagattcgcggcaaaaaggcccacggttggagggtccggggggcccccttgtgcctacggggagcccaggctcccggcaaaagagagacaggaaccaacacacaaaagaaactgatacagagaaggccagacacaagacaagaagaggagataacgccccacagagagccgtaaggagcggaaagaaacaaaagaagacacaacagcgtagcgaacctgagcacggttccgctcggtacccagtgaatattcgccggaattgcgcccatgccagcggtgttgataaacagtttatctaccgcgccgcgctgcaccactttagtatcgccagtaacgatggcaatgcctgccgcgcgggcggtttctgccatgctggtcactacggctttcagtgtctccatcggcaatccttcttcgaggataaagccacaggagagatagcgcggaataacgccactgaccgcaacgtcattggctgtgccgcaaatcgccagcttgccgatattaccgccagggaagaacagcgggtcaataacgtaactgtcggtggagaacgccagacggtcgccttccgctaccagctgcgccaaatcaagacgtgcctgatcttcctgctctgccagccacgggttggcaaaggcttccataaacaggctgttgattaa

SEQ ID NO: 144546 - DNA, 858 bp, Homo sapiens
atggtggggctgccgattgccgcggcgctgggggcgttaggtggaaatgccaacgccgggctggaagtgctgaaagacgcaacagcgcaggcaattgccgatgccaaagcactgctggcggcggggaaagtctccgttaagatccaggaaccttgcgatgaaatcctcttctcacgcgccaaagtctggaacggtgagaagtgggcgtgtgtcaccatcgtcggcgggcataccaacattgtgcatatcgagacgcacgatggtgtggtgtttacccagcaggcgtgtgtggcagagggcgagcaagagtctccgctgacggtgctttccagaacgacgctggctgagatcctgaagttcgtcaatgaagtcccgtttgcggcgatccgctttattctcgattccgcgaagctaaattgtgcgttatcgcaggaaggtttgagcggtaagtgggggctgcatattggcgcgacgctggaaaaacagtgcgagcgcggtttgctggcgaaagatctctcttcatccattgtgattcgtaccagcgcggcatccgatgcgcgtatgggcggcgctacgcttccggctatgagtaactccggctcgggtaaccaggggattggtaccgagctgaatgtatcatgtagattcccagccaccaacttgtttgtgcatgatccgacccagcaggctatgcagcgcaatcagcgccggttcgctgtccagacgttccccgtatggcgggttgctcaacactgtgccgtacggccctttcggcagcggattggtcagttgcgcgacatctttcacctcaaaggtgatcagttcaccaatcgccctgcaaagatcgtggcgttttaa

SEQ ID NO: 144547 - DNA, 797 bp, Homo sapiens
atgagcgacgcagaagacggtgcaaggacgaccctggggtcgggtaacgccgttgagcgtctggcagatgctttaagccagcaaaatgttaccgtgattaaatccacctccttggatgatggttttgccattctctcttcaaacgaagccattgactgcctgatgttcagctatcaaatggaacatccggacgaacatcaaaacgtcagactattgatcggtaagcttcatgagcgccaacaaaacgtgccggtcttcctgttgggcgatcgggaaaagccctcgccgcaatggatcgcgacctgctggagcttgtcgatggaattcgcctggatatttggaagataccgccgactttatcgccggagcgcgccgttgccgcgatgacccgctaccgccagcagctgttgccgccactgttcagcgcgctgatgaaatatagtgacatccgagtgaatattcctgggcagcgccaggccaccagggcggcgttggttttgaccaaaacacccgccggacgtttctaccatgactactaccgtttgttgcgtgtcgcttgggttcttcataagacggagtgtagattaatcaactttcctgagacacctatttttggcaactcatttagatatgacattgaagtgtcgaatgaatcaccggatgaagaagtcaaactacgacgtcatcatttagccagatgtatgaagaattttaagacggatatctatttcgtttccacgtttgaaccgtcgacaaaatcggtcgatttgctcacggttgaaacttttgctggtacg

SEQ ID NO: 144548 - DNA, 1624 bp, Homo sapiens
atgcagcaattaatcaacagcctgtttatggaagcctttgccaacccgtggctggcagagcaggaagatcaggcacgtcttgatctggcgcagctggtagcggaaggcgaccgtctggcgttctccaccgacagttacgttattgacccgctgttcttcctggcggtaatatcggcaagctggcgatttggtttttacttcgcgctggcacacattgtggttccgcttggttctatggggatggatgtttacgtggtggaacgcctggggctcgggacaacccattatacgtccgttacccgaccggattcggtaaccagaccattccgggcaatgaatattcgcgtttggcattttgtttgtcaccgtctttttctacgccgtgtcgttcacgctggcgatgggacatgacgaagcggtaaaagcctatgagcagaatatttccgcgctggcgattgccgcacagtttattagcggtgacggcgcagcgtgggtgaaagtggtcagcgtcattctcaatatctttgctgtcatgactgcattctttggcgtctatttaggctttcgcgaagcaacgcaagggatcgtaatgaacatcctgcgtcgcaagatgcctgccgagaagattaacgaaaatctcgttcagcgcggcatcatgattttcgccattttgctggcctggagcgccatcgtactgaacgcaccggtgttgagcttcacctctatctgtagcccgattttcggcatggtttttaatatgtttgattcgactttaaatccgttatggcagcgttacatcctcgccgttcaggaggaagtaaaaccggcgctgggatgtactgaaccgatttcactggcgctggcggcggcggttgctgcggcagaactggaaggtccggttgaacgtgtagaagcctgggtttcgccaaatctgatgaagaacggtctgggcgtcaccgttcccggcacgggaatggtggggctgccgattgcggcggcgctgggggcgttaggtggaaatgccaacgccgggctggaagtgctgaaagacgcaacagcgcaggcaattgccgatgccaaagcactgctggcggcggggaaagtctccgttaagatccaggaaccttgcgatgaaatcctcttctcacgcgccaaagtctggaacggtgagaagtgggcgtgtgtcaccatcgtcggcgggcataccaacattgtgcatatcgagacgcacgatggtgtggtgtttacccagcaggcgtgtgtggcagagggcgagcaagagtctccgctgacggtgctttccagaacgacgctggctgagatagtgggttacacctcgaacgaacctgttatgctgtgcctgatgtcggctatcgaaacaggggtcattttcctgattaatgatggtatcgaccgtggtcttaatctcaggtcgaacttcatcgacaagctccagcaggtcgcgatccattgcggcgagggctttttcccgatcgcccaacaggaagaccggcacgttttgttggcgctcatgaagcttaccgatcaattgtctgacgttttgatgttcgtccggatgttccatttgatagctgaacatcaggcagtcaatggcttcgtttga

SEQ ID NO: 144549 - DNA, 2958 bp, Homo sapiens
atgagcatagagagcaggcactcgttcaccattccaggggtgtttaaagcaaatcggcgctatacgatggctgtagtcagtagcagcaggcgacctgtttgccgttgtggggcggatctcctcaagcagctccatccggcaggagccgtactaacagccgaagtgacgaaaggacgtcagaaccttcggcaaaaaggaggagaccaagaaaaagaagagaagaagaagggtaacaagacccaggagagaaaagagaaagggaacagcacactgacaacagtgaccaatatttcaccgggttcccccgctcatccaaacttgtccgtcatcattttcagcagttgccatcgcccaattcatttcgatgcgttttgcgtccccagctttaagtgtaccggtagtaatgcatgctccccgctcgctacggtcgtagttgttgtcggccgcctatccgtcccatgtattcgtgacctgttatcccgcctcaagtacttatcaaggaccgtcaacagctatagcaggttgtggttggcgatcgatggtttctatggccgtcatgccgttgaagtactgtatcaaaaccaggcgcgctacagcgtctgcttcaactgctggaaccttacctgccaccgaaacgcattgaggttgttatgcaaaaacgggcgatttatccgggtactttcatcccattaccaatggtcatatcgatatcgtgacgcgcgccacgcagatttcgatcacgttattctggcgattgccgccagccccagtaaaaaaccgagtttaccctggaagagcgtgtggcactggcacagcaggcaaccgcgcattggggaacgtggaagtgcgccacataaacgtgcaccatctgtgcttattttgcgcagcaatcagcgtaatacgacgcagcaagcgacggacgaattgacccagtttagcatgaacgcgggatgcctgctgagagtgcgacctaaatgcatgcaagctggcatggcctgctttgttttggctgttgtgtgtgtgccatggtgtggtcctcagtccggccccggccaatgccgttatagcgcgctcctttttactattgtgtacttcctaattctctatcccaatacgtacgtgtgcggcagcttggttagtgtctttcctcgtattggccccttgcggggtgagtgtaggttgctcatcgccgtaggaccgtgctcaagccgcattcgtatttctagtgggattacttcatcccgcagcgtccacttcagccatatactcaacttacatcacgttcgcttcagtccccttcaagctcttgcttaccgtgtccttgcgctgtgtctgcccactaagcccgcgactgattgcatcgcttacccaacattctccgtgccatctaccagggtattccgcataaaagccttacccattatcctcccgccgcccttttcctttcgccccatctaccacatcgtcccacccgccaacggccggatcaggtccactccttatagcttcgcacgcaacggttcgtgtcttctctccaggctctccgttacccgtctcccgctgtctcccatctttgtccgtgtctatccccggcgcacagcagtatgtttttccccgccgttcaacacgcatttaaataaggcagttggtgctggtttgtgctatgccatacgtattcgcatcccgtttcccgcttactccccatgcggttcgggcatgcgggttactagtcgccaaaggcagggtaaagccccaggcaagttcggtatctcgtccgcaatcgcctccgttatggcggttatcaactggcgctgctacgagtttttggtgtactcctccaaatccataagggctcggcagtgtgtccagccgcaggttatcctggcgcacaatgcgtgtattcaggcctcggtggtcgacaactccgggcacacgttcaaatttgctgttgtagtgttcgtccccctgtacttcctcggtccagtcattctctcaatgcattgtccatccgcaatcgtgtgtccacttctctcgctaaaatcggcgctatacgatgggcagttccgtagcgtccaagtccccacctcttctcggcattgtatgcttatgtatctcgaccctacctaccaaccccctacaccaccgtgtcgcccgtcccggctacatcgccgaggctaccaccacggtcctccaattacaatactaaatcggcgctatacggacgtagccatcagcgggaccaccgcccactacggaccctccctggaggtgcccaccacggtcccgtacaaagcgctccaactgggggaccaattcggctcggcgcaccaagagcgtttgccagttctggtagtgttcctgcgggttcttaccggtgacagcggtgatttccgccgcagcagacacatgatgatgccgtctttgtcggtggaccacggcgtgccgcgaaacgcaggaaggaagcccctgcactctcttcgccgccaaagccgaactgccgtcgaacagaccatcgacaaaccatttgaaacctaccgggactttaccagtttacggcccaagtcgttgaccacacggtcgatcatcgcagataaaccagcgttttaccgacggcaacatctttgccccactgcggacgatgtggaacagcaacgccagatcgaacttatcacgcagtgccagcaggcccgccatcgcacctcggaggagcagtccatacggatcgcgccgtctttatcaagtattcgatacgggaaccgcccagcgatcaacgccaagcgtcaggcccgctttctgaatcgcggcaatatcaacgtatcggccagaccttccacgaacggctgcaccagatcctgctctttcactgaccggatgccatcgcttcgtcgagggagatacgcttcacgcctttcagccatcggccagcagtgcgttggccctgtcttccaccacttatag

SEQ ID NO: 144550 - DNA, 670 bp, Homo sapiens
tccaagtccccacctcttctcggcattgtatgcttatgtatctcgaccctacctaccaaccccctacaccaccgtgtcgcccgtcccggctacatcgccgaggctaccaccacggtcctccaattacaatactaaatcggcgctatacggacgtagccatcagcgggaccaccgcccactacggaccctccctggaggtgcccaccacggtcccgtacaaagcgctccaactgggggaccaattcggctcggcgcaccaagagcgtttgccagttctggtagtgttcctgcgggttcttaccggtgacagcggtgatttccgccgcagcagacacatgatgatgccgtctttgtcggtggaccacggcgtgccgcgaaacgcaggaaggaagcccctgcactctcttcgccgccaaagccgaactgccgtcgaacagaccatcgacaaaccatttgaaacctaccgggactttaccagtttacggcccaagtcgttgaccacacggtcgatcatcgcagataaaccagcgttttaccgacggcaacatctttgccccactgcggacgatgtggaacagcaacgccagatcgaacttatcacgcagtgccagcaggcccgccatcgcacctcggaggagcagtccatacggatcgcgccgtctttatcaag

SEQ ID NO: 144551 - DNA, 1755 bp, Homo sapiens
atgctggggctgagttcccccggacggcaatggttgggtaaacccattgttgaagtggtcaggcccgccgatttctttaccgaacagattgatgaaaaacgtctggatgtggtggcgaactttaacggtctgagcgttattgccaaccgggaagctattcgttcaggatccagcggcgcggggaccaccaccaccagcctcgcgtttcgtaaaatattcgcgcagttaaatctgcatgcagctgaggtggaaggcgacagttttcaccgttacacccgcccggaaatggacatggcgatccgcaaagcgcgcgacgccgggcggcatatcagctacttcggccccgaggctaacgacttcggcctgctggaacaaaccttcattgaatacgtctgttcgaccgcaacttctgctttggcgggcgaaaacagtgcaggggcttccttcctgcgtttcgacagcactccctggtccaccgacaaagacggcatcatcatgtgtctgctggcggcggaaatcaccgctgtcaccggtaagaacccgcatgaacactacaaccaactggcaaaacgctttggtgcgccgaactacaaccgtttgcaggcagctgcgacttcctcacaaaaagcggcgctgtctaatctgtctccggaaatggaaatggcggtcggtctgtcgcaaatcatctccacgcaactggaggtttcacgcgccgagcagctacgtgaaatggcaaataaggcagagcttcgcgccctgcaaagcaaaattaatccccattttctgtttaacgctctgaacgctatttcatcgtcaatccgtctgaatccggataccgctcgccagttgatctttaatctgtcgcgttatctgcgctataacattgaattaaaagacgatgagcaaatcgatatcaaaaaagagctgtatcaaattaaagactatattgccattgagcaggcccgctttggtgacaagctgacggttatctatgatattgatgaagaggtgaattgctgcattcccagcctgctgatccagccgttggtggagaacgccattgtccacggtattcagccttgcaaaggtaaaggcgttgtcaccatcagcgttgcagagtgcggaaatcgggtacgcattgcgtggtcgatagaaaaacaatccgtcatctttgaaaaagccggtaacagcaccgactccgcactggcagcggtatttgtaccgactggctacgatgaatacaccagctcagcctatagctctctgttggggcagatcgtacagccgtggttctacaatcagttgcgtaccgaagaacaattgggctatgccgtgtttgcgtttccaatgaacgtggggcgtaaagcgggtgaaacttataacattggtgggcacaacaaagagaaaaacatcgatgtagtgctcactatttgtgatttgctggatgaaattgtaccgaaagagaaatcttatcgtgagcaaatcacttatgttgctgatcgtccgggacacgatcgccgctatgctattgaggctgagaagattggtcgcgcgttgggatggaaaccacaggaaacgtttgacagcgggattcgtatatcggtggaatggtacctgtccaatacaaaatgggttgataatcatccaccatgcaaccggggtcattgcttttggattcagatcaataaattcctggcaggtcatatctttagcggattcattggctgccaacgcagattgtgcgttcaccagtga

SEQ ID NO: 144552 - DNA, 700 bp, Homo sapiens
atgggacacgcggcggaaagttatacgctattgaccattggcgacggtctggtggcacaaattccggcgctggtgatttctaccgccgcgggggtcatcgttacgcgtgtcagcaccgatcaggatgttggcgagcagatggtgaatcagctttccagtaacccaagcgagatctttttgcttgctgaacgggatgcggcaacgttgctggcgctgctgaccagcgatgatgcgccgaccgacgacgtgttaagcgcggagtttgtggtgcgcaatgaacacggcctgcatgctcgtccaggtaccatgctggtcaataccattaaacaatttaacagtgatattaccgtgacaaaccttgatggtaccggcaaaccggcaaacggacgtagtctgatgaaagttgtggcacttggcgttaagaaaggtcatcgcctacgctttaccgcccagggtgcagatgctgaacaggcgctgaaacatatcggcgacgctatcgctgctgggcgcataatgagcagacgtgttgctactatcacccttaatccggcttatgaccttgttggtttctgcccggaaattgaacgcggcgaagtgaacctggtgaaaaccaccggtctgcatgcggcgggtaaaggcatcaacgtggccaaagtattaaaagacctgggaattgatgtcaccgttggcggcttcctgg

SEQ ID NO: 144553 - DNA, 1613 bp, Homo sapiens
atggtgctgtttccattccagatcccgcggggctgctgtcaacctttatcggcgcgccatattttatctatttgtgagaaagcagagccgttaatttttccatataacggccctgtacgcctggcggataaagcgtttacgcgacaacggatgcccgatgcgacgctggcgcgcttatcgggcctacaaacggccccgaatcgtttgtgccgaaccgtaggccggataaggcgttgcgccgcatccggcagttggagcacaatgcctgatgcgacgcttgacgctcttatcaggcctacaagtctgtgccgaaccgtaggccgtatccggcattcacaaatagagcgccggaaatatcaaccggctcaccccgcgcacctttacgcatcagccaacggctcaacgtcttccggcgtggcgctcgcccagcttgcgcctcgccatacacgccgtgggcatgaaacgcgttcaggcgtaccgaacatcgccgagtcccttgataaacgccgccagttcttcagatgtgttgaaataatccacctggctgtcatctccaaccgtctgtatggggctgaccgtgttctcccatcatgcctttcatccggctctgaagctttggttgtggtggtgctggcgctcaccatttccggagacagcttagacagcgccgcttttgtgcggaagtcgcagctgcctgcaaacggttgtagctcggcgcacaaagcgttttgccagttcgttgtagtgttcctgcgggttcttaccgccgaagctgccgtcgaacagaccatcgacaaaacatttgaaactaccgggacttctaccagtttacggcccaagtcgtttgacaccggtcgatcatcgcagatgaaaccagcgttttaccgacggcaacatctttccccactgcgggagatgctggaacaggtaattgattgccaacggcaggagtggttcggattcatcaaaactggccgaatgacgatacgtggacgcgggggaaattcactacgagaaccgttcgctgtatgcaatgagcgaggccaccgccgtcgcctgctgcgtaccgaatggggcgtggtgcatcagcatccctcgacggcctgcgccgccaggtgtcggcaggcggcaatatcggcgagcgctgatggcgaccggggcacgtcattacggcgatattcgtgccaccgcgagaagtggctggaaaaagtggaaatttcccccaaccggaatgaccacctgccaaccactttttccggcggggcaagtggtgagagtgggttaaccgaccgcgtgctcgacgacccgcatcatccgtataacagctgctggtgtcatcggttttgcagaattgagccggtgccggatgcgcgtaaacgccttatccggcctacaaatgcgctcccccgtattgtcattcttctggatcgccgctatctgcgatcgcgccagcttctacaagatgaaatgaagcgaaagagaagctggtggcgctggggcatcttgcggcagcgttgcccacgaatccgtaacccactttcctcgattaaaggactggcgaaatactttgccggcgcgcgcctgcagggggagaagcgcatcaactggcgcag

SEQ ID NO: 144554 - DNA, 1056 bp, Homo sapiens
atggcatccggtcatgtgaaagagcaggatctggtgcagccgttcgtggaaggtctggccgatatcgttgatatggccgcgattcagaaagcgggcctgacgctgggcgttgatccgctgggcggttccggtatcgaatactggaagcgtattggcgagtattacaacctcaacctgactatcgttaacgatcaggtcgatcaaaccttccgctttatgcaccttgataaagacggcgcgatccgtatggactgctcctccgagtgtgcgatggcgggcctgctggcactgcgtgataagttcgatctggcgtttgctaacgacccggattatgaccgtcacggtatcgtcactccggcaggtttgatgaatccgaaccactacctggcggtggcaatcaattacctgttccagcatcgtccgcagtggggcaaagatgttgccgtcggtaaaacgctggtttcatctgcgatgatcgaccgtgtggtcaacgacttgggccgtaaactggtagaagtcccggtaggtttcaaatggtttgtcgatggtctgttcgacggcagcttcggctttggcggcgaagagagtgcaggggcttccttcctgcgtttcgacggcacgccgtggtccaccgacaaagacggcatcatcatgtgtctgctggcggcggaaatcaccgctgtcaccggtaagaacccgcaggaacactacaacgaactggcaaaacgctttggtgcgccgagctacaaccgtttgcaggcagctgcgacttccgcacaaaaagcggcgctgtctaagctgtctccggaaatggtgagcgccagcaccctggcaggtgacccgatcaccgcgcgcctgactgctgctccgggcaacggtgcttctattggcggtctgaaagtgatgactgacaacggctggttcgcctgcgccgtcctgtcaggcacggaagacgcatataagatctactgcgaaagcttcctcggtgaagaacatcgcaagcagattgagaaagaagcggttgagattgttagcgaagttctgaaaaacgcgtaa

SEQ ID NO: 144555 - DNA, 2305 bp, Homo sapiens
atgtgtctgctggcggcggaaatcaccgctgtcaccggtaagaacccgcaggaacactacaacgaactggcaaaacgctttggtgcgccgagctacaaccgtttgcaggcagctgcgacttccgcacaaaaagcggcgctgtctaagctgtctccggaaatgaggctgaatcgtttcaattcagcaagagaggagaactatgttccagttatccgtacaggacatccatccgggcgaaaaggccggagacaaaaagaggcgattcgccaggtcgctgcggcgctggtgcaggccggtaatgtagcagaaggctacgtcaatggcatgctggcgcgcgaacagcaaacctcaacgttcctcggcaatggtattgctattccacacggcactaccgacacccgcgatcaggtgctgaaaaccggcgttcaggtatttcagttcccggaaggcgtccacctggggtgacggtcaggtagcgtacgtggcaatcggtattgctgccagctcggatgaacatctgggcctgctacgccagctgacccacgtactgagcgatgattccgttgctgaacaactgaagtcagcaacaacagcagaagaacttcgcgcattactgatgggcgaaaagcagagtgagcagctgaagctcgacaacgaaatgctgacactggatatcgtcgccagcgatctgctgactcttcaggcgctgaacgctgcgcgtctgaaagaggcgggggcagttgacgccactttcgtcaccaaagccatcaatgaacaaccgctgaatctcggacagggtatctggctgagcgatagcgccgaaggcaatctgcgtagcgcgattgcggtaagccgtgcggcaaatgcttttgatgtggacggcgaaacggcagccatgctggtgagtgtggcgatgaatgacgatcagcccatcgcggttcttaagcgtctcgctgatttattgctcgacaataaagctgaccgcttgctgaaagcggatgcggcaacgttgctggcgctgctgaccagcgatgatgcgccgaccgacgacgtgttaagcgcggagtttgtggtgcgcaatgaacacgggctgcatgctcgtccaggtaacatgctggtcaataccattaaacacttaccaggatattacggggacaacctggatggtcgcagcaaaacgtgtaccacccaaagtggcggccacaagaagactgcaccaaccaccaagagaaaaaaagcatcgtgcacctgtgacaacgcacacgcgggtgatatcaagcagccggcaaaacaagcggtctcttgtgatatcacatggcatgtggcctctggaaaaactccgctgtctagttgtaaaagaatacaagctttccagtcaataatgatcatgacgatgcttgatcatacacatgagtacttgaatgcaaagctgaagtgcttcatgccatctattctgaatttcaaggtactgatcttcacaaccgaaaaagcccaaataaacgaggaaataaagaagggagagcttggaaaccaagagtctatgagctcgaagggagcatgcaaaggctgggcccgctacccaggccctgtgaaccggaatggccgagaatcgcgggctttccttcagccagacaactccaacaagcttctctctgtgatcactaccaaacagacacaaagcagacaatatgatgaagaggcagaggggacgcgagagagcaaaacgataacaaagaatcaagacaagagacaaaacaccacacaacacaacaaaacaacaacacaaacagcgacgcacaccgcacacacgacaccaaccacgagccacccaggccagccggccggcgacgacgccacacaacgcaacgagcggccaccactcaccccacacaccaacccacacccgcaaacggcagccccacacacaacaagaccaccaccccgagccacacgacaccacgcaagccgccgcgcacaacggacacaaacaccgaaaccccgcacgcccacgagacacaccagcgcaaacaacccgcgaacgcagcgcacagaatggccaacagacagcccccagcacacacgcgcgaacaaagacagaagaagccagaaccgaagccaagaaaaacccgccagcacgcgacaaccagagcaaccacagaccccacagccacagacaccagacacaagccagcacagaacagaaaagaaagactaccacaccgcaaccgaaagggacaaacataccgaccacaccaacacagcaccgccagcgcaccccgacgaggaccactcggtagtggtgtaa

SEQ ID NO: 144556 - DNA, 723 bp, Homo sapiens
atggcaacaaataaacgcacactcagtcgcatcggtttttactgcgggctggcgctgtttctcatcatcacgctgtttccattttttgtgatgctgatgacctcgttcaagggcgcgaaagaggcgatctcactgcatcctacgctgctgccgcagcagtggacgctggagcattacgtcgacatttttaacccgatgattttcccgtttgtcgactacttccgtaacagtctggtggtgtctgtggtttcatccgtggtggcggtattcctcggcattcttggggcttacgcgctttcccgcctgcgctttaaaggtcggatgaccatcaacgccagcttttacacggtgtatatgttctctggcattttgctggtggtgccgcttttcaaaatcatcaccgcgcttggcatttacgacactgagatggcgctgatcatcaccatgctacttcgacaacatcccgatgagatccgaagaagcggggataatggatggctcaaccggcttgcaaatttcttccggataccgggccgtgcgaaatcccgcgaaatccgggtcgccaagagaataggggggcgggagcacaactggtgggggaaatcccccgggccagataccaccggggggacacacacgccacaccatcactgcgagcgaaggacgaacacaaagcggagagattattacgcaaaaagcacggcgcagagagagcccgagtaa

SEQ ID NO: 144557 - DNA, 2691 bp, Homo sapiens; identical to SEQ ID NO: 138482

SEQ ID NO: 144558 - DNA, 2322 bp, Homo sapiens
atggtcacggattttgccgatttcggaaccaccatcaaacaggattttcgcctgctggggcaaaccagcgtggaccgcttgctgcaactctctcagggccaggcggtgaagggcaatcagctgttgcccgtctcactggtgaaaagaaaaaccaccctggcgcccaatacgcaaaccgcctctccccgcgcgttggccgattcattaatgcagctggcacgacaggtttcccgactggaaagcgggcaggattttgccgattttcggaaccaccatcaaacaggattttcgcctgctggggcaaaccagcgtggaccgcttgctgcaactctctcagggccaggcggtgaagggcaatcagctgttgcccgtctcactggtgaaaagaaaaaccaccctggcgcccaatacgcaaaccgcctctccccgcgcgttggccgattcattaatgcagctggcacgacaggtttcccgactggaaagcgggcagtgagcgcaacgcaattaatggattttgccgatttcggaaccaccatcaaacaggattttcgcctgctggggcaaaccagcgtggaccgcttgctgcaactctctcagggccaggcggtgaagggcaatcagctgttgcccgtctcactggtgaaaagaaaaaccaccctggcgcccaatacgcaaaccgcctctccccgcgcgttggccgattcattaatgcagctggcacgacaggtttcccgactggaaagcgggcaggattttgccgatttcggaaccaccatcaaacaggattttcgcgtgctggggcaaaccagcgtggaccgcttgctgcaactctctcagggccaggcggtgaagggcaatcagctgttgcccgtctcactggtgaaaagaaaaaccaccctggcgcccaatacgcaaaccgcctctccccgcgcgttggccgattcattaatgcagctggcacgacaggtttcccgactggaaagcgggcaggattttgccgatttcggaaccaccatcaaacaggattttcgcctgctggggcaaaccagcgtggaccgcttgctgcaactctctcagggccaggcggtgaagggcaatcagctgttgcccgtctcactggtgaaaagaaaaaccaccctggcgcccaatacgcaaaccgcctctccccgcgcgttggccgattcattaatgcagctggcacgacaggtttcccgactggaaagcgggcaggattttgccgatttcggaaccaccatcaaacaggattttcgcctgctggggcaaaccagcgtggaccgcttgctgcaactctctcagggccaggcggtgaagggcaatcagctgttgcccgtctcactggtgaaaagaaaaaccaccctggcgcccaatacgcaaaccgcctctccccgcgcgttggccgattcattaatgcagctggcacgacaggtttcccgactggaaagcgggcaggattttgccgatttcggaaccaccatcaaacaggattttcgcctgctggggcaaaccagcgtggaccgcttgctgcaactctctcagggccaggcggtgaagggcaatcagctgttgcccgtctcactggtgaaaagaaaaaccaccctggcgcccaatacgcaaaccgcctctccccgcgcgttggccgattcattaatgcagctggcacgacaggtttcccgactggaaagcgggcatccagtgaccaccattgtctttcacaaggaacagccccctaagtggcttccacgcttcataaattctctaccccaagccactcttcagaaatactgttatcagaaagggatccttatccataccccaagagatggttcttggatgtcgtgccagaaagaatttggggaaacagctatgaccatgattacgaattcgagctcggtaccccaaaatgcccatgcaatgtatgagaacgatgcctgcgccaaagcgcttggcatcgacattatctcaatggatgaaggctttgctgtagtgaccatgaccgtcactgcacaaatgcttaacggtcatcaaagttgccacggcgggcagctattttcactggctgatactgcctttgcctacgcctgcaatagccaggggctggcagccgtcgcttctgcctgcacgattgattttttgcgtccaggctttgccggagacacctcccccgctactgcgcaggtacgtcatcagggcaagcaaaccggtgtttacgacatcgaaattgttaaccaacaacaaaaaacggttgcgctgtttcgcggtaaatctcaccgcatcggcggcaccatcacaggagaagcctga

SEQ ID NO: 144559 - DNA, 2677 bp, Homo sapiens
atgagtaggggctatggaaatccttggcaggtcaggacttcgagcttcctggggcctttctatatctctttggcgggtggtgtagtattttccccttggtgtatcgttggggggtaccgatgcctcctagtacctgggtcctttcggtctgacctcgtcctgcaacagcagggcaaaacagtgctgcaaattgcagattacccaggaatgctgattttgcgatcggtagcaatgatcatcaatgaagcccttgatttgcttcaaaaaggcgtggcctctgaacaggatatcgataccggcagccgtcttgttgtgaattatccatatggcccacttgcctggggagcgcaacttggctggcagcgaatattaaggctccttgaaaatctacagcatcactatggcgaagaacgctatcgcccatgttcattgctgcgccaacgggcgcttctggagagcggttatgagtcataaggcctggcaaaatgcccatgcaatgtatgagaacgatgcctgcgccaaagcgcttggcatcgacattatctcaatggatgaaggctttgctgtagtgaccatgaccgtcactgcacaaatgcttaacggtcatcaaagttgccacggcgggcagctattttcactggctgatactgcctttgcctacgcctgcaatagccaggggctggcagccgtcgcttctgcctgcacgattgattttttgcgtccaggctttgccggagacaccttaactgctactgcgcaggtacgtcatcagggcaagcaaaccggtgtttacgacatcgaaattgtaaccaacaacaagaaggatccagggccaatcagcgtcagctttgattaccgagggcaccggaaagagattttcgcacaggctatccacaacgccagcccgcgcaacagcaaaccagttattgctattaactgtggcgcatggcccgagcaattgctggagtcggagctgtttgttcatgcgcgtggcgcgtttactggcgctgtcagcaatcgcgaaggtttattccaggcggcggaaggcggaacgctatttctcgatgaaattggcgatatgcctgcgccgttacaggtcaaactgctgcgcgtgttgcaggagcgtaaagtgcgcccgctgggcagtaaccgcgatattgatatcaatgtgcggattatttctgccactcaccgtgatctgccaaaagcgatggcgcgcggggaattccgcgaagatctctattaccgcctcaacgttgtcagcctgaaaattccggcactggcggagcgcacagaagacattccgctactggcaaatcacctgttgcgccaggcggcagagcgacataaaccgtttgtccgcgcgttctctaccgatgcgatgaaacgcctgatgaccgcgagctggccgggtaatgtgcgccagttggtcaacgtgattgaacagtgcgtggcgctgacctcatctccggtgattagtgatgcgctggtggagcaggcgctggagggtgaaaatacggcgctgccaacctttgttgaggcacgtaatcagtttgaactcaactatttgcgtaagctgctgcaaatcaccaaaggcaacgtcacccacgcggcgagaatggcggggcgcaaccggacagaattttataaactgctttcccgacacgagctgatgcaaacaatttcaggaggtaccgcgatttccagcttcaggttttccgatattcggctcacgataaccgtgattcagtcgctaatcacgttcggttggcatcggcgtacacgaactcatgccgcccgtaccgccgcccatcagcaccagtttgccgacgcgctccggccatttaagggtgaacgccacagaactatggccccccatcgagttgcccagcaggtggattttggcgatatccagttgatccaccacgcttttcaggattcgtgcattaagatccgatcgcgaaccactattaacgaccgaatcgctcttgccccaacccggacaatccagcaggatcacccgatagcccgcctctaccagcggatcgatattgcggctgaagttcgcccagccagtagcacccgggccggaaccatgcagcaggacaacggtttcgtcgccttgtccgcagtcattaaaatggatgcgcagcgttttacccgcttcttctacattcagaaaacggctggtggcggcttcggtttgtggctgataactcatcatcttctcctgcatattcagttctctgttctggcgcttaacgagccaaatccggcaatccactccgggattgggcgaaatagcggcaaaagcggcgacccaggttttgatttcatgtgtcgactttccggcaatggcggaaagctcttcgttactgacggcatccagttcctgtatgcgtccctgctccagcaaagtcatgaactggttatcccaaatcgggttgagcggatgcagcgttctctgatcctcaacaacttctcagcggcgctatcacccgtgctggtcagaaatggacgctatcttcggcaaccacgtatggcaaaacatttgcgcaatacttcccgccaggacttgaaataccgtctgtgtagaataaaccatagctatggtgttatctgccgacaacgccatccggagaagccgaatgacgttgtcggagtaagcgctggttaa

SEQ ID NO: 144560 - DNA, 1237 bp, Homo sapiens
atggacaaacttggcaatggcggtaaagggatttcgtggaatacccaggatgaaatcgatttcctcggcaaactcaattacaccaagcgtgatggcccggcacaggggcgtccgctgattgacaccgccattgacgcttcagaagtgattctggcactggcaccggaaaccaacggtcatgttgcagtcaaagcgtggcaggcgctgggcgagatcaccgggcgcgaacatacccatctggcgctgcacaaagaggacgagaagattcgctttcgcgatattcaggcgcagccgcgtaaaattatctccagccccacctggtccggtctggaaagcgatcacgtctcctataacgcgggatacaccaacgttcatgagttaattccgtggcgcacgctgtcgggacgccagcagctctatcaggatcatccgtggatgcgtgcttttggtgaaagcctggtggcttatcgcccgcctatcgacacccgtagcgtcagtgagatgcgccagataccgccaaacggcttcccggaaaaagcacttaacttcctgacgccgcaccagaaatggggcattcactcaacctacagtgaaaacctgctaatgctgacgctctctcgcggtggaccgattgtctggatcagcgaaacagatgcccgagaactgaccattgtcgataacgactgggtggaagtattcaacgccaacggcgcgctgactgcccgcgcggtggtcagccaacgtgtaccgccgggcatgaccatgatgtatcacgcccaggaacgcattatgaatattcctggttcggaagtaactggcatgcgcggcggcattcataactcggttacccgcgtttgcccgaaaccaacgcatatattggcggttacgcgcagctggcctgggcttaaatactacggcaccgtcgatcgaaccggaagagtttatatgaccagcgacgtcaacgcatgggcgatggcgaacggctgtgttcgtgtctacagtggcctgatggacatgatgaatgacaacgaaattgaaggcgttctgggccatgaactgggccacgtcgcgttgggtcactcgcttaccgccatcaggaacagattcgcccccggttctttcgccagttttacgcgcagacggtcgataatttgctgcgccgtttcgctgcgttcgtcgagtgaacagcgggatgatgtttatcaccctcaagagtaaccagcaaaatctgctgtga

SEQ ID NO: 144561 - DNA, 906 bp, Homo sapiens
atggtagttgcgaaatcggcaatccctttaatcaaagatagcccagataggtttttcgatatgcttcgtgatctgctcaagaacgttgatcttaaagggttcgagcctgatgtacgtattttgcttaccaaatacagcaatagtaatggctctcagtccccgtggatggaggagcaaattcgggatgcctggggaagcatggttctaaaaaatgttgtacgtgaaacggatgaagttggtaaaggctcgattatgtcagctacggaccgctactctcatcaactcctctacgctaccgtccgccagcgagggtaccgagctcgaattcgtaatcatgtgctccggggtgatagtgttgagaagacctctcgggtatggtcaggtaatgaacgtgaccaggagctgcttactgaggacgcactggatgatctcatcccttcttttctactgactggtcaacagacaccggcgttcggtcgaagagtatctggtgtcatagaaattgccgatgggagtcgccgtcgtaaagctgctgcacttaccgaaagtgattatcgtgttctggttggcgagctggatgatgagcagatggctgcattatccagattgggtaacgattatcgcccaacaagtgcttatgaacgtggtcagcgttatgcaagccgattgcagaatgaatttgctggaaatatttctgcgctggctgatgcggaaaatatttcacgtaagattattacccgctgtatcaacaccgccaaattgcctaaatcagttgttgctcttttttctcaccccggtgaactatctgcccggtcaggtgatgcacttcaaaaagcctttacagataaagaggaattacttaagcagcaggcatctaaccttcatgagcagaaaaagctggggtga

SEQ ID NO: 144562 - DNA, 2865 bp, Homo sapiens; identical to SEQ ID NO: 130073

SEQ ID NO: 144563 - DNA, 825 bp, Homo sapiens
cgcttgccggggcaagagcttaccgctttcgacttctccgacagtgggacagcccgctctggcagacactggtgccgcatctcgattttgccttgcctccgccgcagaagacgaaacgctgcgtctgaagatgaaagcgattgttgcccgtggcgcaggaacagtgattgtcacgctgggtgaaaacgccagcattgcctgggatggcgcgcagttctggcgtcaggctcctgaaccggtgacggttatcgacaccatgggtgccggagattcgttcattgccggattcctttgcggctggtctgcggggatgacattaccgcaggcgatagcgcagggaacggcgtgcgcggcgaaaaccattcagtaccacgggtcgattatgtcagctacggaccgctactctcatcaactcctctacgctaccgtccgccagcgactgctggatgatatcgcgcagggggtttaccaggccgggcaacagatccctaccgaaaacgagctttgtacacaatataacgtcagccgcattaccattcgcaaagccatcagcgacttagtggcagacggcgtactgatccgctggcagggaaaaggcacctttgtacaaagccagaaagttgaaaacgccctgcttactgtcagtggttttaccgattttggcgtctcacaaggcaaggcgacgaaagagaaagtgatcgaacaggaacgggtcagcgccgcgccgttttgcgaaaagctgaacatccccggaaacagcgaagtgttccatctctgccgggtgatgtatctcgataaagacccccgtgtttattcatagctcat

SEQ ID NO: 144564 - DNA, 783 bp, Homo sapiens
atgatgatgcaagtaatttcagcagtcgctgaatttgaacgagaccttttacttgaacgcactcattccgggatagtaagagcccgcggcgcagggaaacgttttggtcgacctcctgtgttaaatgaagaacagaaacaggtggctcccgaacgaattaagtcaggtcctcacaatatagttaaatgcgatgtttttgacggtgttttccgcgttaacagcagcgttaacggtgattgtgtgtccatgttaaaccattgccacggagtgggtattagccccaataccgacagtatgcgcgtgtgcacctgcgcttgcagcagtgccggacacttgcctttctcacttggcaaggaagatggaagtggggacagaggagatggcccctttcgcttaggtggccatgggccttcctttccactaaaaggaattaccgaacagcaaaaagaaggtcttgagatagtgaaaatggtgatgatatctttagaagagggaacctttgtggtatgccgagtgcaagaacgatgcgtggaccgaacgatccttcaccgcttctcctctcgtagtaggaatggcgtgcatgacccgaaatctgttggtcgattacgaaggacggttaaaaatacctattttgtaaagttgttctcacatgtgggtattgaagagcttaatagtgtgggtggtgttttaaaggtgacgcatccttacaacaggaaagggcttaccctcttccgcagttctggcttcgaggaggtcaagccctttaaggtggcatcgccctaa

SEQ ID NO: 144565 - DNA, 410 bp, Homo sapiens
gcctgggttgtaatccaatggatatcaggaaaccagtggatcacttgcccgaaacaggtatcagagggcattgcttagcattggggggcattgacctgaccagtccaacaagaaaaatgatgatgcaagtaatttcagcagtcgctgaatttgaacgagaccttttacttgaacgcactcattccggaatagtaagagcccgcggcgcagggaaacgttttggtcgacctcctgtgttaaatgaagaacagaaacaggtggtattcgaacgaattaagtcaggtgtaagtataagtgccattgcccgggaattcaaaacctcgcggcaaaccattttaagagccaaagcaaaacttcagacacctgacataataaaaataatcttcgggggagatgctttaccgttttcc

SEQ ID NO: 144566 - DNA, 840 bp, Homo sapiens
atgtctcgaatttttgcttactgtcggatatcaacgctggatcagaccaccgaaaatcaacgccgggaaatcgaaagtgcaggttttaaaatcaaacctcagcaaataatcgaagaacacattagcggctcagcagcaaccagtgagcgtcctggttttaaccggttgcttgctcgcctgaaatgtggtgatcaattgattgtgacaaaactggatcgccttggttgtaatgcaatggatatcaggaaaacagtggaacaactgaccgaaacaggtatcagagtgcattgcttagcattgggtggcattgacctgaccagtccaacaggaaaaatgatgatgcaagtaatttcagcagtcgctgaatttgaacgagaccttttacttgaacgcactcattccgggatagtaagagcccgcggcgcagggaaacgttttggtcgaccacctgtgttaaatgaagaacagaaacaggcggtattcgaacgaattaagtcaggtgcagtattgctgcttgttgtgtacacgctgatggcggctgaggctcgagtggcaccgaaaggctttctggcaacgttgacactgataaagtgtctcctgggtgtgaactctcaggtgctggttgagatgggcactgaggacaaaagctttgccacacacattacaggatctagtcacctcttggctcacctcctccggtacgagctcgagttgtatactgcctacagtttgaaggtcaagccaagaggctttgctgatggaaggaaagagttggtggtgggaggcaagtggaagacgcagaaagcaactcccaaggccaccttcagggccaatagctaa

SEQ ID NO: 144567 - DNA, 945 bp, Homo sapiens
atggttcatgatggccagtttgccgcctgctgggagataagccagggctatgaaatgccgattggcttgtatcgtgatctggcggttggcgtagcggaagattgccagaccatcgctggtcgaggctttcacgccgttaatggtgacattgactttcaccacctggatccagacgcggcgttcagcggcaagctgatgcagcgactgctcatctttcagcaacgccccaccggtacagttccatatcctgatgcactgtcaatgaaccatcacccgcagcgggtaacacctgttcgccagccagaatactttcgcgtacccaatggtaggaccgatgaaaatcgcgaaaaaatgctgctcggtgtctttgtgctggcgctgctgggctggattttcagtaagtctctgggggttgatgaatccaccgtggcaatcgttgttatggcaaccatgctgctgctgggtatcgttacctgggaagacgtggttaaaaataaaggcggctggaataccttaatctggtacggcggtattatcggcttaagctccttattatcgaaagttaaattcttcgaatggttagctgaagtctttaaaaataacctggcatttgatggtcacggtaacgttgctttcttcgttattattttcctcagcattatcgtgcgttatttcttcgcttccggtagtgcctatatcgttgctatgttaccggtatttgccatgctggcgaacgtctccggcgcaccgttaatgttaaccgcgctggcactgttgttctccaactcctatggcggcatggttactcactatggcggcgcggcaggtccggtcatctttggcgtgggttataacgatattaaatcctggcggttggtcggtcgagtactgacgatattaaccttcctggtgcatatcaccctcggcgagtggcccctgcattag

SEQ ID NO: 144568 - DNA, 2108 bp, Homo sapiens
atgaattgccgatttaacaagcacttttctttgcttttgcgcaaacccgctggcatcaagcgccacacagacgcaacagggactgttaaccggggaagatatgtcctaaaatgccgctcgcgtcgcaaactgacactttatatttgctgtggaaaatatgggaaattgtggggcaaagtgggaataaggggtgaggctggcatgttcccggggagcaacgatagtcaagctggtaccgagctgatttttaatgccggagaatgcttacatcagcttgcggcattaaacagtcgattaaattgcgcacaagagatggcccggcgcgacagtattggtgaagttcctcctgtgccgtggcgcacggtcgttggctctggcattgccggagaagcaaagcttgatcatctgcggctggtgtctttaggtatgcgttgctggcaggatattgagcattatggtttacgcatctggtttaccgatcccgacaccggcagtattttgcacctttcgcgcagttggccgcgaagtgaacaggaaaactcaccggcagctacgcgtcggctgtttagttttcaggctggcgcactggcgggcgggcaaattgtttcacaagcagcaaaacgcagtgccgatggcgagctgctgttagctacccgcaaccgcttaagcagcgttgtgccgctgtcgcctgatgcctggcaaatgttgagcgcgccgttacgccagccgggcattgtggctttgcgggaatatttacgccagcgtccccccgcctgcatacggcctcttaatcaggtcgataacttatttattctgccggtcgctgagtgtatttcgctcggttgggacagcagccgccagacgctggatgcgcaggtcattagcggcgaaggggaagataatgtgctgacgttatcattaccagcctcagccagcgcaccttatgccgttgaacgcatggcggcgcttttgcaacaaacagacgaccccgtgtgtctggtttctggctttgtcagttttgttgaagggcaattgacactggaaccacgggtgatgatgacaaaaacccgtgcctgggcgctggacgcagaaactacgcctgtggcaccgctaccttctgccagcattttgcattccgcactattcgccatcaaatttcattcccgactgtctctaacgattaacctttatgcctggataaagaagtacggtccggattcttccactaataaagaacagtcagatgctcaggccgagatccgccgtctccagaaagagctgaaacgggttaccgacgaacgggacatattaaaaaaagctgctgtagattcaatctgtcaatgcaacacccctttcaattatctctttcggtgttttgaacttcagtgtctttctcgctggggtggatgggcgctggcagccggattgccgggcatcattatgctgctggtcacccccgctggtgaatttacaccatgtatcccaccagaaattaaacaagttggataacaaaaccatcgctaaaagcgggccttgccgaactaggaccgatgaaaatccgcgaaaaaatgctgctcggtgtctttgtgctggcgctgctgggctggattttcagtaagtctctgggggttgatgaatccaccgtggcaatcgttgttatggcaaccatgctgctgctgggtatcgttacctgggaagacgtggttaaaaataaaggcggctggaataccttaatctggtacggcggtattatcggcttaagctccttattatcgaaagttaaattcttcgaatggttagctgaagtctttaaaaataacctggcatttgatggtcacggtaacgttgctttcttcgttattattttcctcagcattatcgtgcgttatttcttcgcttccggtagtgcctatatcgttgctatgttaccggtatttgccatgctggcgaacgtctccggcgcaccgttaatgttaaccgcgctggcactgttgttcccaactcctatggcggcatggttactcactatggcggcgcggcaggtccggtcatctttggcgtgggttataacgatattaaatcctggtggttggtcggtgcggtactga

SEQ ID NO: 144569 - DNA, 2457 bp, Homo sapiens; identical to SEQ ID NO: 138643

SEQ ID NO: 144570 - DNA, 1199 bp, Homo sapiens
atgcggtggatcctgttcatcctcttctgcctgctgggcgcacctgcccacgcggtatccatacccggcgttacaaccacaacgacaacggactcaacgactgaaccggccccggaaccggatatcgaacaaaaaaaagcggcctatggcgcactggcgggattgtgctgggataatggacacctcgccgtaaagaagtggatcgaaccagttgcgcaccgttgccgctacgccccctgctgaaccggtaccaaaaatagtgccgccgacgctggtcgaagagcaaaccgtgctgcaaaaggtcaccgaagtcagccgccattatggtgaagccctttccgcccgcttcgggcaactttatcgcaatatcaccggctccccgcataagccgtttaatccacaaaccttcagcaatgcgctgacccatttttcaatgcgtgcaagcacagcgtctgaaatgacgctcatacacgcgtatgaaaatgtgccgatgtatcggcgcaaattcgacgcagcagcgtacatcgtgatgatttcagggaactttcagacctgcgatctgcgcgacaactatccctttgacacctttgccgtgccaatggaacaagtggtgcgcattcatgcttcttcgggaaccacaggtaaaccgacagttgtcggctatacgcaaaacgatattgataactgggccaatattgtagcgcgttctttgcgtgcggcagggggctcgcccaaagacaaaattcatgttgcctatggttacggcctgtttactggtgggctgggtgcgcactatggtgccgaacgtctgggcgctacggtgatcccgatgtctggcgggcagacggaaaaacaagcgcaactgatccgtgattttcaaccagatatgatcatggttacgccatcttattgccttaacctgattgaagagctggagcggcagttgggcggtgatgccagcggttgctcgctgcgggttggagtatttggtgctgagccgtggacacaggccatgcgtaaagagattgagcgtcgcctggggatcaccgcactggatatttatggcctgtcagaagctgatggggccgggggtggcgatggagtgtctggaaactaccgacggcccaaccatttgggaagatcatttctatcctgaaattgttaatcctcatgacgagcacaccgcttgccgatggtga

SEQ ID NO: 144571 - DNA, 4733 bp, Homo sapiens
gccatcatcgccggtgccggcggggccgcccacctgccgggcatgctggccgccaagacgacggtgccggtgctgggcgtgccggtggccagccgccatctgcagggcgtcgactccctgcattccatcgtgcagatgcccaagggcatcccggtcgccaccttcgccatcggcacggccggcgcggccaatgcggcgctgttcgccgtggccatgctggcgaccggcaatgtggccctgctggccaagctggatgccttccgcgcgaagcagacggcggcggcccaggccatgagcgaggaactgcgctgatggcggctctggttcccggcgccgccaccctcggcgtcctcggtggcggccagctcggccgcatgttcgtccacgccgcccaggccctgggctatcgctgcatcgtgctcgatcccgacgccatcagccccgccggcgccgtggcggagaagcatgtgagggccgactacctcgattccttcggcctggcccagatggcgcgcgactgtgacgccatcaccaccgagttcgagaacgaccgggccgtcgagaaggctcatttcgaggccgccggcgtgccctgcgccccgcatgccgtcatcacgaacgagatcgagctggccgccgtcgaccccggcctgctgcccggcatcctgaagaccagccgcatgggctatgacggcaagggccagcgccgccgagctggcccgggcctgggacgacctggggcgcgtgccctgcgtgctggagcagctgctgccgctgaagttcgagctcagcgtgctggtggcgcgcggcgccgacggccagatcgtcaacttccccgtgcagcagaacctgcaccgcggcggcatcctggccgtcaccgaggtcccggcccccgatgtgccggccgaggtcgagaagctggccgtcgctgccgcgcgccaggtggcccaggcctgaactatgtcggcgtgctgagcatcgagttgggtttaatggaagagatttcctacgacgccagcgatttaagcggtcaaaatatcactattgacgcagattatgcgtggctggaaagtttacgacctaaaaccctccccctcgcctttgctgcaattatcgtcgggacagcgctggcatggtggcaaggtcacttcgatccgctggtcgccctgctggcactaattaccgccgggctattacagatcctttctaacctcgccaatgattacggcgatgcggtaaaaggcagcgataaacctgaccgcattgggccgctacgcggcatgcaaaaaggggtcattacccagcaagagatgaaacgggcgctcattattaccgtcgtgctcatctgtctctccgggctggcactggttgcagtggcatgccatacgctggccgattttgtcggtttcctgattcttggcgggttgtcgatcattgccgctatacctacaccgtgggcaatcgtccttatggttatatcggtctgggctcatacattgattccggcactgatccttccggcgaccgcatgcggcctgctggcaacggcagtactgaatattaataacctgcgtgatatcaatagcgaccgcgaaaatggcaaaaacacgctggtggtgcgcttaggtgaagtgaacgcgcgtcgttatcatgcctgcctgctgatgggctcgctgcaagcccgttatgtgatgcgggaaatggacccggtggcgatgcagaccaatgctggaacgtactgtcaagggagcgttagaccttttgccttgagggcaacgtctttcatggtcgcggcagtttcctgcttcttcgcatttcacagctcagctcccgtcgacctgggcaaacgctctacggcagtacatcacatgccagtgccagagccggaaccggaccgagaacccacagtttctcgtctgccagtgggctggagaggatcagattacgcagttgttgcaggaacaatggcgcgtgctgattgttatgatcttccgcacgcacaatcacatggctggtccacggcggtagctgcatcattcgccgctcagccagcgcctgttcggcaaaggcgtcgtagcctttatagagcaacgtttgcaacagaggatgttccggatggtgcgtttgcagcaccacttcgccctgtttacccgcacgcccggcacgaccggcgacctgggtgtaaagctgagcgaaacgctctgccgagcgaaaatcggcagaaaacagcgcgccgtccacgtccagtaatgcaaccagcgtcacatccgggaaatggtgacctttcgccagcatttgtgtaccaatcaaaatccgcgcgccgccgcgatgtacttctgccagttgctgttccagcgcccctttgcggctggtggtatcgcggtcgatacgagaaatgggcacgccggggaacaacggcgcgagcgtctgttcaagctcgcattgttctagtcaatcagctcggtacctcatcgcttatggacgttatccgcaaagagttgcagtcgttgctgcgcgaaccgcaaacccgcgcgattctgattttacccgtgctaattcaggtgatcctgttcccgttcgccgccacgctggaagtgactaacgccaccatcgccatctacgatgaagataacggcgagcattcggtggagctgacccaacgttttgcccgcgccagcgcctttactcatgtgctgctgctgaaaagcccacaggagatccgcccaaccatcgacacacaaaaggcgttactactggtgcgtttcccggctgacttctcgcgcaaactggataccttccagaccgcgcctttgcagttgatcctcgacgggcgtaactccaacagtgcgcaaattgccgccaactacctgcaacagatcgtcaaaaattatcagcaggagctgctggaaggaaaaccgaaacctaacaacagcgagctggtggtacgcaactggtataacccgaatctcgactacaaatggtttgtggtgccgtcactgatcgccatgatcaccactatcggcgtaatgatcgtcacttcactttccgtcgcccgcgaacgtgaacaaggtacgctcgatcagctactggtttcgccgctcaccacctggcagatcttcatcggcaaagccgtaccggcgttaattgtcgccaccttccaggccaccattgtgctggcgattggtatctgggcgtatcaaatccccttcgccggatcgctggcgctgttctactttacgatggtgatttatggtttatcgctggatggcgtggatcaggatgatacccgcagccgcgtggatcagcaggctgtagcgaacaacctgcatcgggaagtactgcgcaaagtacggacgccagataatcaccccggtcaccagcagcacgaaaatcatgctcatgatcgaccagaacatcatcttttgcccggcgttgtacttaccgacatccgccactttatgctcattgcctttcaatacttcgacaatgttcaacagccacggaatatctttcttatccgggatgttgtgatgcacaaaacgcacaaacataaacatcagtgcgacgaaaatcgcaatgccgaagaacgggtgcaaaatgcgtcccatctgcggcgtaccgaaggtttgcgtcagccattgcagcgtcgggaagaagaacgaaatcccggacagcgccaccaggaagaagcaaatcaccacggtccagtgacaggcgcgatcaataaatttggtgcgcacaatcattttcgacttactcatgatgatcctcctcgtcatcgtccacttccttattcgggccaataccgatgtagtggaaaatcaacccggcaaaatggcaataaagccagccgctgccagcggtttcaacgcgcctttccacaggcttaccgaggtgtcgatcttcggatctttcggcagaccgtgatacagctccggctgatcggcgtgatgcagcacgtacataacgtgcgtaccaccgaccccttccgggttgtagacgccagcatgttcgtaaccacgcgctttcagtttcgccacgcgctgttccgccagctccagcatctccttcttgagcgtgcatttatatacccggttatcctctttgttgaggcgcggaatattaaacggacacccggcaatgcagtaaccacagccgatgcagttttccgactggaaatcgacaatcccgttagcgtactgaatgattgcaccagcagacgggcacgccttcaggcagccgggatcttcacagtgcatacagccgtctttacggatcagccactccagcttgccgttctgttcggtttcgctaaagcgcatcaccgtccaggacttggcgctcagatcggcggggttatcgtaaaccccgacgcagtgccccattcatcacggaggtcgttccactcgaacacgccactgacaggctttacagcgatacagccccagtggattggaatacccaccgtttcaactgctgaccattacattcagcggtttcagacgacgcgttaccacagccaccgcgcggataaagccacgcttgctggagacagtgacacgatcgccattattaatgcctttcgccgccgccagcgtttcgctgatttccacaaactgttccggctgagcaattgcgttgagcaatgcgtgcttggtccaggtgtggaagtgctcggtcagacgatagtcgtaccaacatacggaactgctctttttaccagggatccttag

SEQ ID NO: 144572 - DNA, 964 bp, Homo sapiens
atggggacctttccccacaatggggacccaatcaaaatccgcgcgccccgcgatgtacttctgccagttgctgttccagcgcccctttgcggctgggtaatcgcggtcgatacgagaaatgggcacgccggggaacaacggcgcggcgtctgttcaagctgttcggtgcccagccccacggggaccaggtgcgtgaaccgcaggaagggcactggcgcggcaccggacgctgactgtcacagtgtggcagcgcagatggtgctgcgcctgatgcagcgtgtagtagtgatcgaaccacatgttgaattgccggacgcgcattccctgcccgacgggtcaggcgcagcaggcggtattttttctgctggacgttgcataacgtttccagcgcgggcgttgcggagccaagaataatcgggatttgctcgctgtgcgcacgatacaccgccaggtcgcgggcatgatagcgccagccttcctgctgcttgtaggagctgtcgtgctcttcatcaatgacaatcacgcgagatttttaaacggcgtaaacagcgcggagcggtgccgatcacaatcgcccggttcaccccccccatgccccagtttcccggaagcccaaaacagcgactatacacaaaaaccataccggagggggatgatgtctcagccagcgaaagttttgctgctgtatgcccatcggaatctcaggactcggtggcaaaccgggtactgcttaaaccggccacgagctcagcaatgttaccgtgcacgacctttacgcgcactatcccgattttttattgatatcccccggcccgacggcccaaaccaacaagtggttgtttgtcccctctccgtcccggtattaaatataaattggtttgtggccaccaaagcctctcctttcggtaaatccctggtttggcttttgaataacgggaattataaagcccccccaaatttttga

SEQ ID NO: 144573 - DNA, 4527 bp, Homo sapiens
atgacggaagtctgccccgatgccaccatgctcaactatgttaacccaatggcgatgaatacctgggcgatgtatgcccgctatccgcatatcaaacaggtcgggctgtgccattcggtgcagggaacggcggaagagttggcgcgtgacctcaatatcgacccagctacgctgcgttaccgttgcgcaggtatcaaccatatggcgttttacctggagctggagcgcaaaaccgccgacggcagttatgtgaatctctacccggaactgctggcggcttatgaagcagggcagcaccgaagaattgcttcgctggaagatctcgggccaagtttttgcgcttggcaacgcacgaattctggagaattcggcggcgcgggtgaactgcttggcgaagaacaaagcggctcaatggaaaccatcggtttctcgctgtatatggagttgctggaaaacgccgtcgatgcactgaaagccggacgcgagccgtcgctggaagatctcaccagccagcaaacagaagtcgagctgcggatgccgtcgctattgccagatgatttcatccctgacgtgaacacgcgtctgtcgttctacaaacgtattgccagcgccaaaacggaaaacgaactggaagagatcaaagtcgagcttatcgatcgcttcggcctgctgccagatccggcgcgtaccctgctggatattgcccgtctgcgccagcaagcgcagaaactggggatcaggaagcctggaagaaagaactgcagccagacgcgcaagcttacgttgacgatcgtcgttcgccgttgccaggaacgcgaagaagcgaaagcgatgagcgagcacgacatgctgccgtctgaacctgtcaccattgtgctgtcgcagatgggctgggtacgcagcgctaaaggccatgatatcgacgcgccgggcctgaattataaagcgggtgatagcttcaaagcggcggtgaaaggtaagagcaaccaaccggtagtgtttgttgattccaccggtcgtagctatgccattgacccgattacgctgccgtcggcgcgtggtcagggcgagccgctcaccggcaaattaacgttgccgcctggggcgaccgttgaccatatgctgatggaaagcgacgatcagaaactgctgatggcttccgatgcgggttacggtttcgtctgcacctttaacgatctggtggcgcgtaaccgtgcaggtaaggctttgatcaccttaccggaaaatgcccatgttatgccgccggtggtgattgaagatgcttccgatatgctgctggcaatcactcaggcaggccgtatgttgatgttcccggtaagtgatctgccgcagctgtcgaagggcaaaggcaacaagattatcaacattccatcggcagaagccgcgcgtggagaagatggtctggcgcaattgtacgttctgccgccgcaaagcacgctgaccattcatgttgggaaacgcaaaattaaactgcgcccggaagagttacagaaagtcactggcgaacgtggacgccgcggtacgttgatgcgcggtttgcagcgtatcgatcgtgttgagatcgactctcctcgccgtgccagcagcgtcgtcatccggcagcgtattcaacccccggaaacgataaaattcccggtacccgaacgccgcactgactctcattgcaaaaacaggaataaccatgcaaccgtccagaactttgacgatctcaattctcctctattcaccgccgcattttgctgtggggaagcggtggtccgtttttctggaatgggttatatggttaaccctcggcaactgacgccggcgctgaaactggacgctgactggattggcttgctgggcgcgggaacgctcgccgggctgttcgttggcacatcgctgtttggttatatttccgataaagtcggacggcgcaaaatgttcctcattgatatcatcgccatcggcgtgatatcggtggcgacgatgtttgtttcatcccccgtcgaactgttggtgatgcgggtacttatcggcattgtcatcggtgcagattatcccatcgccacctcaatgatcaccgagttctccagtacccgtcagcgggcgttttccatcagctttattgccgcgatgtggcccggtacttggccggcaacggataacttggtcttgaccaaatcgttttggcgctgccaacggcacggcaccgctgaatggttacccgtcgatagcgtcatgagtacgcaacgcttccgggcgcaaccaacgctgaacgcgagaaggcatatccagcccaatcagcaggatcaccacgaacgtcagactgaacgagagcgatgccagcgcagtacccagatccagacgttgagcgatcaacgcgccgatgattggggccagtgcaccgcccaatgcgccaacgttgtaggtaaagcccaggcccgctgcacgctggtcggtatcgaaataaccgccaatcagttttgcatttgctggaagaacagtaacagaccgagcacccagacgtttgcgccgccaatcgcaaataccggaataatcagcagctgcgaggccagcaggctacaaacgtacgctttgcgggttcccagccagtcaccgaggaagccacctacgcagcatcccaccgccgcgccaaagccactaaagaacagcacattggctacacccaagaacagcgacgatcgcggcattttgcaggttaccggcgaagcagaaccacagcgcagtagccgccgccagtgtcattacgatatgagcgtcagcatcatggccccatatgtcaacagagtatgcgcgactgccgcgaccgcctctcgcagcgctcctcttaggagatacaccacaggactccaaggcgcttctcagacagtgagtaaaaactttagcaacaacgcccgcgccaacggtacggccgccttcacggattgcgaaacgcagaccgtcgtccatcgcgatcgggtggatcagggtaacaaccattttgatgttgtcgcccggcattaccatctctacgccttccggcagttcgatggtaccagtcacgtcagtagtacggaagtagaactgcggacggtagcctttgaagaacggagtatgacggccgccttcatctttggacagaatgtacacttcagattcgaacttggtgtgcggcttgatggtgcccggcttagccagtacctgaccacgttcgatttcttcacgtttgataccacgcagcagaacacctacgttctcaccagcacggccttcgtccagcagtttgcggaacatttcaacgccagtacaggtagacttctgagtctctttgataccaacgatttcaacttcttcaccaactttgatgataccgcgttctacacgaccggtaacaacggtaccacgaccggagatggagaatacgtcttcgatcggcagcagaacggctgtcaatcgcacgctctgttccgatatagatccggtgccccccaatcggtaccagatcaccctgacgcccgctggctgttgcccgatcccatcgaaaccctgaaagccgccgaaacgctggtacaacagggatttgtcgtgctgccttactgcggggccgatccggtattgtgtaaacgtctggaagaagtcggctgtgcagcggtgatgccgctcggcgcgccgattggctcgaatcagggactggaaacccgcgccatgctggagattattatccagcaggccacagtgccggtggttgtcgatgctggcatcggcgttcccagccatgccgcgcaggcgctggaaatgggggccgacgcggtgttagtgaatacggcgattgccgtcgcggacgatcccgtcaacatggcgaaggcatttcgtctggcggtagaagcaggcctactggcactccggaccgggcagccgcagttattttgctcatgccaccagcccgctgaccggatttctggaggcatcggcatgaaaaccttcagcgatcgctggcgacaactggactgggacgacatccgcctgcgtatcaacggcaaaacggctgctgacgtagagcgggcgctaaatgcctcgcaactcacccgcgacgacatgatggcgctgttatcgcctgccgccagtggctatctggaacaactggcccaaacgggcgcagcgtcggacccgtcagcgattgggcaaacacagttagtttctacgtcccgctttatctttccaatctttgcgctaacgactgcacaacatcaactgtctctggaaggtcactgtgcccgtcaaatcagccgccgtctgtgtcgcaactacgacctgattttgaccatggaaaagcgccatatcgaacgcttatgcgagatggcaccggagatgcgcggcaaagtgatcctgtttggtcactgggataacgaatgtgaaatccccgatccgtatcgcaaaagccgggaaacgtttacagcggtgtacacattacttgaacggtctgcccgccagtgggcgcaggcattgaacgcagagcaggtataa

SEQ ID NO: 144574 - DNA, 2460 bp, Homo sapiens
atgagggtaaacaccttcgtccagcatcatatggaagaaacgcttaaagcgttccacgtcacaggccatcacatcctgatagcacgtcacggactcggcgtcggtaaagaaaataccgaacatgccgccaacgtggttaacgaccagcggaattccggcttcttctgccgcttccagcagaccttctgccagacgtgttgtcagctcatccagcgtttcgtgaacgcccggctgcgcgacttcattcagacaggcgaaacccgctgccatcgcaatcgggttaccggaaagcgtacccgcctgatagaccggacccgtcggggccagcgcatccattacatcacgacgaccaccgaatgcgcctaccggcattccaccgccgatgattttgccgaggcagctagcgctacgcggaaaccggtcatcacttcatcgatgatcagcaacgcgccaaattcgtcgcacagcgcgcgcagacctggcaggaactctggcagcggcggaacacagttcatattgcctgccaccggctcgacgataatacaggcaatctcttgcgggtattgctcaaatgcggcgcgtacagaagccagatctcttataagttaccggttaaagtatatttggagaaatctgcggaaagcccgggagttgggttggctaaaaaaacaacacagacggagaagcaacagggacaacaaaaagcagagaggcaagaacaagaaagaggaggaccacggagcggagcagaacagacagggcgagcaacggaagagacgagcaacgcgcgaagaaaaggaacgagcagaaacaccattagtttgttgttcactagtcattggagaacagatgattgatgtcttagggccggagaaacgcagacggcgtaccacacaggaaaagatcgcaattgttcagcagagctttgaaccggggatgacggtctccctcgttgcccggcaacatggtgtagcagccagccagttatttctctggcgtaagcaataccaggaaggaagtcttactgctgtcgccgccggagaacaggttgttcctgcctctgaacttgctgccgccatgaagcagattaaagaactccagcgcctgctcggcaagaaaacgatggaaaatgaactcctcaaagaagccgttgaatatggacgggcaaaaaagtggatagcgcacgcgcccttattgcccggggatggggaacgaaccgatgactggatggatggccgccgcagtcgtcacactgatgatacggatgtgcttctccgtatacaccatgttatcggagagctgccaacgtatggttatcgtcgggtatgggcgctgcttcgcagacaggcagaacttgatggtatgcctgcgatcaatgccaaacgtgtttaccggatcatgcgccagaatgcgctgttgcttgagcgaaaacctgctgtaccgccatcgaaacgggcacatacaggcagagtggccgtgaaagaaagcaatcagcgatggtgctctgacgggttcgagttctgctgtgataacggagagagactgcgtgtcacgttcgcgctggactgctgtgatcgtgaggcactgcactgggcggtcactaccggcggcttcaacagtgaaacagtacaaagcttcgcatgctgcagacagactccagtcctggcaggccctctgaatacagcaggaacaaaaaatttctggcggaaaaggtgttactgggtggtaattctcttctacagcctctggtggttggctccatgtgtatctgtgtggcccgtgtctgatctggtgcactcctgtgtgagagaggtagtgtggaagggtggcaagagcgtgtcctttggagacagacccaggctcaaatgggtggactggggtcagcagccccagtctttcggctacatacttgatcctttcagcgaaggtacttttggtctgggctttgcggagaggcagtacgcccatgatactcagtactttcttccagtcttggcccagttcgctatcggaatcaggatgaccatgagctacaaattacacacgggaacaagattctatgtggaattgtgtgggtctcttgcaggcatgctccctttgattctcccattcattgtccaggagcaccagattggacaaccatccacacaaaaaagtaccttcatgagaaccacaattcagtggccacatggcacagacagaatctgtgtgattgtgggagggagagaacagcgatcatgggacttggccttggaattcagtgctgccctatcacagtggaaagcaacacagggcagaacgcagccgacacccacagacggaacatttagaccagaccagggcaagctggagggtcagaaccatcccagtggacagaacctgagatccagtagtataggtttgcctaatctggccattgattataaacagaagcatacactatgtggcctttgtgactga

SEQ ID NO: 144575 - DNA, 1854 bp, Homo sapiens
  misc_feature (1)...(1854): n = a,t,c or g
atggatgcgctaatggcaacgccgctgtggcaggccatgccgtttgtccgcgccggacgctttcagcgcgtacctgcagtctggttttatggtgcgacgctctcggcaatgcactttgtgcgcgttctggataacgccatcggagtgattgtcgctacggcgctcacctggatgaacttctcgcaggcgctgccgcgtagccagtgggcgcaggctgcctggtcgccggatattgacgtcatcgagcagatgatttttcactacagcttgttgccgcgtctggcgatttcgctgctggtgggcgcgggtctggggctggtgggcgtgctgtttcagcaagtgctgcgtaacccgctggcggagccgacgacgcttggcgttgctacaggcgcgcaactggggattaccgtcactacgctctgggcgatccctggtgcgatggcgagccagtttgctgcgcaggcaggggcttgtgttgttggcttaattgtctttggcgtcgcgtgggggaaacggctgtcgccggaaccctccatgagtaagtctgaaaatctttacagcgcagcgcgcgagctgatccctggcggtgtgaactcccctgttcgcgcctttactggcgtgggcggcactccactgtttatcgaaaaagcggacggcgcttatctgtacgatgttgatggcaaagcctatatcgattatgtcggttcctgggggccgatggtgctgggccataaccatccggcaatccgcaatgccgtgattgaagccgccgagcgtggtttaagctttggtgcaccaaccgaaatggaagtgaaaatggcgcaactggtgaccgaactggtcccgaccatggatatggtgcgcatggtgaactccggcactgaagcgaccatgagcgccatccgcctggcccgtggttttaccggtcgcgacaaaattattaaatttgaagggtgttaccatggtcacgctgactgcctgctggtgaaagccggttctggcgcactcacgttaggccagccaaactcgccgggcgttccggcagatttcgccaaatataccttaacctgtacttataatgatctggcttctgtacgcgccgcatttgagcaatacccgcaagagattgcctgtattatcgtcgagccggtggcaggcaatatgaactgtgttccgccgctgccagagttcctgccaggtctgcgcgcgctgtgcgacgaatttggcgccgtgctgatcatcgatgaangcaggttcagagagcatgcctgcaggtcgactctagaggatccccaggctgagtttgctgcagaaggcttggaaattaaaaagaaatggatggaagaggaacaagcaggaaaaaataaattaagtgggaaacagctacttgaaacagatccaaatcttgacacatctgatatccagttcttggaggatgctggaaacaatgtgcagacaagctgtgaccgtctccgggagctgcatgtgtcagaggttttcaccgtcatcaccgaaacgcgcgagacgaaagggcctcgtgatacgcctatttttatagaaacgctggtgaaagtaaaagatgctgaagatcagttgggtgcacgagtgggttacatcgaactggatctcaacagcggtaagatccttgagagttttcgccccgaagaacgttttccaatgatgagcacttttaaagttctgctatgtggcgcggtattatcccgtattgacgccgggcaagagcaactcggtcgccgcatacactattctcagaatgacttggttgagtactcaccagtcacagaaaagcatcttacggatggcatgacagtcgactctagaggatccccatag

SEQ ID NO: 144576 - DNA, 1407 bp, Homo sapiens
  misc_feature (1)...(1407): n = a,t,c or g
atggaagataaccacaaactggctcgccatcgcaccagggatcgcccagagcgtagtgacggtaatccccagttgcgcgcctgtagcaacgccaagcgtcgtcggctccgccagcgggttacgcagcacttgctgaaacagcacgcccaccagccccagacccgcgcccaccagcagcgaaatcgccagacgcggcaacaagctgtagtgaaaaatcatctgctcgatgacgtcaatatccggcgaccaggcagcctgcgcccactggctacgcggcagcgcctgcgagaagttcatccagttcccgttcggcagcacaagagcaaccaaatctcggaatgcggaagggaaatcgaaatccgatcggacgcacacctgctgccaaatgacgtcaagttaaagattaggcctctgattgtcgatgaagaacaccgcttcgggtgcgtcataaagagcgcattaaagcgatgcgcgcgaacgtggatatttctgacgcttactgcaacgccgatcccacgtacgctgaatatggcaatgagcggaatgcgtgacctgtcgattatcgccacgccgcccgcccgtcgtctggcagttaaaacctttgtccgtgagtatgacagcatggtggtccgggaggcgatcctgcgtgaaattttgcgcggaggacaggtttattatctctacaatgatgtggaaaacattcagaaagccgccgaacggctggcagaactggtgccagaagcgcggatcgccatcggtcacgggcagatgcgcgagcgcgaactggaacgggtgatgaatgatttccatcatcaacgtttcaacgtgctggtttgtacaaccattatcgaaaccgggatcgacatcccgacagccaacactattatcattgaacgcgcggatcacttcggtctgggcgcagctgcaccagttacgcggtcgcgtcggacgttcgcatcatcagggcatatgcatggttgctgacccggcatccaaaagcgatgcctcccgatgcacaaaaacgtcttgaagcaattgcctcgctggaagatctcggggcaggttttgcgctggcaacgcacgatctggagattcgcggcgcgggtgaactgcttggcgaagaacaaagcggctcaatggaaaccatcggtttctcgctgtatatggagttgctggaaaacgccgtcgatgcactgaaagccggacgcgagccgtcgctggaagatctcaccagccagcaaacagaagtcgagctgcggatgccgtcgctattgccagatgatttcatccctgacgtgaacacgcgtctgtcgttctacaaacgtattgccagcgccaaaacggaaaacgaactggaagagatcaaagtcgagcttatcgatcgcttcggccccctgccanatccgg

SEQ ID NO: 144577 - DNA, 444 bp, Homo sapiens
  misc_feature (1)...(444): n = a,t,c or g
naaaaagtccactgtgtggaatcggttatcatggggcataaagagcttgtggaaagtaagcaagagcgcggccgattttatgcttggcggaaatgagtaagaaagcgctaataaagtggcgattggaaagttaatacggcgaaatgcacggttactctgcgnaagctcgggccggtgaactgtgcttgggcgtgggaattccagtggaacagcactacggcccgatgagtgaagttgctcctggctgaaagctgcgtgtgcttctggcgcaggcgctgtttgctgatccggatattctcctgctcgacgaaccgaccaacaacctcgacatcgacaccattcgctggctggaacaggtgctgaacgagcgtgacagcaccatgatcatcatctcgcacgaccgtcacttccttaacatggtctatacccacaagacggaccgga

SEQ ID NO: 144578 - DNA, 2280 bp, Homo sapiens
atggggttaccaagcggatattcagcgggctacagctacgaatattttggcggcaatgccacttatatgattattcccgaaatcgccattaatttgggctgcgtattaccgtatcacggctcttattttgctgcggcgtcgctggcagagcctatgtgctgcattattggtgcttatcatgccaattatcacaccacgcaatatgtttatgagcatcgcatgggcgtcaaacctggcggcaatattgcactgctggcgtgtgcaggtccgatgggcattggcgctatcgattacgccattaacggcggcatacaaccgtcgcgggtggtggtggtcgatatcgacgacaaacgtctggcgcaggtacagaagctgctgccggtggaactggcggccagtaaaggcattgagctggtgtatgtgaataccaaaaggatgagcgatcctgtccagatgctgcgggcgctgacaggagaatgccggttcgatgacattttttgttatgcggcgcatatcgctgcattaggtcgcccggatttcagcagcaaaatcaaactgtacaccggcgagatcccgctgttcagccactaccagatcgagtcacagatcgagtccgccttccagcgtgaagttcgtctgccgtctggtggttccattgttatcgacagcaccgaagcgttaacggccatcgacatcaactccgcacgcgcgacccgcggcggcgatatcgaagaaaccgcgtttaacactaacctcgaagctgccgatgagattgctcgtcagctgcgcctgcgtgacctcggcggcctgattgttatcgacttcatcgacatgacgccagtacgccaccagcgtgcggtagaaaaccgtctgcgtgaagcggtgcgtcaggaccgtgcgcgtattcaaatcagccatatttctcgctttggcctgctggaaatgtcccgtcagcgcctgagcccatcactgggtgaatccagtcatcacgtttgtccgcgttgttctggtactggcaccgtgcgtgacaacgaatcgctgtcgctctctattctgcgtctgatcgaagaagaagcgcttgaagagaacacccaggaagttcacgccatttggtttcccggaaaaacctacgaattcgagctcggtaccccagaaagtattaaacaacaggtcgatgcttcgcgttcgatggtgatagggcacacgggtgacaaaattttcgacagtattaccagcaacgcggtagcggaaccagacggtagcgcttctgaaaccaatctttttgccatgctggatagtgccatcgcagccctgaaaacgccggtcgcggatagcgaagcggataaagaaaccgccgctgcggcgttagataaaaccaaccgcggactgaaaaactcgctgaacaatgtgctgactgttcgcgcggaattaggcacgcagctgaacgaactggagtcgctggattcattaggtagcgatcgcgctttagggcaaacgcagcagatgagcgatctggttgatgtggactggaatgcaactatttcatcttacatcatgcagcaaacggcattgcaggcatcgtataaagcatttaccgatatgcagggattgtcgctcttccagctcagcaaataatttcgctttaaaacatatcatgaaactgggtatgttttgtctgcctgctctgggatcgctggggcgggcatttttttgcctattttgcattggtggctagcaaggatgccattcgatgaattttaatatgtcgattcaaagatgaaataaaaaagccctggcagctaccagggcttgattactttgagctaattattactcaacaggttgcggacgcgcaggagcgcgagaggcatgatgtgttgccgtatgaccacctgcggcacctttaccttcgaaggccaaagtagggccctgccagccactgtgacccggggcctcccgtacatattccggggctgcagcgcgcgtcatttggcccggcaccccgcgccatcgcccgcccggccactgaagtatcgctctcgaaggtgcggcctaccctctcggcgcgcacgccgccccccaccacccccccccgggcgtcacgcgtcatcgtccccgcgccccacgcgcgacgtcctgccccgcgagccaagcatgcgtcgctcactcccatagtcaataccctacccgcccctccgcccacaactcctcgtgacgacccggcgtccctctgccgtcagcgcgtccacactaccgctacgccgatcgtcgttgcctccc

SEQ ID NO: 144579 - DNA, 2099 bp, Homo sapiens
  misc_feature (1)...(2099): n = a,t,c or g
ttaagccgaaattatttgctgagctgaaagagcgacaatcctgcatatcggtaatgctttatacgatgcctgcaatgccgttgcttgcatgatgtaagatgaaatagttgaattccagtccacatcaaccagatcgctcatctgctgcgtttgccctaaagcgcgatcgctacctaatgaatccagcgactccagttcgttcagctgcgtgcctaattccgcgcgaacagtcagcacattgttcagcgagtttttcagtccgcggttggttttatctaacgccgcagcggcggtttctttantccgttcgctatccgcgaccggcgttttcagggctgcgatggcactatccagcatggcaaaaagattggtttcagaagcgctaccgtctggttccgctaccgcgttgctggtaatactgtcgaaaattttgtcacccgtgtgccctatcaccatcgaacgcgaagcatcgacctgttgtttaatactttctgctccaccgacgtatttccctttctcttcgctaaacggcgcagtctctgttttataaccggcaaaaatgtagcgcccgttaccgtcagtggtgtttgccagattcagcaactggtcacgaagcccctgaatatccgtagccagcgaggcccggtcatcgtcactcaaggtgccattgctggcgtagacaattttttcctgagcattctggatagcagtggtgctctgttgcccaggagctttggtatggcatggttctgccaggtcgtagccatgtttgtacgctaactttgtggtcagttgtagcggtatctttgccaactgcccaatgccgaacggcagcacgttaacggtgttggtcccttccggatagtaataaagacgcatctcagcactgttaatgacgatgccgtcatgaacggtatccggcaggatcagctgctgcggaatgttcagtacagtaccgcctttcggcaggaaggtatccacacccgggttcgcttccatcatattggaaagccccatctggtactcggcggcaaaatactccagcggctgagtgttaccttcaggaatggtgatcacctgattctgaccaaccaggcgactcccgtcggttggcagaggataagttaccgcagaggcggtactgcaaaagccgacaacagcgaaggccgctgcgaataatgttttcaatttcatattcatgttaagcgagattttgtgcctggcaggccattgggttgagaatattagagtattggaagcgcattataagttcattccagctcacagtgaaattatgatgtgtacgaaatcacattttttgcctttggcttgagtgtagaccttaagcgaggagcaggatcttctttcagacttatggcataatgcgcggtttgtcatatctcttttcaggatacgcctgtgttagtttccagtaacgtcaccatgcagttcggcagtaagccgttgtttgaaaacatttccgtcaaatttggcggcggcaaccgttacggccttgattggcgcgaacggtagtgggaaatccacctttatgaagatcctcggcggcgaccttgagccgacgctgggtaacggttccctcgatcccaacgagcgccattggtaaactgcgtcaaggaccagtttgcctttgaagagttcactgtgctggatacggtgatcatggggcataaagagttgtggaaagtgaagcaggagcgcgaccgcatctatgctttgccggaaatgagtgaagaagacggctataaagtggccgatctggaagttaaatacggcgaaatggccggttactctgcggaagctcgcgccggtgaactgttgcttggcgtgggaattccagtggaacagcactacggcccgatgagtgaagttgctcctggctggaagctgcgtgtgcttctggcgcaggcgctgtttgctgatccggatattctcctgctcgacgaaccgaccaacaacctcgacatcgacaccattcgctggctggaacaggtgctgaacgagaataacagcacacatgatcatcatctcgcacgaccgtcacttccttaacatggtctgtacccacaagacggaccgga

SEQ ID NO: 144580 - DNA, 486 bp, Homo sapiens
atgagcgataacctgagcgccgccgaatcccaggcgttgaatcgtgatatcagtcaacttgaagctttaattgaagagctgctgacttatgcccgactcgatcgcccacaaaacgagcttcatcttagcgaaccagacctgccgttgtggctgtcaacgcatctggcagatattcaggcagtaacgcccgataaaacggtacggataaaaacgctcgtgcaaggccattatgcggcgttggatatgcgcttaatggagcgcgtgctggataatttgctcaataacgccctgcggtactgccattcaacggttgaaaccagcctgctactgtcggggaatagagcgacattaattgttgaggatgatggcccagggattgccccagaaaaccgcgaacatatctttgaaccttttgttcgcctcgatcccagccgggatcgctcaaccggcgctgcgggctggggctggcaattgtccactctatag

SEQ ID NO: 144581 - DNA, 1260 bp, Homo sapiens
atgttccttgccatggtttcttacattaaacgcgcccgctccatgcgcgatattcgtaacgaaaaaggcaccgcaaaacccgatcctgcggttatgaaacgactgattcaactcggtttgccgattgcgctggcactgttctttgaagtgacactgtttgccgtcgtggctctgttagtgtctccgctcggtattgttgatgtcgcaggacaccagattgccctgaactttagttcactaatgttcgtgcttccaatgtcgctggcggcagcggtaactatccgcgtaggttatcgtctgggtcagggctcaacgctggatgcgcaaaccgctgcgcggaccgggcttatggtgggtgtctgtatggcaaccctgacggccattttcacggtttcactgcgggagcaaatcgccctgttgtacaacgacaatcccgaggttgtaacgctggctgcgcatttgatgttgctggcggcggtatatcagatttctgactcaatccaggtgattggcagtgggattttgcgtggttataaagatacgcgttccattttctatattacctttacggcttactgggtgctgggcttgccaagcggctatattctggcactgaccgatctggtcgttgaacctatgggccagcaggcttctgatagcttattattgcctacaacactgcactggattaagatgaaaacgattgaagttgatgatgaactctacagctatattgccagccacactaagcatatcggcgagagcgcatccgacattttacggcgtatgttgaaattttccgccgcatcacagcctgctgctccggtgacgaaagaggttcgcgttgcgtcacctgctatcgtcgaagcgaagccggtcaaaacgattaaagacaaggttcgcgcaatgcgtgctggcggcaacgttgacgttgatggctccgtttccagccaattcctcaccgcactgttaatgactgcgcctcttgcgccggaagatacggtgattcgtattaaaggcgatctggtttctaaaccttatatcgacatcacactcaatctgatgaagacgtttggtgttgaaattgaaaatcagcactatcaacaatttgtcgtaaaaggcgggcagtcttatcagtctccgggtacttatttggtcgaaggcgatgcatcttcggcttcttactttctggcagcagcagcaatcaaaggcggcactgtaaaagtgaccggtattggacgtaacagtatgccagggtga

SEQ ID NO: 144582 - DNA, 749 bp, Homo sapiens
ttagtagggatttttcgccttcgcttttaccgagcattcatgcgcgaaacagcggtgccagttgcggcattgttcgggggccagccagatgggttcttcccttgactcttttacctgctcacgggaccacacaccttgcacggccatccgttcgagcactttattacgcgcggcttcggcacgctccggccaacgatccgggcgaagacggctgggcgcttgcggcaaaaccgccagcattgccgcctcggaatagcttaaattcgcaggcgattttccgagataagcccaacttgccgcaccgatcccctgcaacgtaccgccaaacggagcgcggttaagatacaaggtcagaatttcacgcttagacagatgccattccagttgcaacgcgcgccagagctggcgaattttgccgccaaatgttttggggtgaggatcaagcagacgagcaacctgcatagtgagcgtgctgccaccggaaataacccgtcccgaagtgagatcttgccatgctgcgcgcgccaccgagaatggattcacccccggatgcttccagaaccagcgatcttcataattgatcagcgcttcaaggtaacgtggagaaacatcttcgattgttaccggataacgccagatgccgtcagcatcggcgaagcgccagagcggcgtaccatcctgcgccacgaccactcgtgcgggattgacttcatgcagcggtagaggccagagtttatctgctccccacg

SEQ ID NO: 144583 - DNA, 834 bp, Homo sapiens
atgataaccctttttactattaacttgggcgtttccccctggttaaaaagttttcggcgactaacgggcggccagcgcattggttcttgggagggggggcccacgaacacgccaggattaactggaggggcgggtaaaccgaggggaaagaacacggctcacaaacaagtgaagaacccctacacggggtataaagaggagacgcccacaatccacacggatctccatcggaaacaggaaacaacaacgaataatgtaacgccagttaaactcgaaggggcggtccggattaccgatagcgcgacattgactctgggaaatggcgtcgataccacgcttgccgacctgacggctgccagccggggcagtgtctggcttaacagcaataattcctgtgcaggtaccagcaactgcgaatatagagtaaacagtttgctactcaacgacggtgatgtttatttgtcagcacaaacagcagcgcctgccacaactaacggtatctacaatacgctgacaattgccgtaccatctttctcaacaacctgccggctcccggaggatataattgttgtgtcagctttcccgccgcttttgatattttgcgttccgctgttgatattggtttgccccgactgggaaagccggcccagtgaagcgcatacgcaagtgaatggtggagttgagctgcactgcattgaggcacccacaggctttgacacgttgatggcttcccggctgcgtatggttcgtgtgggaattgttgagcggatgaacaatgttgcacacaaggatacaagctatggaccatggattacagaattgcgagctcggtga

SEQ ID NO: 144584 - DNA, 1632 bp, Homo sapiens
  misc_feature (1)...(1632): n = a,t,c or g
atgatcattgatttggcgaccctcaccggggcggcgaaaactgcgctgggtaatgattatcacgcgctgttcagttttgacgatgcgctggccggtcgcttgctggcgagagaacgaaccgttctggcgtctgccgctggcggagttccaccgcagcttctgccgtctaactttgccgaactgaacaataccggaagcgcggcgtatccggcaggcgcgagcacggcggcgggcttcctgtcgcactttgttgagaactatcagcaaggctggctgcatatcgactgctcggcgacttaccgtaaagcgccggttgaacagtggtctgcgggcgctacgggacttgggcgagctgtggttgaagatagcgcgcttgatttacagcactgggaaaaagaagacggcaccagcgtcattccttttttcacctcgttagaagcacttcaacaggcggttgaagacgaacaggcatttgtcgtaatgcccgttcgcacgctgtttgagatgacacttggcgaaacgctcttccttaatgccaaactgccaaccggtaaagaatttatgccgcgtgaaatcagtttgttgattggtgaagagggaaatccgctgagcagccaggaaatcctggaaggcggtgaatcgctgatattatcggaagtcgcagagccgccagcacaaatgattgattcactcaccaccttatttaaaaccattaagccggtgaagcgtgcttttatttgttcaattaaagagaacgaagaggcacagcctaatttacttattggcattgaagccgatggtgatatcgaagaaattattcaggcgacgggaagtgtagcgacccatacattacctggcgatgaaccaatcgatatttgtcagtatggtgcgcgcagcacgttgcaaaatcctgccgatcccgaaagttctgtgatgtatgttgccgcaccgattatggacggctcgcggcttattggcgttttgagcgtaggcaaaccgaacgcggcgatggctccggtcattaagcgtagcgagcggcgaattttatgggccagcgccattttgttggggattgcactggtgattggcgcaggcatggtttggtggatcaaccgctctattgcccggctcactcgctatgctgattccgtcactgacaataagcccgttcctctccccgatctcggtagtagagagttgcgtaaactcgcgcaggcgctggaaagtatgcgcgtgaagctggaagggaaaaactatattgagcagtatgtttacgcattaactcatgagctaaaaagcccactggcggcgattcgtggagcggcggaaattttacgccaagnagttcatcgcttactacatgacggcgcgtcggcggcgctggcggaaacgctgggatcgatggccggatttatgatgacccgcgacggacagtgtgtggtaggcacagaacttaatgcaacacaccatcgcccggtgtctgagggaaaggtacgcggcgtctgccagccgctgcatcttggtcggcaaaatcagagctgggaaatcgtcgtctctatgaacaggggcggcgttgctgcacttgtcggctgggtacggcagttttgggatgaacccgacagaattagatga

SEQ ID NO: 144585 - DNA, 4831 bp, Homo sapiens
atgggggggcccttcccttgcaatggaaagactttatcggatcgctggacgagatcgaaagagcgtaaccgtcgacgaaccactgcaactgatgaagatgttatctacttatatcaatacatggtcccaccaacgtgcaacccggcactggcggctctgttggataaatcactgcaaaaagagtgggctaacgatctcgatcagctgatcaatctggaaaaattcgctgatgatgcgaaattccgtcagcaatatcgcgagatcaagcaggcgaataaagtccgtctggcggagtttgtgaaagttcgtaccggtattgagatcaatccacaggcgattttcgatattcagatcaaacgtttgcatgagtacaaacgccagcacctgaatctgctgcatattctggcgttgtacaaagaaattcgtgaaaacccgcaggctgatcgcgtaccgcgcgtcttcctcttcggcgcgaaagcggcaccgggctactacctggcgaagaatattatctttgcgatcaacaaagtggctgacgtgatcaacaacgatccgctggttggcgataagttgaaggtggtgttcctgccggattattgcgggccactgctcggtacgctggaatatggtctgccacataaaaacctgattgaaggtattgccgctgcaatgcacttccgcagtgaagatgatccgcaggctcaggaactggcagcactgatcgctgacaaaggtccgcaggcggcgctggcacagatttccggtcttgatgccaacagcgaggttgtatccgaggcggcaacaatggaacaaacccaggcctttgaaaaccgtgtgcttgagcgtctgaatgctggcaaaaccgtgcgaagctttctgatcaccgccgtcgagctcctgaccgaggcggtaaatcttctggtgcttcaggtattccgcaaagacgattacgcggtgaagtatgctgtagaaccgttactcgacggcgatggtccgctgggcgatctttctgtgcgtttaaaactcatttacgggttgggcgtcattaaccgccaggaatacgaagatgcggaactgctgatggcattgcgtgaagagctaaatcacgacggcaacgagtacgcctttaccgacgacgcaatccttggaccctttggtgaactgcactgcgtggcggcgttaccaccgccgccacagtttgaaccagcagactccactgccctccaaaccgggacttgtgtggggacacagacactgttcccagcactgggcctgatacaacgtggcacccaagaaaactccagtatgactgatgcagcacattacctgcgctcagatcgtttcagccgacgctgccctatcggtactatcgctgagtcaaccgcgagaccgactatctcctgggaaaccaatgtacgcgataccaccagctatgcgggcccagtcttaatgggccaaacggtacttaaacgctcggtcgggctgctgacctacttccacactgggccgaagagctgcatccgcaggttacgccctgaagtcagctcagatcctgggccaggcactgcatgggagacaggcatgagcaggacctctttctgccttcgaggaaaacacgggggcatctggggctcacttggcactcatccaccttgtgctgtacctggggacctccgggtgggtggctgtcatagaattcggctccaaaccaggatgcttttgggaattgagggagagccctggcttccacgtggaccacacgggcgagctgcggggaatccggtggaccagcaatttgcggcgggagacctcggactattaacggacgctgatgcccacctggagggctggggcccggagaaaacggtgcccggggtaaccgaagagggaggcggtacgctgacagtcaacgataatggcaaagcgacagatatcgtccagaacagcggtgccgctctccagacgagcacggctaacggtattgaaatcagcggtactcatcagtacggtactttttccatttccggcaatttagcgaccaatatgttgctggaaaatggcggtaatttattggtattagcaggtaccgaagctcgcgactccacggttggcaagggtggggcaatgcaaaacctgggtcaggactccgccacaaaggttaactctggcgggcaatatacccttgggcggtcaaaagatgagtttcaggctctggcccgggcagaagatctccaggtcgctggcggtacggcaatcgtctacgcaggtacgctggcggatgcatcggtcagtggcgcgacaggaagcctgtcgttaatgacgccacgggataatgttacgccagttaaactcgaaggggcggtccggattaccgatagcgcgacattgactctgggaaatggcgtcgataccacgcttgccgacctgacggctgccagccggggcagtgtctggcttaacagcaataattcctgtgcaggtaccagcaactgcgaatatagagtaaacagtttgctactcaacgacggtgatgtttatttgtcagcacaaacagcagcgcctgccacaactaacggtatctacaatacgctgacaaccaatgaactttccggtagcggtaatttctacctgcataccaacgttgcaggctcccggggcgatcaactggtcgtcaacaacaacgccactggtaattttaaaatctttgttcaggataccggcgtcagcccacagtctgacgacgcgatgacgctggtgaaaacagggggaggggatgcttcgtttacgctgggcaataccggcggtttccgttgatcttgggacctatgagtatgtcctgaaaagtgacggcaccagcaactggaccctgaccaatgatgtcaaacccaacccggaccccatcccaaatccaaagccagacccaaaacccgatccaaagccagacccaaatccaaaaccagaccctactcccgatccaacgccgacacccgttccggagaaacgcattacgccttctacggcagccgtactcaatatggcagcaacattaccgttggtatttgatgctgagctaaacagtattcgcgagcggttgaacataatgaaagcgagtccaaacaacaataatgtctggggggcgacgtataacacccgtaataatgtcaccaccgatgcgggtgccgggtatgagcagacgctgaccggaatgacagtggggatcgacagccgtaatgatattccagaaggaattaccacgctaggcgcttttatgggctattcccattcacatatcagttttgatcgcggaggacatggcagtgtgggcagttattctctgggcggctatgccagttgggaacatgaaagtggtttctatctggacggtgtcgtgaagctgaaccgttttaaaagtaacgtagcaggtaaaatgagcagcggtggagccgccaatggcagttaccacagcaacgggctgggcggtcacattgaaaccgggatgcgatttaccgatggtaactggaacctgacgccgtatgcatcgttaacggggttcaccgctgataaccccgaatatcatttatccaatggcatgaaatcgaaatcagtcgatacccgcagtatatatcgtgaactgggcgcaacgctgagttacaacatgcgtctggggaacggtatggaagttgagccgtggctgaaggcggctgtgcgcaaagaatttgtcgatgataaccgggtgaaagtgaatagtgacggtaatttcgtcaattatttgtcgggcagacgtggaatataccaggcagcaggttaccccattcatcgtattctgcgtaccattctgtgtcccttccgtgctgacaagcgccagcggcagcccgcgatggtcgcagtggtacaggtgaatttttcgcgccggcgtgtataccgggtccatctggctttgcatctgcgccaccgtcaggccgcacgatgccagccagcggcggctttcctcactcacccggtcagccaggatttcactttccagccggtcgagcatctgcaccagcaccggcgggaacaccacactgccaccgtcttcgccaccggactgctgaagggtatccgccaggctgcggcgctgcgttttcgccagctcaccggtggcggtttcaaccctgatgagtggcgtgaagctccccggctgataaatcgtctggatgcgggttctgtcgataagtatcgtggtcaggcggtcgccgtcccagccgtaccagaacgccacacgggcagtctgaatgatgaatggatgatggcgggagatctgattgtcgccagtcccggtgttgcactggcgcatccatccttaagcgctgacgctgatgccggaatcgaaatcgttggcgatatcgagctgttctgtcgcgaagcacaagcaccgattgtggcgattaccggttctaacggcaaaagcacggtcaccacgctagtgggtgaaatggcgaaagcggcgggggttaacgttggtgtgggtggcaatattggcctgcctgcgttgatgctactggatgatgagtgtgaactgtacgtgctggaactgtcgagcttccagctggaaaccacctccagcttacaggcggtagcagcgaccattctgaacgtgactgaagatcatatggatcgctatccgattggtttacaacagtatcgtgcagcaaaactgcgcatttacgaaaacgcgaaagttagcgtggttaatgctgatgatgccttaacaatgccgattcgcgttgaatgggttttgcggtttaccgagttcatggcaaaacccgatggctattgtttgaagacctga

SEQ ID NO: 144586 - DNA, 1593 bp, Homo sapiens
gacttcgttcgaaccgcgattttggtgctggtgtggttgcaggtaaaagccagtaacagcgtgccggatgcgttagtcgtggatctgctgcctgcgggtctggaactggaaaaccagaatctggcgaacggtagcgccagcctggagcaaagtggtggcgaagtgcagaacttactgaaccagatgcagcaggcgagcattaagcacattgagttccgtgacgatcgctttgtggcggcggttgccgttgatgaataccaaccggtaacgctggtgtatctggcgcgggcggtgacgccgggaacgtatcagcgtggggagcagataaactctggcctctaccgctgcatgaagtcaatcccgcacgagtggtcgtggcgcaggatggtacgccgctctggcgcttcgccgatgctgacggcatctggcgttatccgagcaaacactgaactgcggcagatggcatcgcaggtcattcaagcggatagcgaatcgacgaatattttatgggccagcgccattttgttggggattgcactggtgattggcgcaggcatggtttggtggatcaaccgctctattgcccggctcactcgctatgctgattccgtcactgacaataagcccgttcctctccccgatctcggtagtagcgagttgcgtaaactcgcgcaggcgctggaaagtatgcgcgtgaagctggaagggaaaaactatattgagcagtatgtttacgcattaactcatgagctaaaaagcccactggcggcgattcgtggagcggcggaaattttacgcgaaggtccgccgccggaagtggtggctcgttttactgacaacattctgacgcaaaatgcgcgtatgcaggcattggtagaaacgttactacgccaggcaagactggagaatcgtcaggaagtcgttctgactgctgttgatgtggcggcattattccgccgcgtcagcgaagcgcgcaccgtgcagttggcagaaaaaaaaatcactctgcatgttacgcccaccgaggttaacgttgctgctgaaccggcgttactggagcaggcgctgggaaatttactggataacgccatcgattttacccccgagagcggttgcatcacgctaagcgccgaagtggatcaggaacacgtcacgcttaaggtgctggataccggtagtggtatcctgactacgcgctgtaccagcaactgcgaatatagagtaaacagtttgctactcaacgacggtgatgtttatttgtcagcacaaacagcagcgcctgccacaactaacggtatctacaatacgctgacaaccaatgaactttccggtagcggtaatttctacctgcataccaacgttgcaggctcccggggcgatcaactggtcgtcaacaacaacgccactggtaattttaaaatctttgttcaggataccggcgtcagcccacagtctgacgacgcgatgacgctggtgaaaacagggggaggggatgcttcgtttacgctgggcaataccggcggtttcgttgatcttgggacctatgagtatgtcctgaaaagacggcaacagcaactggaacctgaccaatga

SEQ ID NO: 144587 - DNA, 737 bp, Homo sapiens
atgcaaaacagtagccacagcaccatacaccgcatgtcgtggaacgatacgctggatgaacgtaatagctggggcatgtctgccggactgcaatccgatcgtccggacaatggagcccaggtgagcggtaactatcagcacctgagttcagcgggtgagtgggatatttctggtacctatgccgccagtgattacagttccgtcagcagcagctggagcggttctttcaccgcaacccaatatggtgcagcatttcatcgccgcagctccaccaatgaaccacgcctgatggtcagcaccgatggcgtggcagatattccggttcagggcaatctcgactacaccaaccattttggcattgcggtggtgccgttgatttccagttaccagccttccaccgtggcggtgaacatgaatgacttacccgacggcgtaacagttgcagaaaacgtcatcaaggaaacatggattgaaggcgcgataggttacaaatcactggcttcccgttccggtaaagacgttaacgtcatcatacgcaacgccagcggtcagttccctcccctcggtgcggatatccgccaggatgacagcggcattagctcatctcaatggtgatattgtggtcgcggaagaaacgctgcatatagccgggatactggccacgcgcctgaacatcaccaaagaacatccagcgccggttctcttccatggcctgcaacatatcctgtggctggcag

SEQ ID NO: 144588 - DNA, 3513 bp, Homo sapiens
atggacggcggtcagttaaatatcagtggtctggttgttgataacacctgtgaaacccgcgttgacggcggtaacaaggatggtctgatcctgctgcaaaccgcaaccgttggtgaaatcgatgctggcgtactgaatgacaccgttggcgctaaagctaaacctttcagcatcaccgttgactgcagcaaagcaaatccgaatccaggtagcacggctaaaatgaccttcggttctgttttctttggtaacagcaaagggactttgaacaacgacatgtctattaacaacccatctgacggcgttaatatcgctctacacaatattgatggttccactatcaaacaggttcaaattaacaaccctggcgatgtgtatactaaagccctggatgcaacgacaaaatctgctgtttatgattttaaagcgtcttacgttcgtgccgtcgcagaccaaacagcaactgctggttatgtaaaaactaacactgcatacaccattacttatcattcatcgtctattgcggacattgtcatttcgggtactcgcgtaatatataaaagcgatcaaaaaagtgtcaacgtacgtctggaaaataaagggaataacccgttgcttgtccagagttggttagatactggcgatgacaacgctgagcctggcagtattacagtcccttttactgctacgccgccagtatcgcgtattgatgccaaacgtgggcaaacaatcaaattaatgtacacagccagcacctcactgcctaaagacagagagagcgtgttctggtttaacgtactggaagttccaccaaaaccagatgcagaaaaggtcgcgaatcaaagcctgctgcaactggcatttcgcacacgtataaaacttttctatcgcccggatggattgaagggaaatccctctgaagccccgttagccctgaagtggttctggtcaggttcagaaggttttgtacttactatggaatggattgccgatccgtctatctgggccgggttaatcacgctgattgtgatcgaactggtcctcggcattgataacctggtctttattgccatcctcgccgaaaaactaccgccgaagcagcgtgaccgcgcacgggttactcgggctgctgctggcaatgttaatgcgcctgttactgctggcgtcaatctcctggctgaaacaaattttgctcggggcgatccccgcttattatttcatattttcggcggtaccttttcttcgcttcgcatgcggttatacgtcaaaatacgagaaatgccgccgcatgattatcaaagtacgcttagcgactatatcgtcgtgcaatttgacggtgccggtagcgttaacgaagaccctactgcccaaaacctgaaatatcatattactggtctggaaaacattcgcgtgctggattgcagcgtcaatttttccatttcaccggaaacacaggtgattgattttggtaaatttaatttgctggatatacgtcgccacacaatgtcgaaaacgttcagtattaaaacgaccaagagccaaaacgatcaatgcaccgacggatttaaagtcagttcctccttttataccgaagaaacgttggttgaagaagataaagcattgttgattggtaatggtctgaagctacgtttactggatgaaaacgcctcgccttataccttcaataaatatgctgaatacgccgatttcaccagtgacatgttggtctacgaaaaaacctatacggctgaacttcggtccttcaggcaccccatcgaggtggccctcgataacaccgtgctgggcggcgtacgcgcgacggaaggtcagggctttaaagcggccgatatcatcggcatgggcattaacggtgtggatgcggtgagcgaactgtctcaagcacaggcaaccggcttctacggttccctgctgccaagcccggacgtacatggctataaatccagcgaaatgctttacaactgggtagcaaaagacgttgaaccgccaaaatttaccgaagttaccgacgtggtactgatcacgcgtgacaactttaaagaagaactggagaataaaggtttaggcgtgattcacggagacgttatgcaacagtctaccccgtatctctcatttcgcggcatcggtgaaacgtttcccggcgttaaggcgctgacggatatgagttctgactgctatgccggtcaggttcatgcgttgatgggtgaaaatggcgcaggaaaatcaactctcttaaaaatcctcagcggcaactatgcgccaaccacgggttctgtagtgattaatgggcaggaaatgtccttttccgacacgaccgcagcacttaacgcgggcgtggcgattatttaccaggaactgcatctcgtgccggaaatgaccgtcgcggaaaacatctatctcggccagctgccgcataaaggcggcattgtgaatcgctcattgctgaattatgaggcgggtttacaacttaaacatcttggtatggatattgacccggacacgccgctgaaatatctctccattggtcagtggcagatggttgaaatcgccaaagcgctggcgcgtaacgccaaaattatcgcctttgatgagccaaccagctccctctctgcccgtgaaatcgacaatcttttccgcgttattcgtgaactgcgaaaagaggggcgggtaatcttatacgtttctcaccgtatggaagaaatatttgccctcagcgatgccattactgtctttaaagatggacgttatgtcaaaacctttaccgatatgcagcaggttgaccacgacgcgctggtgcaggcgatggtcgggcgcgacattggcgatatctacggctggcacccgcgcgcgctggatgaaggtgtaatctgcgatatgtttgaaggtcatgcgccgtacaaaccgcgctatgtcttacccgattacgcccgttttctggcgaacggttccgaatggctggagctggaaggcgcgaaagatcttgatgacgcactctctctgctgaccattctttaccaccacgtaccgtcggtcacatcgatgccggtctacctggggcaactggatgcgttgttgcaaccgtatgttagaattctaacacaagacgagatcgatgttcgaataaaacgtttctggcgttacctcgacagaaccctgccagacgcctttatgcacgccaatatcggcccgtctgattcgcccattacccgcgcgatcttacgtgcagatgcagagttgaagcaggtttcaccgaacctgacctttatctacgatcctgaaatcacccctgatgacctgctgctggaagtggcgaagaacatctgtgaatgtagcaaaccgcacatcgccaacggtccggtgcatgataaaattttcacaaaagggggctacgggattgtgagctgttacaactcactgccgctggcgggtggtggcagcacgctggtacgccttaacctgaaagccattgcgcgagcgcagcgaatcgctggatga

SEQ ID NO: 144589 - DNA, 1666 bp, Homo sapiens
gagctttggccaaaaccggtcggttcaaaggttcccgcacccacctgtggccgttcttcgtctccggagatttcttctttccgggcgcaagataattcgcctggtggcgtttatggcaaaatctgcggagtgctgttcgtcgccgggggccgctgttctggtcacccgcatgatgctgggcgataacgctgaagcgtgtaaccagcatatcgtctggttgccgccagtgagcattaatctcctgcttactattttgctcgcggtcgtggccggtacagtgggatgcctgctgcgtcttccttccggcacgatgctcatcccgatgctggcgggcgcagtgctccagtctggtcagctcatcaccatcgaactaccgctatttgtgcgcggtatgcgtgggggctggacccggtttatgcacattgattttatgactgcctacctcggcaccagccccggcggcttgtatagcgtgtgcgtcatcgcgcagggaggcaatgtcggagatgggtcgcatcatggtgatgaaagcctaggcctgttcagttattttgctggcagcgcctcgcattgcgcgtgttatttcaacctatggtccgaagcgtatggctattgcttgcatgcaggggaccgtaaaaagtgcgcgatcactctgacggtctctgccgccatttataccaacgtacgtggtggaggaggcggttcgaagaagatctcgcgtatggagctccgtatgaagaaagatcacaaggtgcgcgctggtacagtcctgtatcaccacagccgagctcagagaagagatgctctgtttgataaaagcaaaagcttgagttttaaatccagatctgccattgccctcttgaaacttgagaacaagagctcaggatggattcagacccggatcaggatgggcaagaaaaactggaacactcttggagagggagtctgcagctgcaggatgtttttgcccgatgcgaacacattggccaagaacagtgcttgctctgcagccagcgctgtccaagcagcagaccggccagacagccaggaagcagacgccctggagcacatggcccacagtcgctgtgcactcgggtcgactctagaggatcccctgaatttgctggaaatatttctgcgctggctgatgcggaaaatatttcacgtaagattattacccgctgtatcaactccgccaaattgcctaaatcagttgttgcccttttttctcaccccggtgaactatctgcccggtcaggtgatgcacttcaaagagcctttacagacggaagaggaattacttaagcagcaggcatctaaccttcatgagcagtgtaaagctggggtgatattcgcagctgaagaagttatcactcctttgactcctgtgcttagaacgtcatctgcatcaagaactagtttaagctcacgacatcagtctgctcctggagcgacagtattgtataagggcgagaaaatggtgcttaacctggtcgactctagaggatcccctgttgaaacctactacatcatcctagataagaaagatgctcgtgaaatagacatctttttgcgtcagtgccgttctcaaaatctagggctcattaaaccactgtacgagcacgagtacttgttcgtcaaagggcttggacaacatgaaccataa

SEQ ID NO: 144590 - DNA, 2667 bp, Homo sapiens
atggttacaatcagggttcccgttccggtaaagacgttaacttcatcatacgcaacgccagcggtcagttccctccccctcggtgcgtatatccgccaggatgacagcggcattagcgtggtactgttgggcgaggaagtacatgcctgcttgggttgcaatgctgcggtgcaacccgatcgcacacactgtgagaataactgccaatgaccaagtcaccagcctgggtatcgaaaaccaaagtgacaaactgccttatcttgcttattcctggatagaaaatgaaaaaggggagaaaagcgatgctcttctggtcgctttgccccctattcaacgtctggaaccgaaagcgacatcgcaggtgcgggttgtgaaacaagcctcaaccacacaattacctggcgatcgtgaaacgctatttttctacaatatgcgcgaaattcctcccgctccggataaaagcagcgaccatgcgatacttcaggtcgctattcaaagtcgtattaaattgttctggcgaccggctgcattacgcaagaaagcaggagaaaaggtcgaactgcagttacaggtcagccagcagggcaaccaactgacactgaaaaatcctaccgcgtattatctgagccatggcctatctggggagaaatgaaaaaaggcgttctcccaggcttwcaaaaccgtgatggttgcaccttttagtacggtcaavacaaacmccggragttatagcggcagccagttttatctcggttacatggatgattacggcgcattacgcatgaacgacgctcaactgcagcggacaatgccgtttacaagcagtggagscgaaatgagtgctggcaaggvgattgttgctcgtcatctgcctgttatttctgccgttgaagtctgcaatgccgctgaactgctattttggtacatctggtggcgcagtagaaaaatcagaagcgattcacccgtttgctgtaccaggcaatgccaaacccggtgataagatctgggaatctgacgatattaaaattcccgtctattgtgacaacaataccaacggcaactttgaaagcgagcatgtctacgcctgggtaaacccctatccgggggtgcaggatcgttattatcaactcggcgtgacatacaacggtgtcgattacgatgccagtctgggaaaaagtcgcatcgacactaaccagtgtatcgacagtaagaacattgatatttatacccctgagcagatcatcgcgatgggatggcagaacaaaatttgctcgggcgatcccgctaatattcatatgtcgcgtacctttctcgctcgcatgcggttatacgtcaaaatacgagaaatgccgccgcatgattatcaaagtacgcttagcgactatatcgtcgtgcaatttgacggtgccggtagcgttaacgaagaccctactgcccaaaacctgaaatatcatattactggtctggaaaacattcgcgtgctggattgcagcgtcaatttttccatttcaccggaaacacaggtgattgattttggtaaatctaatttgctggatatacgtcgccacacaatgtcgaaaacgttcagtattaaaacgaccaagagcctaaacgatcaatgcaccgacggatttaaagtcagttcctccttttataccgaagaaacgttggttgaagaagataaagcattgttgattggtaatggtctgaagctacgtttactggatgaaaacgcctcggccttataccttcaataaatatgctgcatacgccgatttcaccagtgacatgttggtctacgaaaaaacctatacggctgaactttcgtccattccaggcaccccccatcgaggctggccccttcgatacagtggtgctttttaagattaactataactgatttaccatgatgccctttgccgccggaaagggcatctctttcagaaaattgctgattttccccttttccttgattgctgatattttttcctggcccagctttctttatgctgtatcgatacaccacagagaaaataatgagggagcgaaggatgccagtttttgcagtggggaatgttatgtgtgctatcacttctcctttctattgagttactcgcgggacatctcccggcggcgctattacttgtgccgatgatcgccgggatcatctttagtatgcgcggaagtactctgcaacttccccgctctgcttttctcgccgcccaggccattcttggctgcatgattgcgcaaaacctcactggttcgattctcaccaccctggccgtcaactggccgatcgtgcttgcaattttactggtaacgctgctttccagcgccattgtgggttggttattggtgcgctatagctcattgcctggaaataccggtgcctggggctcctctcctggcggcgcggcggcaatggtcgctatggcgcaagattacggcgcagatattcgcctggtggcgtttatgcaatatctgcgagtgctgttcgtcgcgggggccgctgttctggtcacccgcatgatgctgggcgataacgctgaagcggttaaccagcatatcgtctggttcccgccagtgagcattaatctcctgcttactattttgctcgcggtcgttgccggttccgtgggatatgctccttggaagtacaagtaa

SEQ ID NO: 144591 - DNA, 1692 bp, Homo sapiens; identical to SEQ ID NO: 140292

SEQ ID NO: 144592 - DNA, 218 bp, Homo sapiens
atgattacgaattcgagctcggtaccccccggaacgcttcacccgtccaggcgtggacccagttatcctccggcagatagagcgtccagtcgctacggcattcttcatgcaccggagcgaccagaatgtcgcgacctaacaggtactgatatttcagggaacagcgggcgcataaccggcaggccggacttcgcattcagcgcgacggcctctttcag

SEQ ID NO: 144593 - DNA, 3198 bp, Homo sapiens; identical to SEQ ID NO: 143887

SEQ ID NO: 144594 - DNA, 1207 bp, Homo sapiens
  misc_feature (1)...(1207): n = a,t,c or g
tttaaacaggaaagagagagaacgagagaaaagaggacccatccctctgctggaaaaattaaccgccctgctgggacgccagccagaactgcccgactggatttatgacggagtaacgctcggcattcagggcgggacggaagtgtgccagaagaaactggacaccatgcgtaacgcgggcgtgaaggtcaacggcatctgggcgcaggactggtccggtattcgtatgacctctttnggcaaacgcgtgatgtggaactggaagtggaacagcgaaaactacccgcaactggattcacgcattaagcagtggaatcaggagggcgtgcagttcctggcctatatcaacccgtatgttgccagcgataaagatctctgcgaagaagcggcacaacacggctatctggcaaaagatgcctctggcggtgactatctggtggagtttggcgagttttacggcggcgttgtcgatctcactaatccagaagcctacgcctggttcaaggaagtgatcaaaaagaacatgattgaactcggctgcggcggctggatggctgacttcggcgagtatctgcccaccgacacgtacttgcataacggcgtcagtgccgaaattatgcataacgcctggcctgcgctgtgggcgaagtgtaactacgaagcccttgaagaaacgggcaagctcggcgagatccttttctttatgcgcgccggttctaccggtagccagaaatactccaccatgatgtgggcgggcgaccagaacgtcgactggagtctcgacgatggcctggcgtcggttgtcccggcggcgctgtcgctggcaatgaccggacatggcctgcaccacagcgacattggcggttacaccaccctgtttgagatgaagcgcaaccaaaggagctgctgctgcgctggtaaccgtcctggcgacaactggcagtttgacggcgacgcagaaaccatcgcccatttcgcccgtatgaccaccgtcttcaccaccctgaaaccttacctgaaagaggccgtcgcgctgaatgcgaagtccggcctgccggttatgcgcccgctgttcctgcattacgaagacgatggtaccgagccctcggtccaactcgcttatgacgagcgcgcaccagctggtacttactgtgtcagatactccaccgatgtgtatcagacgcgagaacgggaacagcaggaataa

SEQ ID NO: 144595 - DNA, 1491 bp, Homo sapiens
atggttcttgattcctttaatggcgagatccccttaaacggattatctgccagactagtcattggagaacagatgattgatgtcttagggccggagaaacgcagacggcgtaccacacaggaaaagatcgcaattgttcagcagagctttgaaccggggatgacggtctccctcgttgcccggcaacatggtgtagcagccagccagttatttctctggcgtatgaacggtaacaacggtaatagcagcgaagtgcattatcgcgactatacgttgccggatgtgccgaagcccaatacggttagtgtaacgtcgggaagtgatgaggctggtggcagcatgaacaacctcaacggctatgtcgtcggtaccaacgtttacggcagcgccgggaagctgaaggttcacaatgccagcatgaacggcgtggagattaacacgggctttaccgctgtggaaggtagcaacctgaccgacgctgacgccatcacctcaacgtccgtggtatggactgccaaaggcagcaccgatgccagcggtaacgttgacgtcaccatgagccacaatgcctacaccgatgtggcaacagatgcctcggtgaatgacatcgcgaaagcactggatgcgggttacaccaacaacgaactgtttaccagcctgaacgtcggcacgactgctgaactgaacagtgctctgaaacaggtcagcggtagccaggcgaccacggtattccgcgaagcgcgcgtgttaagcaaccgctttagtatgctggcagatgccgcgccgaaagtgggtaacggtctggcgttcaacgttgtcgcgaaaggcgatccgcgtgccgagttaggtaataataccgaatacgacatgctggcattgcgtaaaactatcgacctgagcgaaagccagacgatgagtctggagtacggtatcgctcgtctccatggtgatggtgcgcagaaagcgggtgataatggcgttacaggcggttatagccagttttttggcctgaaacatcagatgtcgttcgataacggcatgaactggaataacgccttgcgttacgacgttcacaaccttgacagcagccgctcgattgcatttggcaacacgaacaaaacggctgataccgacgttaaacagcagtacctggagttccgcagcgaaggggcgaagactttcgaaccgagcgaaggactgaaggttacgccatatgcgggtgttaaactgcgtctcacactggaacaaagaaacaaagaaaaagaaaggagcaggggagcgagaacgaaagaagggaacgacgaacacgcagaagaggcgctacaaggcgaaagagacacgagagcgagagagggaaaaaccggcacgaggagccggaagagagagggacgaagaaaagaagaagaaggggaaggagcgaagcgacaagaacacgagagaaaggaaaaacgacgggagaaagagattcttcacagacggttgattgtctga

SEQ ID NO: 144596 - DNA, 4024 bp, Homo sapiens
atgcgccgcagacatctgggtacgaatacgcgcctgacctttcggaacgaccggatagaagaaaccggtaacgtaaatgccctctttttgcagctcacgggcaaatttctgcgccactaccgcatcaccaagcatgaccggaataatggcgtgatcggctcacgccagggtaaagcccgccgccgacatttgctcacggaactgacgcgcgttcgcccacagacggtcacgcattcgctgcccgctttcgacatctccagtactttgatggacgcggcaacaatggccggtgccagcgagttggagaacagacggtgtatcaatatcaatgtggactggtcagcgtttataacgatgcacagaacaattgttaactatggtacaatctgcactttcggcgtgtgccaatcggggaatgagtacaataatacagatgatttcacctcactgatctataccggtggcgatacgattacacgaagcggagaaactgtaacgctaaataaatctgctgctgtgactgataagctggctgggaatgttgttaatagcggaacgctttccggtgatcaaattacggtatcaagcggtcttctggaaaataccagcggtggcatcatcaataacttagtaaaacttgacaagggtgccgtcattaaaaatgccggggtgatgacgaataacgtcgatgttagcggtggaatcctcaataatgccggagaaatgactgcgcaaattaccatgaatgctggtgctgatagttcgttagtgaacaacaccggaaccatcaataaaatcgtgcagaacgcgggggtattcaataatagtggcagtgtaacagggcggatgatgtcggctggcggggtctttaataatcaaactgacggggcgattatgagaggtgctgcgctgacaggtactgcagtggcaaataacgaaggaacctggaacctcggaagtagtagtgagggtaacaacaccgggatgctggagagttaataataattcagctttcaatagccgcggcgagtttattcttgataacgacaagaatgctgtgcacatcaaccagtccggtacgctttataataccggtcacatgaacatcagtaattcttcccacaacggagccgttaatatgtggggcggaaatggtcgttttatcaatgacggaacgattgatgtttctgcgaagtcactggtagtcagcgctaataatgccggcgatcagaatgccttcttctggaaccaggataacggggtcatcaacttcgatcacgacagcgccacaactttattgcccagaatgacggcatcatttgctgcccgtggtgttgatgaacgccgctggatgcgcttcggttgcgctactcgcccaatcccgaatctaccagaagcgcgcgccagccgaatgtgttcatcgccggaaaccggattatcactggaaacggccgctaaactaagtgaagtcatgccaggagctggcggacgttcctgcctggaacgctacgaatatgccaaacacggtgcctgctttggttttgatccggacgcatacttcggtacgatggtacgcctgaatcaagaaattaaagagagcgaacgcggaaaattccttgcggataattacggtaaaacagtgagccgccgtgactttgacgccgcctttgccaaaagctggggaaaagagaacgtgaaagcagttaagctaacgtgccagggtaaccctgcgtatttgactgaaattcagatctcgatcaaagctgacgccatcaacgctccgctttctgcaaactcattcttgccacaacctcacccagaggatgcactcgcatcctctttacgcaaaatcagcaatttttcctggttctcactgttcacttttgctgcaaaattattccgtttcgtttgtgggaataaccatggcagaagcattttacatcctgataggatgtctgattatggcggcgattatcgtcatggctgtcctttacctcgaaaaccactcctgacgatcatattgttccccccggcatcgcattcaccagacctgaaaccgccttctgcgccgcctctgcgctttgtgcaccgggtaccagaatcaccttacggcactcctcttcacgtttttcgaaaatctcatatccccgggcggcctcttcaaacggcatatagtggtgtcgaggtgataggcattcagtcggagaaactcagtcgctatcttgagcgtttacatactgccggactcaacgtgacgcgggttttgccagatggctgctatcttccctgggaagtagatagctggactctggttaaccagcaaacaagctggctcattcgcagtgccgcacatgccttcaacgaactggatgaacactggttacagcatcttgctgcccagtttccgcctgagaatatgctttgttatggtgtagtacctcacggcgttgcagcggccaatccacttatccagcatcctgaaataccatcactgagtttgtattctgccgatattgcattccagcgctatgacatgctgcatggtatttttcgtaaacagaaaactgtaagcaaatcgggaaaatggctcgcccgcctggcagtaagctgtctcgttctcgccattctttcttttgttggcagccggagcatcgcgctctggcatacgcttaagattgaagatcaacttcagcaacaacagcaagaaacctggcaacgttatttcccgcagatcaaacgcacccacaattttcgtttttactttaagcagcaactcgctcagcaatatcctgaagctgtgccgttgctctatcatttacaaacacttctgctggaacaccctgaactgcagttaatggaggcgaactatagccagaagcaaaagtcgctgaccttaaaaatgagtgctaagagtgaagctaatatcgatcgtttctgtgagttaacacagtcctggcttccgatggataaaacagaaaaagatccgaaccagtctgcgctgtcgagttctatcgagcgtctgtcttctggcttgcgtattaacagcgcgaaggatgacgcagcgggtcagtcgattgctaaccgtttcacctctaacattaaaggcctgactcaggcggcccgtaacgccaacgacggtatctccgttgcgcagaccaccgaaggcgcgctgtccgaaatcaacaacaacttacagcgtgtgcgtgaactgacggtacaggccactaccggtactaactctgagtctgatctgtctgctatccaggacgaaattaaatcccgtctggatgaaattgaccgcgtatctggtcagacccagttcaacggcgtgaacgtgctggcaaaaaatggctccatgaaaatccaggttggcgcaaatgataaccagactatcactatcgatctgaagcagattgatgctaaaactcttggccttgatggttttagcgttaaaactaacgatacagttaccactagtgctccagtaactgcttttggtgctaccaccacaaacaatattaaacttactggaattaccctttctacggaagcagccactgatactggcggaactaacccagcttcaattgagggtgtttatactgataatggtaatgattactatgcgaaaatcaccggtggtgataacgatgggaagtattacgcagtaacagttgctaatgatggtacagtgacaatggcgactggagcaacggcaaatgcaactgtaactgatgcaaatactactaaagctacaactatcacttcaggcggtacacctgttcagattgataatactgcaggttccgcaactgccaaccttggtgctgttagcttagtaaaactgcaggattccaagggtaatgataccgatacatatgcgcttaaagatacaaggcgcttcgcgaagtatgtcgcggccttttggaggatagccagctcttcatcccgttctgccagctggcgtttgagacgtgcaatctcggtagacatctccagttcacgttcagaagacgtctgctga

SEQ ID NO: 144597 - DNA, 3316 bp, Homo sapiens
atggccgcattaccatacatgcaactgtacatagctgattacctggctgacaccatgcatttgtcagcagaggagcatggtgcgtatttgttgctgatgttcaattactggcaaacaggaaagccaatacctaaaaacaggctggcaaaaattgcccgtctgactaacgagcgatgggctgatgttgaaccatccttgcaggagtttttttgcgataacggcgaggaatgggtgcatcttcggattgaggaagatctggcatcagtcagggaaaaattaaccaaaaaatcagccgcaggaaaagcatctgttcaggccagaagaagcagaaaggaagcagatgttcaaacaaaacaagagagaaatttaacaggtgttcaaacagatgttgaagtggtgtttgaacatgatgtcaacacaaaggcaactaataaagatacagataaagatctaaaaacagatccccccctaaatcccccccgggggaatcgaggtgtcaaaaagtttgaccctctggatattactttgccgaactggatttctgtctcgctttggctcagcgctaataatgccggcgatcagaatgccttcttctggaaccaggataacggggtcatcaacttcgatcacgacagcgccagtgccgtgaaagtcacccacagcaactttattgcccagaatgacggcatcatgaacatcagcggcaccggtgctgtggctatggaaggtgataagaacgcgcagctggttaacaatggcaccatcaacctcggtaccgcaggcactactgacacgggtatgatcggtatgcaactcgatgccaacgccacggcggatgcggtaatcgaaaacaacggcaccatcaatatcttcgccaatgactcgtttgcatttagcgtactgggtacagtaggtcatgtggttaacaacggcacggtggtgattgccgatggggttacgggttctggactgatcaagcagggcgacagcatcaatgttgaaggtatgaacggtaacaacggtaatagcagcgaagtgcattatggcgactatacgttgccggatgtgccgaagcccaatacggttagtgtaacgtcgggaagtgatgaggctggtggcagcatgaacaacctcaacggctatgtcgtcggtaccaacgttaacggcagcgccgggaagctgaaggttaacaatgccagcatgaacggcgtggagattaacacgggctttaccgctggctacggcagacaccactgtgagttttgataacgtagtggaaggtagcaacctgaccgacgctgacgccatcacctcaacgtccgtggtatggactgccaaaggcagcaccgatgccagcggtaacgttgacgtcaccatgagcaaaaatgcctacaccgatgtggcaacagatgcctcggtgaatgacatcgcgaaagcactggatgcgggttacaccaacaacgaactgtttaccagcctgaacgtcggcacgactgctgaactgaacagtgctctgaaacaggtcagcggtagccaggcgaccacgggattccgcgaagcgcgcgtgttaagcaaccgctttagtatgctggcagatgccgcgcccgaagggggtaacgggctggcgttcaacgttgtcgcgaaaggcgatccgcgtgccgagttaggtaataataccgaatacgacatgctggcattgcgtaaaactatcgacctgagcgaaagccagacgatgagtctggagtacggtatcgctcgtctcgatggtgatggtgcgcagaaagcgggtgataatggcgttacaggcggttatagccagttttttggcctgaaacatcagatgtcgttcgataacggcatgaactggaataacgccttgcgttacgacgttcacaaccttgacagcagccgctcgattgcatttggcaacacgaacaaaacggctgataccgacgtgaaacagcagtacctggagttccgcagcgaaggggcgaagactttcgaaccgagcgaaccggatggcaacgccaaaccggctattttactgatgatccgcaaactgccggaagccaatataatccagacggatcgctcccccaccattcgcgcctcgctggaagaagtcgagcaaacgctgattatctcggtggcgctggtgattctggtggtgtttttattcctgcgctcgggtcgcgccactattattcccgccgtttcggtgccggtttcgctgattggtacgtttgcggcgatgtacctgtgcggattcagtctcaataacctttcgttaatggcgctcaccatcgctactggtttcgtggtggatgacgccatcgtggtgctggaaaacattgcacgtcatctggaagcgggaatgaaaccgttgcaagccgcactgcaaggtactcgcgaagtcggttttacggtgctgtcgatgagtctgtcactggtggcggtgttcctgccgctgctgttgatgggcggattgccgggccgactgttacgcgaatttgccgtgacgctttctgtcgccattggtatatcgttgctggtttctctgacattaacgccaatgatgtgtggctggatgctgaaagccagcaagccgcgcgagcaaaagcgactgcgtggttttggtcgcatgttggtagccctgcaacaaggctacggcaagtcactaaaatgggtgctcaatcatacccgtctggatttcatgaaaattatccgtgacgatccggcagtggataatgtcaccggctttacaggcggttcgcgagtgaacagcgggatgatgtttatcccagtgccgcgcttaatactggcattaacacatcgcgcatccagcgatggcgagtcaggacatcttcgcccgccaaaacgcatcactttgccgataccttcgttgaggttgcagtacgcccggttgccgtcggtcacgttctcaaccaccagcatcggcatactggcagaagtaataccgcccattggcccgacggcattcacatggccccacccagctaagaaaaccttctacccgggcccgcgcaacaacgggcaaaagaacgatgaggagcgggtcaccgcgcgcgcaggcccagaccactcgagaacgacaagaccagaccacaacactcaccccggcccgggagagcaggagacagctgtggaccttcttggtacaatcagcaggtggtccagtcggtacttcggaaatgatccttgcacaagttctacagcgaggaaaccctttgcgttacgcacaccaattcaccaggcagcatcgccccgtttactgcggtttttttcgccgtcataa

SEQ ID NO: 144598 - DNA, 1342 bp, Homo sapiens
atgcgcaccggttctaccgctagccagtatacttcccccatgatgtgggcgggcgaccacgacattggcggttacaccaccctgtttgagatgaagcgcagcaaagagctgctgctgcgctggtgcgatttcagcgccttcacgccgatgatgcgcacccacgaaggtaaccgtcctggcgacaactggcagtttgacggcgacgcagaaaccatcgcccatttcgcccgtatgaccaccgtcttcaccaccctgaaaccttacctgaaagaggcccgtcgcgctgaatgcgaagtccggcctgccggttatgcgcccgctgttcctgcattacgaagacgatgcgcacacttacaccctgaaatatcagtacctgttaggtcgcgacattctggtcgctccggtgcatgaagaaggccgtagcgactggacgctctatctgccggaggataactgggtccacgcctggacgggtgaagcgttccggggcggggaagttaccgttaatgcgcccatcggcaagcccgccgaatcgcccaaggagtccggccttatctggtgctcctccgcgctctgggagccctgtggccgtggttccgaaggtaattcttcccacaacggagccgttaatatgtggggcggaaatggtcgttttatcaatgacggaacgattgatgtttctgcgaagtcactggtagtcagcgctaataatgccggcgatcagaatgccttcttctggaaccaggataacggggtcatcaacttcgatcacgacagcgccagtgccgtgaaagtcacccacagcaactttattgcccagaatgacggcatcatgaacatcagcggcaccggtgctgtggctatggaaggtgataagaacgcgcagctggttaacaatggcaccatcaacctcggtaccgcaggcactactgacacgggtatgatcggtatgcaactcgatgccaacgccacggcggatgcggtaatcgaaaacaacggcaccatcaatatcttcgccaatgactcgtttgcatttagcgtactgggtacagtaggtcatgtggttaacaacggcacggtggtgattgccgatggggttacgggttctggactgatcaagcagggcgacagcatcaatgttgaaggtatgaacggtaacaacggtaatagcagcgaagtgcattatggcgactatacgttgccggatgtgccgaagcccaatacggttagtgtaacgtcgggaagtgatgaggctggtggcaggatgaacaaactcaaaggatatgtcgtcggtaccacgttaacggagggccgggaactgaacgttaacaaggccggatga

SEQ ID NO: 144599 - DNA, 912 bp, Homo sapiens
acaaactgtgggtgccatcacagatataaatgagcaagaactgaacaattgcattaaagatttaaatatgttcaaagtgaagaatgaattatgacaatcaacgattcggcaatttcagaacagggaatgtgtgaagaagaacaggtcgcgcggatcgcgtggttttactatcacgacgggctgacccagagcgagatcagcgatcgtctcggcctgacacgtttgaaagtgtcgcgattgctggagaaagggcatcagtccggcattattcgcgtacagattaattctcgctttgaaggctgtctggaatatgaaactcaattacgtcgtcagttttcgctgcaacatgtccgggtgatccctgggcttgcggatctcgatgtcggagggcgactggggataggcgcggcgcatatgttgatgagtttacttcaaccacaacagatgctggcgattggttttggcgaggcaaccatgaatacgctgcaacgcttaagtggttttatttcgtcacagcaaattcgcctggtcacgctctccggtggcgtcggttcttatatgacgggaatcgggcagcttaacgcggcgtgcagtgtgaatattattccggctccgttgcgggcatcctccgctgacattgcccgtacgctaaaaaatgaaaattgcgtcaaagatgttctgttagccgcgcaacgagcggatgcggcgattgtcggcattggtgctgtgagtcaacaggacgatgcgacaatcattcgctccggttatatcagccagagcgaacagttaatgattggcccgaaaagggcggtagggacattttaggctacttttttgatgcaaaggtgacgctgcacgaatatcaaaatacataacgaactgttggcctaccctcaagcgccgtgagaccat

SEQ ID NO: 144600 - DNA, 700 bp, Homo sapiens
  misc_feature (1)...(700): n = a,t,c or g
gaataccccaggatttatgtataaaaacctgcagtgtctggttattgatgaagctgatcgtatctttgatgtggggtttgaagaggaattaaagcaaattattaaacttttgccaacacgtagacagactatgctcttttctgccacccaaactcgaaaagttgaagacctggcaaggatttctctgaaaaaggagccattgtatgttggcgttgatgatgataaagcgaatgcaacagtggatggtcttgaacagaagaaccgaaagaagaagcttatggtcttcttttcatcttgtatgtctgtgaaataccactatgagttgctgaactacattgatttgcccgtcttggccattcatggaaagcaaaagcaaaataagcgtacaaccacattcttccagttctgcaatgcagattcgggaacactattgtgtacggatgtggcagcgagaggactagacattcctgaagtcgactggattgttcagtatgaccctccggatgaccctaaggatatnttcatcgtgtgggtagacagcnagagccnaattggagaaggcatnccttcgccatttgccgccagaagaatgggtttcttccntacttgaaacnatcaaggttccattaagtgaattganttccctgnctaaattctganatcagctccgcttgagaaatgatgaaagattcntcttcat

SEQ ID NO: 144601 - DNA, 507 bp, Homo sapiens; identical to SEQ ID NO: 121881

SEQ ID NO: 144602 - DNA, 2679 bp, Homo sapiens
atggaaaaattttttcggattttgtcttttaaaaccaaagatacgaaaaaagcaaaaactgaaaacaaagggaaatctgaagaagaaagtgccgagactactaaagaaacagaaaataatgtggagaagccagataatgatgaagatgagagtgaggtgcccagtctgcccctgggactgacaggagcttttgaggatacttcgtttgcttctctatgtaatcttgtcaatgaaaacactctgaaggcaataaaagaaatgggttttacaaacatgactgaaattcagcataaaagtatcagaccacttctggaaggcagggatcttctagcagctgcaaaaacaggcagtggtaaaaccctggcttttctcatccctgcagttgaactcattgttaagttaaggttcatgcccaggaatggaacaggagtccttattctctcacctactagagaactagccatgcaaacctttggtgttcttaaggagctgatgactcaccacgtgcatacctatggcttgataatgggtggcagtaacagatctgctgaagcacagaaacttggtaatgggatcaacatcattgtggccacaccaggccgtctgctggaccatatgcagaataccccaggatttatgtataaaaacctgcagtgtctggttattgatgaagctgatcgtatcttggatgtggggtttgaagaggaattaaagcaaattattaaacttttgccaacacgtagacagactatgctcttttctgccacccaaactcgaaaagttgaagacctggcaaggatttctctgaaaaaggagccattgtatgttggcgttgatgatgataaagcgaatgcaacagtggatggtcttgaacagggatatgttgtttgtccttctgaaaagagattccttctgctctttacattccttaagaagaaccgaaagaagaagcttatggtcttcttttcatcttgtatgtctgtgaaataccactatgagttgctgaactacattgatttgcccgtcttggccattcatgtaagtgatgatgatgagctcattgaaaacaggggaaagcaaaagcaaaataagcgtacaaccacattcttccagttctgcaatgcagattcgggaacactattgtgtacggatgtggcagcgagaggactagacattcctgaagtcgactggattgttcagtatgaccctccggatgaccctaaggaatatattcatcgtgtgggtagaacagccagaggcctaaatgggagagggcatgccttgctcattttgcgcccagaagaattgggttttcttcgctacttgaaacaatccaagcttgagaaattgattgaaaagaattactttcttcataagtcagcccaggaagcatataagtcatacatacgagcctatgattcccattctctgaaacagatctttaatgttaataacctaaatttgcctcaggttgctctgtcatttggtttcaaggtaatgtataggaaagaacagagagagggttcagtgttgtccacagtttcagacatccactggggatccaggaatgtatccctggaggataagggggaactaccgtattcgctgggtgctgtttgtgattgtagtggcaggatggtccaggctagggacaagagacaaccagacttgaccagcctggccagattcagatatgaaggagccagttactggtatcacgtacaaaggcagtgctcaggacagtgccctggtgctgagtgctctgtccatggtaccggcctccgtgcatcctacgtgaaaaacttgctgccatacagcagcaggtacagaggctcatcccaaaccgtgagccagtctgggctttggcatacaggatttctaacagtctggatctcttggaattctggagagcagacttgggctttggaaagcggtccagtcctgcagcaccttcctaagaatggaaggaatgaaaacacaaggattaggtgtacagtcaggccaagtcagatcttagaaacaagacctaacgacactattatcaggaacatcaggaaaaggggaagaagcagagggctctcggctgtgcactcaggacagctgctgcgacggggccggctacgcttgtcagagcagcagctggtgattttggacttgcctttgctggcaggggagcgctatcgagggttcattttatccagcttgaggaaagaaaggtcggagtgtaggggaagagtgggacaaacacgcgacccagtcatgccgagagcatgcgctgagggggacgtggagcgaggagtggggctcaggctgctgaggctccggaccaagtgccccctgcactttcaacgccgtctcccggcagccctggaaggacagtcttacccggacgccacggtggtctcccggcagccctgggaaggacagtcttacccggacgccacggtggtctcccggcagccctgggaaggacagtcttacccggacgccacggccgagctgcccttccctccctgctgcccccagggaaggctgctggtgtcctcagatgcgggcaggaggaacccgccagcgcctgagagcctggcccgaaccaggcctggaggtgctggggcgaagacacagaggatgtggcctccatccctggtaacagacggttaccagggcggctttgggtga

SEQ ID NO: 144603 - DNA, 1071 bp, Homo sapiens; identical to SEQ ID NO: 121882

SEQ ID NO: 144604 - DNA, 348 bp, Homo sapiens
ggatatgttgtttgtccttctgaaaagagattccttctgctctttacattccttaagaagaaccgaaagaagaagcttatggtcttcttttcatcttgtatgtctgtgaaataccactatgagttgctgaactacattgatttgcccgtcttggccattcatgtaagtgatgatgatgagctcattgaaaacaggggaaagcaaaagcaaaataagcgtacaaccacattcttccagttctgcaatgcagattcgggaacactattgtgtacggatgtggcagcgagaggactagacattcctgaagtcgactggattgttcagtatgaccctccggatgaccctaag

SEQ ID NO: 144605 - DNA, 711 bp, Homo sapiens
atggctgaaattcagcataaaactatcagaccacttctggaaggcagggatcttctagcagctgtaaaaacaggcagtggtaaaaccttggctgttctcatccctgctattgaactcgttgttaagttaaagttcatgcccaggaatggaacaggggtccttattctctcacctactagacaactagccatgcaaacttttggtgttcttaaagagctaatgactcaccatgtgcacacctatgggttgataataggtggcagtaacagatctgctgaagcacagaaacttgctaatgggatcaacatcattgtggtcacaccaggccgtctgctggaccatacgcagaataccccagggtttatgtataaaaacctgcaggttgaggacctggcaaggatttctccgaaaaaggagccattgtatgttggtgttgatgaagataaagctaatgcaactgtggatggtcttgagcagggacactttgtttgtccctctgaaaagagataccttctgctctttacattccttaagaagaaccaaaagaagaagctcatggtcttcttttcagcttgtatgtctgtgaaatacccctacgggttgctgaagtacattgatttgctgtcttggccattcatggaaagcaaaagcaaaataagcatacaaccacattcttctagtactgcaacgcagattcaggaacactattgt

SEQ ID NO: 144606 - DNA, 987 bp, Homo sapiens
  misc_feature (1)...(987): n = a,t,c or g
tttgttcattttcaatcttcacagcaaatgtattttttgtttcagggcccgggaagaggtatttttttcctcagaaagaagctaccattaatgtgtgctgggcaccgtctgacagcttggctctaactccaagtaagttgcccttgtcttctaagtactctacagagtgcaaaggcttaccaaatccaaaccaccttgaattaagcaaatcttaatgaggagcatcatcgttctttgtatgaaagtctttgttatgttaccaaatgaagaaatgcagtacattacacctcctattgatgtcaaatgaggctcaaaacatctcaattccatcctcttcctaccccccagccatcaaacgttataactgcttagtgacactttattcaaattacaacccatagtttttgctccaaaaaatgcaacacctgagaaaggcctgttgctttaaaatcaagaatctataaaagccaatgcccacccctaatccttaaggtgccttccttaggtanttcccccaaagcctctttgcctctttttatactgccagcatttttcaggaggagtcatttagatactgtcaaggtcccaagaaataactaaaaaaaaaaaataacctgagactctttttctgcanccgccaccagctgcccagtacactaggtcaccttttacagcagtgagcacagcaatccatgccacaaaaatcttcgcaaagcaagaaggaaagatacaaaaagaattatattaaaatggtaacatacacttgtatgagggagggatatttaaaattaaaatattatcatcacaagaaacaccagatattccttgctctgcccttgggcaaccaagaaacttaaagcctgttttatatcccagaaataaaagagagacgtgatagaacgtaacagtgctcagtgcttgcaacccaagtcaatttatactcttgttaggtaagtccaaattctaaagtctacaaaaatcctgtta

SEQ ID NO: 144607 - DNA, 3175 bp, Homo sapiens
  misc_feature (1)...(3175): n = a,t,c or g
ggaaaaaaaatttgcccgcctgctggaattccgcacgagggaagtaacgtcagcctgagaactgagtagctgtactgtgtggcgccttattctatgcacttgttgggcagaatgtcacacctgccgatgaaactcctgcgtaagaagatcgagaagcggaacctcaaattgcggcagcggaacctaaaagtttcagggggcctcaaatctgaccctatcggaaactcaaaatggagatgtatctgaagaaacaatgggaagtagaaaggttaaaaaatcaaaacaaaagcccatgaatgtgggcttatcagaaactcaaaatggaggcatgtctcaagaagcagtgggaaatataaaagttacaaagtctccccagaaatccactgtattaaccaatggagaagcagcaatgcagtcttccaattcagaatcaaaagggaaaatgaagaaaaagagaaaaatggtgaatgatgctgagcctgatacgaaaaaagcaaaaactgaaaacaaagggaaatctgaagaagaaagtgccgagactactaaagaaacagaaaataatgtggagaagccagataatgatgaagatgagagtgaggtgcccagtctgcccctgggactgacaggagcttttgaggatacttcgtttgcttctctatgtaatcttgtcaatgaaaacactctgaaggcaataaaagaaatgggttttacaaacatgactgaaattcagcataaaagtatcagaccacttctggaaggcagggatcttctagcagctgcaaaaacaggcagtggtaaaaccctggcttttctcatccctgcagttgaactcatttgttaagttaaggttcatgcccaggaatggaacaggagtccttattctctcaccctactagagaactagccatgcaaacctttggtgttcttaaggagctgatgactcaccacgtgcatacctatggcttgataatgggtggcagtaacagatctgctgaagcacagaaacttggtaatgggatcaacatcattgtggccacaccaggccgtctgctggaccatatgcagaataccccaggatttatgtataaaaacctgcagtgtctggttattgatgaagctgatcgtatcttggatgtggggtttgaagaggaattaaagcaaattattaaacttttgccaacacgtagacagactatgctcttttctgccacccaaactcgaaaagttgaagacctggcaaggatttctctgaaaaaggagccattgtatgttggcgttgatgatgataaagcgaatgcaacagtggatggtcttgaacagggatatgttcgtttgtccttctgaaaagagattccttctgctctttacattccttaagaagaaccgaaagaagaagcttatggtcttcttttcatcttgtatgtctgtgaaataccactatgagttgctgaactacattgatttgcccgtcttggccattcatggaaagcaaaagcaaaataagcgtacaacccacattcttccagttctgcaatgcagattcggggaacactattgtgtacgggatgtgggcagcgagaggactagacattcctgaagtcgactggattgttcagtatgaccctccggatgaccctaaggaatatatttcatcgtgtggggtaggaacagccagagggcntaaatggggaggaggggcatgccttggcttcatttttgcggcccaggaaggatttggggtttttctttcgtttactttgaaaacattccaagggtttccctttaagtggaatttggactttttcctgggtctaaaaatttctgacattcagttctcagcttggagaaattggattggaaaagtaattactttccttcataagtcagccccaggaagcatataagtcatacattacggagcctatggattccccattcctctgaaacaggtcttttaatggttaataacctaaatttggcctcagggttgctctgtcaatttggtttcaagggtgcctcctttcgttgatctgaacgtcaacagtaatgaaggcaagcagaaaaagcgaggaggtggtggtggatttgggctacccaggaaaacccaagaaaagttggagaaatcccaaaatcttttaaacacattaggcaaggaaatcatctggacaggcagggcagttctctcactgaacacatgccttcctttcatcttgaataactttgtcctaaaatgaattttttttccccttgatttaacaggatttttgtagactttagaatttggaacttccctacaaagagtataaattgacttggggttgcaagcactgaggcactgttacttctatcaccgtctctccttttatttctggggatattaaaacagggctttaagtttcttgggttggccccaagggcaggagccaagggaatatctgggtgttttccttgtggatgataataattttaattttaaatatccctccctccatacaagtggtatggtaccattttaatcataattctaattagtacctttccttcttgttttgtgaaggtttttgtggcatgggattgctgtgctcactggctgtaaaaggtgacctagtgtactgggcagctggtggcggtgcagaaaagagtctcaggttattttagatttgtttaattcaaggtggtttggatttggtaagcctttgcactctgtagagtacttagaagacaagggcaacttacttggagttagagccaagctgtcagacggtgcccagcacacattaatgttagcttctttctgagaaaaaaatacctcttccagggccctgaaacaaaaaatacatttgctgtgaagattgaaaatgaacaaagttaggaaaaaaaaacaggcaaaatcagtgatttagtcaggtgagttttttcgttgtagggagcacttgatttctagtgtgttttgtacagtatataactacaagatagtacattttgtagcagttcaaagccaaagttgctagcatcattttgctgttgtgccagttaatcataggatcccattaaataagtgtgctaacatcgaatatagagaaaactggtaaagaacattccagtaggaaaagaaaagaacaatcttccatttctgggcttggccaccatcaccctggtcggacctgtcctggac

SEQ ID NO: 144608 - DNA, 418 bp, Homo sapiens
  misc_feature (1)...(418): n = a,t,c or g
nnnnnnnnnnnnnnnnnnnnnnnnnnnnnnnnnnnnnnnnnnnnnnnnnnnnnnnnnnnnnnnnnnnnnnnnnnnnnnnnnnnnnnnnnnnnnnnnnnnnnnnnnnnnnnnnnnnnnnnnnnnnnnnnnnnnnnnnnnnnnnnnnnnnnnnnnnnnnnnnnnnnnnnnnnnnnnnnnnnnnnnnnnnnnnnnnnnnnnnnnnnnnnnnnnnnnnnngggggggggccctcccccttaaatggggggggcccttttaaaggaaccaattttaagtcccgggggtgggaaaggaaaaatttttttttgggggccccaaaattaaattccggggccggggtttaaaaaccnnnnnnnnnnaaaaacccgggggttccccaatttaaaccctttgtgaaaaaannnnnnnnnnnnnnnnncg

SEQ ID NO: 144609 - DNA, 2129 bp, Homo sapiens
  misc_feature (1)...(2129): n = a,t,c or g
cttcccaaagagcgtattaaattggggaacccccggggttttcccctccccccgtgtttaaaacccgggccccggaatttaattttggggccccctaaaaaaaatttttcctttcccacccccgggtaataaaaattgattcctttaaaagggccccccccnnnnnnnnnnnnnnngtattcaatatgacttatgttttatttatgtaggtggcatttaaaatacatgatggtgtttaggggttacattgtccacagaaagcattcaaataccactcctctccccgccaaaaccaaataaacaaaagccaactctttggcaacagttgggttaaaaaaaaatcccagggtcacacttgttttctgggctcccaagcctgggggtcactgcctacatgggattgcgcccaaaaaaattccccagcttcaaacactgcctagattaaaattgctgggcattttttaaatcacaggcaaagctttttcaccaatgcccctcaagtcccaaggagggccaaagggagaaaggcaacattgaacccggcaggntcctccatgtgaaaggggaagggaagtcacttgggagggagccatgccagggaagaagtccaaggccagccccggaattcctaccccgtgcctcaataaaaacaaaacgtgaagaagccaatacatccatgccaaacgaaataatgaccggaagtgggcgcatcctagttagaatgaaagtgactttccgtaaggagtcaatgttcgcgaactgaaacatgagttcaacctccttgtgccgtctctgggtgttttgcgcgtgtgtaaataccggcccgttttccccagcatggccctaacccatggacactagggagggtgccactgagcaaaaattttttgctaaaaataattagcaaaaatccaagaaaaaaatatggaatctagcaaaacctacaccatatttgaagttgaaatttgcactacctgcaaaggatgaaaaattaaaaagagtaaacagaaggaatgattttacatctgaatgtgaattcacgaacagccttctaattcgtgtggccggattgctctgaggaagaggtgccctgacgggcaggattccaatgtgtcacttgcaatattctctaagttacactctactgaattaccttctaattcccaaacactacgccgccacagaaaggcctcatttcatgaatgttactcagttagccatctgcgccctcctgtacttctaaagccaagaaatattccagcagcatgcggagtggttgagtagccgaaaagaatgaagaggatccggaagcactagaggaaaatgcagcaagattaagagctgaagagaaccagagagtcgcgggccaagtcccaaaacgtctgtccccggcaaacccttgccgttaaagccccggtttcttgaccctgttctgactgatccgtgatcgcataatcctgccgagcgagtgtggcctcgaaacagtcctgaccgacgctgctacctagcgcgtgtgcacgaccgcatgccgagcacggtggacgcgccagcgtctgggggtgcaccgcgtgcctcaagtccggtctagtgattgcctttggtcgacttcttcttcttcgactcctctctctgcttctgcttcttcctcttgccaccttctttcaatcctgctgcggacgcgagggggtcccagggcccgggtgcccgaggtcggtcctgctcgccctcctcctcagagagacatgtgaggcgccgtgtctcagcagcgaggcaggccggggcggcttcggcgggcggaggccggcaggctgggctggcagggcgttctggcctctccgcatgcgctcctcagcgagggcatcgtcgtcggccacaccagctttggcacagtcaacacgcctcttccgagagtgagtgtgccccactgaaatcacggtcagggctgacaagttcgctgtcaaaaccagccagctgagccaccctggggaagaaaggttctgggtccagttggcgatttcctcctgagtccatacacggaagacatcccctctccgcctcgtgctggaataaatctgtggcagcagcggcggcgcccacgggagccacagccccgcccaaggcagggccat

SEQ ID NO: 144610 - DNA, 485 bp, Homo sapiens
  misc_feature (1)...(485): n = a,t,c or g
gaactgcgnatggaagcttgcggaaanaaagcttgatggggcccaccatcccggaccnaagtctnttcttctggcggaagcccatcacctggatgcctacgtgggaagggacctcgaatgtgggaccccagcccctctccagctcgaaatccctccacagccnacggggacaccctgcacctattcccacgggacaggctggacccagagactctggacccggggcctccccttgagtagagacccgccctctgactgatggacgccgctgacctggggtcagacccgtgggctggacccctgcccaccccgcaggaaccctgaggcctaggggagctgttgagccttcagtgtctgcatgtgggaagtgggctccttcacctacctcacagggctgttgtgaggggcgctgtgatgcggttccaaagcacnagggcttggcgcaccccactgtgctctcaataaatgtgtttcctgtcttaaca

SEQ ID NO: 144611 - DNA, 402 bp, Homo sapiens
  misc_feature (1)...(402): n = a,t,c or g
gtaggagttagggtgttagaaggagtgatcaggaaaaataaaagtgctgccgtatnnnnnnnnnnnnnnnnnnnnccccnnnnnnnnnnnnnnnnngnnnnnnnnnnngggggggggaaacaaattccttttaagggggggaaatttaaatggggcccgggcccggttttaaaaaagggggaaagggaaaaacccgggggaaacccaaaaaaaaccccctggaaaaaaannnnnnnnnggnngacnccanggatccacccgtgcttcacttaacacgctcctgacccgaggccattatattaacacacaatctacttacaaaggacccttcatcattgaaaacgactaaaaaatatgttcggtgacacctagatagaagcctaacttaacggccagtgaaan

SEQ ID NO: 144612 - DNA, 73 bp, Homo sapiens
ttttccaaaggggtttttttttggttacccccggttttttccctttcccccttttttaaacccgggccccgga

SEQ ID NO: 144613 - DNA, 454 bp, Homo sapiens
gttaagacaggaaacacatttattgagagcacagtggggtgcgccaagccctgtgctttggaaccgcatcacagcgcccctcacaacagccagcacccagcggtccgggcccaccaggagagccgggatgagagcgcctgtgtgccagtcacaaagcgtttatttcacacaaacaatctcattgaagcccacaataaccgtgccaggcaggtgtgacgctttccaggttacaaacaacaaactcgcccaggccacacagtcagaaggggttgcgggggcctcgaacccagaccttgagtctcacgagccagcccacggcatgcagcgagaattctcaggggtcacagccgtctcccaagcggacactgtcatgaattaccctgtttctaacgggtgggaaaatcgaggctcagggtgattcaagtaacctacctggtacccatgtaccattctt

SEQ ID NO: 144614 - DNA, 476 bp, Homo sapiens
  misc_feature (1)...(476): n = a,t,c or g
aagacaggaaacacatttattgagagcacagtgtgtttttccttcgcagacaaagaaggatccttatgcgacgaatactggaatccagcagctaacctcattaacgtctgcagcctcttccttcgacaaggcccgagattagccctgatgcaaggagagcccgtggacaagggctgcctgggagtgctgttggagaataaataagacaagtaagacaagcaagaggggtgggaagggactgacctgtcaaaccttttcaacaaacatttgctgatcacctcctctatgccagatcctgcctgaggccttcttttattcttcatttaatttcttcacaacaaccctagggngggttgctcttcatcgaccccattcccccagaaaaaggatagggaagatctttcagagagggtgggggcgtgcctttgggtgattcagtagcatgctcatttccagaagcccacccagggcctttg

SEQ ID NO: 144615 - DNA, 686 bp, Homo sapiens
  misc_feature (1)...(686): n = a,t,c or g
gcggacgaataatttatggtcagtgaaaatccaggccccagtgagattcgagtgggctgtaaaatcgagagtcctgctcccagtgagtaatggtagtgaatgtttctgtcactttttgcaaccgtccattcatttgatcctcacaactccctgtcctgagccaggaccggccacttgcactcccagggaaacagaggctgtcaagaggctccacagattgggccccactggatcattgaacccctgttccctgagttctagaggaagaattgtacctgtctcagtcccggccacctccagaaggcctccctctgcatttctgactttgctgtgccggcagcctggagcctcccaggtccctgctgtcatcttttctaagccactacagtctctgtctttcctttcacagccaagcttcttgaaaggcctggtctacacttgctggtcttccttcctaacctccaatttcctcttcaaccactggtttcctgactcgctctactccgtggaagcacgctcacaaagcaggttcccagtgcccccgacaagcccctgctggtgtctccatctcctgccaagcatcctccagtgcctccttcctgtgggcctgggcttcagggctnatggacagactcctgtcccatccnagagaacccctcgtgatcgttcctgggcaagtggggcgt

SEQ ID NO: 144616 - DNA, 1339 bp, Homo sapiens
  misc_feature (1)...(1339): n = a,t,c or g
cccaggtcaagcggcgtccatcagtcagagggcggggtctctactcaagggnaggcccggggtccaagagtctctgggtccagcctgtcccgtgggaataggtgcagggtgtccccgtggctgtgnagggatttcgagctggagaggggctggggtcccacattcgaggtcccttcccacgtaggcatccaggtgatggcttccgcccaaaccaggaaggagacgagaggcccgccaggaagaagacttgggtccgggatggtgggccccatcagggcctcttccgcagcttccatccgcagttcttcagccgacccagccgggccacggcccacgtgcctgcagtttacttttcggtggagtggggtgacagggaacgatcacgaggggtctctgggatgggaccaggagtctgtccatagccctgaggccaggcccacaggaggaggcactggaggatgcttggcaggagatggagacaccagcaggggcttgtcaggggcactgggaacctgctggaaacaggcagctggagtgggagtggctcctggggcaggggagtggtactcagaccacaggagggccaggtgaccacaggtatgggcgtggcagggagaaccagcctgctatggcagagggctgtggagttgagccctggagcccagggactgaggcagagaaggggaggttggtcaggcccccctcaggagacagagcaaagcagagtgccgggtgggtgaggaagctggccgctggagagcccccagggagagcaagccagcagccgggcagaagcagagcctgcagatgctccctggaggtatacccctaatagtcctcggcatgggaggtgggccccagcagctgctagagagtgaaggagctggacccaagccccgggggaggaaggcatcacggcaagggaagggtcgcagtcacaaccacacctcgagagggagacctgtggccaaagcccgggggggcacacactacagctgttcccgtgcccactttggtcctgagagactcagggccaggggtccagaacagttcagcatcaggaatggggcggggaaggcagagagggagaaggggctggctccgaccagagcagagccctggggatagcttgaatctgccctcacaccctccagcctacctctatggagccacagtccactgctccagcccctgggcaaccccccggcccgccctcctggggacacagaggccatcaagggatgggctacggtggccggtgcccaggccagaccagggccgtgggcgtgctcagttaggatgaattcctcctctctggaatagtaatcgtaaatctatt

SEQ ID NO: 144617 - DNA, 722 bp, Homo sapiens
gtcccttcccaggtaggcatccaggtgatggcttccgcccaacccaggaaggagacgagaggcccgccaggaagaagacttgggtccgggatggtgggccccatcagggcctcttccgcagcttccatccgcagttcttcagccgacccagccgggccacggcccacgtgcctcattatgataatcagtgtgtttttccttcgcagacaaagaaggatccttatgcgacgaatactggaatccagcagctaacctcattaacgtctgcagcctcttccttcgacaaggcccgagattagccctttgtgagcgtgcttccacggagttagagcgagtccaggaagcaagtgggttgaagaggaaattggaggtgaggaaggaagacagcaagtgtagacaggcctttcaagaagcttggctgatgcaaggagagcccgtggacaagggctgcctggagtgctgttggagaataaataagacaagtaagacaagcaagaggggtgggaagggactgacctgtcaaaccttttcaacaaacatttgctgatcacctcctctatgccagatcctgcctgaggcctcttttatctcatttaattctcacaacaaccctaggaggttgctctcatcgaccccattcccccagaaaaggataggaagatcttcagagaggtggggcgtgcctttggtgattcagtagcatgctcattccagaagcccac

SEQ ID NO: 144618 - DNA, 1269 bp, Homo sapiens
atgtcacaggttctgtctctcgttccgagaccacccacatgcgtgacagcggtgcctggaggactgggtctttctgactttagtgaacgtgtgtttaattggattgacgaagccaagcttcttgaaaggcctgtctacacttgctgtcttccttcctcacctccaatttcctcttcaacccactgcttcctgactcgctctactccgtggaagcacgctcacaaagttttattccactttccgcccttttcccttaatgaacacagggctaatctcgggccttgtcgaaggaagaggctgcagacgttaatgaggttagctgctggattccagtattcgtcgcattaaggatccttctttgtctgcgaaggaaaaacacactgattatcataatgagcagctgctggggcccacctcccatgccgaggaccagcaggggaaacctccagggagcatctgcaggctctgcttctgcccggctgctggcttgctctccctggtggctctccagcggccagcttcctcacccacccggcactccgctttgctctgtctcctgagttctggatttggggctgcccctaacccagcccgttgctgctttgcaccttttcctgtcattgggcatcccccagtagtcaccccactccaccgaaaagtaaactgcaggcacgtgggccgtggcgagcttgggtcggctgaagaactgcggatggaagctgcggaaagaagccttgatggggccaaccatcccggacccaaaatcttctcccctggcgggcctctcgtctcccttcccctggtttgggcggaaacccatcaccctggaatgccctacgtgggaaagggaccctcgaaatgtgggacccccagccccctctccagctcggaaatccctcccacagcccacggggaccaccctgcaaccttattccccacgggacaaggctggacccaagaagactcttggaccccggggcctcccctttgagtaagaagaacccgccctctgaactgatggacgcccgctgaccttggggtcagaacccgtggggctggacccctgcccgaccccgcaggaaccctgaggcctaggggagctgttgagccttcagtgtctgcatgtgggaagtgggctccttcacctacctcacagggctgttgtgaggggcgctgtgatgcggttccaaagcacgagggcttggcgcaccccactgtgctctcaataaatgtgtttcctgttcttaaccaaaaaaaaaaaaaaaaaaa

SEQ ID NO: 144619 - DNA, 898 bp, Homo sapiens
gcggccgcggggccccggacaagggtccgcagagctgcagccttcgagggccagccctctccgagtccggggctgggtcccaccagtgacaaggcggcagccccgcgcacaccaaagagaaggcggctgtggcggcagcggcagccccagccatgctgtgttatgtgacgaggccggacgcggtgctgatggaggtggaggtggaggcgaaagccaacggcgaggactgcctcaaccaggcatatctttttcttgcacatcaaggaggccctcttggcaggccacctcttgtgttccccagagcaggcagtggaactcagtgccctcctggcccagaccaagtttggagactacaaccagaacactgccaagtataactatgaggagctctgtgccaaggagctctcctctgccaccttgaacagcattgttgcaaaacataaggagttggaggggaccagccaggcttcagctgaataccaagttttgcagattgtgtcggcaatggaaaactatggcatagaatggcattctgtgcgggatagcgaagggcataaactgctcattggggttggacctgaaggaatctcaatttgtagagattactttagcccaattaataggatagcttatcctgtggtgcagatggccacccagtcaggaaagaatgtatatttgacggttaccatggaatctgtgaacagcatcgagctctagcttaatatgatcaacaccatgtcggccattgggctttaccgagcgataacagacacgcatgcatactacatggtgtaacgcagtgaccagcgccgtgatgatcccttttgctcgggactaggacgctcacttggtatttatcgttttgaattcacaccattgggcttatccccccactcct

SEQ ID NO: 144620 - DNA, 713 bp, Homo sapiens
agcggccgcggggccccggacaagggtccgcagagctgcagccttcgagggccagccctctccgagtccggggctgggtcccaccagtgacaaggcggcagccccgcgcacaccaaagagaaggcggctgtggcggcagcggcagccccagccatgctgtgttatgtgacgaggccggacgcggtgctgatgggaggtggaggtggaggcgaaagccaaccggcaagggactgcctcaaccaggtgtgcaggcgactgggaatcattagaagttgactattttggactgccagtttaccgggtagcaaaggtgaaagtttaatggctaaaacctgagaaaccggattctcccagcagatgggatggggctaagcccctttacaaggctttaaaactttagagttcaagttcttccgttggagccttcatcttcatctttacaaggagcagacttagggcatatcttttttcctttgcacatcaaggaggccccttttggcaggccacctcttgtgttccccagagcaggcagtggaactcagtgccctcctggcccagaccaagtttggagactacaaccagaacactgccaagtataactatgaggagctctgtgccaaggagctctcctctgccaccttgaacagcattgttgcaaaacataaggagttggaggggaccagccaggcttcagctgaataccaagttttgca

SEQ ID NO: 144621 - DNA, 6359 bp, Homo sapiens
gagacagtatcactctgtcacccaggctggagtgcagtggtgtgatcatggctcactgcagcctcgacctccctggactcaagcaatcctcccacctcagcctcccaagtagctgggattataggtgcatgccatcatgtctggctaattttttaaaatttttttgtagagacaaggtttcaccatgttgcccaggctggtctcaaactcttgagcccaagcgatcctcccgcttcagccccccaaagtgctaaaattacaagcatgcaccactgcatccagactgtatacatctattcttaacattcaaactttagtgagcaaagtccaaaattaattaatactgctaccttccttcaagaaacaaataaaaaatgggctgagcacagtggttcacacctgtaatcccagcaccctgggagatccaaggcaggaggatcacttgaggccaacagacaggcctgggcaacacagtgaaagtgcctccaaaaacaaacaaataaaacctccaaaaacaaaaaaaaacacagggactggagaggcacagtcgctcatgcctgtaatcccagcactttagcaggccaaggcgggcagatcacttgaagtcaggagtttgagaccagcctggccaacacagtgaaaccccatctccactaaaaatataaaaagtagctgggcctggtggcgcacatctgtaatcccagctacttggaaggctgagacacaagaattgcctgaacccgggaggccgaggttgcagtgagctgagatttcgtcactgcactccagcctgggcaacagagcaaggccgtctcacaaaagagtttcttagttgtaaactcctttagttttgtttgccaaaaaattataattctcattctcaaaacattttcactgtatgtaggagcctagcgtggtattttattttagtacatcaaagctaatgttccactgccttctggcttctgtggattctgtcgagaagttagtctgccacctttttggtgatcaatctattcatgcccagcccaaatctattttttctggctgcttctaagatcttttactttgggccagatgcagcagctcatgcctgcaatcccagcactttaggatgccatggtgggaggatagcctgaagccaggagctcaagaccagcctgggcagcatagtgagaccctctattttaatttttttttaattttaataaaaaataagatcttttactttggtgctctacaatcatattatgccacatataggtatggatttttttgtatttttcctatttggaatatttggtgttgatcagaaaattcgaaaagttttctagaaattgttttttttcccattctttctctgccctgtgcaactctgatgagttgcacactaagccttctttttttgaggcagagtctcgctctctcaccccggctggaatgcagtggcacgatctccgctcactgtaacctctgcctcctgggttcaaccaattctcctgcctcagcctcccaagcagctgtgaccacaggcacccaccaccacacctggctaaattttgtatttttagtagagagagatggggtttcgccatgttggccagactggtctcgaactcctgacctcaggtgatctgcccacctcagcctcccaaagtgctgggattacaggcgtgagccaccacacctggcctaaaactctttttgttttgagacagagtcttactctatcgcccgggctggagtgcagtggcacgatctcagcccactgcagcccccacctcccatgctccagcaattcttgtgccccagcttcccgagtagctgaaagtacagaggcacaccaccatgcccggacaatcttcatatttccagtagagaaggggcctcaccatgttggccaggctgctcctgaactcctgaactcaaaagacccgcccacccctgccgagaccagctcggtcactaactcagcagcgctagaggaattaaagacacacacacaaaaatatagaggtgtgaagtagaaaatcaggggtctcacagccttcagagctgagagcccccaacagagatttacccacatatttattaactgtggggaaaagagagatcagattgttactgtgtctgtgtagaaagaagtagacataggagactccattttgttctgtattaagaaaaattcttctgccttgagatgccgttaatctgtaaccttacccccaaccctgtgctccctgaaacatgtgctgtgtcaactcagggttaaatggattaagggctgtgcaagatgtgctttgttaaacaaatgcttgaaggcagcatgctccttaagagtcatcaccactccctaatctcaaaccactccctaatctcaagtacccagagacgcaaaatactgcaaaggccgcagggacctctgcctaggaaagccaggtattgtccaaggtttctccccatgtgatagtctgaaatatggcctcgtgggaagggaaagacctgaccatcccccagcccgacacccataaagggtctgtgctgaggaggattagtaaaagaggaaggaacacctctttgcagttgagataagaggaaggcttctgtctcctgctcgtctctgggcaatggaatgtctgggtgtaaagccgatttactttacatggaatatacttccatctactgagataggggaaaaccgccttagggctgtaggtatgacatgcgggcagcaatactgctcttcaaggcattgagatgtttatgtgtatacatatctaaagcacagcacttaattctttaccttgtttatgatgcagagacctttgttcatgtgtttaccttctgaccttctctccactattatcctattatcctgccatgctcgataatgatcaataaatactaagggaactcagaggccggtgccagtgtggatcctctgtatgctgaatgctggtcccctgggcccacttttctttctctatactttgtctctgtgtctcttttccaagtctctcgttccacctaacgagaaacacccacaggtgtggaggggcaacccaccccttcatttaacagcaaaccagtcattagcattgtttctatagatattaaattaactaaaagtatcccttatgggaaacaaagggatgggctgaattaattgcagcaggaacacacccgtaagacacagatcgctcatgcttttgtttgtggcttaagaatgcctttaagcggttttccgccctgggcaggccaggtgttccttgctctcattcccataaacccacaaccttccagattgggcgttagggccattatggacatgttttagtgctgcagaggttttgcttatggccagttttggggccagtttatggccagactctggggggcttgctcccaacatgtctcccttcttcgatttgcaaagagactctcgcaggagtcgggatccgcatctgcagactatacaaaggcaaacaacagattaaaaagcatagtcatcattgaaatcacagagcttccaagtgtttttacccatttaaatgggttactagctgctaatttttctgcagctcctttaagcactctggttcctggcattaaggtcaggttgcccgggatgctttacatatttgttcttttaattttgctatatccaaaaacaagtttgtagagtgtccttctagatactcttttattctttcccaaattttgatcttattaagagcatttaatagtttttacaaatccttatgtttagctcctagagcgggccatattatttgaggttgaggtgccactataccgccatggttccagataataggaacttttgccgtacttaacatttctaccatctgactgttttgttcagatcatctgaacatagtgtgaccgtggcatgcagactgagaggtgcaattcaagctaaacatccccttgggggaccaattagtaatgattccataggaatcgttgtgcagcatctctgcctattctgcaaagcaatcttcctaaataagtacgttcattttttctaactgggtccaatcctgtttacaaataggtttttgagggtggtatgcctcaattataggagccgatttattatggtaaatactgagatcagaaagcatgtgtaactgtgtcatagaatgattgcatccaggcattattaccagcccttattgaaggaatactcacggcagtggtgataactgctatcatagctaccattaaattattcattgtgactggttgtcccgctttcctcaggttttcttccgccatctgtgacagcttcttgatctgttcttagcggggtggctgtgttcgacgggtgttgctcatgatagttggagtcctcctcagcgtcagtctctacgtggctgcaaccagggggtcctctggatcctcccagagtctcttccttggcatctggctcatgataaggtttcaggtgtcttgaaggtatccaaatcggctgttgattttggccacggggattgctttaagagtactcaggtgtcctccagctagttttccattccaaccgtcgctcctgcgaccctttgacctggattcgagcccccaggaatagaagccacttgccgagaccagctcagtcagggagaccctaacccagcagcacttggtcagctggtccccctcgcgccagaggcagaagcctgagcagagggtctctccgcgtctgtactctggcgtctctcggtgtgtgggcagcgtgaccgacctcagcgcgatgacataggggtccccattgtcacaaggcttccgcctcgaggccaggatcacgaagtcctggggctttgtgtgacctccgagggcagggctggtgacgtggtagatggcgtcgtcctcgtctacctgctgcactagctccacgctccggtagtgcttgtcccactctggcctctgacgcaggtccgagagcagcaggaaggcctgggctgcatccacatgcaccaccatctccatgtggaaggagaggaacttgtcatcctccagagtgtacaggcggacctgactgatctccgaggacagcacccagttgtccttggccacaagcatcttcaaggaggagacgttattgtagctcaggtacacctggttgctagggtcccaggggacggagaggggcacctctgtctgcttacaggacacgatgtacttcctgtccaggcggatcttctttctggcactggcctctcggtaccgccgctcaccatcgccgggctggggccgaatccagggcagcaactggggctggtcatctgcgtccaggaccacaaaggtcataaaggcactgttgatgtggcgccggtgggtctcagcctcctggcgataggcctccacgcacacgcccacctccatgctatgtttgaaggcattgttcacgatggctttgagcaccagacggtcgccgacctgggacgggcctcggaagtggaacatttcaatggccttcagcgtagggtgggcacggcagagccggctggctgcaatggtggccacattctccatccaggccatgatctggcccccaaaggtgttgccctggtgattggcgtggggaggcaggaccagctccacactctccacacgggtcttctcagccggcaccatgcggctacagtctctgctctccagatcgccctgaatggcgcagttggccaggaggtccttgatggtgtctgcatagacaaggcgcatgcgccggcgctcagccgccacactgtgctccatcttctcctcttctgtccgcggcgtgatctgcttcagcttcaccttggtgatctctcggcgggccacgaaggtggccaaggccttgcacacattccactgcttctcagagcacaggtcctccgaggccacctggatgcccacctccatgctggagttgaaggcccggttcaccttggccttgatattcaccacttgtccaacactaatggtgtgctcaaaatagatgtcatccatggaagctgtgacacaggggcagccagcgtgcctctccgcggacaggcaagccgtggtgtcaatccacttgagcagctgcccgacgctcagctcaccacgttggttggtgtggcagggcagcaccagctggctcatctgcacctccgtggggttccggtatccctcgccgtctgccatggcactgtcgttccccgcacgtaaggctgacttccgggatgtgcggttggagaacacagaggccaagccccgtcgcaggtgatttccgacattctggatcatcgcgccgggtggccggggaaagcagcgccctcccagagacacaagctggtcacctgagcaacagccaggcc

SEQ ID NO: 144622 - DNA, 720 bp, Homo sapiens
atgactcttaacgagcatgctgccttcaagcatctgtttaacaaagcacatcttgcaccacccttaatccattcaaccctgagtggacacagcacatgtttcagagagcacagggttgggggcaaggtcacagatcaacaggatcccaaggcagaagaatttttcttagtacagaacaaaatgaaaagtctcccatgtctacctctttctacacagacacggcaaccatccgatttctcaaacttttccccacctttcccccctttctattccacaaaactgccattgtcatcatggcccgttctcaatgagctgttggagaataaaatacctaggaatccaacttacaagggatgtgaaggatctcttcaaggagaactagaaaccactgctcagcaaaataaaagaggatacaaacaaatggaagaacattccatgctcatggataggacgaatcaatattgtgaaaatggccatactgcccaagaattggaaaaaactactttaaagttcatatggaaccaaaaaagagcctgcattgccaagacaatcctaagccaaaagaacaaagctggagacatcacgctacctgacttcaaactgtactacaaggctacagtaaccaaaacagcatgggaaccaaaacagagatatagaccaatggaacagaatagagccctcagaaataacgccgcatatctacaactatctgatctttga

SEQ ID NO: 144623 - DNA, 10120 bp, Homo sapiens
  misc_feature (1)...(10120): n = a,t,c or g
tttagaatggtgtcaatgctggttttgtggaatagaaagcgggggaaaggtggggaaaagattgagaaatcggatggttgccgtgtctgtgtggaaagaagtagacatgggagacttttcattttgttctgtactaagaaaaattcttctgccttgggatcctgttgatctgtgaccttacccccaaccctgtgctctctgaaacatgtgctgtgtccactcagggttaaatggattaagggcggtgcaagatgtgctttgttaaacagatgcttgaaggcagcatgctcgttaagagtcatcaccactccctaatctcaagtacccagggacacaaacactgcggaaggccgcagggtcctctgcctaggaaaaccagagacctttgttcacttgtttatctgctgaccttccctccactattgtcctatgaccctgccaaatccccctctgtgagaaacacccaaaaattatcaataaaaaaataaatttaaaaaaaaaaaaaaaaaaaaaagaacctggcagggcacgcaacccagtaccacttacctttgggcctaaaccccacttccgagggtaagtgtctctctccatgatcactctcttgatcttggctactataccatggtcgcaggtagagatgaccgctgtggtcattaatgcaatagctacaggcattgaataaagaaaagaattatttgaagggtgaaagaattgataattgatgagccccaattctactgttgtatgccactttaaaacttttaaaactctgagctactactttaattggggttacctttgctcaggatgtgcatatggaggaaatactccattatgagaaggaggcctttgaaatgacgttaaacttctgaagttaaaaaacacctaaccaaagcacctaacgatacacataacaggcttgcagctcaagacgtctataagaacggcatgcacactccctttggggccacagaacctttgaagttttaaggattccttttctgctgctgtccataagccgtggctgccttgcctgctcacagagctaaggaatcctgatgacatgcttacttctggtacaaattagacccattaaatgaatagctctaaggttcattcactaagagggtgcgcagagcatttaaagtcttaagagacaatccaacagtagctaagctttcacaagttaaaaaacactggtactttacatggaaccacaaaagactcaaaatagccaaagctatcctaagcaaaaagaacaaacctggaggaatcacattacctgacttcaaattatagtatagagctacagtatccaaaacagtatggtactggcataaaaacaggcacataaaccaatggaacagaataaggaacccagaagcaaatgcacacacctacatttaactcatttttgacaaaggtgccaagaacatacactgggtaaaaaccagtctcttcaataaatggtgctgggaaaactagatatccatatgcataagaatgggagaaaatatccgcaaactacccatctgacaagggattaataaccagaatatataaggaactcagcactataggaaaaaaaatctaataatctgatcaaaaaacaggcaaaagatttgaacagacacttctcaaaagaagacaaataaatggcaaacaggcatatgaaaaagtgctcaatgctgatcacgagagaaatgcaaatcaaaactacaatgaaatatcatttcactccagttaaaatggtttatatccaaaaggcaggcaatgacaagtgctggcaaggatgtggagaaaagggaacctttgtacattgttgatgggaatgtaaattagtataaccactatgaagaacagtttggaggttcctcgaaaaactaaattgagctaccataggatccagcaatcccactgctgggtatataccccaaataaaggaaatcagtgttatcaaagagatcacagtagccaagatttggaagcaaccgaagtgcccatcgacagataaatggataaagaaaatgtggtacatatacacgatggattactattcagccttaaaaaagaatgagatcctgtcatttccaacaacatggatggaactgaagatcgttatattaagtgtaatcggccagtcacagaaagacaaacattgcatgttctcacttatttgtgggagctaagaatcgaaacaattgaactcatggacagagaagagtaaaagaatggttaccagagactgggagggtagtggggggctggcagggaggtagggatggttaatgggtacaaaaaaaaaaaaaatcaggcccggcatggtggctcacacctgtaatcccagcactttgggagggcagatcacctgaggtcagaagttcgagaccagcctgaccaacatgacaaaaccctgtctctactaaaaatacaaaaaattagccaggtgtcatggtgtgcacctgtaatcctagctactcggaaggctgaggcacgagaatcgcttgaacctgggaagcagaagttgcagtgagccgaggtcacgtctctgcactgcagtctgggtgaaaagagcaagactgtctcaaaaaaaaaaaaaaaaaaaaaacaccaccaccaaaaaaccaaaagaatgaacaagaagagtgagactatttaatagcacaacggggtgactataatcaataataacttaagtgtatattttaaaataactaaggtgataaataactaacagtaaaataggattgtttgtaacacaaaggataaatgcttaagatggatgccccattctccatgatgtgattattatgtattgcatgcctgtatcaaaacatctcatgaaccccataaatatatacacctagtatgtaaccacaaacatttagaatttgggaaataaacatcccctctnacccatgcagattgcttctcctttggtggtgataaccacaatctcctgattgacctcaatgccgtcctcatatcgaataacacctggaagcataatcttggccccatagcagatggcatttacctgcagagatggcaccaagtgtaaggggcccagctgctgccctccaccccactcccacaccagagtaaaggaggacaacaagggagtggggcctgacaccaggaaacagggatgacacttatagcccactagctgcaaggggcatgagtggtactcagaagagccacctcactgtgctataggtaccactctccgcacattacacacgactcaaaagtagtaaagaagactttcaggttttcaggttctagagactcacaagtattttcttttttttttttttttttttaattttcaggcagaacctccctctgttgtccagggtggagtgcagtggcacattctcggctcactgcaacctccatctcccaagttcaagtgattctcagtctcccaaggagctgggattacaggcacgtgccaccacgcccagctaatttttgtatttttaatagagacagggtttcaccatattgcccaggctggtctcaaactcctgagctcaagcaatttgcctggcccggcctcccaaagcgctgggattatgggtgtgagccaccgcacgtggtccatattttcatttgaaacataaaaatagccttggcattccttaattactcctctctcctccttatgaggagaaagaacagatttactggagatccaggcaataacaggctcttaaagaacttgagaacaagattactgagccctgttgaaccaatcacacaaaagtcttggtgcagaatttataggtcagtgggtacaagttaaggctacctctccagaggttcaatggtacccaatgcacccatctgcctcataccatctccactcacctagacctcttttgatcacattctcccctccctttacattcacccagaagccaatggtttgataaggagaggacatcacatttatgttgtccactgttttgtgactgagttttttcaactattatggtgccatctttcagtatttattacagcctatacacatacaaaaaatgtgaacatctatacaagatttgaatataaataattaccaactacaaacattttaaatatccagaaatttttatccctcaagttagagaaaaagacaatgttttaatttataaaaggccaactctctgatcatcataaaaacacagctcacagccttgatctcctgggctcaagctggtctcaaactccttcctggactcaagtgatcctcttgcctcagcctgccaaagtgctaggattataggcatcagccactgtgcctggcctaatgtgccttatttttaagtatgcctaccattaaacttttactttaaattaatatacttggtttggacttgaaaaaaataaaataaaacccaaggaaaacaataaaaagagcaagcgtcatctttggagtacgttctttccaaatataaactcctaacccggaacttactgcactgtctttcataaccagccgtttatgagatgtcaacagcttttccaaagggtaaacaactcgccgtaggtaactctcatccttgtggttatcatacagccactgagcatcaagcacatcatgcattgtcaccatgtggtcctgaaaagcagccatgtatgaaaataattcagtttatttgtatctcagcccatcagaccccaaacttcctaaaactgaatgtcacttgtttactagtccaagctcattatgttttcagcctcttcagtcctggctcttccaggcatctttttttttttttttttttttttttgagacggagtctcgctctgtcgcccaggtgggactgcggactgcagtggcgcaatctcggctcactgcaagctccgcttcccgggttcacgccattctcctgcctcagcctcccgagtagctgggactacaggcgcccgccaccgcgcccggctaattttttttgtatttttagtagagacggggtttcaccttgttagccaggatggtctcgatctcctgacctcatgatccacccgcctcggcctcccaaagtgctgggattacaggcgtgagccaccgcgccctcttccaggcatctttaaccgttgaagtattagaccccaagcaggcatttttgtaggctgggaggcaaatgaatagaataatactttctacccaatcatctcccttagcccattttaatgtcccaaagtttaattaacagaacagggaagctgccctggactgaactcaacactttggaaagcatctttcccacgacatgaagcaagtggagtgccatcaaaggctggcagatggtaagaaccagctctaaaacttctagccccgtaacacataccttttcactcatgactccagaacgaaccctccgaagctcctgcatctgaccaccaactcccaataacaaaccaaggtgcacacataatgtccgactgtaggtgtcagcctcacaactcacccaaaagattcctaagatacacacacacaaaagaaaagcagcacctactgtaaatacatcactggttgagaaatgcagttatccttcatctgagccaccaagactagaggtgacagacacacttcttaaaatataagcatttgctgtaaagatctgtaattctggccaggcacggtggctcacgcctgtaattccagcactttgggaggcagaggcgggtggatcacgacgtcaggaggtcaagaccatcctggctaacatggtgaaaccccgtctctactaaatgtacaaaaaattagccgggcatgatggcgggcgcctatagtcccagctacttgggaggctgaggcaggaaaatggtgtgaacccgggagacagagtttgcagtgagccgagatcatgccaccgcactccagcctgggcgacagagcgagactccgtctcaaaaaaaaaaaaaaaaaaaaaaagatctgtaattctgatattagcagaatttttaacacttaagttgcaggtatattcagcatggtatgtttcatggatgggaggaaaattggcattgtcttaaatttacttctgacaacagaaacttctaagcagtcaaaattgcagcaaataaaaaacacatgcaaaacatactttggtgaaaacacttacctttgaacaaagcaccgaactacacaaatgcagaatgaaaacatttcaactccagcagaagcagtcatcataaaaggtgtaaaagccatctcactttactaggcactgttcactttttcaacaaaagataacaaaaactatcgcccacagacaatatcccagctgtagggcaggttttagaaagtcttcaacttcaagggcatctacttttaataagagaacagaatcctgaagaatgtgttcatacccactcacaggcctaatgactcacctaatcttctttcaggatcgtattcaatcattttgctctcgtagatggtcctcactcggagctgcctctttactgcagcaataagtgggggtcgctggaataaggcacctgtcagagtttctagggcctaagaacaaacacaaatgaaaacaaacacctcatcagaatgtacatgtgcagtcactggtccaggctggctgcagcagccgactgaaaaggggacaaaaggagtcagtcaggacagctaacccatctccagatgtttaggggctcagagatccaagtcaacaaagggtgtcctccctacaattgcagacttaccctagaaagctgggtccccccttcaatagcattgtgcagccggacaatccccacatactctttgcctgaaaaatgacaaaagagtagtcaggtgtggccactgagttttctgttttccatatttcttatatgctcagtcactcccattttgcacagcaggaaaagcggcagtttgaccttgtgtttctataaaatttgcattaagagagatttcatggtgatgatgtgggaaagaatgaagacactttctcactgggaattcaatgtactaacagggacagttgggagtactcagtgtagaagctgcgtggaaaaagccttgcaagataagcaggcttttctcagataaaaatgaacgaaggatactttaggcagaagcggtagcacagagtgagaagcctggagtgacaagctgagagctgaacccggacaaatggatccagtcagcttgatgaatacatgcttagtatgtggaattccaaaaagcgcggaccaccaagatctggcaggggacagaacgtacacagaaaccaaaacaatatccttgctttaggatttttttttttcttaatgaagaaatagtttccagcagacaaaacatagaagggaaatacagaaagcttttcactctagccagtccttccctccctctcccacatacctgcactctgttgtgacttcaccaagcgagtggctcgttctatgcacacgattaaacaaccagtcaccttgggatccagagtaccactgtgccctgtcttctccacccgaagtatccgtcgaatccaggctaccacctcatgggaagaggggttagagggcttgtcaagattaatgaaacctgtcctggaatggaaaaaaaaaaaattaatgtatcacccactcttaatgctccagtgaaacaacaaatctgaaaagttaaaaagaaaaataattcactgcgggtacaggttatatattcaagacaaagctattctggcatgccactgccttcctgaatagctgatgtgaaagcattttcaaaagaaagtaagtttgcacagtgcctcctcccaacacttacctgatatagtccccaatctctctcttcagaggattttaaccacatgcaagaggtgtatagtgtgttgtccttacattcagcttatcaaaattctacaaagcaacgacacaacacaaaacaaaataccatgtcgtgagcacatgtaaaaaaagagtcagtaccactatgtggcccacaaactggcataggtctgcaagatggactaagtacaaaaactgagaactgttgacaaactcagcaatttaacattgtggggacatgtgttctacaacagtgttgagtgcactgccaattttttaaaaacttggttctcatttcagataccttaaggaatcctgctttaaactgtatcagtgggcacttcccaaagtcaaggatgccagcagtaagcattctcaatcaattgtttaacacttggaaataacgtaaaagcaggcattcatctgatgcacgattttaaccacatacctttagcaaaaggggccactgagacgtgtccaacttagcaactttggattcaggtttgataagaaattcttcagcgtgttgtatttccttcgacaggacagaaatataacctattaaacttcccacccgattttgaacaattccattactgccatggaaatgtatgccttttaaacagaaaacaaggcttcctatgccttttcactgggacctccaagggaaagagagagaagaaatgaaccaggagtacagaggggaagtgaaatgtcactaagatgggtccaaacatttaaagagaaagggggatggcgggtctgtgggtggcataaggaagacaaattcagagacagcagttggtaaggccagcaccatttagtaagctatgcctgaaggacacttggactgtctggggctgtgtcatttcagtgctttttcgaatctacacaatgactaccaatgctggcccattccttggaaacctttaaaaacacttctttcctttagtttgttatttaagtaaactttctttttagtcaaagtgaagtcaaacacattactactcacggctacatcttcttctggcaatgacttccgctcctttttcttcttatgtttctttggcaaaataattactaaaaaaacaaacacaggatttgggaattttccccaagaataaatgaaacaagggtttaaaataaagaccgaaattagggcaggtaggaaatggattttaggtctacaattacagtcacatgccacataatgttttgcaagtacagactgcgtatgtgatggtggcccccataagattataacagagctgaaaaattcctatctcctagtgatgtcttgatgatcctgaccctgtgtaggtcaaggctactgtgtgtgctgtgtttgtgtcttagttaacaaaaaaaaattttttaagaaaaaaattaaaaaattttaaaatagaaaacttataaataaggagataagcagagaaaatatttacgtacagctaaataatgtgtttgttttaagctaagtattattacaacagtcgaagtaaaaagtttataaagttacagtaagctaaggttgatttattctgaagaaaaatatatttttataaatttagtgtagcctaggtgtacagattataaagtctccagtagtgtaatgtctgaggccttcacattcagtcaccgactcaaccagggcaacttccagctcagcaagctccattcatggtaagtgccctcctcttcgggtgcaccacttataaccttgtgtactatatatatataatatacatacatataatacatacatatataatatacatatatacacacacatatttatatatatataattttttttttttgagacggtcacactctttccccaggctggagtgcagtggcagaaactcggctcactgcaacctccttctccaggttcaagcaattctcctgcctcagcctcccgagtagctgggattacaggcgtataccaccacgcccacctaaattttttgtatttttagtagagacggggtttcaccatgttggccaggctggtcttgaactcctgaccgcaggtgatccgccagcctgggctgggatcacaggcctgagccaccgcgcccggccctgtgctatatttttactgncctttttctgcttagacatgtttaagtacacaaactctcgacgctgtgtcccaactgnctacagcattccgcacaataccatgctgtcaggtttgaagcctaggagccatacgctacaccatatacagctaggtgtgtagtagcctatgccacctaggtttgtgtaagagccctctgatgttcacacaatgatgaaa

SEQ ID NO: 144624 - DNA, 924 bp, Homo sapiens; identical to SEQ ID NO: 116550

SEQ ID NO: 144625 - DNA, 738 bp, Homo sapiens
atgtggcaaagcatatggtccacacccctaagtagacataagaggatgcacactggagagaaaccttacaaatgtgaggaatgtggcaaagcctttaaatgttcctcaactgttactgaacataaagtaattcatactgaagagaaaccctacaaatgtgaaaaatgtgtcaaagcctttaagcagtcttcaatcctgagtaaccataagataattcaaactggaaagaaaccctgcaagtctgaagaatcagcctccggacccccaagggctaaggaatcagacacaccgggtttggatcctgactccactaggagccatgtgatctcagggatatttcttgatctctctgagctctttttcctttttctgcaatgtggggaaaaggctccctctctcacagagttactaccagaattcaatgactccaagtatccaaagcatctggcacagtgcctgggcacacagggcaggtttcccatggaatgtgggaaatcttttaacctgtcttcaacttttattaaacataaggtaattcatactggagtaaaactctacaaatgtgaagaatgtggcaaagtgtttttctggtcctcagccctaactagacataagaaaattcatgctggacagcaaccctacaaatgggaaaaaattggcaaagcctttaaccagtcctcacatcttactacagataagataactcatattggagagaaatcttacaagtgtgaataa

SEQ ID NO: 144626 - DNA, 1026 bp, Homo sapiens
atgagggctaggcggttgccctgggccctcacactcgtagcggagctaggctgggacacccagggtggggaccagacctccccgggtgggaatgacaggatgtccatggaggctgagtgtgaaagcaccacggtctcacccctgtcctgttccatcccaacaggctgtggacaaacacgggaagaggtcagtgcccgagccaccccaccgccctcccttggggcctcattgctgcagacgctcaccccagacactcactgcaccggagtgagcgcgaccatcatgtccatgctcgtggtctttctcttgctgtggccttttagccattcttcaacccttgctaaacataagaggatacacactggagagaagccctacaaatgtgaagaatgtggcaaagcttttagccgttcttcaacccttgctaaacataagagaattcatactggagagaaaccctacaaatgtaaagaatgtggcaaagcttttagacaatcctcaacccttactaaacataagataattcatactgaagagaaaccctacaaatgtaaagaatgtgacaaagcttttaagcgactctcaacccttgctaaacataaaataatacatgctggagagaaactctacaaatgtgaagaatgtggcaaagcttttaatcgatcttcaaatcttactatacataagtttattcatactggagagaaaccttacaagtgtgaagaatgtggcaaagcatttaactggtcctcaagccttactaaacataaaagaattcatactagagagaaacccttcaaatgtaaagaatgtggcaaagcatttatatggtcttcaaccctaactagacataagaggatacacactggagagaagccctacaaatgtgaagaatgtggcaaagcttttagccgttcctcaacccttactaagcataagacaattcatactggagagaaaccctacaaatgtaaagaatgtggcaagcttttaagcactcctcagcccttgctaaacataaaataa

SEQ ID NO: 144627 - DNA, 665 bp, Homo sapiens
atgattcttaacaagcatgctgccttcaagcatctgttgaacaaagcacatcttgcaccgcccttaatccatttaaccctgagtggacacagcacatgtttcagagagcacggggttggggctgctggcgtcccaatgaggcaccgccccccgggaaacggcaacggccgggatcccccgcgtgcgcggcccaaccatccggcactgcaacgaagccggcacgcacaggcccacggggaggatcaatctccccagccggcgagggggcctcacgatcccgaagatcccgaagcacagttgggacgcgggaagcatgccagggctccccttgagagatcagagggcggggacactaggactggagcgaggcaagagggcgtcgcgggctggacagagaaattaaaagggaagctggaggaggtggaaaaaaggcgacagcttccagctacgtggagagttgaggttaaagtaaagcctgagcccgagggaggtgaacgatgcagggagccatgcacgcaacgctggacggcagagcgaacacaagaagcggagagcggagagaagagaaaaggaaaggggaggggagggaggaggggagtggaagagagagagagacaacctacagaatgggagaaaatatttgcaaactatacatctgacaaagg

SEQ ID NO: 144628 - DNA, 2835 bp, Homo sapiens
ttattcacacttgtaagatttctctccaatatgagttatcttatctgtagtaaggtgtgaaaactggttaaaggctttgccaaatttttcctgtttgtagggttgctgtccagtatgaattttcttatgtctggttagggctgaggaccagaaaaaggatttgccacattcttcacatttgtagagttttactccagtatgaattaccttatgtttagtaaaggttgaagaccggttaaaagatttgccacattctttatatttgtagggtttctctctagtatgaattttaggtgtgatagtatgaattttcttatggttagtaaggattgaagactggttaaaggctttgccacatttttcacatttgtagggtttctctccagtgtgaattatcttatgtttagtaagagctgaggactctttaaaggctttgccacattctccacatttgtagggtttctctccggtgtgcaacctcttatgtctagttagggttgaagattggctaaatgctttgccacattcttcacatttgtagggtttctctctagtatgaattctcttatgtccatttagggttgaggatgatataaatgctttgccacattcttcacacttgtaaggtttctctccagtatgaattatcttatgtgtagtaagctttgaggatcgattaaaagctttgccacattcttcacatttgtatggtttctctccagtgtgcatcctcgtatgtctagttagggttgaggattggctaaatgctttgccacattcttcacatttgtagggtttctctccagtatgaattatcttatgttcagtaagagttgaagatttcctaaaagctttgccacattcttcacatttgtagggtttctctccagtatgaattatcttatgtgtagtaagggttgaggattggctaaaagctttgccacattcttcacatttgtagggtttctctccagtgtgcatcctcttatgtgtagtaaggtgtgaaggctggctaaatgctttgccacattcttcacatttgtaggttttctctctggtatgaattctcttatgttcagtaagggctgaggaccagataaatgctttgtcacattcttcactcttggaaggtttctctttagtatgaattatcttatgtgtcgtaagatttgaagattgattaaaagctttgccacattcctcacatttgtagagtttctctccagcatgtattattttatgtttagcaagggctgaggagtgcttaaaagctttgccacattctttacatttgtagggtttctctccagtatgaattgtcttatgcttagtaagggttgaggaacggctaaaagctttgccacattcttcacatttgtagggcttctctccagtgtgtatcctcttatgtctagttagggttgaagaccatataaatgctttgccacattctttacatttgaagggtttctctctagtatgaaatcttttatgtttagtaaggcttgaggaccagttaaatgctttgccacattcttcacacttgtaaggtttctctccagtatgaataaacttatgtatagtaagatttgaagatcgattaaaagctttgccacattcttcacatttgtagagtttctctccagcatgtattattttatgtttagtaagggttgagagtcgcttaaaagctttgtcacattctttacatttgtagggtttctcttcagtatgagttatcttatgattagcaagggttgaggaattgctaaaagctttgccacattctttacatttgtagggtttctctccagtatgaattctcttatgtttagcaagggttgaagaacggctaaaagctttgccacattcttcacatttgtagggtttctctccagtatgaattctcttatgtttagcaagggttgaagaatggctaaaagctttgccacattcttcacatttgtagggtttctctccagtgtgtatcctcttatgtctagttagggttgaggaccatagaaatgctttgccacattcttcacacttgtagattttctctttagcacaaattattttatgtgtagtaagggttgagagctgcttaaaagctttgccacattcttcacatttgtagggtttatcttcagtatgaatttccttatgattagtaagggttgaggaccaatgaaaggttttttcacattctttacatttacaggacttctctgtaatataaacgcatttatgttgggttttgtgtaaacggatgcaaaatgacttgacacattttttacatttgaagcatttctttccagtatgtcttatcgtatgtctgtttgaatttaaaaatttatagaagactttcaaatatttcccacattgaaatactttgctctgggcagttgtgagacactggttaagtttattataaccttctttgtgcaccttacactcatccacacttttacaaccttttcttaactgtaaattctcatgtccacatttttcatgttttctcagtaatactttttgaaaagaatcttccatgctctgctctggccaaaagtcttgaggaaaatgaggacatatacctgtgcagaagtatgtcacaatgcccccttcaggaaggggccaggtagagaactcccgtcccttaggtgttgagcccagtgtcacatttgggtatgtcacaatacccaaatatgtggggcccccaaccctgtgctctctgaaacatgtgctgtgtccactcagggttaaatggattaagggcggtgcaagatgtgctttgttaaacagatgcttgaaggcagcatgctcgttaagagtcat

SEQ ID NO: 144629 - DNA, 4018 bp, Homo sapiens
caggtctcgacttcactgctctgtgtcctctgctccaggaggcccagcctgtgtggccctgtgacctgcaggtattggaagagccacagctaagatgccaggaacccctggaagcctagaaatgggactgttgacatttagggatgtggccatagaattctctccggaggagtggcaatgtctggacactgcacagcagaatttatataggaatgtgatgttagagaactacagaaacctggccttcctgggtattgctctctctaagccagacctgattacttatctggagcaaggaaaagagccctggaatatgaagcaacatgagatggtggatgaacccacaggtatatgtcctcattttcctcaagacttttggccagagcagagcatggaagattcttttcaaaaagtattactgagaaaatatgaaaaatgtggacatgagaatttacagttaagaaaaggttgtaaaagtgtggatgagtgtaaggtgcacaaagaaggttataataaacttaaccagtgtctcacaactgcccagagcaaagtatttcaatgtgggaaatatttgaaagtcttctataaatttttaaattcaaacagacatacgataagacataccggaaagaaatgcttcaaatgtaaaaaatgtgtcaagtcattttgcatccgtttacacaaaaacccaacataaatgcgtttatattacagagaagtcctgtaaatgtaaagaatgtgaaaaaacctttcattggtcctcaacccttactaatcataaggaaattcatactgaagataaaccctacaaatgtgaagaatgtggcaaagcttttaagcagctctcaacccttactacacataaaataatctgtgctaaagagaaaatctacaagtgtgaagaatgtggcaaagcatttctatggtcctcaaccctaactagacataagaggatacacactggagagaaaccctacaaatgtgaagaatgtggcaaagcttttagccattcttcaacccttgctaaacataagagaattcatactggagagaaaccctacaaatgtgaagaatgtggcaaagcttttagccattcttcagcccttgctaaacataagagaattcatactggagagaaaccctacaaatgtaaagaatgtggcaaagcttttagcaattcctcaacccttgctaatcataagataactcatactgaagagaaaccctacaaatgtaaagaatgtgacaaaacttttaagcgactctcaacccttactaaacataaaataatacatgctggagagaaactctacaaatgtgaagaatgtggcaaagcttttaatcgatcttcaaatcttactatacataagtttattcatactggagagaaaccttacaagtgtgaagaatgtggcaaagcatttaactggtcctcaagccttactaaacataaaagatttcatactagagagaaacccttcaaatgtaaagaatgtggcaaaggatttatatggtcttcaaccctaactagacataagaggatacacactggagagaagccctacaaatgtgaagaatgtggcaaagcttttaggcaatcctcaacccttactaaacataagataattcatactggagagaaaccctacaaatttgaagaatgtggcaaagcttttagacaatccttaacccttaataaacataagataattcatagtagagagaaaccctacaaatgtaaagaatgtggcaaagcttttaagcaattctcaacccttactacacataaaataattcatgctggaaagaaactctacaaatgtgaagaatgtggcaaagcttttaatcattcctcaagtctttctacacataagataattcatactggagagaagtcttacaagtgtgaagaatgtggcaaagcatttctatggtcctcaaccctaagaagacataagaggatacacactggagagaaaccctacaaatgtgaagaatgtggcaaagcttttagccattcttcagcccttgctaaacataagagaattcatactggagagaaaccctacaaatgtaaagaatgtggcaaagcttttagcaattcctcaacccttgctaatcataagataactcatactgaagagaaaccctacaaatgtaaagaatgtgacaaaacttttaagcgactctcaacccttactaaacataaaataatacatgctggagagaaactctacaaatgtgaagaatgtggcaaagcttttaatcgatcttcaaatcttactatacataagtttattcatactggagagaaaccttacaagtgtgaagaatgtggcaaagcatttaactggtcctcaagccttactaaacataaaagaattcatactagagagaaacccttcaaatgtaaagaatgtggcaaagcatttatatggtcttcaaccctaactagacataagaggatacacactggagagaagccctacaaatgtgaagaatgtggcaaagcttttagccgttcctcaacccttactaagcataagacaattcatactggagagaaaccctacaaatgtaaagaatgtggcaaagcttttaagcactcctcagcccttgctaaacataaaataatacatgctggagagaaactctacaaatgtgaggaatgtggcaaagcttttaatcaatcttcaaatcttacgacacataagataattcatactaaagagaaaccttccaagagtgaagaatgtgacaaagcatttatctggtcctcaacccttactgaacataagagaattcataccagagagaaaccctacaaatgtgaagaatgtggcaaagcatttagccagccttcacaccttactacacataagaggatgcacactggagagaaaccctacaaatgtgaagaatgtggcaaagcttttagccaatcctcaacccttactacacataagataattcatactggagagaaaccctacaaatgtgaagaatgtggcaaagcttttaggaaatcttcaactcttactgaacataagataattcatactggagagaaaccctacaaatgtgaagaatgtggcaaagcatttagccaatcctcaaccctaactagacatacgaggatgcacactggagagaaaccatacaaatgtgaagaatgtgggaaagcttttaatcgatcctcaaagcttactacacataagataattcatactggagagaaaccttacaagtgtgaagaatgtggcaaagcatttatatcatcctcaaccctaaatggacataagagaattcatactagagagaaaccctacaaatgtgaagaatgtggcaaagcatttagccaatcttcaaccctaactagacataagaggttgcacaccggagagaaaccctacaaatgtggagaatgtggcaaagcctttaaagagtcctcagctcttactaaacataagataattcacactggagagaaaccctacaaatgtgaaaaatgttgcaaagcctttaaccagtcttcaatccttactaaccataagaaaattcatactatcacacctaaaattcatactagagagaaaccctacaaatataaagaatgtggcaaatcttttaaccggtcttcaacctttactaaacataaggtaattcatactggagtaaaactctacaaatgtgaagaatgtggcaaatcctttttctggtcctcagccctaaccagacataagaaaattcatactggacagcaaccctacaaacaggaaaaatttggcaaagcctttaaccagttttcacaccttactacagataagataactcatattggagagaaatcttacaagtgtgaataatgtggtaaagtctataaaaagtcctgaattcttaacagacataatattattcatactggagagaaactctacaaacctgaaagatgtgccaacgcttttgacaagtcaaacttttctaaacatcaagaaaatcatgctgctgagaaatccta

SEQ ID NO: 144630 - DNA, 3501 bp, Homo sapiens
atgactcttaacgagcatgctgctttcaagcatctgtttaacaaagcacatcttgcaccgcccttaatccatttaaccctgagtggacacagcacatgtttcagagagcacagggttggagccaaatccaacaatccaccagccagcaaaggagtctgggcgttgcagtctgcaagggtcaagtttgcagagaccacagcagggcagaaagggatgaatacaacttgggtcttttattacccaaatgtggcctccacctggtggggggccatgatacctgtacacgtggttttacctggaggctgccatgatgccagcacacttggtgacaaggaaaagagggcaggggaggctgtattgaatgtacctggcttccaggactctctcgaaagccatggaaggatagtcaactgccttatcccagatgtgcaagagaacaatccttcaacagggaacgagagctggttgaaaagtcaccagaggctgggggagcccacatcaagacgctggttaatcaccctgccagtcacatcaagatcaaactccatagggcatcttaaaggaacaccaggaaaaagcaaggaggaaataaaggcaactgtgtgtgctccaactttgaaaaatggattttggattgctgagcgggtcatgactgttagtggacacgagggggcagcctcatcccgggctctgagggaagagctacggcttcttttttcctcctgtgcacagggcagactgacacctcacatagccgggtacccctctaaggcgaagctccgagaggaacgatcaggcagcaacatttgctgttcagctatattcgctgtactgcagcctctgctgctgatacccaggggaacagggtctggagtggacctcctgcaaactccaacagacctgcagctgagggtcctgactgttagaaggaaaactaacaaacaggaaggacatccacaccaaaaccccacctgtacatcaccatcatcaaagaccaaagatagatccacgagacggaacgttaagaaggatacccaggaattgaactcagctctgcgccaagtggacctaatagacatctacagaactctccaccccaaatcaagagaatataccttcttctcagcaccacatcgcacttattccaaaattgaccacacagttggaagtaaagcactcctcagcaaacgtaaaagaacagaaattataacaaactgtctctcacaccacagtgcaatcaaactggaactcaggattaagaaactcactcaaaaccgctcaactacatggaaactgaacaatctgctcctgaatgactactgggtacataacgaaatgaaggcagaaataaagatattctttgaaaccaacgagaacaaagacacaacataccagaatctctgggacacatttaaagcagtgtgtagagggaaatttatagcactaaatgcccacaagagaaagcaggaaagatctaaaattgacaccctaacatcacaattaaaagaactagagaagcaagagcaaacacattcaaaagctagcagaaggcaagaaataactaagatcagagcagaactgaaggagatagagacacaaaaaaaccttcaaaaaatcaatgaattcaggagctgcctggcagagacacaacaaaaaaaaaagaattttggaccaatacccctgatgaacatcaatgcaaaaatcctcaataaaataccggcaaaccaaatccagcagcacatcaaaaaggttatccgccatgatcaagtgggcttcatccctgggatgcaaggctggttcaacatacgaaaatcaataaacgtaatccatcatataaacagaaccaaagacaaaaaccacacgattatctcaatagatgcagaaaaggcctttgacaaaattcaacagcccttcatgctaaaaactctcaataaattaggtattgatgggacgtatctcaaaataataagagctacttatgacaaacccacagccaatatcacagtgaatgcgcagaaactggaagcattccctttgaaaactggcacaagacagggatgccctctctcaccactcctattcaacatagtgttggaagttctggccagggcaatcatgcaggagaaagaaataaagggtattcaattaggaaaagaggaagtcaaattgtccctgtttgcagatgacatgattgtgcatttagaaaaccctatggtctcagcccaaaatctccttaagctgataagcaacttcagcaaagtctcaggatacaaaatcaatgtacaaaaaccacaagcattcttatacaccaataacagacaaacagagagccaaatcatgagtgaacttccattcacaattgcttcaaagagaataaaatacttaggaacccaacttacaagggatgtgaaggacctcttcaaggagaactacaaaccactgctcaatgaaataaaagaggatacaaacaaatggaagaacattccatgctcatgggtagaagaatcagttatcatgaaaatggccatattgcccaaggtaatttacagattcaatgccatccccatcaagctaccaatgactttcttcacagaactggaaaaaactactttaaagttcatatggaaccaaaaaagagcccgcatcaccaaggcaatcctaagccaaaagcacaaagctggaggcatcacactacctgactgcaaactatactacaaggctacagtaaccaaaacagcatggtactggtaccaaaacagagatatagatcaatggaacagaacagagccctcagaaataacgccacatatctacaactatctgatctttgacaaacctgagaaaaacaagcaatggggaaaggattccctacttaataaacggtgctgggaaaactggctagccatatgtagaaagctgaaactggatcccttccttacaccttatacaaaaattaattcaagatggattaaagacttaaacgttagacctaaaaccataaaaaccctagaagaaaacctaggcattaccattcaggacataggcatgggcaaggacttcatgtctaaaacaccaaaagcaatggcaacaaaagccaaaatggacaaatgggatctaactaaactaaagagcttctgcacagcaaaagaaactaccatcagagtgaacaggcaacctacaaaatgggagaaaattttcgcaacctactcatctgacaaagggctaatatccagaatctacaaagaactcaaacaaatttacaagaaaaaaacaaacaaccctatcaaaaagtgggcaaaggacatgaacagacacttctcaaaagaagacatttatgcagccaaaagacacatgaaaaaatgctcatcatcactggccatcagagaaatgcaaatcaaaaccataatgagataccatctcacaccaattagaatggcaatcattaaaaagtcaggaaacaacagggacatggatgaaattggaaatcatcattctcagtaa

SEQ ID NO: 144631 - DNA, 8442 bp, Homo sapiens
atgattcctgccagatttgccggggtgctgcttgctctggccctcattttgccagggaccctttgtgcagaaggaactcgcggcaggtcatccacggcccgatgcagccttttcggaagtgacttcgtcaacacctttgatgggagcatgtacagctttgcgggatactgcagttacctcctggcagggggctgccagaaacgctccttctcgattattggggacttccagaatggcaagagagtgagcctctccgtgtatcttggggaattttttgacatccatttgtttgtcaatggtaccgtgacacagggggaccaaagagtctccatgccctatgcctccaaagggctgtatctagaaactgaggctgggtactacaagctgtccggtgaggcctatggctttgtggccaggatcgatggcagcggcaactttcaagtcctgctgtcagacagatacttcaacaagacctgcgggctgtgtggcaactttaacatctttgctgaagatgactttatgacccaagaagggaccttgacctcggacccttatgactttgccaactcatgggctctgagcagtggagaacagtggtgtgaacgggcatctcctcccagcagctcatgcaacatctcctctggggaaatgcagaagggcctgtgggagcagtgccagcttctgaagagcacctcggtgtttgcccgctgccaccctctggtggaccccgagccttttgtggccctgtgtgagaagactttgtgtgagtgtgctggggggctggagtgcgcctgccctgccctcctggagtacgcccggacctgtgcccaggagggaatggtgctgtacggctggaccgaccacagcgcgtgcagcccagtgtgccctgctggtatggagtataggcagtgtgtgtccccttgcgccaggacctgccagagcctgcacatcaatgaaatgtgtcaggagcgatgcgtggatggctgcagctgccctgagggacagctcctggatgaaggcctctgcgtggagagcaccgagtgtccctgcgtgcattccggaaagcgctaccctcccggcacctccctctctcgagactgcaacacctgcatttgccgaaacagccagtggatctgcagcaatgaagaatgtccaggggagtgccttgtcacaggtcaatcacacttcaagagctttgacaacagatacttcaccttcagtgggatctgccagtacctgctggcccgggattgccaggaccactccttctccattgtcattgagactgtccagtgtgctgatgaccgcgacgctgtgtgcacccgctccgtcaccgtccggctgcctggcctgcacaacagccttgtgaaactgaagcatggggcaggagttgccatggatggccaggacgtccagctccccctcctgaaaggtgacctccgcatccagcgtacagtgacggcctccgtgcgcctcagctacggggaggacctgcagatggactgggatggccgcgggaggctgctggtgaagctgtcccccgtctatgccgggaagacctgcggcctgtgtgggaattacaatggcaaccagggcgacgacttccttaccccctctgggctggcggagccccgggtggaggacttcgggaacgcctggaagctgcacggggactgccaggacctgcagaagcagcacagcgatccctgcgccctcaacccgcgcatgaccaggttctccgaggaggcgtgcgcggtcctgacgtcccccacattcgaggcctgccatcgtgccgtcagcccgctgccctacctgcggaactgccgctacgacgtgtgctcctgctcggacggccgcgagtgcctgtgcggcgccctggccagctatgccgcggcctgcgcggggagaggcgtgcgcgtcgcgtggcgcgagccaggccgctgtgagctgaactgcccgaaaggccaggtgtacctgcagtgcgggaccccctgcaacctgacctgccgctctctctcttacccggatgaggaatgcaatgaggcctgcctggagggctgcttctgccccccagggctctacatggatgagaggggggactgcgtgcccaaggcccagtgcccctgttactatgacggtgagatcttccagccagaagacatcttctcagaccatcacaccatgtgctactgtgaggatggcttcatgcactgtaccatgagtggagtccccggaagcttgctgcctgacgctgtcctcagcagtcccctgtctcatcgcagcaaaaggagcctatcctgtcggccccccatggtcaagctggtgtgtcccgctgacaacctgcgggctgaagggctcgagtgtaccaaaacgtgccagaactatgacctggagtgcatgagcatgggctgtgtctctggctgcctctgccccccgggcatggtccggcatgagaacagatgtgtggccctggaaaggtgtccctgcttccatcagggcaaggagtatgcccctggagaaacagtgaagattggctgcaacacttgtgtctgtcgggaccggaagtggaactgcacagaccatgtgtgtgatgccacgtgctccacgatcggcatggcccactacctcaccttcgacgggctcaaatacctgttccccggggagtgccagtacgttctggtgcaggattactgcggcagtaaccctgggacctttcggatcctagtggggaataagggatgcagccacccctcagtgaaatgcaagaaacgggtcaccatcctggtggagggaggagagattgagctgtttgacggggaggtgaatgtgaagaggcccatgaaggatgagactcactttgaggtggtggagtctggccggtacatcattctgctgctgggcaaagccctctccgtggtctgggaccgccacctgagcatctccgtggtcctgaagcagacataccaggagaaagtgtgtggcctgtgtgggaattttgatggcatccagaacaatgacctcaccagcagcaacctccaagtggaggaggaccctgtggactttgggaagtcctgggaagtgagctcgcagtgtgctgacaccagaaaagtgcctctggactcatcccctgccacctgccataacaacatcatgaagcagacgatggtggattcctcctgtagaatccttaccagtgacgtcttccaggactgcaacaagctggtggaccccgagccatatctggatgtctgcatttacgacacctgctcctgtgagtccattggggactgcgcctgcttctgcgacaccattgctgcctatgcccacgtgtgtgcccagcatggcaaggtggtgacctggaggacggccacattgtgcccccagagctgcgaggagaggaatctccgcgagaacgggtatgagtgtgagtggcgctataacagctgtgcacctgcctgtcaagtcacgtgtcagcaccctgagccactggcctgccctgtgcagtgtgtggagggctgccatgcccattgccctccaggcaaaatcctggatgagcttttgcagacctgcgttgaccctgaagactgtccagtgtgtgaggtggctggccggcgttttgcctcaggaaagaaagtcaccttgaatcccagtgaccctgagcactgccagatttgccactgtgatgttgtcaacctcacctgtgaagcctgccaggagccgggaggcctggtggtgcctcccacagatgccccggtgagccccaccactctgtatgtggaggacatctcggaaccgccgttgcacgatttctactgcagcaggctactggacctggtcttcctgctggatggctcctccaggctgtccgaggctgagtttgaagtgctgaaggcctttgtggtggacatgatggagcggctgcgcatctcccagaagtgggtccgcgtggccgtggtggagtaccacgacggctcccacgcctacatcgggctcaaggaccggaagcgaccatcagagctgcggcgcattgccagccaggtgaagtatgcgggcagccaggtggcctccaccagcgaggtcttgaaatacacactgttccaaatcttcagcaagatcgaccgccctgaagcctcccgcatcgccctgctcctgatggccagccaggagccccaacggatgtcccggaactttgtccgctacgtccagggcctgaagaagaagaaggtcattgtgatcccggtgggcattgggccccatgccaacctcaagcagatccgcctcatcgagaagcaggcccctgagaacaaggccttcgtgctgagcagtgtggatgagctggagcagcaaagggacgagatcgttagctacctctgtgaccttgcccctgaagcccctcctcctactctgccccccgacatggcacaagtcactgtgggcccggggctcttgggggtttcgaccctggggcccaagaggaactccatggttctggatgtggcgttcgtcctggaaggatcggacaaaattggtgaagccgacttcaacaggagcaaggagttcatggaggaggtgattcagcggatggatgtgggccaggacagcatccacgtcacggtgctgcagtactcctacatggtgaccgtggagtaccccttcagcgaggcacagtccaaaggggacatcctgcagcgggtgcgagagatccgctaccagggcggcaacaggaccaacactgggctggccctgcggtacctctctgaccacagcttcttggtcagccagggtgaccgggagcaggcgcccaacctggtctacatggtcaccggaaatcctgcctctgatgagatcaagaggctgcctggagacatccaggtggtgcccattggagtgggccctaatgccaacgtgcaggagctggagaggattggctggcccaatgcccctatcctcatccaggactttgagacgctcccccgagaggctcctgacctggtgctgcagaggtgctgctccggagaggggctgcagatccccaccctctccccagcacctgactgcagccagcccctggacgtgatccttctcctggatggctcctccagtttcccagcttcttattttgatgaaatgaagagtttcgccaaggctttcatttcaaaagccaatatagggcctcgtctcactcaggtgtcagtgctgcagtatggaagcatcaccaccattgacgtgccatggaacgtggtcccggagaaagcccatttgctgagccttgtggacgtcatgcagcgggagggaggccccagccaaatcggggatgccttgggctttgctgtgcgatacttgacttcagaaatgcatggtgccaggccgggagcctcaaaggcggtggtcatcctggtcacggacgtctctgtggattcagtggatgcagcagctgatgccgccaggtccaacagagtgacagtgttccctattggaattggagatcgctacgatgcagcccagctacggatcttggcaggcccagcaggcgactccaacgtggtgaagctccagcgaatcgaagacctccctaccatggtcaccttgggcaattccttcctccacaaactgtgctctggatttgttaggatttgcatggatgaggatgggaatgagaagaggcccggggacgtctggaccttgccagaccagtgccacaccgtgacttgccagccagatggccagaccttgctgaagagtcatcgggtcaactgtgaccgggggctgaggccttcgtgccctaacagccagtcccctgttaaagtggaagagacctgtggctgccgctggacctgcccctgcgtgtgcacaggcagctccactcggcacatcgtgacctttgatgggcagaatttcaagctgactggcagctgttcttatgtcctatttcaaaacaaggagcaggacctggaggtgattctccataatggtgcctgcagccctggagcaaggcagggctgcatgaaatccatcgaggtgaagcacagtgccctctccgtcgagctgcacagtgacatggaggtgacggtgaatgggagactggtctctgttccttacgtgggtgggaacatggaagtcaacgtttatggtgccatcatgcatgaggtcagattcaatcaccttggtcacatcttcacattcactccacaaaacaatgagttccaactgcagctcagccccaagacttttgcttcaaagacgtatggtctgtgtgggatctgtgatgagaacggagccaatgacttcatgctgagggatggcacagtcaccacagactggaaaacacttgttcaggaatggactgtgcagcggccaggacagacgtgccagcccatcctggaggagcagtgtcttgtccccgacagctcccactgccaggtcctcctcttaccactgtttgctgaatgccacaaggtcctggctccagccacattctatgccatctgccagcaggacagttcgcaccaggagcaagtgtgtgaggtgatcgcctcttatgcccacctctgtcggaccaacggggtctgcgttgactggaggacacctgatttctgtgctatgtcatgcccaccatctctggtctacaaccactgtgagcatggctgtccccggcactgtgatggcaacgtgagctcctgtggggaccatccctccgaaggctgtttctgccctccagataaagtcatgttggaaggcagctgtgtccctgaagaggcctgcactcagtgcattggtgaggatggagtccagcaccagttcctggaagcctgggtcccggaccaccagccctgtcagatctgcacatgcctgagcgggcggaaggtcaactgcacaacgcagccctgccccacggccaaagctcccacgtgtggcctgtgtgaagtagcccgcctccgccagaatgcagaccagtgctgccccgagtatgagaatgggagactggtctctgttccttacgtgggtgggaacatggaagtcaacgtttatggtgccatcatgcatgaggtcagattcaatcaccttggtcacatcttcacattcactccacaaaacaatgagttccaactgcagctcagccccaagacttttgcttcaaagacgtatggtctgtgtgggatctgtgatgagaacggagccaatgacttcatgctgagggatggcacagtcaccacagactggaaaacacttgttcaggaatggactgtgcagcggccaggacagacgtgccagcccatcctggaggagcagtgtcttgtccccgacagctcccactgccaggtcctcctcttaccactgtttgctgaatgccacaaggtcctggctccagccacattctatgccatctgccagcaggacagttcgcaccaggagcaagtgtgtgaggtgatcgcctcttatgcccacctctgtcggaccaacggggtctgcgttgactggaggacacctgatttctgtgctatgtcatgcccaccatctctggtctacaaccactgtgagcatggctgtccccggcactgtgatggcaacgtgagctcctgtggggaccatccctccgaaggctgtttctgccctccagataaagtcatgttggaaggcagctgtgtccctgaagaggcctgcactcagtgcattggtgaggatggagtccagcaccagttcctggaagcctgggtcccggaccaccagccctgtcagatctgcacatgcctgagcgggcggaaggtcaactgcacaacgcagccctgccccacggccaaagctcccacgtgtggcctgtgtgaagtagcccgcctccgccagaatgcagaccagtgctgccccgagtatgagaacccctgccccctgggttacaaggaagaaaataacacaggtgaatgttgtgggagatgtttgcctacggcttgcaccattcagctaagaggaggacagatcatgacactgaagcgtgatgagacgctccaggatggctgtgatactcacttctgcaaggtcaatgagagaggagagtacttctgggagaagagggtcacaggctgcccaccctttgatgaacacaagtgtctggctgagggaggtaaaattatgaaaattccaggcacctgctgtgacacatgtgaggagcctgagtccaacgacatcactgccaggctgcagtatgtcaaggtgggaagctgtaagtctgaagtagaggtggatatccactactgccagggcaaatgtgccagcaaagccatgtactccattgacatcaacgatgtgcaggaccagtgctcctgctgctctccgacacggacggagcccatgcaggtggccctgcactgcaccaatggctctgttgtgtaccatcaggttctcaatgccatggagtgcaaatgctcccccaggaagtccagcaagtga

SEQ ID NO: 144632 - DNA, 477 bp, Homo sapiens
ttaaagatcttgagtctgggagattgtcaggattgtccaagggggcccggtgtaatcacaatgatcagcagcagaggggaagagcaatccgactaggaagttggaggtccagttggagcagccggccactgccatcgcagctgggcgggggccctggctgaagagttcggccacaataaaccagggaatggggcctggtccaatttcaaaacaggccacaaagaccaagatagccccaatacagacaaagctcatcccattatagtgattagaaagtaaagtgaagatagtattaaccacacccgcgctgatggtggcatagatgggctgttgaacacctgcatccttgaagattcctgttgagtaatagaacaccttgttagccaagatggtctcgatttcctgacctcgtgatctgcccgcctcggcctcccaaagtgctgggattacaggcgtgagccaccgcgcccggtgcat

SEQ ID NO: 144633 - DNA, 9911 bp, Homo sapiens
tcacttgctgcacttcctgggggagcatttgcactccatggcattgagaacctcatggtacacaacagagccattggtgcagtgcagggccacctgcatgggctccgtccgtgtcggagagcagcaggagcactggtcctgcacatcgttgatgtcaatggagtacatggctttgctggcacatttgccctggcagtagtggatatccacctctacttcagacttacagcttcccaccttgacatactgcagcctggcagtgatgtcgttgcactcaggctcctcacatgtgtcacagcaggtgcctggaattttcataattttacctccctcagccagacacttgtgttcatcaaagggtgggcagcctgtgaccctcttctcccagaagtactctcctctctcattgaccttgcagaagtgagtatcacagccatcctggagcgtctcatcacgcttcagtgtcatgatctgtcctcctcttagctgaatggtgcaagccgtaggcaaacatctcccacaacattcacctgtgttattttcttccttgtaacccagggggcaggggttgcaggtggtcttcctgcactccagcttgaatccagagatgacccccacctgcaccatgcagcggcaggtcgtgcacacatcgatcatcacagtcttcccgggcccaatgacagtgccattgagcatgcaggcctccatgcgctcacagcgacagcttgggcagcacgctgaggtcttacagctgagctgaaagcccgaggggcagacagggacctccagctgggggcaggagacgttcctttgttgtataaagacctcctccttcactcggacacactcattgatgaggcaggggttctccggggaggcccactgggagccgacactcttccaggaagactgggagtccccccgcggtgagccagtcaccacctcacaggcagatggcaggcaccttccacagcactcgccttcatgcagaacgtaagtgaagcccgaccgacagctgtcctcacagggcttctgggagcactgggccacgcggaggcccatcacggcatcctccatgtcggtgcaggtgcacacatcgcagccctcctcccagaactggcccacagggtagatggtgcttcggtggacacacaccttgtcgggaaggcaggtggttgtggtacagccacagtcattggtggcggttgaggccaagtacccaaggggacagctcactgtggagttgacacagttgcaggcacactcatactcatcacagcactgggtcttccgaagggtgggcaaacggtgcggggggcaggagggtggggacactcttttgcactcctccttcctgcaggcgcaggtgaagttgggtctgcactcgccagggttggtcagtgtgggctggaggccacgttcacagtgaggcactgggggcaggtcacagctcactgggtcacacacacactcatactcggggcagcactggtctgcattctggcggaggcgggctacttcacacaggccacacgtgggagctttggccgtggggcagggctgcgttgtgcagttgaccttccgcccgctgaggcatgtgcagatctgacagggctggtggtccgggacccaggcttccaggaactggtgctggactccatcctcaccaatgcactgagtgcaggcctcttcagggacacagctgccttccaacatgactttatctggagggcagaaacagccttcggagggatggtccccacaggagctcacgttgccatcacagtgccggggacagccatgctcacagtggttgtagaccagagatggtgggcatgacatagcacagaaatcaggtgtcctccagtcaacgcagaccccgttggtccgacagaggtgggcataagaggcgatcacctcacacacttgctcctggtggcaactgtcctgctggcagatggcatagaatgtggctggagccaggaccttgtggcattcagcaaacagtggtaagaggaggacctggcagtgggagctgtcggggacaagacactgctcctccaggatgggctggcacgtctgccctggccgctgcacagtccattcctgaacaagtgttttccagtctgtggtgactgtgccatccctcagcatgaagtcattggctccgttctcatcacagatcccacacagaccatacgtctttgaagcaaaagtcttggggctgagctgcagttggaactcattgttttgtggagtgaatgtgaagatgtgaccaaggtgattgaatctgacctcatgcatgatggcaccataaacgttgacttccatgttcccacccacgtaaggaacagagaccagtctcccattcaccgtcacctccatgtcactgtgcagctcgacggagagggcactgtgcttcacctcgatggatttcatgcagccctgccttgctccagggctgcaggcaccattatggagaatcacctccaggtcctgctccttgttttgaaataggacataagaacagctgccagtcagcttgaaattctgcccatcaaaggtcacgatgtgccgagtggagctgcctgtgcacacgcaggggcaggtccagcggcagccacaggtctcttccactttaacaggggactggctgttagggcacgaaggcctcagcccccggtcacagttgacccgatgactcttcagcaaggtctggccatctggctggcaagtcacggtgtggcactggtctggcaaggtccagacgtccccgggcctcttctcattcccatcctcatccatgcaaatcctaacaaatccagagcacagtttgtggaggaaggaattgcccaaggtgaccatggtagggaggtcttcgattcgctggagcttcaccacgttggagtcgcctgctgggcctgcgaagatccgtagctgggctgcatcgtagcgatctccaattccaatagggaacactgtcactctgttggacctggcggcatcagctgctgcatccactgaatccacagagacgtccgtgaccaggatgaccaccgcctttgaggctcccggcctggcaccatgcatttctgaagtcaagtatcgcacagcaaagcccaaggcatccccgatttggctggggcctccctcccgctgcatgacgtccacaaggctcagcaaatgggctttctccgggaccacgttccatggcacgtcaatggtggtgatgcttccatactgcagcactgacacctgagtgagacgaggccctatattggcttttgaaatgaaagccttggcgaaactcttcatttcatcaaaataagaagctgggaaactggaggagccatccaggagaaggatcacgtccaggggctggctgcagtcaggtgcaggggagagggtggggatctgcagcccctctccggagcagcacctctgcagcaccaggtcaggagcctctcgggggagcgtctcaaagtcctggatgaggataggggcattgggccagccaatcctctccagctcctgcacgttggcattagggcccactccaatgggcaccacctggatgtctccaggcagcctcttgatctcatcagaggcaggatttccggtgaccatgtagaccaggttgggcgcctgctcccggtcaccctggctgaccaagaagctgtggtcagagaggtaccgcagggccagcccagtgttggtcctgttgccgccctggtagcggatctctcgcacccgctgcaggatgtcccctttggactgtgcctcgctgaaggggtactccacagtcaccatgtaggagtactgcagcaccgtgacgtggatgctgtcctggcccacatccatccgctgaatcacctcctccatgaactccttgctcctgttgaagtcggcttcaccaattttgtccgatccttccaggacgaacgccacatccagaaccatggagttcctcttgggccccagggtcgaaacccccaagagccccgggcccacagtgacttgtgccatgtcggggggcagagtaggaggaggggcttcaggggcaaggtcacagaggtagctaacgatctcgtccctttgctgctccagctcatccacactgctcagcacgaaggccttgttctcaggggcctgcttctcgatgaggcggatctgcttgaggttggcatggggcccaatgcccaccgggatcacaatgaccttcttcttcttcaggccctggacgtagcggacaaagttccgggacatccgttggggctcctggctggccatcaggagcagggtgatgcgggaggcttcagggcggtcgatcttgctgaagatttggaacagtgtgtatttcaagacctcgctggtggaggccacctggctgcccgcatacttcacctggctggcaatgcgccgcagctctgacggtcgcttccggtccttgagcccgatgtaggcgtgggagccgtcgtggtactccaccacggccacgcggacccacttctgggagatgcgcagccgctccatcatgtccaccacaaaggccttcagcacttcaaactcagcctcggacagcctggaggagccatccagcaggaagaccaggtccagtagcctgctgcagtagaaatcgtgcaacggcggttccgagatgtcctccacatacagagtggtggggctcaccggggcatctgtgggaggcaccaccaggcctcccggctcctggcaggcttcacaggtgaggttgacaaatctgttttaccaaatctggcagtgctcagggtcactgggattcaaggtgactttctttcctgaggcaaaacgccggccagccacctcacacactggacagtcttcagggtcaacgcaggtctgcaaaagctcatcagaggcctcacctggagggcagtgggcatggcagccctccacacactgcacagggcaggccagtggctcagggtgctgacacgtgacttgacaggcaggtgcacagctgttatagcgccactcacactcatacccgttctcccggagattcctctcctctcagtactcacggcacaatgtggccgtcctccaggtcaccaccttgccatgctgggcacacacgtgggcataggcagcaatggtgtcgcagaagcaggcgcagtccccaatggactcacaggagcaggtgtcgtaaatgcagacatccagatatggcaaggtcctcaccagcttgttgcagtcctggaagacgtcactggtaaggattctacaggaggaatccaccatcgtctgcttcatgatgttgttatggcaggtggcaggggatgagcccagacgtacttttctggtgtcagcacactgcgagctcactttccaggagttcccaaagtccacagggtcttcctccacttggaggttgctgctggtgaggtcattgttctggatgccatcaaaattcccacacaggccaaagccactgacctggtatgtctgcttcaggaccacggagatgctcaggtggcggtcccagaccacggagagggctttgcccagcagcagaatgatgtaccggccagactccaccacctcaaagtgagtctcatccttcatgggcctcgctgcacttacctccccgtcaaacagctcaatctctcctccctccaccaggatggtgacccgtttcttgcatttcactgaggggtggctgcatcccttattccccactaggatccgaaaggtcccagggttactgccacctctcacctgcaccagaacgtactggcactccccggggaacaggtatttgagcccgtcgaaggtgaggtagtgggccatgccgatcgtggagcacgtggcatcacacacatggtctgtgcagttccacttccggtctgagcctcaccaagtgttgcagccaatcttcactgtttctccaggggcatactccttgccctgatggaagcagggacacctttccagggccacacatctgttctggtgactcaccatgcccggggggcagaggcagccagagacacagcccatgctcatgcactccaggtcatagttctggcacgttttggtacactcgagcccttcagcccgcaggttgtcagcgggacacaccagcttgaccatggggggccgacaggatagacagtactcactgcgatgagacaggggactgctgaggacagcgtcaggcagcaagcttccggggactccactcatggtacagtgcatgaagccatcctgcacagtagcacatggtgtgatggtctgagaagatgtcttctggctggaagatctcaccgtcatagtaacaggggcactgggccttgggcacgcagtcccccctctcatccatgtagagccctggggggcagaagcagccctccaggcaggcctcattgcattcctcatccgggtaagagagagagcggcaggtcaggttgcagggggtcccgcactgcaggtacacctggcctttcggagggcacgcaccacagcggcctggctcgcgccacgcgacgcgcacgcctctccccgcgcaggccgcggcatagctggccagggcgccgcacaggcactcgcggccgtccgagcaggagcacacgtcgtagcggcagttccgcaggtagggcagcgggctgacggcacgatggcaggcctcgaatgtgggggacgtcaggaccgcgcacgcctcctcggttcacatactcatgcgcgggttgagggcgcagggatcgctgtgctgcttctgcaggtcctggcagtccccgtgcagcttccaggcgttcccgaagtcctccacccggggctccgccagcccagagggggtaaggaagtcgtcgccctggttgccattgtaattcccacacaggccgcaggtcttcccggcatagagggcacctaccttcaccagcagcctcccgcggccatcccagtccatctgcaggtcctccccgtagctgaggcgcacggaggccgtcactgtatgctggatacgaagcatacctttcaggagggggagctggacgtcctggccatccatggcaactcctgccccatgcttcagtttcacaaggctgttgtgcaggccaggcagccggacggtgacggagcgggtgcacacagcgtcgcgggcaaagctcacctggacagtctcaatgacaatggagaaggagtggtcctggcaatcccgggccagcaggtactggcagatcccactgaaggtgaagtatctgttgtcaaagctcttgaagtgtgattgacctgtgactcccacgctacctgctggcatcagggccacaccagcctcagactggtgccagcggaatgcctggccagggggaggctgcccaatagcacagggttctctgaacctgagtgtggagaggctctgggaaacagtgtcacccctttaactcacagaccctaaatacagtcccaggtatccaagctcaacccacttcaggccaccatagctggtacctgaaaccagagctggggtcacgtggttgcagccaacctgtgcagagagggcaacttctcgctgccttgagttgtgaggtcgcctacctggacattcttcattgctgcagatccactggctgtgcccccattaccaggtgttgcagtctcgagagagggaggtgccgggagggtagcgctttccggaatgcacgcagggacactcggtgctctccacgcagaggccttcatccagaagttcattaccagggcagctgcagccatccacgcatcgctcctgacacatttcattgatgtgcaggctctggcaggtcctggcgcaaggggacacacactgcctatactccataccagcaggggccgactgggctgcacgcgctgtggtcggtccagccgtacagcaccattccctcctgggcacaggtccgggcgtactccaggagggcagggcaggcgcactccagccccccagcacactcacacaaagtcttctcacacagggccacaaaaggctcggggtccaccagagggtggcagcgggcaaacaccgaggtgctcttcagaagctggcactgcaatcagctcacctggtcagagaagagtgtcccagatccgcactcacctgcagccataccacatggcatgtttaggtggctatctctgctgctcccagcttccctgttctgccacaggtagccctgccagacctgtcacttacccacttggaggtgtggagatatctgggcaccttgttttccttctaacctcaagctgtgctcggctacccaaaaggaatgggttatagttgcgagggggaaggagaaaaagaatgcgtgttgaaacttgtgcttaaagcccggcgtgtgcttgtcctgcttctgccggctcccattctcaaggcaggggcactccagcggaaaacacgggacagtgggagaatatggggagccagctaacaacaactcctcctcctcctcctcctcctccttctcgtcctcctcctcctcctcatcatccacacccaccttctgcatttccccagaggagatgttgcatgagctgctgggaggagatgcccgttcacaccactgttctccactgctcagagcccatgagttggcaaagtcataagggtccgagaacatcttaccttcttgggtcataaagtcatcttcagcaaagatgttaaagttgccacacagcccgcaggtcttgttgaagtatctgtctgacagcaggacttgaaagttgccgctgccatcgatcctggccacaaagccataggcctcaccggacagcttgtagtacccagcctcagtttctagatacagccctttggaggcatagggcatggagactctttggtccccctgtgtcacggtaccattgacaaacaaatggatgtcaaaaaattccccaagatacacggagaggctcactctcttgccattctggaagtcccagtccataaaccacattctgcggagctccagatcaacacaacatgccacggaaactaaggctccccgggggaagtgactcagcaggctgttggttgttgatggctctctcttggcaggtatgagagccagatcctgcagccgtagcttaggaagagcagtctcaataatcgagaaggagcgtttctggcagccccctgccaggaggtaactgcagtatcccgcaaagctgtacatgctcccatcaaaggtgttgacgaagtcacttccgaaaaggctgcatcgggccgtggatgacctgccgcgagttccttctgcacaaagggtccctctgattttggctctaggagactttggagcagtcatttctcctctctgaccctcagtctcttcattgtaccatgggaggttcaacaaggtgacctccacaatcttatcgaaaactaataatccatccaagtcttggattccttcctcctcatcctgtgcccccataatataggacagttctgtgccacctttatgcttcttaattccccaacaggagatggcatttgcaggcacctggtctctgctgattcccggaaaggtgtcactccagatggccctggggcaggaatgagaaatggaggcccttttgtacctacctggcaaaatgagggccagagcaagcagcaccccggcaaatctggcaggaatcatcttctgcatttccccagaggagatgttgcatgagctgctgggaggagatgcccgttcacaccactgttctccactgctcagagcccatgagttggcaaagtcataagggtccgaggtcaaggtccgggagagctctgttggccggatgccctccaggtcccacacatcacgccatgaagatggctgcctcctcctggggaggatggagttgaggaggaggaggaggaaggcggcgtctgggatacctcctgtaagtgccat

SEQ ID NO: 144634 - DNA, 1299 bp, Homo sapiens
ggaaaacagtggtgctgactcgtgtctgaggccttcggcgctgcctggccaaccaccctactttgttctccatcagcccacagggctgatcagacagacaggagaggccacgttggcgtctgtaggaaacaaggaggccgccctgcctgatgttggcgtctgtaggaagcaaggaggccgccctgcctgagaactggagcccacccatgcatgtgggtgttgtgggctgatggcctggcctgggtcccaaaggcagacctgagagctaatctggctgctttcttttctccctaaaatactcctgtgagtgtttgctttccctcagtcttcccacagcatgtgaaccaatgctgcagggagtcaggggttgattctctcttaatcacatttggcttacctacagaacaggcctacattgtcagcaggggcacgttcccatcacggattgcgtgttaatgtttccctagaaaagatgagtcctctgttttcttggtagcaacttccctattttcattagcttacaggactcattctgaataatagcagctacttattaccacatttaaaatatagtatcagtaacatggccacatattcagcatatttcaaaacgtggatcacaggtatagcccagtatctgcattgcatatctgaccattattagccctgttttgaattcctgaagatagttcaatgcagctttaaaaaaaagaaaactctaaccagatctacattttgacgacagaaaaggcagacacaggcttctttgaaatgaagctgttgtctggaatctttctttgtaggaaactggtttagagaaagtcccacatctttttctttttttttttgagatggagtctcgctctgtcacccaggctggagtgcagtggtgcgatcttggctcactgcaagctccttctcccaggttcaagccattctcctgccctcagccaaccgagtagctgggactacaggcacccgccaccacgcccggctaattttttgtatttttagtagagacggggtttcaccatgttagccagggatggtctcaatctcctgacctcgtgatctgcccacctcagcctcccaaagtgctggggattacaggcgtgagccaccgcgcccggccgaaaatctgtcctctcttacacaatacctcgagtgcactcaatttgaaatccatctgggttcacaaaccgctctagaaggaaggctggttcctgtcacttacccacttggaggtgtggagatatctgggcacccggttttccttctaacctcaagctgtggtcgagc

SEQ ID NO: 144635 - DNA, 761 bp, Homo sapiens
  misc_feature (1)...(761): n = a,t,c or g
cactgggcgatggctgaccaggttccaagccatgtgggatcctaaacaagaagactgtgtcatagttggcagcatggcccatccacgacgggtagaaatcttccatgagacaggaaagagggtgcattcgtttggtggagaataccttgtctctgtgtgttccatcaatgccatgcacccaactcggtatattttggctggaggtaattccagcgggaagatacatgtttttatgaatgaaaaaagctgctgagtttttggtttaggaacatcaatttgttcaaattgaccactgtctaaggagcctagtaatcggcgtgccttagtgtgtttatgtggtaatgtgttacatttagcaattataacattgttttattaataagactataagaagagtgtacttttagtaagggagaagtcttggagggttgcttctgcaggacggggagggaatttgaggggaggctgagagtgccgtcaggactttttttttttttttttttgagatggagttttgctcttgttgcccaggctggagtgcaatagcgcgatcttggctcaccgcaacctccgcctcccaggttcaagcgattctcctgcctcanactcctaagtnnctgggattacaggcacctgccaccacgcctggctattttttttgtatttttagtananatngggtttcatcatgttggccangctggtctcgaacctcctgacctccaggtgatctgcccgccctcggcctccaaaaattgctg

SEQ ID NO: 144636 - DNA, 425 bp, Homo sapiens
cgaggcgctcccggagctgagcgcttctgctctgggcgcgcatggcgcccgcacacggagtctgacctgatgcagacgcaagggggttaatatgaacgcccctctcggtggaatctggctctggctccctctgctcttgacctggctcacccccgaggtcaactcttcatggaggtacatgatagctacaggtggctcctgcagggtgatgtgctataatgaactgggcctggtgagccgtcggcggattctgtgtcagcgatattcaccatgtattcttacccttatctatggagaggctaaggtgctatttgtatgtggtttatcgctcctcgtgcattggcccaactggtgccccttcgttccgtgataacacttgactactgcgttttttgcatgtcataatcgttttactcaggcctttg

SEQ ID NO: 144637 - DNA, 600 bp, Homo sapiens
  misc_feature (1)...(600): n = a,t,c or g
tctaattggtcattacattattattgaccagttttttttacggaaactttcttaaaaactcttgcattgggaaattttagggaaatcactttatcaaaacttggagatagtcattatcgttaaggggtcttcatatactgcataccccccgttagaggatggaatgcagaactcactataccctgtctgcatagaagagggaagaaactcaatcccaaagtaatatggaagcagtctcacatgtattgttggttatatatgatatccagtatttttatttttccttttagtgagattacgtactataggtgaacttttagctcctgcagctccttttgacaagaaatgtggtcgtgaaaattggactgttgcttttgctccagatggttcatactttgcttggtcacaaggacatcgcacagtaaagcttgttccgtggtcccagtgccttcagaacttgtaagactgttacttttctgtattttgtatctggggcnctcaacttgtggcaccccatgagtgggggtatatggcgcatccccctggcgccagggccaaaaagtttttttgccccggggtctgccaacaattttgtcccgg

SEQ ID NO: 144638 - DNA, 3432 bp, Homo sapiens
gggcagtgtctcgtttgcagtcggcgctttaggggaactgtcttcctccgcaggcgcgaggctgggtacagggtctattgtctgtggttgactccgtactttggtctgaggccttcgggagctttcccgaggcagttagcagaagccgcagcggccgcccccgcccgtctcctctgtccctgggcccgggagggaccaacttggcgtcacgcccctcagcggtcgccactctcttctctgttgttgggtccgcatcgtattcccggaatcagacggtgccccatagatggccagctttcccccgagggtcaacgagaaagagatcgtgagattaccgtactattaggtgaacttttagctcctgcagctccttttgacaagaaatgtgggtcgtgaaaattggactgttgctcttgctccagatggttcatactttgcttggtcacaaggacatcgcacagtaaagcttgttcccgtggtcccagtgccttcaagaactttctctttgcatggcaccaagaatgttaccaatttcaagcagtttaaagatttgccaagacaaaatagttgatggtgggtcagaaaaaataaagcctcgtgaacatattatagactgtggagatatagtctggagtcttgcttttgggtcatcagttccagaaaaacagagtcgctgtgtaaatatagaatggcatcgcttcagatttggacaagatcagctacttcttgctacagggttgaacaatgggcgtatcaaaatatgggatgtatatacaggaaaactcctccttaacttggtagatcatactggagtggtcagagatttaacttttgctccagatggaagcttgatcctggtgtcagcttcaagagacaaaactctcagagtatgggacctgagagatgatggaaacatgatgaaagtattgagggggcatcagaattgggtgtacagctgtgcattctctcctgactcttctatgctgtgttcagtcggagccagtaaagcagtggtggcagcaatattggtgtgattgaggttatgctggcaccactcgcacacaggcgcacaatggtgttagctgggcagaaagagtggcatctctggctaccgggctgggggcgacctttaccataggatgaagtaaccttgcattcggctgcaaggtgtactgtacgtacacaggtgctggtcgatgtccactttctgcttttctttctttctttttttcttttttaaagtaatttcccccacagtaaaatacactgactcctgagtaaattgattttccagttttatggaattgggagtctgacaagtgaaaccaatttaatgtaaagtatttggctttcaaatggtttctctgtgctattttttggaattctttcagattccagagatatcttacgtctttgattcaatttaaaatttgtacttattttcttttagaaataatgtattgtgtctgtgcagaaaaaaaaaaaaccaaaaaggattgctttactccaagaggagagattgtcttaggataaacctccaagctcacatttaatataacagactgaagtaaacattagaatcctgtttagagctattctgcacagttaactactgatctttagaatctaaaattgtatatgaacttattcttaaataattgaactgttttatattcaaatgacttatgatcgtggttagtttgggaaaaataagatggttaaattttgatttattgaaatgtaattgtattattttcataaaatagcattttcattttgtaatgtggtttaacatccttgttgtttgccaaagaaatttcatttggctgtgaatattctatttgcttgcagtatctgtttctcttcctaggctcaagttggtgacccaagcctattgtaaacaagtgattatctcaaagggagatgccaatggagtaacaatttgttaaccttacgttttctgtctgtatattttttaaaaatctggtagtttctggaaaaaaaaagagaagggggtttgtagtacttaaccctatttatttccgtatattttagttaattagtttttggaataaatggatttcagtatagctttgtggttaaattgcattgcctttattttatgtttaggcttatttttaaattaacatttaacagaaacatttgaaatagaatttgcatgtctgccttaattaacttaaagactgattttaatctgactatgacactgagcatattctttaaattactcataatttataatgcttaatataatcttaattaaatttagcagttttagtataagatgtgccattttgtcctctgtatgtctgaatgaagctataacattcgcctttttattgcaggttttcctttggaatatggataaatacaccatgatgcggaaactagaaggacatcaccatgatgtggtagcttgtgacttttctcctgatggagcattactggctactgcatcttatgatacttgagtatatatctgggatccacataatggagacattctgatggaatttgggcacctgtttcccccacctactccaatatttgctggaggagcaaatgaccggtgggtacgatctgtatcttttagccatgatggactgcatgttgcaagccttgctgatgataaaatgggtgaggttctggagaattgatgaggattatccagtgcaagttgcacctgtgagcaatggtctttgctgtgccttctctactgatggcagtgttttagctgctgggacacatgacggaagtgtgtatttttgggccactccacggcaggtccctagcctgcaacatttatgtcgcatgtcaatccgaagagtgatgcccacccaagaagttcaggagctgccgattccttccaagcttttggagtttctctcgtatcgtatttagaagattctgccttccctagtagtagggactgacagaatacacttaacacaaacctcaagctttactgacttcaattatctgtttttaaagacgtagaagatttatttaatttgatatgttcttgtactgcattttgatcagttgagcttttaaaatattatttatagacaatagaagtatttctgaacatatcaaatataaatttttttaaagatctaactgtgaaaacatacatacctgtacatatttagatataagctgctatatgttgaatggacccttttgcttttctgatttttagttctgacatgtatatattgcttcagtagagccacaatatgtatctttgctgtaaagtgcaaggaaattttaaattctgggacactgagttagatggtaaatactgacttacgaaagttgaattgggtgaggcgggcaaatcacctgaggtcagcagtttgagactagcctggcaaacatgatgaaaccctgtctctactaaaaaaaaaa

SEQ ID NO: 144639 - DNA, 442 bp, Homo sapiens
  misc_feature (1)...(442): n = a,t,c or g
gttgacggagagagaagagctggcagggagcctggcccgggctattgcaggtggagacgagaagggggcagcccaagtggcagccgtcctggcccagcatcgtgtggccctgagtgttcagcttcaggaggcctgcttcccacctggccccatcaggctgcaggtcacacttgaagacgctgcctctgccgcatccgccgcgtcctctgcacacgttgccctgcaggtgttctcagagctcggtttcccgccagccgtgcaacgctgggtcatcggacggtgcctgtgtgtgcctgagcgcagctttgccttcttaacggggttcggcaggatgggggaccctgcttttcctctaacttgctgttcagttccttcgagaagccccagccacaggaaccttagccttnagcaaccccagaagatggaagggggaattttggaa

SEQ ID NO: 144640 - DNA, 453 bp, Homo sapiens
acgccctgagcctggactctccctcttctcaggttaatttggagtggcccctggagtcagtttcctacaccatccgaggccccacccagcacgagctacagcctccaccaggagggcctggaaccctcagcctgcacttcctcaaccctcaggaagctcagcggtgggcagtcctagtccgaggtgccaccgtggaaggacagaatggtcagtgccctgtaatggatacaattacaatttggaatagccttggccccccagtcctggttggggaagttggatccaccttccccactgctggatgtctgggaaggcttccaggagggagtaggtggagcctggagtagcttggagtacttggagtggctgctggagtcagtctcctacaccatctgaagccccagccagcacaagttgcagcctacaccaggaagccctggaacctcagcctgg

SEQ ID NO: 144641 - DNA, 1383 bp, Homo sapiens
ggaggtggtagcccattggaggtcccgggagcgaagtccagcttccgttaggcgctgggatagtcgcacgctggatgcatctacgtccgccgagcccctggggcgaaaaggccgcgtccgccttcagttgtggccggtgcttcgccccctgacccttcgcccccaaagaccagctctaacgttaatttggagtggcccctggagtcagtttcctacaccatccgaggccccacccagcacgagctacagcctccaccagggagggcctgggaaccctcagcctggcactttcctcaaccctcaggaagctcagcggtggggcagtcctagttccgaggttgccaccgtgggaaggacagaatggcagcaagagtaactcaccaccagccttgggcccagaagcatgccctggcttcctggccaagccccccggaagcctccacactcaagggccctccacctgaggcagatcttcctaggagccctggaaacttgacggagagagaagagctggcagggagcctggcccgggctattgcaggtggagacgagaagggggcagcccaagtggcagccgtcctggcccagcatcgtgtggccctgagttttcagcttcaggaggcctgcttcccacctgggccccatcaggctgcaggtcacacttgaagacgctgcctctgccgcatccgcccgcgtcctctgcacacgttgccctgcaggtccacccccactgcactgttgcagcttttccagggagcaggtttttttcagagctcggttttcccgccagccgtgcaacgctggttcatcggacggtgcttgtgtgtgcctgagcgcagccttgcctcttacggggttcggcagggatggggaccatgctttcctctacttgctgtcagctcctcgagaagccccagccacaggacttagcccttaagaacccccaagaagatggacggggaacttggacgcttgtttcccccatcattgggggctacccccaaggccccacagcccagctgcctccagcctgcccaagtccacttccagcccagctggtcctgtcccttccggcaccttcattcaatgccccagaaacgccctggctgtgagatgtgtagcacccagaggccctgcacttgggacccccttgctgcagcttccacctagcagccaccagaggttacaaggggagagtggcccttccctcacaagtccgacatctccaggcccccactgaactccggggacctctactgactgcttgctgggacagtcaccagggttggggggaagggccacaaaatgaaacccttaaaggacccttatgagccggtctgggtgtttacaaccacaactttactgggagggcggggacccccg

SEQ ID NO: 144642 - DNA, 1017 bp, Homo sapiens
gaggaattcactcactgtacttgttttttacttattttttcctgacctcttaacaaggtgagtccatttaatcatctgtggtataaaatgcttctctagtcacctgttctcattaaacagttgtaagtaagttttaaaagccattattttaattactaaaagttctcaagtgtgtagtattatctgagtattttaattgaaaaattaatcaggcttttaaaaattacttttttattgtattagttggcttttaaattcagattctttatatttgcttgatttttcctggaagttccaagttttatgaatttgtagctgatagtaggttttacttgtgtaccccatctgcactttgatgttgtgtagatcgttttgtgagttatttgaaccgcgtaactcagagaataggtatttcctcatacataaagtgacctcacttttaatcagctcctttatagtatgttgaaaatcactgcgtgtaatgagaggtattgagagtttcttgcacacatgagtgtaaaaggttgagaactagattatacaaagtagtaagtcacagtgcatggcaactttctacaggttggattacaagacttcgtatgtggagtaagataattatattgggaaaaaattattttctctaacttgaagactccagagacacttttcttagtcatgaccagtaatatttttcatatattttgggaaggaaataagcttcctcactataccacccagtttagtggattttattttattttatggtattttaggagacagggcctcccttctgtcgcccagtttggggtgcggtggtgtggtcatagcttactgcagcatcaaactcctgggctcaggtgttcctcctgcctcggcctcccaagtagctggagcctcagccccatgccaccacactcggctaattttaaattttactaatttcatttaatttttgtgggagatgggggtcttgctgtgttgtttaggctggtcctgaactcctggcctcaagcgatt

SEQ ID NO: 144643 - DNA, 424 bp, Homo sapiens
ttttttacacacaaaatatcttttattctgtggaatcaaagctccacacaagtactttataagatccattattttttttttttttttgagacagagtcctactccattgcccagggtggagtgcagtggggcaatcttggctcactgcaacctccatctcctgggttcaagcaattatcctgcctcagcctcccgagtagctggaactacaggtgcgcgcccccatgcccggctaattttgtatttttagtagagatggggtttcactggattaagccaggctagtctcgaactgacctcgtgatccacctgcctcggcctcccaaagtgctgggattacaggtgtgagccaccatgcccagccctaatgtagtatttttaaatgatatgattatacaacaactttctttaaaatctaagttca

SEQ ID NO: 144644 - DNA, 603 bp, Homo sapiens
cggacgcgtgggtggggaggtaggtgacttttccttgcaaatctccctgcctcatctccagaagggggcatacctgcgtggcctctctgcattatttatgcaggaagagacacgaaacagcaatggccacatggtatgggggcctgctggcaccacaagtgaatgaaatcagaaccgtcccactgagtcttccaaaaggcacataatttttttttttctgtcacctgcctttggtgacagggtcaaaggcacagattgaagagaaaatcttgatttgggagaagcatttatatccagatgcctacccttacactccctagcttactttctacataatttgagttttaagagcagggaaatgcataacatggtttttaagtcttaacaagcacttaaattcattagacgcatagaaaataaccatttattattttattatttttatttttattttgagaggaagtctctgtcactcccccctgggcaatggagtaggactctgtctcaaaaaaaaaaaaaataatggatcttataaagtacttgtgtggagctttgattccacagaataaaagatattttgtgtgtagaaaaaaaaaaaaaaaa

SEQ ID NO: 144645 - DNA, 849 bp, Homo sapiens
aatatgacacaccagtatggaaatccttattcttctcacagccaccagctattggcccatccactgactatcccaattccacctgccttatcagtggaaaggggaaatgtatgcccactttttcctcacaccattcccctttctatcaaaaactaccaagagaaacccaggacctaccaaaatagttaagatgtgctccactgtgtctactgccagccaaacctgttgaaggctggcttcaaccctaatctgtgccttcctgtcttctcacaaacgtagtctggatttgctgggctaggatttctagttaacaggccacaggggcaggaaatgttgttccctttccccaatatgtcacataatccccaagagcctcaggccagaagtccacaacatgtaactagttcaaaggatataatttttctctgcattaattctaacatgaggaatactgaaaactcttttaaacatctgaagaatttcagcaattcacaattcaccttactggagtgttacactgtcatccagatttagaaacaggaggatataaaactttttaatggaaaagcctagagaactaaattgcatttttttttttttctgagacagagtctccctctgccccccaggctggagtgcagtggctcgatttctgcccactgcaacctcctcccgggttcaagcgattctcctgccccagcttcccgaatagctgggaccacaggcacacaccaccatgcccggccaatttttatacttttagtaaaagagggttttcaccatgttggccagcctggtctcaaactgctgacctcaggcgatccccctgccccggcctcccaaagtgct

SEQ ID NO: 144646 - DNA, 448 bp, Homo sapiens
  misc_feature (1)...(448): n = a,t,c or g
cgcctgaggtaccgctccggaattttcgggtcgacgattnnnnctggagtgcgccggaaagccgggcgcgctagagctcgcggtaggccatcatgaggaagccacgagcagccgtgggaagtggtcacaggaagcaggcagccagccaggaagggaggcagaagcatgctaagaacaacagtcaggccaagccttctgcctgtgatgagacgtagctgaagtcacagccttccgagggagcctgctaagctggtacgaccaagagaaacgggacctaccatggagaagacgggcagaagatgagatggacctggacaggcgggcatatgctgaagtggcctacactgcaggacctggccagtgcttccctggaggaggtgaatcaactctgggctggcctgggctactattctcgtggccggcggctgcaggaaggagctcggaaggg

SEQ ID NO: 144647 - DNA, 1812 bp, Homo sapiens
ccaagggtaacgtgtgggttaccagctgtccgatgcttcccattgtcccgttcacatatcgataaggcatattctaagtagtagtcctcgaaacgggcatgaaactcagcagcatatttggtgtcataaatgcttgctaggaacatttctcacaggtcagcggtgaaggttcccagactctcagggaggtgtgcataaaaagttcctggtaacaggaaacacccaagtctataaggcccattgtgtagcacccaggggccggcgggctcggattagctccaggaatagggtccgtactgactggctctggctctcatcacccttgtcattgcccttatggtaggggaatgccttgggcatactgctggttgaagttgaagccatgctgtatcaggaactgcacagactttggttctatgacatactcctccatgcacagcagagtgagattgaacacttgagccagataggaatgttcaacccttgtcctgggtgcccgcttgaaagcaggcgaggccccagggaaaaggaataagaacgggtccctggcaagcaatgaacacacggccttgtaacgttcctcaatgcactggttcagcaaactcttcctgtccccaagcccactcagctccgtgtccacagccacgaaattagctgtctttatggctagcaggagggatggccacatctccttgaagttgttgctttgcacatccactacgggaacctggactactagctcctccccagatgttgtgcttttgctgacaccaccgttatgagctccagactacatctcccgccatgcctccatcagccccatgctcccaacgctccaggcttttgcagccggagccgcggtgtacaacggaacttgtagtctcctcgtggactagttcaggcggaaggagcagtcctctgaagcttgaggagcctctagaactatgagcccgaggccttcccctctcccagattttcagaggctttgaaggctacctctgggaaggcggtcaccgtcggaagctgcgggagctgaaactgcgccatcgtcactgtcggcggccatgacaccgctcgtctcccgcctgagtcgtctgtgggtacgctggacttgcggccatcatgaggaagccacgagcagccgtgggaagtggtcacaggaagcaggcagccagccaggaagggaggcagaagcatgctaagaacaacagtcaggccaagccttctgcctgtgatggcagaagatgagatggacctggacaggcgggcatatgctggtcagtacatctcctgagagcagggccactttgcctcgaggcccttgggtctgggggctgtgggccaggtaggggcaggtcaacagtgtcctcatgccaacccctttcccccagtgtgggtctcaaaggtcatgctgcaacagacccaggttgccactgtgatcaactactataccggatggatgccggtgactccaggggaggaagggaagggtcatgggtcagaccccagatgagagcctctactttggggggggtgtagagaaggcttcctctaccaccttcacccttgaccttgtctctttttgcctgcctggggctatagaagcgggcctaccctgcaggacctgggcagggctttcctggaggaaggggatcaacttttgggctggcctgggctactattctcggggacggcggatgcctgaagacacccctgcacgaaacgggacagcacagaggtccttaccccagcacattaggcctcttaatgagtggccactagagtggcgactcgacgcgtgtcgtgagcccc

SEQ ID NO: 144648 - DNA, 652 bp, Homo sapiens
ctcaaacaaagtgagctatttggataacaaagcatacccagtggtctgctagtaaaccagctctttgtgtgggaagggacaaatgaaaaaattcccaaatttgtagcatttgttgacttccatggtgtgaatactcccacatggcgtgatttcaggcttatagttggctcatacacgttcctgcatatttaataattggccctcaccagactgtaggagctagctccaatgcactattgactgtacccttcatagcggggcacaatgttgcccttttaatagtcattttttaaatgggggttaataaactacttttgtgttctttatagtttttttaaggtaattatagaaagtgatgaatatatctggctggggcgcagtggctcacatctgtaatcctagtactttggaagccgaggcgggtggatcacttgaggtcgggagttcgagaccagcctggccaacatggtgaaacctcatctctactaaaaatacaaaaattagccaggcgtcatggtgcgtgcctgtagtcccagctacttgggaggtggaggcaggaaaatcactcgaatccgggagacagaggttgcagtgagctgagattgcactccagcctgggcgacagagggagactccgtcttaaaaaaaaaaa

SEQ ID NO: 144649 - DNA, 1823 bp, Homo sapiens
acgcgtccgagctgtttcacactgtatatgtacattgttttctgtaggaataggataatgatatataggatcatgatattccttctatccatgtgccaaatgggtgtaatgtttatttactgatgctttatgttaccaaaacatacagtaaaaaagtagaaatttatgaaatacttttgataaaaagtttattttgtgcttaccaaaaggaatgctttcacaatagtgtatcagttcttttgttttgttaaagttggaatttatttctgttgccaccatttaggtagtcatggcaagtcctgtttttaaggaccttttggagactggagctttctgttccattaagtcttttgtttatactacaaattgtcacctcacttagttcagatgaaatctgttactctacaaggaaggtgttcatcattaggaggcagctttactaagctggtgctttgcatggtagcaagtgctgccctttatcagcaccctgggtcatagtgtaggctagagttaaggcactggcagacttagggatgctggacagacctgtagttcgttttaagtcatgttcacaggaatttctacaataataaacccatcatctccataggtcagatcgaagtgcattccaatgctaaatagaagttatgagtgggtttaacaattttagatgattcagcttttgttccattactgttgaactatatgaactattccattactgcagagatttaagtatctgttttaataagctctttttgttatttaaaggctgcccatgggtttctgcctagtggtaaagctgattgttaccctcctttgaaatcccttctagttctgagatgctttgagggtaactggattcgattttgggatatcttttctcacattcagacttacacttaatggtgttagaaatcaacaaaactcctttttaaaaagaaaagatattaagcctgcctacttctacaatgcattctgttacctatttgaacagtatgtttgtaactatggcaatgaagtcagtagataggaaaccagttattccttctacctttaaaaaaattttggaggaacttggcccaaccaggggactaaagctattatcttgaacagagtccctaaagctagtgctagtttttgccacatctgcaatgattattgtttaatttcaaaagaatcttcaggctttacaatctaggggtggtaaatgagtttccgctatacttgggaaaaggtcagtaggatgtgcatcctagggaagatacaatcgtatatggtaaaggcatttgagttaattttgcattatatgtaggaaccatattatttaaaatttaagtcctattaatgctgaccgatcgtaagagctagtatgttgtaaaacctgccacctgaataaaatgaaaaaaaaagtgtttttttgagacagagtcttgctctgttgcccaggctggagtgcagtggtgtgatcttgggtcactgcaaactccgcctcccaggttcacgccattctcctgcctcagcctcccgagtagctgggaccacaggtgcccaccaccacgcccgcctaattttgtttttttttgtatttttagtagagacaagatttcaccatgttggccaggctggtctcaaactcctgacttcaggtgatccgcctaccttggcctccaaaagtgctgggattacaggcatgagctactgcacccggcctaaccaggctggagtgcagtggtgggatctcggctcactgcaagctccgcctcccagattcacgccattctcctgcctcagcctccccagcagctgggactacaggcact

SEQ ID NO: 144650 - DNA, 481 bp, Homo sapiens
  misc_feature (1)...(481): n = a,t,c or g
nnnnnnnnnnnnnnnnnnnnnnnnnnnnnnnnnnnnnnnnnnnnnnnnnnnnnnnnnnnnnnnnnnnnnnnnnnnnnnnnnnnnnnnnnnnnnnnnnnnnnnnnnnnnnnnnnnnnnnnnnnnnnnnnnnnnnnnnnnnnnnnnnnnnnnnnnnnnnnnnnnnnnnnnnnnnnnnnnnnnnnnnnnnnnnnnnnnnnnnnnnnnnnnnnnnnnngttggaagttaaaagaaaaaaaaggaattagaaaaaggaaacatggactaaatccaaagtagcaggaggggaaacaataaagatgagagcaaaaattttttaaacgacaaatacaaaactaatgaagaaaaacaaaaccagaagtttggtctctgagaatttcaataaaattggcaaagctttagctagattaagaaaaaaagagaagacaccaattaccaaagtcagaaatgaaaccgaggatattaccactaattttattgaaaa

SEQ ID NO: 144651 - DNA, 1835 bp, Homo sapiens
ctgtgggcgcagagggggctccgtacggaggagcgacgggttgcctgagtgtaggccgttggaagggcagggagcagtggtgggttagcgatgagagggcgccctcggtgggcggaaatggatcgtataggggcgcagcggggataggtttgtgcggggaagatgccgagccgttgttccggaaaagccgggagaagttgagcttgtgcaagaggggtattatggagcctcagggagcgtcggggcagcttgagggttgttttgccaggcgcagagggccgaagttggggcgaggggatttggggttgatcgtggtttgctggggttccccgcaacctccagcgttggaaagcatgcccaggacctcctgtggtgacggttccccgcccttaatttgggtgtcagctgcccttcctccctccatccgtgggattcagcagcagcacgtgagagcccgcgccaggatctgactctgaggagccctctgcctcttgtctagaggaagactttcccccttggtgggaaggaaagggcctaggccaaatgtgcttctaaaccagacttagcccaaaaccttgaaactttagaagttaaaaaataatcctaattattttgtttctctttgtgtttctattgcggccttcctttggaagggttatggggaaaacaaagggattgcagggtaactcatacaaggccaaattacaaatgtgaaaggccctatgatctaagaaaaatatggcattctacatcctgtaatccaaaataaaatccgcatttaataaaacagcattgattataaaataaatgtaaagaactccaacaggccgggcgcagtggctcacacctgtaatcctagcactttgggaagccaaggcaggaggatcacttgagctaaggagttcgagaccagcctgggcaatatagtattatttatatatactattatatattatatctaatatatataactgttaaaatatatattttaaaaatataactccaacaagtcctgatttttctcatgctttgtgtttagtatcagattccttcaaaaaggaatgccctttctcattcagccctggcactgaagacacgattcatacccacctgttaaggggcaaaggaaccaagctgcagagagtccacagggttactcatggtcattttcaatgactgacacttggtccactgtgttaaagtacaggattcacacaagaccaagcagctatttcgctgggagagatcgctgatgcagccagaggtgatggttgggaaggcagaagactggttcctggtggagcccagtttttgtcttcctggtaaccaggctggatccagagagctgcagcaagttaaatgtatttagctagatattgccgtgtaataaaccaccctggaactccatggcatgcactactaagcatttatcacgctcccaggcttacagatcagctggggctttcatacattggacgggggaggctggagtaggctctgctctactttctcttgctcttcagaagccatgggctaaccagggcatattcttcccatgtggtggcagaagccagagaggggtgagcagaaacacgagagtttgggttcaggctcggaactggtactgagtgactcccacccaccgggtactttggatgagaactgcacccaggccagcattagcagctagctcagcggccagcaccctctgctgttggctctcctgtggctgcacaccagtcagccaggtctgatgacccagatggcaaccactgcaactgaagtggttgtgggctatgctgtcgggcacaccctgagttacagtgagaacatac

SEQ ID NO: 144652 - DNA, 1674 bp, Homo sapiens
atgattgtatatccagaaaaccccattgtctcagcccaaaatctccttaagctgataagcaacttcagcaaagtctcaagatacaaaatcaatgtacaaaaatcacaagcattcttatacaccgataacagacaaacggagagccaaatcatgagtgaactcccattcacaattgcttcaaagagaataaaatacttaggaatccaacttacaagggacgtgaaggacctcttcaaggagaactacaaaccactgctcaatgaaacaaaagaggatacaaacaaatggaagaacattccatgctcatgggtaggaagaatcaatatcgtgaaaatggccatactgcccaagaattggaaaaaaactactttaaagttcatatggaaccaaaaaagagcccgcattgccaagtcaatcctaagccaaaagaacaaagctggaggcatcacgctacctgacttcaaactatactacaaggctacagtaaccaaaacagcatggtactggtaccaaaacagagatatagatcaatggaacagaacagagccctcaaaaataacgccgcacatctacaactatctgatctttgacaaacctgagaaaaacaagcaatggggaaaggattccctatttaataaatggtgctgggaaaactggctagccatatggagaaagctgaaactggatcccttccttacaccttacacaaaaattaattcaagatggattaaagacttaaacgttagacctaaaaccataaaaaccctagaagaaaacctaggcattaccattcaggacataggcatgggcaaggacttcatgtctaaaacaccaaaagcaatggcaactaaagccaaaattgacaaatgggatctaattaaactaaagagcttctgcacagcaaaagaaactaccatcagactcgcccccctgaccgtaaagaggcccggctgtgtcgtgaaaggggccgcaacgcgcagagcgctggttgacggccgggactccattttgttcgccgttactctgcgcgtaagtcgcttgtccgtggcttctctgagaagaaaagttgaaaaagggcagtgggaagagatgcggcccctggacatcgtcgagctggcggaaccggaggaagtggaggtgctggagcccgaggaggatttcgagcagtttctgctcccggtcatcaacgagatgcgcgaggacatcgcgtcgctgacgcgcgagcacgggcgggcgtacctgcggaaccggagcaagctgtgggagatggacaatatgctcatccagatcaaaacgcaggtggaggcctcggaggagagcgccctcaaccacctccagaacccgggcgacgcggccgagggccgggcggccaagaggtgcgagaaggccgaggagaaggccaaggagattgcgaagatggcagagatgctggtggagctggtccggcggatagagaagagcgagtcgtcgtgagcgcggtcggcggtttccagccaatggattctggtcaactggtggagattggctgacaccctggagaagccgaaaccagagagccttttgttttctcttttttcctgtctatgctctgtctcacttaacactacgttttctgctatggtctgtggttgatgacctcaatatgagtttcgattgttaacgtgaaaaaaaaaa

SEQ ID NO: 144653 - DNA, 526 bp, Homo sapiens
ttttttttttttttgttcgccgttactctgcgcgtaagtcgcttgtccgtggcttctctgagaagaaaagttgaaaaagggtaaaagttttcaggaatattcgggctctctattgctaagcatagcgagtgtcggttttctctctccaacagacatcgctattgcggttccgaggcagtgggaagagatgcggcccctggacatcgtctagctggcggaaccggaggaagtggaggtgctggagcccgaggaggatttcgagcagtttctgctcccggtcatcaacgagatgcgcgaggacatcgtgtcgctgacgcgcgagcacggggcgggcgtacctgcggaaccggagcaagcttttggagattggacaatatgctcattccagatcaaaacgcaggtggaggcctcggaggagagcgccctcaaccaccctccaaaccccggcgaaacccgccgagggcccgggcggccaagaggtgcgagaaggccgaggagaaggcccgggaattgcaaaaagccaaaa

SEQ ID NO: 144654 - DNA, 1694 bp, Homo sapiens
ccctccagggacctctgcttccacccacatatgtccacttagtcacccacacttgacacagttcctggagtaccctcttcccccaaccccagacctgctttcagagcaaaactcaagtccctcttcctccgtgaagcttctccctcagctgagcagtgatcacttactcactcttaaccccaatccgctgactgggtggggacagcacgtccagccttcccacctctcctgcaggcttctagacggagtttcaaaaactgatgagcctcgatccagggcttgaaagaagccagggtgtaatcttgttcatgcatgcgtccccagagcctcgcccagtgcctgggcacattagtaggcactcaataaatgctgaatgggtgaatagttgaatgataggtgctcaataaatgaatgaatgggccttcccttcttcaggctatttcccaccattagtcttgcccacctttctagggtggggttgggccaccatttaaacacggggtgggggtgaggggcccctgcaattcacggtgcaatattcaccagttttgccctctgcctcataaaggcaaacctggcttttgattaccatgtgtggatgtttcagtgtcctttcttctctgtccctggggatggggtggtctgtgaatatgtgacatttctgcagttcagtatccgaagttttctcttgggggtaggggctcctgggcggccagatgaatgggtccctgggaacccagacctcagatgaggacttaatgtcttcttcctctcaagccaaattcgcctccacccactccctctgaagaactgggcatttgccaaagtaaccactggaagtcatctaatggccctccccctccccaggtttcccacagctttcaggggacagtaggcaagaggacacccccccccaccacctcagtggaacacaccattctccccccctcaacagcacacttagtgcaggcaagacttgacccttgaccccgttcccagcccttccctaccttgggacaggaaggaagtaatgcaccttctcttgctgattatttatttgtttggagagacagaaatgtaaaagtgtatctagaaatatctatatctctatatatttttaacttgactctttgggaatcccctgggggtgggggtgagggggtaagtttagggttttcgcgggagggggaggagacatgggagcctgggaactccttgttctccccctctgctgccctctcccccaacccccttaaagccagttgggtaggaagggaatggtatttgtatggggggagggaaggctggaaatggaaaaatctggattctctccctcttcccccattctcccagagggagggaggtggtgaggaagagggaagggaggggcaggatgggcccatggaggtgcccccaccccccacacctaacaatcaccccacactccctggggctcttccctgggtccctggggcagggcgagtcccaagtgtgaggctgttgatttgttttcaatatttccttttcgtgctgtatggtgatgctttcttagtattctacacaataagaaaagacaaagtcctcgagattcttatgagttttgtttgaaaactctttcactatatttgttgtaaagaggtttactattaaaagaaaaagaatacatgtttctgataaaaaaaaaaaaaaagtcg

SEQ ID NO: 144655 - DNA, 386 bp, Homo sapiens
ggctcggaagtacgccagggtccggccacgcgtccgccgtgccccacccccttcctcccccttagccaatggagatcttcgtggatgatgaggcgaacttgacgctgcatggggtgcaacagtactacctgaaactgaaggacaacgagaagaaccggaagctctttgaccttctggatgtccttgagttcaaccagggggtgatctttgtgaagtctgtgcagcggtgcattgccttggcccagctactagtggagcagaacttcccagccattgccatccaccgtgggatgccccaggaggagagtttaaagattttcaacgacgaattcttgtggctaccaacctatttgggcgaggcatggacatcgagcgggtgaacattg

SEQ ID NO: 144656 - DNA, 945 bp, Homo sapiens
  misc_feature (1)...(945): n = a,t,c or g
gaggctgcagtgacttgcgattgcaccactgcactccagtctgggggacagagtgagaccccatctcaaaaaagtgtttaattaatatacttgtgagtgggtctatttgcatttaaaactgctttctagaattaggatagctcccttaggtttaatgttttggtgagcaggaatatcagttacccctccagatcttaattctagttttttatcactttttcatgaggtgatctcatcctcatctcctagcatgtctcggcaattttgatttctgaactttgtgctacctcagaggccagcttccttagggaaaaatcagtgctgaaataaagttatatttccttttctgctctaaatatatagtgggggaataagagaaatgaagaggaattcctgagaacgtaattactagaaactcccctctcccacgtaatgtctctcacacaccatggacccctattcccccaatttgcgaccccccaccccaccccacaacaggtgggtgatctttgtgaagtctgtgcagcggtgcattgccttggcccagcttactagtgggagcaggaacttcccagccattggccatccaccgtggggatggccccagggagggaggagggttttttcgggtattcaggcagttttaaaggtttttcaacggacgaattttttgtgggttaccaacctattttgggccgaggcatgggacattcgaggcgggtgaacattgcttttaattatggacatgcctggagggtttttgacacctacctggcattcggggtgggccagaggcagggccggttttgggcaaccaaggggtttgggttattcacattttgtgttccgatggaggattgatggccaagattccttcaatggatgtggcagggttcgtttttgagggtcaatatttagttnaggttgcntgattgaggataggac

SEQ ID NO: 144657 - DNA, 660 bp, Homo sapiens
ctagccctggctcgaaataagagcctcaacctcaaacacattaaacactttattttggatgaatgtgataagatgcttgaacagctcgacatgcgtcgggatgtccaggaaatttttcgcatgaccccccacgagaagcaggtcatgatgttcagtgctaccttgagcaaagagatccgtccagtctgccgcaagttcagtgcaagatccaatggagatcttcgtggatgatgagacgaagttgacgctgcatgggttgcagcaggtactacgtgaaactgaaggacaacgagaagaaccggaagctctttgaccttctggatgtccttgagttcaaccaggtggtgatctttttgaagtctgtgcagcggtgcattgccttggcccagctactagtgggagcagaacttcccagccattgccatccaccgtggggatgccccagggaggagaggctttcttcggtattcagcagttttaaagattttcaacgacgaattcttgtggctaccaacctatttggccgaggcatggacattcgagcgggtgaacatttgcttttaattatgacatgccttgaggatttttgacacctacctgcatcgggtggccagagcaggccggtttggcaccaagggcttggctatcacatttgtgtcc

SEQ ID NO: 144658 - DNA, 454 bp, Homo sapiens
  misc_feature (1)...(454): n = a,t,c or g
cggcacgaggctctgtctaactccatggcacagctaatgcacctcatcataaaaacactnnnnnnnnnnnnnnnnnnnnnnnnnnnnnnnnnnnnnnnnnnnnnnnnnnnnnnnnnnnnnnnnnnnnnnnnnnnnnnnnngccaaccctgcctgacacgatactgagacactcgatgtacaaaccagtaggagacgaccagttgacgactctgcaaagaacccttccgtcctgggagcttccggcccaactggcatctggctaacgtggtggagaacattgaacgcctccagctggtgtcacacactgagattgatagaagaggattcatctctcaactaatattcaataatcatatttcattccgagtcatatcgatataattaactttatataatctactccataaactaatccttacttaaactctgtaaattatgacatagctaatatcg

SEQ ID NO: 144659 - DNA, 1360 bp, Homo sapiens
tgtgtgtgtgtgtgtgtgtgtgtgtgtgtgtgtgagacagagtcttgctccgttgcccaggctggagggcagtgtctcgatcttgactcactgcaatctccgcctcctgggtttaagtgattctcctgcctcagcctccagaggagctgggactacaggtatgtgccaccacacctggctaatgttcttatttttagtagagacgggatttcgccatgttggccaggctggtctcgaactccagacctcatgatccacccgctttgcccttcccaaagtgttgggattacaggtgtgaaccaccatgcccggccgtgacactcgttttatagcatcaggcttggtgaccagaatgtcatggcttctgggcagaggccagcttccatgccgtgtcctgtcttcctagtgcagatgtccccagctgcagtgagtaccagtgtgagggaatgggctccagactcccagaggggccacagggatggccacgccaagctctggggagtagccgattccccagcacctgcctgcccatgcacctttggggtgactcatgagacagggtggggctcccacctcccctctcccaaaaggcaatcagctataaaggctctcagaggcccacccagccccaggtcatcaaacaagcccccagttccatggcaaccattatacccattcatcaaggagatgtagagggaggtgcttcctggttcaccccaccctcagcagagacagaccccagatctgggcccaggactttgtgcagggaggggaaatgcaggtgactcagcccctattcctccatcaaaccaggcttgaagatgggttaaatcagagattttcattccacaaaagagaaattttaatggggtcagaacattgatcttctaatatttgaaagcctgttaactaggagagagagagcaaacgattttgttgtagaaggacccacccagctctgactggtttaaagcatcatgaatgcgaatttgaactccagaaaagcagagcttcctaacaatgggacttccacagcaatgggatctgcttcctctttcagtgtgtgccttttctatgagcgagagactcctaggaaagcagcagcccattaggaaaacgtgtgggaactcactcgcaggttctttattttttttgagatggagttttgctcttgttgcccaggctggagcacaatggtgccatctcggctccctgcaacctgcgcaccatgagttcaagtgattctccagcgccctctcccgagtggctgcgactacaggcatccaccaccatgcccggccaattttttctacttttagtagagatggggttccatcacgttgtccaggctggccgagga

SEQ ID NO: 144660 - DNA, 380 bp, Homo sapiens
  misc_feature (1)...(380): n = a,t,c or g
cnnnnnnnnnnnnnnnnnnnnnnnnnnnnnnnnnnnnnnnnnnnnnnnnnnnnnnnnnnnnnnnnnnnnnnnnnnnnnnnnnnnnnnnnnnnnnnnnnnnnnnnnnnnnnnnnnnnnnnnnnnnnnnnnnnnnnnnnnnnnnnnnnnnnnnnnnnnnnnnnagctggtttagaagactttaagatgcttctcagctcaaaaaagacaaaaaaattaaagaaaaatgaaaaattcctatcctgccccttttgccccccgccccatctacagctcaccaccacctccccaggagctcagtgaggaggtagggatatggccgcaatttggtgaggggctctcagcatccctcctccagtacctgatctcttgcctctgggacg

SEQ ID NO: 144661 - DNA, 376 bp, Homo sapiens
gtcgacaaagccctcacttggtttcccttccgacatcttctggtgtgaagctttaaaatatgttgctattgataatataaaataatatttgtactagaaacatgcatgtataaagttatttgccgatttgcaaacaacacaatgcacctttcctacactgttattcacaaggaccctggaaaaggtagaggcatcattagcccaaatttattttattttatttattttgagatggagttttgctcttgatgcccaggctggagtgcaatggcacgcgcgatcttggctcaccgcaacctccacctcccgggttcaagcaattctcctgcctcagcctcctgagtagctgagattacaggcatgtgcaccatgccgt

SEQ ID NO: 144662 - DNA, 437 bp, Homo sapiens
accaaaccctgtcctctgcaatgtgaaatgtgctttgaagtcctctcaccctgaggcttgcccgccttctagctggtgaaagaagctgggggctagtggacccggacacacagagcttcaacatgccatgtggcttaccaagaagacggacttttacatctacgaaatacgaacgaccctgaaaactttcccaaatcctatcactatcaccgtatcatcattggaggtgcctcaggatgacaggcgactgctcgagaggcaacccattatgacggcgatgtgatagacctggactttgtcactcccaccccatcttggaactacatggggtctggaaggaacatgtgagaacggagattcgctaccggctgacctgatgcatcaatcaccattggtaggacaacccactgaagactttcgaaatactggagggcacg

SEQ ID NO: 144663 - DNA, 860 bp, Homo sapiens
  misc_feature (1)...(860): n = a,t,c or g
actagtgccatgcttttgtgagctcttggtatggcccatattactttgttttttttttttttattgttgttttgtgatagtcttgctctgtcgcccaggctgcagtgcagtggcacaatctcagctcactgcaacctcgtgcctcctgggttcaagcaattctcctgtctcagcctcctgggtagctgggactacaggtgcatgccaccatgccttggctaacttttgtatttttagtagagacagggtttcaccacgttggtcaggctggtctcgaactcctaacctcaggtgatccacctgccttggcctcccaaagtgctgagattacaggcgtgagcccccgcgcctgggccctgtttgtttttttaacatgatttttctctaagcttaaataccacaaggccaaagagaaatggtcataatttaaaccattattatattgttgagggatccctagctattattatagcaaagtgggaaaaaacgtgtttattcctattgaagttatgtaatgatcccgacattaatggggaatatagaggagtcctaattaattgggtataatttcacaaagcgggaatgggtattccttgggaggagttaaaggacattctctttacgtaagtgtaaacccaaggggcatttttctttattcctgccttctaattccttcctagcccaggtgaattaatttcctctttttccnctgggtaaatgtgatgaatggggaattgttttattacatttgaagttgacttgaagtgaccttttgtgctttaagtgcaggttgacactgaaaaaaaaacaaaacactgaatttttcacacctatgtctgcattaaaggctgttttactac

SEQ ID NO: 144664 - DNA, 835 bp, Homo sapiens
gagtaaacaaatacacattgtaggggaaggtgctgaaatgttaaagttaacattcccaaatagaaaatgggatagtttgcaggttactttctgaacttcacttcgtgttaattttcacctaccagttggtgggtagaacaacattaaacacattttactttagtacccttctgttcttatctggagcatggtaatcccaagtacagacagaaaaagaagaagcagatatgcgacttaaaaatgaaaataacataacaacacggattattgtgatagatcctgtacctttttaaagactctgacattccacttaggagtaagatggaaaagtcccttgttctaaaatttgaaaatgataaaaataagtcatattaatggaaattaaagaaagaatatgtccattgttaggttatgtaaagggtacacatcttcacttctttcacatcgttttttgattttaaatttaatgttaactgaaatttttaaaatgacggatttaatattcatgcctagcagtttatttttaatgtgaataaaattaacagtaaaactatcataaaagataggtgggggccgggcacggtgggcttcacacctgtaataccccagcactttgggaggccacagcaggcgaatcacctgaggtcaggagttcgagaccagccctgggcaacagggtgaaaccccatctctactaaaaatacaaaaataagctggacatggtcgtgggcacctgtaaacccagctactcaggaggctgagacaggagaatcacttgaacttgggaggtggaggttgcagcgagccaagatcacgccattgcaccccagcctgg

SEQ ID NO: 144665 - DNA, 457 bp, Homo sapiens
  misc_feature (1)...(457): n = a,t,c or g
gagatgagctnnnnnnnnnnnnnnnnnnnnnnnnnnnnnnnnnnnnnnnnnnnnnnnnnnnnnnnnnnnnnnnnnnnnnnnnnnnnnnnnnnnnnnnnnnnnnnnnnnnnnnnnnnnnnnnnnnnnnnnnnnnnnnnnnnnnnnnnnnnnnnnnnnnnnnnnnnnnnnnnnnnnnnnnnnnnnnnnnnnnnnnnnnnnnnnnnnnnnnnnnnnnnnnnnnnnnnntcagttaatccaaaacagaaaatatcaagtattggttagttcatggtgaattggaaactgctctgcatcgctggaggaatagtaaaatggcatattaactggggaaaccagttccttataaacttacgcacacaattaccttacgattcagcaatcccattcattgggtgcataccttttaaatatgaatgctggacctacaataaggatttgttcacccacgtttatatcn

SEQ ID NO: 144666 - DNA, 339 bp, Homo sapiens
atgggccgggcatggtggctcatgcctgtaatcccagcactttgggaggctgaggcgggtggatcacctgagagcccaagcttcctctgtgcccaacagccactttctagaaaccggcaacctctgtccccgtcatcgtctgtgtttgttcctccgcaaagcccgagcttcctctgtgcccagccacctacacagaacatcatgctggtcagccacattggtggtatcatgctgctcgagtctggtgagctggaagtagcaaatatctcagagaggagagatcaacccacactaactcaggacctcgcgaccttgttgaaatgtccagggatccagtga

SEQ ID NO: 144667 - DNA, 432 bp, Homo sapiens
ttttttagctgtacctacgcttttctaacaagtcacaagggagcgtcaggagggcagagggccgggagcagggctgccagggatattcctgtgatgagggacgtggcgacatcagcggtgatggcagccactggccatgtgtcactctgcacacttgaaacgtggccaatgcaatggaggaactcagttaatttgattttaatttaaacagccccacgtgggccgggcatggtggctcatgcctgtaatcccagcactttgggaggctgagaagggtggatcacttgaggtcaggaatttgagaccaacctggctaacacagcaaaactccatttctacttaaaatacaaaaattagctgggcatggtggcgcacgtctgaaatcccagctgctcgggaggctgaggcaggagaattgcttgaactcgggag

SEQ ID NO: 144668 - DNA, 439 bp, Homo sapiens
  misc_feature (1)...(439): n = a,t,c or g
ngacaaactttttacttctctcccccttggtctccacatctgtaaaatgggaataaancaacactaagtccagaggctgatgtgaacatcataaagctcatcctccaccagtctccccatatcaatcaatggcaccatctttcacccaaaggctgaggccaaaagagcaggtgtcacccacaatgcctttctctcttgtatcaactccaatccatctcaccagcggcaccccggctggtctccctgcttctattcctggccctctgcagtccccgtggccctccacaaccacagggacacactgacaaaatacaaggtccatctcctgcacgccctgctcagaactctcctgtggcttcctcatgagccacgtcctcaccgtggcctgccagacctccttggaccccactgcacagctctcttcctgccctggccgctg

SEQ ID NO: 144669 - DNA, 561 bp, Homo sapiens
agaaaaaaattaagttgggccatgggtggtgggcaccctgtaatccccagctacttcagggaggctgaggcagggagaattacttgaaccccaggaggcgggacgttgcagtgagccgagctttgtgccattgcactcccagccctgggcgacaagagcaaaactcttcaaaaaacaaaacaaaacaaaaaaacccctggcccttggtttcttccaagtttctagaggtatcagcttcctagcagcttatgaacacatatgcttgcttggccaggcaaggtggtgtgtgcctgtaatcccagcactttgggaggccaaggcaggtggatcacttgcagtcaggagttcaagaccatgcctgtccaacgtggtgaaaccccatctctactaaaaatacaaaaattagccaggggtggtggtgcacgtctgtaatcccagctactcaggaggctgaggcaggagaatcacttgaacccgggaggtggaggttgcaattgagccaatatgacaccgctgcagtccagcctgggccatagagtgagactctgtctcaaaaaaggg

SEQ ID NO: 144670 - DNA, 963 bp, Homo sapiens
ttttttttttttgggaaccagagaaagcgtttattgaggagtttgagggtgtgagctcctcctcctccccctcccagctgggtcagcagaggaaacaggatgctggggttttgcactcttggaattcagctctcaaaaacctgaatgttcctcctcccccgccaggaggctggtgcctctggggcaccgctgccctttcctcttcccaggcaggcaggggaagcggcattgggagagggggcggggagtcggggggcacaggtgttcctcagcagagggtgaagcgccgggcggaattgtttcatgcgcgtgaggcccaggttgccgcagcagcggggccaaggggctaggccggctccgtgcttccagtctccaggctccagctgcggcgctcatccaggcagctcctggtgtcaggtgaacaggcttgggtccatatttgagtgcggtgcatgctgggcccgcagccgcagcagctgccctgccaggctgcctgtcctgcgcctgcatctcccgcagctcccgtcggagccactccaagggcggagtccattgaattccgaaaaccacagatgtcccccaggtccccctggtccccagtttggcttggggccccttggcccaggccctggctctggaccctgggctgtcccactcccaaaatatgagggccgccgagtctgcagctgcagcttggctgtcagtgccttcacagagtcccaggctctccccctcctcatcctcctcgtcctcttcacccactgcctggaatttcagtagccccagggacatggcaggtttgaggtgagtgacagggcagggctgcagctctgagattagggaaaggctggcagtattgcccagggagaggtggcagaagttgagggtgagaagagcgtgccagggagtgtgtggtggtcaatgttcaaggtgggttaggggggctgaatgtgccagggtgag

SEQ ID NO: 144671 - DNA, 1150 bp, Homo sapiens
gctattggcctggtcaacgtggtgtggtggctggcctggtgcctgtggaaccagcggcggcttgcctcacgtgcgcaagtgcgtggtggtggtcttgctgctgcaggggctgtccctgctcaaggctgcttgacttcccaccgctcttctgggtcctggatgcccatgccatttggcacatcagcaccatccctgtccgacgtgctctttttcagctttctggaagatgacagcctgtacctgctgaaggaatcagaggacaagttcaagctggactgaagaccttgggagcgagtctgccccagtggggattcctgcccccgccctgctgggcctcccttctcccctcaacccttgagatgattttctcttttcaacttcttgaactcggacatgaaggatgtgggcccagaatcatgtggccagcccaccccctgttggaaatcaccaaaattggagtctgttctagggaaggcctcccagcatctgggactcgagagtgcggcagcccctctacctcctggagctgaactggggtggaactgagtgtgttcttagctctaccgggaggacagctgcctgtttcctccccaccagcctcctccccacatccccagctgcctggctgggtcctgaagccctctgtctacctgggagaccagggaccacaggccttatggatacagggggtccccttctgttaccaccccccaccctcctccaggacaccactaggtggggctggatgcttgttctttggccagccaaggttcacggcgattctccccatgggatcttgagggaccaagctgctgggattgggaaggagtttcaccctgaccgttgccctagccaggttcccaggaggcctcaccatactccctttcagggccagggctccagcaagcccagggcaaggatcctgtgctgctgtctggttgagagcctgccaccgtgtgtcgggagtgtgggccaggctgagtgcataggtgacagggccgtgagcatgggcctgggtgtgtgtgagctcaggcctaggtgccccatgtggagacgggtgttgtcggggaagaggtgtggcttcaaagtgttgtgtgtgcagggggtgggtgtgttagcgtgggttaagggaacgtgtgtgcgcgtgctg

SEQ ID NO: 144672 - DNA, 320 bp, Homo sapiens
ttttagtagagatggggtttcaccagcctgggcaacatggtgagacaccatctctacaaaaaatttaaaacaaaaaaattagctggacatggtggcacatgcctgtagtcctagctactcaggaggctgagtcaagaggatggcttaagcctcggaggtcgaggcttcagtgaaccaggattgtgtcactgcactccagcctgaacaacagagcaaggcctcaaaaaataataaataatagcacataacaattaaccaccttttgaattgctctaattttatttttgagggtagttaacaaatatttagctttcatttgg

SEQ ID NO: 144673 - DNA, 503 bp, Homo sapiens
  misc_feature (1)...(503): n = a,t,c or g
gtctttaagtgtgaagtgcctccgttagtttaacagttcgcttcgaaaggcccgagggctgggcggggggagttctggggtaggaagtggtcccgggagattttggatggaaaagtcaggaggattgacagcagacttgcagaattacatagagaaattaggaacccccaaatttcatgtcaattgatctattccccctctttgtttcttggggcatttttccnnnnnnnnnnnngggtttttttttacccccccttaactttaagcccctaaaaaccaatttaaannnnnnnnnnattgaaaaggggggccgtgaaaaaagccaaaaccccccaagcccccctgggaaccaactacttttggccccccgcttttattcccccgaggggaatttggtttttaattgccccttgtggctgggtttaagaagaggggggaccctctggggggccatggccatggtgcccccttggaaaaactcacggggagggtggaaagccctt

SEQ ID NO: 144674 - DNA, 741 bp, Homo sapiens
  misc_feature (1)...(741): n = a,t,c or g
cggcacgaggataattccttttagtttagctactattttaggggattttttttagaggtaactcactatgaaatagttctccttaatgcaaatatgttggttctgctatagttccatcctgttcaaaagtcaggatgaatatgaagagtggtgtttccttttgagcaattcttcatccttaagtcagcatgattataataaaaatagaaccctcagtgtaactctaattcctttttactattccagtgtgatctctgaacttaaattacttcatctaaatattcagatactttatttcagaagaggtcatagttaatttattctttttttcaatatactggtcatccattctcaaccttgtatttatttcttgctttcaaattggcactgattctgcctgctttatttttagcgctatcacaggacccagagcctatgcccttttaaacttaccacaaaagcagaagattaattcaatttaagatgatactctcatttgttacgtccnnnnnnnnnnnnngggaaaggggatttttttttggcccccatccgggggggcgggggaaaaaactgggttaatggggccccccatttccggggttaaaggaattttcccccctaaggcccccttaagaggggggattaagggggcccccccccttgcccgggtttttttgggttttttaagaaaaggggggtttaaacatgggggccaagggggccaaaaccccggggggggga

SEQ ID NO: 144675 - DNA, 778 bp, Homo sapiens
caagtaaatgttgaaggaatttgacattaccagatcagccctacaagatatggtaaaaggagttctaaatcttcaaacaaaaagttgatatgcaccagaatagaacctcttgaaagcatgcaacttacaggactgccaggcacggtgggtcacaccttgtaatcccagcactttgggaggctgtggtgggcggataatgaggtcaggagttcaagaccagtctgaccaacatggtgaaacccatctctactaaaaatacaaaaattagccagacatggtggtgggcacctgtaatcccagctactcaggaggctgaggcaggagaattgcttaaacccaggaggttggaggttgcagttagcccaagattgcaccactgtactccagcctgggcaacagagcgagactcttgcctgccatccccccactcccccctccaaaaaaaaacttcacaggacctattaagcaatagcgcagtaaagaaaacaaagtactaggtaacaatcaacatgatgactggaatagtaccttatatctcaatattaatgttgaatgtaaatggtctaagtgctcacttgaaagaagaagattggcagaatggataaaaattcacaaaccaaatatctgctgtcttcaagagattcatctaacacataaggattcctatagactcaacgtaaaagagtggaaaaagatatttcacacaaatggaaactcaaagtgagcaggagtagctattgttatgtcagagaaaacagattttaaagcaacaacagtt

SEQ ID NO: 144676 - DNA, 488 bp, Homo sapiens
  misc_feature (1)...(488): n = a,t,c or g
nnnnnnnnnnnnnnnnnnnnnnnnnnnnnnnnnnnnnnnnnnnnnnnnnnnnnnnnnnnnnnnnnnnnnnnnnnnnnnnnnnnnnnnnnnnnnnnnnnnnnnnnnnnnnnnnnnnnnnnnnnnnnnnnnnnnnnnnnnnnnnnnnnnnnnnnnnnnnnnnnnnnnnnnnnnnnnnnnnnnnnnnnaaaaaggtttggaaaaaacgggttttacccttgtggcccgggtgggttaaaaccccgggccctaaaagaacccccccccttaaccccccaaaggggggggattaccnnnnnnnnnncccccccccaacccaaaaaaacccttttttttggttattggccaaaaaaaagcctttgaattaacccacaggggggtttgaacccttcccaaggcggaaaacctttgggggggttttccctttttggacaattatggaggctgttggaaccgtccccctggggggccttgggggggctatttaaaac

SEQ ID NO: 144677 - DNA, 588 bp, Homo sapiens
ctagtgaggcggaattcctcctgtcatgatctctggcaggaagaacaaaagaaggtaatccacaaagacacagcccttacttagaaattctgacaaagacagcaagacaaatctgctccccactcccacacaccacagacaaacacatctcagggcccctaaagaaggcatccccaccccaccctccgccccaagccatagaatcacagttcagtggaatattctccctggtactagatcaatccctccaccttccttcctacccctttttccttgacaatcccaacactgtccccctgcagcctccctggccctcccaaagcagcatccaccgccaggaagaggcagctgcacagttttagttccacctccagagacctatttcttttcctcagccctcctagtctttcggccgcctagtctctatggtgggccttttattttgtatagggaaagaaagagaaaagggagaggtgggagagatttcctagtgcaatacaaccaaaaaatatttttaaagtcttgaaaaataaacataaagcagccttcttcccccaggcaactaaacagaaagaggtttggttttgt

SEQ ID NO: 144678 - DNA, 2302 bp, Homo sapiens
gggctgagtacccggctcgagacaattcgggcggacccacgcgtccgccaaatcctgtgtattaggataatatccttccccccgggagccttcgctgcaaacctgttctgccgcatgcaaagactgtgaccatggagttttggcagacaagatttggaaaggcagtggaatgaaatctctttgcagtggcctctctccaaatttccaaagatgactgcatagggaccaacactgcctgactttgcagtatctgtgagaaaaacctgaaaattaattcagggtgaaaatgtggagctctcggcctagtgtaaagtatcaagatgtatatttatgggatagatacatgacttagaagaagtagaagaaaattgtccagaaacagtactgaattttagatagaaaaggctcatgcttcctgggagtaggggaattgtctttgccatttaatgtgaatgcataaaattaggggggaaaacccaagtggctaagagctgtgttattcctgggaagaactaccaatctagggcacacgtctctctgaattgttgattatgcgctttatgaagagatttttcaatctcgtgtgctttactttgtgtggtttagaccctctgacctagacttttatttttaaactgaaaaagttggtcttgtctatataattgctgcgttttacataatttattttcccctctcaggacaaattctgtcttgctccatcttacagcttttccatgttctccaagaaaggtgtggaacattttcattaaacagctgttgctgaaggcttcctgccttgacccttcctgcgtgcccgaaatgccacagagaggcaccgaggagagaaaggcttttctcactcgctccccgatgataccgtctctggccattcctgactgaggcagctcactctgaatgggcacctttggagcttttgcccaccacaaggctagtggggtgtttctaacaacacaagtgggacagcttttggcaggcttttcctgaggcctcggcgcttccatcctggacagcaccacttccacatggagctggaatgcaagcaggctgctaattggccttaaaaattctttgtttttttttgagatggagtttcactcttgttgcccaggcttgagtgcagtggcacaatctcggctcaagtgcaacctccgcctcccatgttcaagtgattcttctgcctcagcctcccgagtagctgggattacaggcatgtgccaccacgcccagctaatttttgtatttttagtagagaaggggtttcaccatgttggtcaggcaggtcttgaactcacagcctcaggtgatccacttgccttggcctcccaaagtgctgggattacaggcatgagccactgcacccggccttttttttttttttttgagacagagtttcactcttgttgcccaggctggagtgcaatggcgtgatctcggctcactgcaacctcctcctcctcccaggttcaagcaattctcctgcctcagcctcccgagtacctggtagctgggtttacaggcatgcaccaccgtgcccagctaatttcgtattttttttttttttttttttttttttagtagagaaggggtttctccatgttgctcaggctggtcttgaactcctgacctcatgatcctgatccgcctgcctcggcctcccaaagtgctgggattacaggtgtgagccaccacacccggccaatgtcttttaaaaatatataccttttttttttttttttttgagacagagtctcgctcttgttgcccaggctggagtgcagtggcgcgatctcagctcacggcaacctccgcctcccgggttcaagcgattctcctgcctcagcctctccagtagctgggattacaggcgtgtgccaccatgcctggctaattttgtatttttaggagagacggggtttctccacgttggtcaggctggtctcaaactcctgacctcaagtgatccgcctgccttggactcccaaagtgttgggattaccaggtgtgagccagcgcgcccagacaaaaatgtgtatgtgtgtcgttaaaggctgggtcaagcaaagcagtggaactggagaaagaatgaggaattctacctggctgtgatcaattcgtggtgaacaccactgtgcttggaccagccaagctgatgccttggtttggtttgtttgagacgagtctggctccgtaaccaagctgaggacaatggtgtaatctggctccttgaggctcaacccccgggttcaagcaatttcctgcctagccccgtgatagcgggaaa

SEQ ID NO: 144679 - DNA, 472 bp, Homo sapiens
aagtaactgaatttgcaaaaacatgtgttgctgatgagtcagctgaaaattgtgacaaatcacttcataccctttttggagacaaattatgcacagttgcaactcttcgtgaaacctatggtgaaatggctgactgctgtgcaaaacaagaacctgagagaaatgaatgcttcttgcaacacaaagatgacaacccaaacctcccccgattggtgagaccagaggttgatgtgatgtgcactgcttttcatgacaatgaagagacatttttgaaaaaatacttatatgaaattgccagaagacatccttacttttatgccccggaactccttttctttgctaaaagctcgatgaacttcgggatgaagggaaggcttcgtctgccaaacagagactcaagtgtgccagtctccaaaaatttggagaaagagctttcaaagcatgtagctcgcctgagccagagatttcccaa

SEQ ID NO: 144680 - DNA, 873 bp, Homo sapiens
  misc_feature (1)...(873): n = a,t,c or g
ggcacgagcttttgtcaaccccactcgcctttggcacaatgaagggggtaaccttgatgttcccttctttttctctttagctcggcttattccaggggtgtgtttcgtcgagatgcacacaagagtgaggttgctcatcggtttaaagatttgggagaagaaaatttcaaagccttggtgttgattgcctttgctcagtatcttcagcagtgtccatttgaagatcatgtaaaattagtgaatgaagtaactgaatttgcaaaaacatgtgttgctgatgagtcagctgaaaattgtgacaaatcacttcataccctttttggagacaaattatgcacagttgcaactcttcgtgaaaccctatggggaaattgcttgactgctgtgcaaaacaaagaacctgagagaaatgaaagcttttttgcaaccacaagaaggacaacccaaacctcccccgattgggtgaggaccagaggttggatgtggatgtggcactggctttttcatggacaatggaaggaggacatttttggaaaaaatacttattatggaaattggccaggaaggacatccttactttttatggccccgggaactcctttttcttttgctaaaaagggtattaaagctgctttttacaggaatgttggccaagcttgctggattaaagctggcctgcctgttggccaaagctcggtggaanttccggaatgaagggaaggcttcgtctgccaaacagagactacagtgtgccagtctccaaaaatttggagaaagagctttcaaagcatgggcagtaactcgcctgagccagagatttcccaaagctgagtttgcagaagttttccaagttagtgacagatcttaccaaag

SEQ ID NO: 144681 - DNA, 1454 bp, Homo sapiens
ggagtgcagtgacacaatcatagctcgctgcaatctcaaactcctgggcacaagctttctcccacctcagcctcctgaatagctgggactataagtgtgcgcaactacatccagctgatttctaaaaattttttatagagacaggatctccctttgttgcccaggctaggaaaatactgcttttggtttttagttgatctctttgttaatttttcagcttctcagcccccacctctttaactaaatatcttaattttaccgtgttggggagtcaatgaagtataataaaagttctggggctttaaaaccaggatgagcccaagttcaaacctgagttctgttgctgactatagctatgtgattttagacatcattcacacactctgagccaaggagttttcttcagaaaaatggatatagtaatacctaccttacatagaacaggtgaattcttgttctagttacattagggatatgtagcttaagtgaattgggaagtaattttgacatttgggaattttggcttcattaggttttttcttcaaggtatctgtccacttcatttttcctcaacaaatagaatgaaaaaagaatttctgtactttttaatttactgtaactccttagaccaagatgaaacaaacaaaacatcatcattatttttttaactacaaaataaacatacggattgttaattctttgtatttttcttgcctgttcctgtgggaaaagctgccattttcaatttgaaattagtccgcaaatctataatatagttcttctttaggaaaagcattagaaaattggcatggataagattttgaaaacacctcaaatatgaggtttaatataatactacaaaacttgtgccactttatctgtgtaaaatgatctttttacttttctgttatgtttatgttttaagacagtgtctcgctatgttgcccaggctggaatgcagtggcacaaccacagctcactgaagtcttgacctcccagggctcaagtgatcctcccacctcagccttccaagtagctggggattacagatgcgtaccacaacggttcagcttactttttattttttgtaggaggaaggggttctttcctattttggcttaggctggtcttgagcaactaggttcaaggaatcatcttgccttggcctcccacctaagtgttgggattataggtgtgagctaccacacccagcctgttttaacagcagctatagcaatggttttatattttgttaataagttatctgtattgctatagtaccaagaagagtaaacaaattgtattattatgttaaaatattggttatacaaatagcattcaatactaattattacagcaaaatagtctacaacagttacactggtttactcagtagattaagacaaaaatttttagcctgggtgacaaagtcaagaccccatctctaaaaaata

SEQ ID NO: 144682 - DNA, 644 bp, Homo sapiens
  misc_feature (1)...(644): n = a,t,c or g
gggtaggagggactgaaggtagagtcacatcacatggaggtgggttggctaaggaagttgggaggttgtgttggttgggccaggaggtgggtgtgattttccttcccactctctcctagatcacacgccgctatgcagagttctcctccgctcttgtcagtatcaaccagacaattcctaatgaacggaccatgcaattgctgggacagctgcaggtggaggtggagaattttgtcctccgagtggcagctgagttctcctcaaggaaggagcagcttgtgtttctgatcaacaactatgacatgatgctgggtgtgctgatggtaataggtgctccttctccttgccttcctacccagaaaattcggtttcccccactgctgttagctctgtgagggcagagatgatgcctgtcttgttcagtgttttactcttggagtctggcacagtgtccagcttaagtacaataagtgtggaatgaaggggacatcctgaagtgaaggactgctttccccaaactagacatttccctttgtcttcccttaggagcgggctgcagatgacagcanagaggttgagagcttccagcagctgctcaatgctcggacacaggaattcattgaagagntgctgtctcccccttt

SEQ ID NO: 144683 - DNA, 432 bp, Homo sapiens
aatttccgggtcgacgatttcgtagtggttagagctgaaaggggacagctggagtcaaacaacttatctcaaatatctgggaacgatttcgcgctgaggaagaccctttgggacttgtagctccactccggggaacggactcgccgggactgacagttgccggaagcgggtggtcctgggctccaggaaccactgcaacttggggagttggatatcacttctgatgaattcatcctggatgaagtggatgttcacattcaggcaaatctggaggatgagttagtaaaggaagctcttaaaacgggtgtagatctccgtcactattcaaagcaagttgagctggagctacagcagattgaacagaaatccattcgggattatattcaagagagtgagaatatagcatctctacacagccagatcacagcctgt

SEQ ID NO: 144684 - DNA, 630 bp, Homo sapiens
ttttttttttgtgtctggcccagctgcacacgacctgttccatgctgtcatgggccgtacactaagcatgaccctgaaacacctggattcttatctagctgactgctacgatgccattgctgtttttctctgtatccacattgttctccggttccgtaacattgcagcaaagagggatgttcctgccctggacaggtcactgaattctggtccttgatgcccaacaggccacgaactctcttggtcttgcatgactctgccctgaccttagactcctactgacctggtatcatcaacctttattcccattcatttgctccggaggcagtagtgctgctttttgactcacctttctccaaccactgccccccaacccccacaactagctattgaccattaaactgaatgatgccccactccctcccatccccctccaacattccttgctggctgacctctgattctgattaagcccacaggtactgggaacaggtgcttgccttgctatggccacggtttgaactgatcctggagatgaatgttcagagcgtccgaagcactgacccccagcgcctaggggggttggatactcggccccactatgtgagggagggcaagggtaacaaaggg

SEQ ID NO: 144685 - DNA, 2385 bp, Homo sapiens
  misc_feature (1)...(2385): n = a,t,c or g
gtgcatgggctaccgcttttgaattcccgggtcgacgatttcgtagtggttagagctgaaaggggacagctggagtctaacatcttaactcaaatatctgggaacgatttcgcgctgaggaagaccctttgggacttgtagctccactccggggaacggactcgccgggactgacagttgccggaagtgaggctgcggggaatggccgccgctgcgaccatggcggctgcggcccgggaactggtgttgcgggctgggacctcagatatggaggaggaagagggccccgctggcgggtggtcctgggctccaggaaccacttgcaacttggggagttggatatcacttctgaatgaattcatcctggatgaaagtggatgttcacatttcaggcaaatctggaggatgagttagtaaaggaagctcttaaaaacgggtgtagatctccgtcactattcaaagcaagttgagctggagctacagcagattgaacagaaatccattcgggattatattcaagagagtgagaatatagcatctctacacaaccagatcacagcctgtgatgctgtcctggagcgaatggagcagatgttgggagcttttcagagttgaccctnaggctccatcaagctctgagattccggacactgcaggaacagtcaggagccatgaacattcgacttcgaaatcgccaggcagttcgggggaaacttggggagcttgttgatggtctggtggtgccttctgctctggtcacggcaattctggaggctccagtgacagagcccaggttcttggagcagctacaggagctggatgccaaggcagccgcagtcagagagcaggaagctagaggcacagcagcctgcgcagatgtcagaggcgtgctcgatcggctccgggtcaaggcagtgacgaagatccgagagtttatcctccagaagatttattccttcaggaaacccatgaccaactatcagatcccccagacggccctgctgaagtacaggttcttctatcagtttctgctgggcaatgaacgagcaacagcaaaggagatcagggatgaatatgtggagacgctgagcaagatttacctgtcttactaccgctcttacctggggcggctcatgaaggtgcagtatgaggaagtcgctgagaaagatgatctaatgggtgtggaagatacagcaaagaaaggattcttctcaaagccatcgctccgcagcaggaacaccattttcaccctaggaacccgcggctctgtcatctcccccactgaacttgaggcccccatcctggtgcctcacacagcgcagcgcggagagcagaggtatccatttgaggccctcttccgcagccagcactacgccctcctagacaattcctgccgcgaataccttttcatctgtgaattttttgttgtgtctggcccagctgcacacgacctgttccatgctgtcatgggccgtacactcagcatgaccctgaaacacctggattcttatctagctgactgctacgatgccattgctgtttttctctgtatccacattgttctccggttccgtaacattgcagcaaagagggatgttcctgccctggacaggtactgggaacaggtgcttgccttgctatggtcatcggtttgaactgatcctggagatgaatgttcagagcgtccgaagcactgacccccagcgcctaggggggttggatactcggccccactatatcacacgccgctatgcagagttctcctccgctcttgtcagtatcaaccagacaattcctaatgaacggaccatggcaattgctgggacagctgcaggtgggaggtgggagaattttgtcctccgagtgggcagctggagtttttccttcaagggaagggaggcagcttgtgttttctggattcaacaactatggacatggatgctgggtgtgctgatggtaataggagcgggctgcagatgacagcaaagaggttgagagcttccagcagctgctcaatgctcggacacaggaattcattgaagagttgctgtctcccccttttggggttttangttggcatttgtgaaaggaggctgaggctttgattgagcgtggacaggctgagcgacttcgaggggaagaagcccgggtaactcagctgatccgtggctttggtagttcctgggaaatcatcagtggaatctctgagtcaggatgtaatgcggagtttcaccaacttcataaataggcaccatgtatcattcagggagcgctgacccagctgatccagcttctatcatcgcttccaccgggtggctgtcccagccgcagctccgagccctccctgcccgggcttgagctcattcaacatttcaccaccttatg

SEQ ID NO: 144686 - DNA, 1561 bp, Homo sapiens
  misc_feature (1)...(1561): n = a,t,c or g
tttttttttttttttttttaacaatgggccaaatgttttatttctctcatatgcggggtaattacctctcaaagcatttttaaaaaacgcattattacactttaccaatgaattatttctgtccctggagattaaatcaaatcaaaatgttacaaatagtatcagtatgatataatttcttaaatatatggggacattgtcaacagctgtgattcatatggaaaaatataatcaggatatctcaaattccctaattctgttttaaaaacaccaaacactgggaacaggttgctatgggaaattactggataatggatccccttttaataaactggcaattaaccccctaatatagaaattcaatttaagcaagaagttttatatattatactttacagaaaaaaataattttgaaaaagtaatgacaaaacagagatcaaacatttaggggcattaagttactgcatttctcttttttagaatactacatttaagtaacactagtaaaatttaaagtaataatgaacaggccttaaaaaacatgaatgattgatgacagaaccactatccacacataaacaaaaatagagcaaacccaagccgtgtcccacatctcccatgaattcagtgatttgaaataaatgttgttatgttaaacattatgagcaaatctaaaggttcaaccaaaaaacttacatatttttgagtattttttaaagttttaatagtttatctctgatcaaggatggagaaaggacaaaaaaaaatactgtcctgaattgattctcacagggcctgctccctcacagaacacagtgtccattaataataatgccccttatttataatataaaacaacccaaagaattttccattcctcctagtaagtatttaaaatacattcctagggccgtgccatttagggagtaaaatggttaaatttggtggatgccccttaaaaagacctttcaaccctggtaaggaaaccaatttctgggaattataaaaaataattggaattttaccatatttccaggagtcttgagaaaacnttaaagtgccagtattttcatgtatcagcaaaataattaattggtgtcatataagctcatcttgaaaggagggatgtaaataccttccaaattttttatgaatgctaccattaccagagggcagagtgtagctattttaaggtttggattgtcccagatttttttattagactgcaaggaggaaaaaataagcaccaaagtaaaatatgctttattagggggaaaaactagtgttttcatgaaaagaaaatagaaaacatgtcatttctccctttagtgacctttgttcattcaattacctggtttaccaagaatgttaactcagttcaattattgaacaaatcactcttaatcaaaatgtcaggatccagcgtttgttcatgggttaaagccttttggcgggccgtggtggctcatgcctgtaatcccagcactttgggaggctgaggcatgcggatcacaaggtcaggagttcgagactagactgaccaacatggtgaaactcatct

SEQ ID NO: 144687 - DNA, 356 bp, Homo sapiens
  misc_feature (1)...(356): n = a,t,c or g
ngggttaaagagggaaattcctttaacccccggaaacaaaggttcaaataacttaggttccccccttggcctcccaactgggggacaaaaggagaattttttttcnnnnnnnnnnnnnnnnnnnnnnnnncaaggacaaaatccatataatcatttcaattatactaaaaaaatttgataaaatttaatattctttaataataaaaaaccctttgaaaactgggtatggaatgaacatacctcaacataataaaagtcatatatgacagaccaacagctagtatcatactaagtggggaaaaactaaaatcctttcctctaaaatctggaagatgacaagaatgtccacttttacc

SEQ ID NO: 144688 - DNA, 335 bp, Homo sapiens
  misc_feature (1)...(335): n = a,t,c or g
atcatcccacctgtgacaaggttcccataacttcgtcagcccccttgtgactcctactcgggggaaaaaaggagtcttctttttnnnnnnnnnnnnnnnnnnnnnntaacaaggacaaaatccatataatcatttcaattatactaaaaaaatttgataaaatttaatattctttaataataaaaaaccctttgaaaactgggtatggaatgaacatacctcaacataataaaagtcatatatgacagaccaacagctagtatcatactaagtggggaaaaactaaaatcctttcctctaacatctgcaagatgacaagaatgtccacttttacc

SEQ ID NO: 144689 - DNA, 6743 bp, Homo sapiens; identical to SEQ ID NO: 115041

SEQ ID NO: 144690 - DNA, 1018 bp, Homo sapiens
ggggacttcattctggacagcatatgacaaggacgaggacccctattctagccagttaaagctggacagaatttttaaaagcaatgaagccagttccttggatatatccacgggctttgctttgagaaggaactgagtaggcagtgagaagagtcgagtgaagcctgtgcccgtgagtgcctcaacatctgagaggaacgtcgactcgcttgcaggcaagttgtcactcaccagcgagctgaactatatcctgtgttccagaaaaggcataggttcttaccgaaagcaggggaggaagccgcagtccaaggaggtcgtcacttgccgggaaggtggctcgggccaagctgcacttcaaaacccgtgctctgtccacacttgctacggggccagagccaaggaagcttccacttcttcccccagacagccccaacagcggctaccccaagggagccagcagccttgtgttcctggggattcccagcccctgcagaatgacccaccagggtctttagcatcacagccaaactcatcaatggaggtgtagcagggctcgtgggggtgacctgcgtgttccccatcgacttggccaagcactcgccgcagcaaccagcattgggaaagccatgttacaaaggaatgatccgattgcctgatcgaagacggctcgggcggagggcttcttcggccatgtaccgaggggctgcagtgaacctcactctgggcactccagagaaggccatcaagctggcggccaacgactttttccggcggctgctcatggaagatgggatgcagcggaacctgaagatggagatgcttgccgggtgtggggctgggatgtgccaggtcgtggtgacctgtcccatggaaatgctcaagattcagctgcaggcatgctggacgcctggccgtccatcatcagggctcggcctcagcaccctccacctccaggtcctacacaactggttcggcttccacccacaggcgcccctctgccaccctcattgcctgggag

SEQ ID NO: 144691 - DNA, 305 bp, Homo sapiens
  misc_feature (1)...(305): n = a,t,c or g
ctggaacaagacaaggatgcccactctcacctctttgattcaacacagtactggaaattctagtcagatannnnnnnnnnnnnnnnnnnnnnnnnnnnnntgtctcactgcagatccaaggtcctacacatagaaaatcctaaaggctccataaaataagtgctagaactaatcaacgaattcagtcaagttgcaggatacaaaatcaacatgaaaaaactgtagcatttctatacactaacaattaattatctaaaaaagaaatcaagaaaacaatccaatttataatagcatcaaaaagaacg

SEQ ID NO: 144692 - DNA, 340 bp, Homo sapiens
aaaataacttccttaatttggcaaaagatacccagtaaaaacctagatgtatcgtctcttttttcagcatggtagtggaggcctgagccagcattgtaaaataagaaaaagaaaagattggaaatcagggaacaaaactgtaatgatttgaagaaatgatttttacataggaaactcaagagcatctgcagacacattattagaaataaaagatttcagcaaaatatctggatataggttcaatatacatcaatcagttatgtttctgtactttagctgttagaaaattaagtcttaacctacagccatgcattacttaacgatggggatatattctgag

SEQ ID NO: 144693 - DNA, 712 bp, Homo sapiens; identical to SEQ ID NO: 112136

SEQ ID NO: 144694 - DNA, 468 bp, Homo sapiens
cgtgcagtgagccaagatttcaccgtttcactccagcctgggcaaaaaaagtgaaactccgtttcagaaaaaaaaaaagaaaaaaaaaagtgatacatccaggaccaggattaggatgaaggagataagtcacctaactgggttgtaaaatgtaaaaggcgccaaagcactcagtaattaagtgataaataataatagtaaataatacaagtaataaaataattttttttccagcagagttttgctcttgtcgcccaggctggagtgcaattgcacgaatctaggctcactgcaacctccgcctcctgggttcaagcgattcttctgcctcagcctcccaagtagctgggattacaggctcctgccaccacgcccagctaatttcttgtatttttagtatagacggggtttcatcatgttgtccaggctagtcttgaactcctcacctcagatgatccacccgccttg

SEQ ID NO: 144695 - DNA, 729 bp, Homo sapiens
tactgtaaagatgcaccatatcccatatctcatttgtcagtggaaagaacacagatttggagccaggtaaaagtacctcttgctacctgtgacgtcttggacaagttcccaccttttggggccagtttctccatctataaaatggggataatgcctaacttaagagttattttagatccaatataaaaattcccagcccaatgcctggcatgcagtaagcaggcaattatattatttttcctctctactagtcacaactacccaggaagggaagttttcactcattcctggccatccgccccatgctgggcacttggggcatgctgactgtggtgaatgaaacagacagggtactggtcctactattatagaatgtttgcttcataagaacaggcactgactgtatcatctctgaacacaatggaatgaagctggcaataacaaaagaaaaattggaacatttacaaatgtgtggaaattaacagatttctaaacaatcaaggggtcaaagaagaaatcacaagggaaattagaaaatactttgagatgaatgaaaacaaaaacacaaaataccaaaactgagagtgtgtgatgacaacagtgtgcagagggaaattcatagctgcaaatgtccatattaagaaacaagacagtaactatgtgaggtgatgggtgttaattagctccagctgtagcaatcatttcctaattgtattttcaaaacatccc

SEQ ID NO: 144696 - DNA, 359 bp, Homo sapiens
  misc_feature (1)...(359): n = a,t,c or g
agcaaactcacagtaaactgtattgcccatgataaaaactgcagttacataatttaaaagcaagaatcgcagcaattcatcaggcacagtgactcacgcctgtgatcccaacactttgggaggccaaggcaggaagattccttgagcccagggaggtcaaggccagcctggggcaacatagtgaggaactcatgtccacaaaanttacaaaatagcccgggcatgggtggccaagcacctgtgggtccccagctacttcaagaggcttgaagttnggagggtcgctttnagccccnggggggtcaaggctgcagttagcgattgatcctgccacttccttcccagcctngggttacaga

SEQ ID NO: 144697 - DNA, 375 bp, Homo sapiens
tggtaatataatttttcattctatttattgtagggtttcagagatatttggctataggtgttttataataaaactacttttaaagtctttattatagctataatttgttcccttatttattttgtttgcttgcattctattgttattttgttaaactgttatttcctgaggttatcaacaatagtctttttctagaagaagcttctgatagtattaacctttttttttctataccgttccattattttttcttggtttctaccttttattattttctttcttcctgtttctttgggtgtactctgtctcttgcttatgtcttcagttgtgcttatttttcagcttttcctattttctaatacatgtattgagaag

SEQ ID NO: 144698 - DNA, 355 bp, Homo sapiens
  misc_feature (1)...(355): n = a,t,c or g
nnnnnnnnnnnnnnnnnnnnnnnnnnnnnnnnnnnnnnnnnnnnnnnnnnnnnnnnnnnnnnnnnnnnnnnnnnnnnnnnnnnnnnnnnnnnnnnnnnnnnnnnnngacatgatcctatatatagaaaaccctaaagactccagcaaaaacccgttaggactaataaacaaatacagtaaagttgcaggatacaaaatcaacacacaaaaatcagcagcatttctgtaaactaacaactatttgaaaaattaaccaagagaacaatcccatttacaatagctacnnnnnnnnnntacttagaaacatatttaaccatggaggtaaaagacctgtacactgaaaactataaaatgc

SEQ ID NO: 144699 - DNA, 358 bp, Homo sapiens
ccaacctgttttacatgttaatgtatgtgaaatgtgaaatcaggacaaaatctcacgatgggtgaagggtcagtctcccaaggcagcatcttctcaagcctagggggacatagaacagtatcagtggtgactatggtcagatgtcgctgcccggcccatcgtggtctctcgcgctggcttccatctactctcatctggcacacagtaaggcccgtgaaactgctgaccgaacccacccatcaccctgctcaggcctccgcgccctcggcagagatgcccctcactgtgtcaatttcccccataaacatctcctagacaacggccctcccagcccccgcagggccctccagagtttccc

SEQ ID NO: 144700 - DNA, 2139 bp, Homo sapiens
atgcgcattccctccttcttgctcaatctccaagatttcgaggacaaaatggaaattaaaaggtacaggcctgagggtccactcgccacctctgcccaaagccacgtctccactgctcccctcatctccacacagattcctccccacgtgcctccccttttcttggactgccgacacctgacaccagcaagcttatttgatcaaactttaattccgaaaaaggctccttccaactgcgtaacagactcctatagaaaaacatcagaaattcatccaggttccttgtttctgatcctaaatcttcaatttaggacctcaacctcaaactgttgctttagtggctctgggaaggaagcactaactggcagcataggtagagagcgcagccctcttctagcacaaacaccgtttcccacattgaagaaatcacagagatcagcaactctagagtgcgatgaagaagcttcactctgggagaacccccttcgtgaccacggtctctttcctgccagcgaacatcgcctccctctaccgctcaatcagcaaaagggaccgcccttgaggacctcacccgccgctcactcccctcccaacttcgcgggcatcgcctccggtcgcctcttccgaaggcctaacgagcatttattcacagctcagcccgataggcacctccggggcggcgacggcaaagagggtgcccttattaagtgcagctccacggggactggcctctctgcacggctgtgtacacctgagcgagacgctcagtcgctctctaaagccgcttctgcggatgacagacacggagataaacgcgatggcaacgcaacccccccgtttgctctgggcaaaacttcgagagttccctctgaagctggagctttttcctcagatccaagatccaattggtcaccaattcgtgatttccgtcggccaagtgcgtgggcattgatctacacagaagctttatgggccaattcgttcggcatccccgggggcagatgcgcggtgcgcggggaagaagaggatttgactgcggttctccacccccggcgcctaacctccaccccggtgcgcgcgctcttccaggctcctgctggtcccacttgccaggagttaggtctcaggaagtatcattccttgattcaggatcaggctcaagagttaacccacctacggcagaagatgaagcttgggagagtggcctctgctcttctcatccagcatgtcaagaacacactaaagacctttgaggagctactccagagcaataactttgaccactatatggagcagcactactgcgagcagctggccaaaggaagccagctggcagagagccttgccagaaaattcagcacagatgactgtacaagtaagaagaatcaagtaggacaggtgtcttcgactctcagtatcttgaggaagatgcataatatgagtaaagtgacagaagtcctagagaccaagtgggatgcccggtcccagactcagccccagatctggtgcagcaaccacacccggtctaccccacatcactccctgagcagcacgtctccacagcttgacaaggaggaagtgcatccttcagtgactgtagtcagctggctactactgcaggtctccagcagagtcttcatggaaggagaacctctggccttgaggtgtcatgcgtggaaggataagctggtgtacaatgtgctttactatcgaaatggcaaagcctttaagtttttccactggaattctaacctcaccattctgaaaaccaacataagtcacaatggcacctaccattgctcaggcatgggaaagcatcgctacacatcagcaggaatatcacaatacactgtgaaaggcctccagttaccaactcctgtctggtttcatgtccttttctatctggcagtgggaataatgtttttagtgaacactgttctctgggtgacaatacgtaaagaactgaaaagaaagaaaaagtggaatttagaaatctctttggattctggtcatgagaagaaggtaatttccagccttcaagaagacagacatttagaagaagagctgaaatgtcaggaacaaaaagaagaacagctgcaggaaggggtgcaccggaaggagccccagggggccacgtag

SEQ ID NO: 144701 - DNA, 1374 bp, Homo sapiens
tcaggtctgcgccctcatcttcctgactctcattttctgaggaacctgaatggatgagccgtcgctcttgtcccacacattctgtccaaaggtgccctcctctctacttgctccggtgcctgctctctgagctctgacactcaggctgggatgccgcccagtacagaagctctgcagccctgcagggctctgactgttccacaccagcaggataaaggccacagggcatgccggtttcctctcctccaccacccaagctcctcctcgacccccttgctcagctgttctcaggacagcaagatccccagcccttggaaaagccccatctccagtgcttggggagggagttgggttcaggtcgtcggggtggaggttggtcgccgggggtcgagaaccgcagtcaaaccctcttcttccccgggcaccgcgcacctgcccccggggatgccgaaggaagtggcccataaagcttctctggcgacgcacgaccgactggtcacttgctgccacctcgcaaaggcgcatctctagtccagtggtgagctgcggccgggtcgctgcaactcgctccaggccttcggactcgtggcctcggtgtccctcgcggagccctcggtgtgtcgcttgcaggctcttctttcccgtcgccaccccggagacgcccatcgggctgagctgcgaataactccgttgccagcgaaggcgctcgttaggccttgggaagaggcgaccggaggcgatgcccgcgaatttgttaggggggtaagcggcgggtgaggtcctcgagggcggtcccgtttgctgattgagtggtagacggaggcgatgttcgctgacccaacaaggacagcaggtggagtaggcacagacggaaaactgctgccggtgcccgggcaggaccactgagcaaggccttggaaacccagagagattagagcggtgagtcgcgccggtcacgttggacgcctgcgtgttaggagattcctgcccagtcgctttccgggccgctgaggagcttccgctgccatcttcggatcctgtgttccgcacgggggctccaccagggcagggatggtggtgagggtcgctcgtgggtcccctcgcggggagcagggtctggtactcaccagggcgcacgactaggacttgtggaatgaattcatcgtcgcctttagcttttagtcctttgaagagccccggcagggagggcaactggcagggcctctggcgcaccttctgcgcggtggagccacgggggctcagctgggcggtggtgcggccgtggggtggtaggtcaagagctggtatcatggattcacaggtctgtgactggaagtccccataaatttgtgggttgctggaggcaaacatcat

SEQ ID NO: 144702 - DNA, 721 bp, Homo sapiens
ttattcacagctcagcccgataggcacctccggggcggcgacggcaaagagggtgcccttattaagtgcagctccacggggactggcctctctgcacggctgtgtacacctgagcgagacgctcagtcgctctctaaagccgcttctgcggatgacagacacggagataaacgcgatggcaacgcaacccccccgtttgctctgggcaaaacttcgagagttccctctgaagctggagctttttcctcagatccaagatccaattggtcaccaattcgtgatttccgtcggccaagtgcgtgggcattgatctacacagaagctttatgggccaattcgttcggcatccccgggggcagatgcgcggtgcgcggggaagaagaggatttgactgcggttctccacccccggcgcctaacctccaccccggtgcgcgcgctcttccaggctcctgctggtcccacttgccaggagttaggtctcaggaagtatcattccttgattcaggatcaggctcaagagttaacccacctacggcagaagatgaagcttgggagagtggcctctgctcttctcatccagcatgtcaagaacacactaaagacctttgaggagctactccagagcaataactttgaccactatatggagcagcactactgcgagcagctggccaaaggaagccagctggcagagagccttgccagaaaattcagcacag

SEQ ID NO: 144703 - DNA, 1176 bp, Homo sapiens
gagctcaggctgacctgagacctaactcctggcaagtgggaccagcaggagcctggaagagcgcgcgcaccggggtggaggttgggcgccgggggtggagaaccgcagtcaaatcctctttttccccgcgcaccgcgcacctgcccccggggatgccgaacgaattggcccataaagcttctctgcaacggaaagaagcctgaagctccaggaggtgcgagaggagcctcgttgagcgagcccagccctctgcccggctggccctggtcaacaggctcggaagaggccgatttggaggacagaacggaagacaagacctaaaggtttcgactctcatgatgtggaaatgttaaaaccctaaaaccctaaggtcccgaactgtgagggggagcgagggtgttctcgagctggatccacccttgagccttcacctggagagtcctctgcacaagttcaagagaagaaggactacgcgcagcaatggttctcaacagggggcaacttcgccctcacatgcctctcccaaccccgctgggacactaggccgcggctgggggaagcgggagggagaatgttatccccctgggcatgtgtctagtcagcggaggagacagatgctgctaaacaccttgcaatccacggtgggagggcccctcccccaccccgaagtagccatttcggcagaggtggagaaactcgcgtgttagatcaattgcccacggcattttggccgacggaattcacggatttggtgaccaattggatcttggatctgaggaaaaagctccagcttcagagggaactctcgaagttttgcccagagcaaacggaggggttgcgttgccagtcgcctaaagatgggaagatggcaggcgtcacaggttgcaggggaaggttggagaccagttgagtgccccggagccttcctggaaagagtttcctatccagcccgcctcggtttccgcatccgtctgattccttatgatgttgagggtgccggggtctgggtcctttatgatgcagagggtgcccccgtctcacctcgggcgcctccccgctcccgcctcctcctggcaacctggtgggcggctccggacccggcgacccgcgaccatcttgtcagttgctgccgcctggcaaagggcatctctaggccagtggtgagctgcggccgct

SEQ ID NO: 144704 - DNA, 1001 bp, Homo sapiens
ttgcgggtgttacagcaggggcaggtcaaccgcgcctgggccaggcaaaggcatcagcttgggaacaactctgacagtgcccagaccccaagctgacagcaggaggagtccaggccaagcccaccacactggagactgcacctcatcctcccataaccctggaggtaaggacgagcactctatgaatgagcaaactgaggtgcagaggccaaggtctcaacactagaaatcagcagagtccggattcatcactgggcagtgatggctatcatgtgtcccctcaaaaggacaaggacccacaggcccagcctggactctgccttggggcttcatctcctgccccactggccgcctctggtgaaatcccaatcttgtcttcctcttcacctgcacttgttaagtcacagctggaatggcaatgcaactagaaatctgttctctctaccctcaactgggcccagcctcgacactggccagagaccctgccgtgggtcccttcttagcctgagacctctcttccgccaccaggagggtctcacctccaactccagacatggattgactcaactcagcatcccccaacagtgctcctccagcctgctaaaatcccagcccagcctgccgcctcagcagcctccctgccatcactcctgtctcccaggaccctacacaccagcactgaacaggctcccaagcctgcctttaccccatggctgcctccagctgcctctgcccttcaaggctcaaactgcttccaagggatgaccaagtcatatgtggcttccacctctgcctctactgacattccccaagcctgttctccagcccggcccttttgccttgagcaccttcccagcctcccaaaggggtcccacaggcaccttctcagcatcctttgacaccatcccatagaacctgctcccccgcaggcctcctaaccccttaaatggtactaactatccacatagtttatcaaaccaggaaaccaggagtcctccaag

SEQ ID NO: 144705 - DNA, 724 bp, Homo sapiens
gtcgacggcaatcaatttgtcagacagatttcttagggtacgtgaggttggagaagtataagacctatggccaggaactcatcacatctgtgctgccctttccctgaagagtcagtagggtattgtagcataaaagtttaggaagtcttggctggacacagtggctcacacctgtaatcccagcactttgggccaaggtggacgaatcacttgagatcatgaattcaagaccaccctgggccaacatggcaaaaccccgtctctactaaaaatattaaaaaaaaaattagctgggcatggtggtgctcacctgtagtcccagctactcgggaggctgaggcatgagaatcacttgaacccaggagggggaggttgcagtgagccgagattgccacactgcagcctggatgacagaataagactccgtttcaaaaaaaaaaaggccaggtacagtggcccacgcctgttatcccagcactttgggaggccaaggcgggcggatcacaaggtcaagagatcgagaccatccttgccaatatggtgaaaccccgtctctgctaaaaatgcaaaaattagctgggcatggtggcacacgcctgtagtcccagctactcgggaggctgagccaggagaatcgtgaggttgtggtgagctgagattgtgccactgcattccagcctggcgacagagtgagactgcctcgccaaaaaaaaaaaaaaagtcg

SEQ ID NO: 144706 - DNA, 689 bp, Homo sapiens
atttcggcacagggcactgttcagtatactggggatagagcagggggaaaaaaatgacaaaaacccctacccttaagaggttcacagtatagcatggggaattagaaataagcatctgtctcttctctggtctttaagcacctcacaggcactggccatgtctgctcatctgtttattcccatcatctaacagagtgctcaacacatttgcttgatgaatacgttttgagcactgggagatgatcacagaagagctaagaagtgatagcagttgtatttagtggagaaccagtattcacaccttgttgtcctagattgcccttgaaaatcaggctctgtatggatatcttttttttttctcttaagaaaaaactgttaacctatttaggagtaattttatttaagggagctttttatttttttgtttttttttttgagacagggtcccaccctgttcccccaggctggagtgcagtggttcaacaaccacagctcacttcagccttgacctcctgggggtcccacctcagtctcctgagtagctgggaacacagggacgtggccaccctgcccaggctaattttttattttttgtagagatggggttccactgtgttgcacaggctggtctcaaacttctgggctcagtcaatcctcccgccttggcctcccaaagtgttaggattaca

SEQ ID NO: 144707 - DNA, 531 bp, Homo sapiens
tttttttttttcttgagccgagtctcgcttgtcgccaagctgagtgcaatgcacatctcgctcactgaagctcaactcttggttcacgccattctcatgcctcagcctccggaacagctggaactacaggtgcccgccatcacgcctgggtaatttttttgtatttttagtagagacggggtttcactgcgttagccacgatggtctcgatctcctgacctcgtgatctgtccgcctcagcctcccaaagtgctgggattacaagggtgagtcactgcaccgggcccaaaattatctagatttataactcaattcaataatttaaaatttaaaaatacttaaatatctattttgaatgagtagaatttgtgtggagcaggagttgttttttgttactaaatcacttcaaataacttgtttgggttttttactttctggaagatttcagttagccatcaaattgatttagtcttacctcatgtccttaaataggggactgatttaaattatcatttgaatcattctcgtgcc

SEQ ID NO: 144708 - DNA, 470 bp, Homo sapiens
tatgaagggaatgtggaagatgacctgatgatcactttccggatatcacaggacagatctttttgctaacccaatgatgtatgatctaaaggataatggtgataaaattccaattacagaatatgacggtggctataccagggactctgttctgattagggagttctgggaaatcgttcattcatttacagatgaacagaaaagactcttcttgcagtttacaacgggctcagacagagcacctgtgggaggactaggaaaattaaagatgattatagccaaaaatggcccagacacagaaaggttacctacatctcatacttgctttaatgtgcttttacttccggaatactcaagcaaagaaaaacttaaagagagattgttgaaggccatcacgtatgccaaaggatttggcatgctgtaaatcaatacaaaacaaaataaaacaaaaaataggaaggaaaaaataa

SEQ ID NO: 144709 - DNA, 455 bp, Homo sapiens
agaagtttggcgaaatatgagttattaagcctacgctcagatcaaggtagcagctagactggtgtgacaacctgtttttaatcagtgactcaaagctgtgatcaccctgatgtcaccgaatggccacagcttgtaaaagtgccagcaggtttattttttgttttgcaagccagctctgcctccttacagtatgacatctgatgctggagggtcgcactttcacaaatgagtcagctggtacatggggttatcatcaatttttagctcttctgtctgggagatacaagtttggaagcaatcttggggtacttacccacaaggctggtggagaccagatcaggagaacctcagtctgacgacattgaagctagccgaatgaagcgagcagctgcaaagcatctaatagaacgctactaccaccagttaactgaggggctgtggaaatgaagcctgca

SEQ ID NO: 144710 - DNA, 440 bp, Homo sapiens
  misc_feature (1)...(440): n = a,t,c or g
tggacgcgtgggtggaaaagaacaagtaggtttacattactgatttccagaagtaagtagtttcccctttcctagtcttctgtgtatgtgatgttgttaatttcttttattgcattataaaataaaaggattatgtatttttaactaaggtgagacattgatatatccttttgctacaagctatagctaatgtgctgagcttgtgccttgggnnnnnnnnnnnnnnnnnnnnnnnnnttttaactgattactgtaaatcaacctgatgatttgtttgtttgaaattggcaggaaaaatgcacctttcaaatcattggggggagaaaaaggatgtctttcaggattattttaattaatttttttcataattgagacagaactgtttgttatgtaccataatgctaaataaaactggggcactttttaccataaattaattn

SEQ ID NO: 144711 - DNA, 415 bp, Homo sapiens
  misc_feature (1)...(415): n = a,t,c or g
cggacgcgtgggtggaaaagtacaagtaggtttacattactgatttccagaagtaagtagtttcccctttcctagtcttctgtgtatgtgatgttgttaatttcttttattgcattataaaataaaaggattatgtatttttaactaaggggagacattgatatatccttttgctacaagctatagctaatgtgctgagcttgtgcnnnnnnnnnnnnnnnnnnnnnnnnnnnnnnnttttaactgattactgtagatcaacctgatgatttgtttgtttgaaattggcaggaaaaatgcagctttcaaatcattggggggagaaaaaggatgtctttcaggattattttaattaatttttttcataattgagacagaactgtttgttatgtaccataatgctaaataaaactgt

SEQ ID NO: 144712 - DNA, 1369 bp, Homo sapiens
tgctgaggcattggtagagagcttctggaaagctaaacaacacaccaaggaagaactgaagtctcttcaagcaaaggatgaagagaagaatgaaaatgaaaaggcaaaagctgcatgttctgctgctgctatggaagaagactcagaagcatcttcctcaagcacaggtgatagctcacagggagacaacaatttgcaaaaattaggccctgatgatgtgtctgtggatactgattccattagaagggtctacaccagattgctctctaatgaaaaaattgaaattgcctttctcaatgcacttgtatatttgtcacctaacgtggaatgtgacttgatgtatcacaaggtatactctcaagatcctaattatctgaatttgttcattatagtaatggagaacagaaatctccacagtcctgaatatctggaaatggctttgccattattttgcaaagcaatgagcaagctaccccttgcagcccaaggaaagctgatcagactgtggtctaaatacaatgcagaccagattcggagaatgatggagacagttcagcaacttattacttacaaagtcataagcaacgaatttaacagtcaaaatctggtgaatgatgatgatgccattgttgctgcttcgaagtgcttgaaaatgatttactatgcaaatgcgtatgctgtcacaaagaatttgggattatattatgacaatagaattcgcatgtacagtgaacgaagaatcactgttctctacagcttagttcaaggacagcagttgaatccatatttgagactcattgttagatgtgaccatatcatagatgatgcacttgtccggctagagatgatcactatggaaaatcctgcagacttgaagcagttctatgtggaatttgaaggagaacaaggtgggttgcagcattctgggacagagctagtgaacctaaggcaaactcgattgggtttggaggaagtcagttgtggatgccaactccagttgcctcttacacctgatgccaggacagtgctgcaaacccacccaccagtaaaaaccattcccagggagaaaggagctgaggaacagaggcttgaatcgactgagtttaatactgagtcgctacattttaaaatggtagcaattgagtttaacttgaatgacaagtgctcaaagagcagatgctacattcatataaaatccaggtcccagggcacattatcacagtctctgcagaagaagccaggccaagccctggctgtgaatccattgggatcaccagtgccagaggagaaggtcacctgcatttgtttttctgatgtgatggaggttctgtttgctgtggcagtaggagaggtgtttggattcccttga

SEQ ID NO: 144713 - DNA, 3173 bp, Homo sapiens
cgactacgaccagtgaggcggccgccgcagcccaggcgcgggggcgacgacaggttaaaaatctgtaagagcctgattttagaattcaccagctcctcagaagtttggcgaaatatgagttattaagcctacgctcagatcaaggtagcagctagactggtgtgacaacctgtttttaatcagtgactcaaagctgtgatcaccctgatgtcaccgaatggccacagcttgtaaaagagagttacagtggaggtaaaaggagtggcttgcaggatggagaagctgcaccagtgttattggaagtgagccaccatttgaatttgctagctcatgctgcagtattcagattatgccagcaggtttattttttgttttgcaagccagctctgcctccttacagtatgacatctgatgctggagggtcgcactttcaaaaatgagtcagctggtacatggggttatcatcaatttttagctcttctgtctgggagatacaagtttggaagcaatcttggggtacttacccacaaggctggtggagaccagatcaggagaacctcagtctgacgacattgaagctagccgaatgaagcgagcagctgcaaagcatctaatagaacgctactaccaccagttaactgagggctgtggaaatgaagcctgcacgaatgagttttgtgcttcctgtccaacttttcttcgtatggataataatgcagcagctattaaagccctcgagctttataagattaatgcaaaactctgtgatcctcatccctccaagaaaggagcaagctcagcttaccttgagaactcgaaaggtgcccccaacaactcctgctctgagataaaaatgaacaagaaaggcgctagaattgattttaaagatgtgacttacttaacagaagagaaggtatatgaaattcttgaattatgtagagaaagagaggattattcccctttaatccgtgttattggaagagtttctttctagtgctgaggcattggtacagagcttccggaaagttaaacaacacaccaaggaagaactgaaatctcttcaagcaaaagatgaagacaaagatgaagatgaaaaggaaaaagctgcatgttctgctgctgctatggaagaagactcagaagcatcttcctcaaggataggtgatagctcacagggagacaacaatttgcaaaaattaggccctgatgatgtgtctgtggatattgatgccattagaagggtctacaccagattgctctctaatgaaaaaattgaaactgcctttctcaatgcacttgtatatttgtcacctaacgtggaatgtgacttgacgtatcacaatgtatactctcgagatcctaattatctgaatttgttcattatcgtaatggagaatagaaatctcaccagtcctgaatatctggaaatggctttgccattattttgcaaagcgatgagcaagctaccccttgcagcccaaggaaaactgatcagactgtggtctaaatacaatgcagaccagattcggagaatgatggagacatttcagcaacttattacttataaagtcataagcaatgaatttaacagtcgaaatctagtgaatgaatttaacagtcgaaatctagtgaatgatgatgatgccattgttgctgcttcgaagtgcttgaaaatggtttactatgcaaatgtagtgggaggggaagtggacacaaatcacaatgaagaagatgatgaagagcccatccctgagtccagcgagctgacacttcaggaacttttgggagaagaaagaagaaacaagaaaggtcttcgagtggaccccctggaaactgaacttggtgttaaaaccctggattgtcgaaaaccacttatcccttttgaagagtttattaatgaaccactgaatgaggttctagaaatggataaagattatacttttttcaaagtagaaacagagaacaaattctcttttatgacatgtccctttatattgaatgctgtcacaaagaatttgggattatattatgacaatagaattcgcatgtacagtgaacgaagaatcactgttctctacagcttagttcaaggacagcagttgaatccatatttgagactcaaagttagacgtgaccatatcatagatgatgcacttgtccggctagagatgatcgctatggaaaatcctgcagacttgaagaagcagttgtatgtggaatttgaaggagaacaaggagttgatgagggaggtgtttccaaagaattttttcagctggttgtggaggaaatcttcaatccagatattggtatgttcacatacgatgaatctacaaaattgttttggtttaatccatcttcttttgaaacagagggtcagtttactctgattggcatagtactgggtctggctatttacaataactgtatactggatgtacattttcccatggttgtctacaggaagctaatggggaaaaaaggacttttcgtcgacttgggagactctcacccagttctatatcagagtttaaaagatttattggagtatgttgggaatgtggaagatgacatgatgatcactttccagatatcacagacaaatctttttggtaacccaatgatgtatgatctaaaggaaaatggtgataaaattccaattacaaatgaaaacaggaaggaatttgtcaatctttattctgactacattctcaataaatcagtagaaaaacagttcaaggcttttcggagaggttttcatatggtgaccaatgaatctcccttaaagtacttattcagaccagaagaaattgaattgcttatatgtggaagccgcaatctagatttccaagcactagaagaaactacagaatatgacggtggctataccagggactctgttctgattagggagttctgggaaatcgttcattcatttacagatgaacagaaaagactcttcttgcagtttacaacgggcacagacagagcacctgtgggaggactaggaaaattaaagatgattatagccaaaaatggcccagacacagaaaggttacctacatctcatacttgctttaatgtgcttttacttccggaatactcaagcaaagaaaaacttaaagagagattgttgaaggccatcacgtatgccaaaggatttggcatgctgtaa

SEQ ID NO: 144714 - DNA, 9268 bp, Homo sapiens
  misc_feature (1)...(9268): n = a,t,c or g
atggctgggaaggcttcagaatcatggcgaaaggtgaaagacacttcttgcatggcagtgacaagagaaaatgagaaggatgcaaaagcggaaacccctgataaaaccatcagatctcgtgagacttactaccacaagaacagcatgtgggaaactgcccccatgattcagattatctcccagggggtcactcctacaacacatgagaattatgggagtacaattcaagatgagatttggtgcttgactaacttttgccttgatgatatgttgagctttgtacttgagagctgtactaatcactgtgcttattgtttgaatgtttggtacaggaagcgagcagctgcaaagcatctaatagaacgctactaccaccagttaactgagggctgtggaaatgaagcctgcacgaatgagttttgtgcttcctgtccaacttttcttcgtatggataataatgcagcagctattaaagccctcgagctttataagattaatgcaaaactctgtgatcctcatccctccaagaaaggagcaagctcagcttaccttgagaactcgaaaggtgcccccaacaactcctgctctgagataaaaatgaacaagaaaggcgctagaattgattttaaagatgtgacttacttaacagaagagaaggtatatgaaattcttgaattatgtagagaaagagaggattattcccctttaatccgtgttattggaagagttttttctagtgctgaggcattggtacagagcttccggaaagttaaacaacacaccaaggaagaactgaaatctcttcaagcaaaagatgaagacaaagatgaagatgaaaaggaaaaagctgcatgttctgctgctgctatggaagaagactcagaagcatcttcctcaaggataggtgatagctcacagggagacaacaatttgcaaaaattaggccctgatgatgtgtctgtggatattgatgccattagaagggtctacaccagattgctctctaatgaaaaaattgaaactgcctttctcaatgcacttgtatatttgtcacctaacgtggaatgtgacttgacgtatcacaatgtatactctcgagatcctaattatctgaatttgttcattatcgtaatggagaatagaaatctccacagtcctgaatatctggaaatggctttgccattattttgcaaagcgatgagcaagctaccccttgcagcccaaggaaaactgatcagactgtggtctaaatacaatgcagaccagattcggagaatgatggagacatttcagcaacttattacttataaagtcataagcaatgaatttaacagtcgaaatctagtgaatgatgatgatgccattgttgctgcttcgaagtgcttgaaaatggtttactatgcaaatgtagtgggaggggaagtggacacaaatcacaatgaagaagatgatgaagagcccatccctgagtccagcgagctgacacttcaggaacttttgggagaagaaagaagaaacaagaaaggtcctcgagtggaccccctggaaactgaacttggtgttaaaaccctggattgtcgaaaaccacttatcccttttgaagagtttattaatgaaccactgaatgaggctctagaaatggataaagattatacttttttcatagtagaaacagagaacaaattctcttttatgacatgtgcctttatattgaatgctgtcacaaagaatttgggattatattatgacaatagaattcgcatgtacagtgaacgaagaatcactgttctctacagcttagttcaaggacagcagttgaatccatatttgagactcaaagttagacgtgaccatatcatagatgatgcacttgtccggctagagatgatcgctatggaaaatcctgcagacttgaagaagcagttgtatgtggaatttgaaggagaacaaggagttgatgagggaggtgtttccaaagaattttttcagctggttgtggaggaaatcttcaatccagatattggtatgttcacatacgatgaatctacaaaattgttttggtttaatccatcttcttttgaaactgagggtcagtttactctgattggcatagtactgggtctggctatttacaataactgtatactggatgtacattttcccatgggttgtctacaggaagctaatggggaaaaaaggaacttttcggtgacttgggagactctcacccagtttctatatcagagtttaaaagatttaattggagtatgaagggaatgtgggaagatgacatgatgatccactttccagatatccacagacagatctttttggtaacccaatgaatgtatgatctaaaggaaaatggtgataaaattccaattacaaatgaaaacaggaggggaatttgtcaatctttattctgactaccattctcaataaatcagtagaaaaacagttcaaggctttttcggggaggttttcatatggtgaccaaatgagattctccccctttaaagtcttatttcagccagaagagaattgaattgcttatatgtggaagccgggaatctaggatttcccaagcactagaagaaactacagaatatgacggtggctatccccagggactctggttctgattagggagttctgggaaatcgtttcattcatttacagatgaacagaaaagactcttcttgcagtttacaacgggcacagacagagcacctgtgggaggactaggaaaattaaagatgattatagccaaaaatggcccagacacagaaaggtgtacctacatctcatacttgctttaatgtgcttttacttccggaatactcaagcaaagaaaaacttaaagagagattgttgaaggcccatcaccgtatgccaaagagatttggcatgctgtaaaacaaaacaaaacaaaataaaacaaaaaaaaggaaggaaaaaaaaagaaaaaatttaaaaaattttaaaaatataacgagggataaatttttggtggtgatagtgtcccagtacaaaaaggctgtaagatagtcaaccacagtagtcacctatgtctgtgcctcccttctttattggggacatgtgggctggaacagcagatttcagctacatatatgaacaaatcctttattattattataattatttttttgcgtgaaagtgttacatattctttcacttgtatgtacagagaggtttttctgaatatttattttaagggttaaatcacttttgcttgtgtttattactgcttgaggttgagccttttgagtatttaaaaaatatataccaacagaactactctcccaaggaaaatattgccaccatttgtagaccacgtaaccttcaagtatgtgctacttttttgtccctgtatctaactcaaatcaggaactgtattttttttaatgatttgcttttgaaacttgaagtcttgaaaacagtgtgatgcaattactgctgttctagcccccaaagagttttctgtgcaaaatcttgagaatcaatcaataaagaaagatggaaggaagggagaaattggaatgttttaactgcagccctcagaactttagtaacagcacaacaaattaaaaacaaaaacaactcatgccacagtatgtcgtcttcatgtgtcttgcaatgaactgtttcagtagccaatcctctttcttagtatatgaaaggacagggatttttgttcttgttgttctcgttgttgttttaagtttactggggaaagtgcatttggccaaatgaaatggtagtcaagcctattgcaacaaagttaggaagtttgttgtttgtttattataaaccaaaaggcatgtgaaaagtgccacttaaggataggggtttttattaattacttacttattacctagattttaaatagacaatcccaaagtctcccccttcgtgttgcccatcatcttgttgaatcagccattttatcgaggcacgtgatcagtgttgcaacataatgaaaaagatggctactgtgccttgtgttacttaatcatacagtaagctgacctggaaatgaatgaaactattactcctaagaattacattgtatagccccacagattaaatttaattaattaattcaaaacatgttaaacgttactttcatgtactatggaaaagtacaagtaggtttacattactgatttccagaagtaagtagtttcccctttcctagtcttctgtgtatgtgatgttgttaatttcttttattgcattataaaataaaaggattatgtatttttaactaaggtgagacattgatatatccttttgctacaagctatagctaatgtgctgagcttgtgccttggtgattgattgattgattgactgattgttttaactgattactgtagatcaacctgatgatttgtttgtttgaaattggccgggaaaaaatgcagccttccaaaccatgggggggaagaaaaaaggatgtcccttcaggattattttaaattaatttttttccataattgagacagaactgtttgttatgtacccataatgcctaaataaaactgtggcacttttcaccataatttaatttagtggaaaaagaagacaatgctttccatattgtgataaggtaacatggggtttttctgggccagcctttagaacactgttagggtacatacgctaccttgatgaaagggaccttcgtgcaactgtagtcatcttaaaggcttctcatccactgtgcttcttaatgtgtaattaaaagtgaggagaaattaaatactctgagggcgttttatataataaattcgtgaagaaatgtgtgctcttcagttctcaagttttattattatggtatttattaaagttctacaattgtaataacgtatccatatgacaagttttaaagtggtaattgaaataggttatcagatatagagttgttcacatcaagtagacttttaacagagtcagaatgaacctacccttaaaattttagagaaaaaaaatcgtcggttgcacagaatagctgctctagcttgcttaattatgccgggcatgttgtcactcctcttacttttgctgccttttcattactatttaatggaatgtccctgaacaataaggaagagcaaaacatagacattttgactacagtggatacttcctctaccccaaatgttatgttataaaagtactttttttgcccaggtactctattatatattttggttttctttgaattaaacctcaatctccaggaagctctggagggaaaaaaaggaaccataaactaaagtaactggttttccaaataaatgtaaacttttttaaccttttattattatagaacatttcaaacatacataaaacatgaaaacagcctgcagccaaacttttctggaccttggcagctccagcaaatgagctggtcatcctaaccctggtttcctgagacaactacttttggggatgcttgcttgtatagggagatgatagatagatagatacatatcaaaaagaaacttgaaaaaggcttcgaacagaacttgccgatgttactcatccctcctcggtacagacattctgttagaacagatggttgtaatggggcagcatcactccctattcccattaaaaacatgaccattctgagatttcaggccccttcgaggaatttttctcaagaattccatacaaactgtcagaggaagaaatgtcgtcccaagactagtccctgtgtagtcttgatccctttacctgcttactgtaattttttttctctgactttccgccagtgtctaagggccatctgtacccctcccacccttccatgagccactgtataatccaaaaacacaccttccatttgctccctcacttgtctccttttacctcaacagtgttagtgtgtaaagaattgcctggggagggtagagggttttacaagtacagagtcccaagtcttttctcccctccccgttagtgggttggcatttattaataggcactgcaagattttgatgcaggtgtggggtagatatcactgtgaaaggctactaatgcatggtagtttcaccgaaagtacagtcttcaaggatccttataatctcctcattgccaaaatcagtaacatctataaccttgacaacaccctagcttgggctgttgcttctctggctacttgtttttccatcccagtttacccagattttagatggatactcctccaattctgcttaaagtccttacctgttcttgcccagttccctctagtcaacctcagtcactcccaaagattcttccccaatcccatatcttttgctcagacctctgtctctgggatttctttgttacctcatagtcagtagtcctaaaaacaaaattcttcatcttgcatctctatcgaccgaccattctttgtttctttttaagaaatgtaaccttcaccccaatcatcaaaatctctcattcctcaattgtcacaggttgtcacttctttccccctaaacctctcccatcattccttccttctttatactgcccttacaggtcctgatcctctgactcacccggacattcttagcagctgcctaatttcactccctgactctcatctccctcttccaatccttttcattgtgctagaacactatcttgctaattttaatatcctctgcattcagtgcctccacagattgccccctcactgacctttccaatttggccttgtgttacacactttcctcgctgcattcctacccagcatcttcacttgtcatatttctcaaatactcttcatgaccagatatttaaagtacctcatccatgaagacttcatcaacccccaaagtgcctccaatgcttccgtggtagcacagcataatggggtacatttcttagttgaacagtgaggagtcactgggattcttacagagtgtcttagggtctcctcttgatactctttccacatttcagttaaggaattttcttacatctttttttcttctaataacctttgcctggagtgtaagtaaattcatgatagagactgtcatttttaaaaaaaaaaaacaaaccattttgcctttcacatgttattacctccatctttctgttatcttgtcagtgttgccacctaaatgattgaaaatgaccgagcatgcagtagaatgtagtgaagtttcctatttcatccattttttgcataagtgcattggtatctgtatatccatctgcccaagcaccagttgttgaaaagactattatttccccatgaatggtcctggtacccttgtcaaagaacagttgaccataaatataagactttctggattctcagtcttactccattgccctatatgtctgtcgttataccagcaccgcactgtcttgattgctgtagcttggtagtaagtttagatttgggatgtgcaagtcctccattttttttttttttttccccaaaatcattttgtctgttttgggtcccttgcattgcatatgaatttttatatgatcattgtgtcaattcctgcaaaacagctgggatcttgatagggatttagttgaattggtagataaatttgagaaataactgctattttaatggtgttaggttttctgttccatgactgtgggatgtctttgcatttgcttaggtctttatttcagtgatgttttagagatttcagtgtgcaagtcttgatgtctttaatttttttctaagtattttactgatgccactttaattatatgattattttctaatttttatttttgtattcatcactggtgttagaaataaaattaatttttgtatattgattttgtatattgtagcttttctaaaattctttttttgtcacttagtattttttgcatatgagatcatgcatctgtgaacagaaatacttttacttcttcctttccagtctagattcctattatttcattttcttgccttagtgtgctggctagcacctccagtacaatattggatagaagtgacaagagcagacatctttttcttgttcctgattttaaggggaaagcattcagtctttcaccattgagtatgatgttagctagctgtgggtttgcttcaagttgaggaaattcttttattaaacctagtttactgagtgttttttaatcaaaaaaaaaaaaggaggggctgtgggttttgttaaatgcttcttctgtatcaagattttcatgttgttttgtcctttattaatatgttgtattaatggacttttgtatattgaattaactttgcattcctgggataatctcagttgtccatgctacataaaccttgttctatgctgctggatttggtttgctagtattttgtttagaatgtttgcatctatattcataaggaatattggtctgtagttttcatattatatatctgtccaatttggggatgagagtcatactcctgacagaatgaattgggagctttccctgttcttaaacctactgaggtattttttaagtgaactacttggagaccttcacctgtgatcttcagatgctgggggacacagggatggtacctgactctgaaaaggctctcagggtaagacgtgtctgaactggcctgtggcagttaactaaagagtactcctaccaataatggagtcaagatgtatgtttcccataggccacgctggtcactgaaagagatgggctatgagccatcttgaaaactaccctgcacanatggactgccggcctggagccaggcaccctgcagctgagtgccatataatgttgaagctgttgagggaggagaggttggaagctgccagcttagcgaatctcagctgtcgtttcccagcagggtgtattccccaggaaagaaagtcattcccccacccctggctcaaagtaataattaacagtgactgggtaaggcaggatctttttttcctaattccctcccctccagaaagggcagcaacagctcttgaatgggaaagaaggtggagggaggaaaagaaaaaccaattgccccaacactgctgtctttaagcttcccacccaaagacctcagtaagaggcagaattatgttttcaattaagagagagtttggcctcttggtgtttcaaaagtgtaggctttttaatacctagagaaactgatgatttgttgattaccaaaaagggaccagaaaagctacatagcctgagatttcatccccagaaaaacgaatccagagagcagacttgcaaaaaaaaaaaaaaaaaa

SEQ ID NO: 144715 - DNA, 378 bp, Homo sapiens
  misc_feature (1)...(378): n = a,t,c or g
gagatccattctaagcctccaaagctccagcaggttcgctgtctgtcagagcccagaagtgcttcttataaccaaagtttcnnnnnnnnnnnnnnnnnnnnnnnnnnnnnnnnnnnnnnnnnnnnnnnnnnnnnnnnnnnnnnnnnnnnnnnnnnnnnnnnnnnnnnnnnnnnnnnnnnnnnnnnnnnnnnnnnctccattattggcacatagtcaatgttttacttcccatgccctgaatccttaagaaactaggaacctagaaacaaaaacaacttttcataaccacatcaaatattgctaatttattccttttgttagattcactaatttttaacattaaaaatgacttgtacactttacaaattaaaacattag

SEQ ID NO: 144716 - DNA, 353 bp, Homo sapiens
  misc_feature (1)...(353): n = a,t,c or g
ctagtgttttaatttgtaaagtgtacaagtcatttttaatgttaaaaattagtgaatctaacaaaaggaataaattatcactatttgatgtggatatgaaaaggtgtttttgtttctaggttcctagcttcttaaggattcagggcatgggaagtaaaacattgactatgtgccaataatggaggtnnnnnnnnnnnnnnnnnnnnnnnnnnnnnnnnnnnnnnnnnnnnnnnnnnnnnnnnnnnnnnnnnnnnnnnnnnnnnnnnnnnnnnnnnnnnnnnnnnnnnnnnnnnnacaaaaactttgggtataacaagcacttctggggtctgacagacagtgaacctgctggg

SEQ ID NO: 144717 - DNA, 2970 bp, Homo sapiens
cagcagcgtgctaagaagcagtcacataaacagcagcaggagtaggcctcctgcttttcaaaagcagagtactgcagggtcgcgaaatgcaagacactcagatgtttgaaaatctcccgagttgagaatggctactgtaaaagcgtcaccaagaaactctgacgatctggacagtcctaactctgtgttagcaatacttacttccggaaaattaatgctacttcttgtagatttttgcaaataggaaacccccttgaagaagatctcaaattacgccccccacccccaaaaaaagacaaacaggggagaacaaagttttggcatgcctgcaggaacggtggcttttttagaaactacctaggaggcagaagctaagtgatttgctcatgcctcttacctgggagtagaaggtgggaagaaatggaccgaggctgtgacgagaagacaaggcacagtgcagcttggtgaagccacacgctgactgcgttctgccccctcttcatgcagtgctgcgggctggtgcatcgccggcgagtacgggtgtcctatggttcggcagactcctacactagccgtccatccgattccgatgtatctctggaggaggaccgggaggcagtgcgcagagaagcggagcggcaggcccaggcacagttggaaaaagcaaagacaaagcccgttgcatttgcggttcggacaaatgtcagctacagtgcggcccatgaagatgatgttccagtgcctggcatggccatctcattcgaagcaaaagattttctgcatgttaaggaaaaatttaacaatgactggtggatagggcgattggtaaaagaaggctgtgaaatcggattcattccaagcccagtcaaactagaaaacatgaggctgcagcatgaacagagagccaagcaagggaaattctactccagtaaatcaggaggaaattcatcatccagtttgggtgacatagtacctagttccagaaaatcaacacctccatcatctgctatagacatagatgctactggcttagatgcagaagaaaatgatattccagcaaaccaccgctcccctaaacccagtgcaaacagtgtaacgtcaccccactccaaagagaaaagaatgcccttctttaagaagacagagcacactcctccgtatgatgtggtaccttccatgcgaccagtggtcctagtgggcccttctctgaagggctacgaggtcacagatatgatgcaaaaagcgctgtttgattttttaaaacacagatttgaagggcggatatccatcacaagggtcaccgctgacatctcgcttgccaaacgctcggtattaaacaatcccagtaagcacgcaataatagaaagatccaacacaaggtcaagcttagcggaagttcagagtgaaatcgaaaggatttttgaacttgcaagaacattgcagttggtggtccttgacgcggatacaattaatcatccagctcaactcagtaaaacctccttggcccctattatagtatatgtaaagatttcttctcctaaggttttacaaaggttaataaaatctcgagggaaatctcaagctaaacacctcaacgtccagatggtagcagctgataaactggctcagtgtcctccagagctgttcgatgtgatcttggatgagaaccagcttgaggatgcctgtgagcaccttgccgactatctggaggcctactggaaggccacccatcctcccagcagtagcctccccaaccctctccttagccgtacattagccacttcaagtctgcctcttagccccaccctagcctctaattcacagggttctcaaggtgatcagaggactgatcgctccgctcctatccgttctgcttcccaagctgaagaagaacctagtgtggaaccagtcaagaaatcccagcaccgctcttcctcctcagccccacaccacaaccatcgcagtgggacaagtcgcggcctctccaggcaagagacatttgactcggaaacccaggagagtcgagactctgcctacgtagagccaaaggaagattattcccatgaccacgtggaccactatgcctcacaccgtgaccacaaccacagagacgagacccacgggagcagtgaccacagacacagggagtcccggcaccgttcccgggacgtggatcgagagcaggaccacaacgagtgcaacaagcagcgcagccgtcataaatccaaggatcgctactgtgaaaaggatggagaagtgatatcaaaaaaacggaatgaggctggggagtggaacagggatgtttacatcccccaatgagttttgcccttttgtgtttttttttttttttttttgaagtcttgtataactaacagcatccccaaaacaaaaagtctttggggtctacactgcaatcatatgtgatctgtcttgtaatattttgtattattgctgttgcttgaatagcaatagcatggatagagtattgagatactttttcttttgtaagtgctacataaattggcctggtatggctgcagtcctccggttgcatactggactcttcaaaaactgttttgggtagctgccacttgaacaaaatctgttgccacccaggtgatgttagtgttttaagaaatgtagttgatgtatccaacaagccagaatcagcacagataaaaagtggaatttcttgtttctccagatttttaatacgttaatacgcaggcatctgatttgcatattcattcatggaccactgtttcttgcttgtacctctggctgactaaatttggggacagattcagtcttgccttacacaaaggggatcataaagttagaatctattttctatgtactagtactgtgtactgtatagacagtttgtaaatgttatttctgcaaacaaacacctccttattatatataatatatatatatatatcagtttgatcacactattttagagtc

SEQ ID NO: 144718 - DNA, 1826 bp, Homo sapiens
tcgctttagtgatgtgcttacagttctactgtctgtgtactttatctggtgcaattgctgttataatcatatggcgttcattaagtgtgcgatggagccgtttgtaggcctgattcccgggtcgaccacgcgtgcgcgaaaactcttcactgcagcggttcagctgctgaagccagagggtgtgctggtttatagcacgtgcactatgagactggccgagaatgaagaacaggttgcctgggccctgacaaaatttccttgccttcagcttcagccccaggaaccgcagattggaggagaaggaatgagggggagctgggctctcatgtgaacagttgaaacagctgcagcgatttgatccattcggctgtgccattaccggacactgacatggactctcttagagaggccagaacacgaagacatgttgcgtctggctaataaggactctataggtttttttattgcaaaatttgtaaaatgcaaaagcacataggagtagggatggatgctcagaaatgaaaattccaaacatttgctgtctgtggttttttttttttttttttttttaaccaaagtgttgtcaggccaactgaatgatgatgtggttgctatggaaacagaaaaggctgccagctgttttaccagggatccagagacatagaggaagtagggggtggtatgagattatattttctgtttttaaaagattttttttttttatgtatttagtagagtataaagaaaagcagatgcctatagatgtctggagcatattttcatttgtgatctaatgttttaatttgtaaagtgtacaagtcatttttaatgttaaaaattagtgaatctaacaaaaggaataaaataacaatatttgatgtggttatgaaaagttgtttttgtttctaggttcctagtttcttaaggattcagggcatgggaagtaaaacattgactatgtgccaataatggaggttgtcaccagggctggagtgcattggtacagtcacggttcactgcagcctccacctcctggggcttcaagggatcctcctatctcagcctcccaagtagctgggtctacagaacagaaactttggttataagaagcacttctgggttctgacagacagtgaacctgctggagtcggtggtggggaggaatggttcttcttcagcttgggaagcagaacggataggagcggagcgatcagtcctctgatcaccttgagaaccctggcagcgaaaggagcacaccaggcgttaaccaagactatggaaatgatgtcagacaaaaagcgaatttgagtgactttcttattcgagttcaaaatgggtcgtaaagcagtggagacaacttgcaatatcaacaatgcatttggcccaggaactgctaatgaacgtacagtgcggtggtggttcaccgaagctttgcaaaggagacgagggacttgaagatgaggagccatagtggcctgacccattggaagttgacagcgacctcctcaagaacaataatcaaagctgattcctcttacaacctacacgagaagttgctgaagaattcaacattgaccattctatggtctttcctacatttgaagcaaatcggaaaggtgaaaaaactcaataagtaggtgcctcatgagccaagcaaaaataaattgttgtttggaagcatcttctcttattctgtgcaacaacaatgaaccatttctcagtcggattgtgacgtgggacgaaaattggattttatatgacaaccactgacaaccagctcagctgttggactgagaagctccaaagccaaacttgcaccaaaaaaa

SEQ ID NO: 144719 - DNA, 724 bp, Homo sapiens
ggacaggcaggtgatgtttaatttgctttgtagagcatgtagcccaagctcaggtggggaagggtgtaaatattatgcgatgttttatttcagctaaaaaatctccttgagctggatgacaagagtctgggttgcttccagctcctttcctcttgctgtttgcccttgggtgaagaacttcctctttctctgactttttttttttcagggctttttgggtgtgtgattgtgatggggccttaacattaattattatccttaaaattttccttggggattcctctgtaaaacttacatgttgccttctctttgtaaccttgcctgacagccccttttccttaccaggtcctggggtagcgctgattgcttcctcctttgtatttttacagtaccctttttcactcctttcttacaggtggatcatccttgttttggtaattgtcaacttgcccttcctacactgttagttcaagcttcttgcaatggggaactgagtctcatgcttaaaaacaaaacaaaacaaaacctctggcacctaggaggccatgttttatacgtgggagggggagtgggctcaggaaatatttgttggattaaaaaaaattaggctgggaaacatcagctcatgcctataatcccagcactttaggaggctgaggtgggcagatcgcttgagcccaggagtttgataccagcctggacaacatagcaagacctgtctcta

SEQ ID NO: 144720 - DNA, 371 bp, Homo sapiens
  misc_feature (1)...(371): n = a,t,c or g
cagcgctcacgaggccgtgggagcctgcgcataggacagacgtgcctgcgccgggacatgctatcccaggagctacccaggctagagttcccgttgctgctgttgctgatgctgctgatgccgtccgccgccgtgccctgcccacagagccacgctcttcgaccccacctgggagtccctggacgcccgccagctgcaccgcgtggtttgaccaggccaagatcggcatcttaatacactggggagtgcttaccgggcccagctactgtatcgagagggtctagcggaattggcaaatggaaaagataccgaagaatgtggaatttatgacagatgattaccctcctaggtacacacatgaagattttggn

SEQ ID NO: 144721 - DNA, 379 bp, Homo sapiens
  misc_feature (1)...(379): n = a,t,c or g
nnnnnnnnnnnnnnnnnnnnnnnnnnnnnnnnnnnnnnnnnnnnnnnnnnnnnnnnnnnnnnnnnnnnnnnnnnnnnnnnnnnnnnnnnnnnnnnnnnnnnnnnnnnnnnnnnnnnnnnnnnnnnnnnnnnnnnnnnnnnnnnnnnnntccctttctatgtagaaaacccataataatacacactaaaaaactttctcctggaactaataagcaattataacaaggttgcaaaatacaagattaacatacaaaggtcaatctatttcttatatgcaagccataaacaagtagattttaaagtacaaacacaataccatttacattagcaccctccaatgaaatagttcagtataagtctaacaaaataagtacaagatg

SEQ ID NO: 144722 - DNA, 349 bp, Homo sapiens
  misc_feature (1)...(349): n = a,t,c or g
aaaaaaaacaatttaaaagcagagattgtcatattgtatatataaaacaacaaagacctatgccacctacaaagaaatacataggttgaagtaaatggatgcaaaaggatataccatgcaaacactaatcaaaagaaagctggagtagctatattaatatcagacaaaaaacacttaaggcaagaatattatcagggttaaaaagagatgttannnnnnnnnnnnnnnnnnnnnnnnnnnnnnnnnnnnnnnnnnnnnnnnnnnnnnnnnnnnnnnnnnnnnnnnnnnnnnnnnnnnnnnnnnnnnnnnnnnnnnnnnnnnnnnnnnnnnnnnnnnnnnnnnnnnnnnn

SEQ ID NO: 144723 - DNA, 675 bp, Homo sapiens
  misc_feature (1)...(675): n = a,t,c or g
agcaaacactaagagaattcatcaccactggactaatactatagtagaggctcaaaggagtcccagacatggaaacaaaaggttgatatttgccatcataaaaacacatgaaagtataaaattaataagtctcataaaacaattacacgaagaagagaaaggaatcaaatggcaccatgatagaactccatgaaaccacaaagacagaagaaaaaataaaacaaagaatttacaaaacagctagataacaatatatttcagtaacaagatgtcatatatcaatgttaaccttgaacctaaatggatcaaatgctccgcttaaaagatacagcctgactgaatagatttttttaaatgacacaactgtgtgatacctagacacacagatcgactgaaagtgaaggggtagagaaaaacatgctacacaaacagaaagcaaaagcagtaagaatagctattcttatgccagataaaacagacgttatgnnnnnnnnnnnnnnnnnnnnncgtaaatagataatagtgaagggatcaattctgcaggaggatatgacaattcaaaatatttatacacccaacaccatagcacccataaataagtaaagctaatattactaggcctcaagggatagatacactccaatacaataatggttgggaaattcagtatccggc

SEQ ID NO: 144724 - DNA, 463 bp, Homo sapiens; identical to SEQ ID NO: 130872

SEQ ID NO: 144725 - DNA, 795 bp, Homo sapiens
  misc_feature (1)...(795): n = a,t,c or g
caggagaccgccactcacgcggagccaatcggaactcgcggcggggttgctgggtcttccaggatcgcgcattagcggacgctggctacgggtggccgggcgggatgtaaccggctgctgagctggcagttctgtgtccccaggcttcggcccggccgccgccgcacataaactgcgaggaggagctttacgacttcccggtcttcggggccgggcgcagcaagggccagactctgcgctagcaggcgctgcgcgccaaccggccggcccctgtcgcagaaggtgcaaccgatcgcactgtcgcgcagaagctcctcaatggccagcgccagctgcagccccggctgcccactcgcctcacctgagcctgggtggaacaatccaaagttttaatcaaagaaggtggtattcagttgctgcttacaatagttgataccccaggatttggagatgcagtggataatagtaattgctggcagcctgttatcaaatactttgacagcaaatctcaggacctacctaaatgcagaatcgcaagtgaacagatgtcagatgcctggtaacagggtgcnactgttgtttatacttcattgctccttcaggacatggaccgttacataactgaagactcccaccttcaggcaggattgggtagtacatgtttgtaacaacctggcattgccttttgttgagacttaaaccattggatattgagtttacaaagcatttgcatgaaaaagtgaatatcatcccacttattgccaaagcagacacactcatgccagaggaatgcca

SEQ ID NO: 144726 - DNA, 966 bp, Homo sapiens
gcagagccaatcagaactcgcggtgggggctgctggttcttccaggagcgcgcatgagcggacgctgcctactggtggccgggcgggatgtaaccggctgctgagctggcagttctgtgtcgttaggtttttgcccggccgccgccgcacataagccacgaggaggagctttacgacttcccgtttttcggcgccgggcgcagcaagggccagactatgcgctagcaggcgttgcgcgccaaccggccggcacctgtcgcagaaggtgcaaccgatcgcactgtcgcgcagaagatcctcaatggccaacgccagctgcagccccggccgcccactcgcctcatatgagcctgggcgaatctggactgggaaagttgatattaatcaactcattattcctcacagatttgtattctccagagtatccaggtccttctcagagaattaaaaagcctgtacaggtctacatattggtatttttaattgatgataagctggaataatattaatacacacaaagcacgtgttgtaactttcattatgcttccctagagctggcagcctgctatcaattacattgatagtaaatttgaggactacctaaatgcagaatcgcgagtgaacagatgtcagatgcctggtaacagggtgcaggggtgtttatacttcattgctccttcaggacatggaccattacataactgaagactcccaccttcaggcaggattgggtagtacgtgtttgtaactacctggcgattgccttttgttgaggtggcgagacaagaaacatggattattgcgtggagttccattagtaggaataagactcattctacattcttgttgttcttagtgttttttgttttttcatgagaaggaattgtatcagcacaaggcaatattctaacatgacaatgacagcagacagaacctcaataaactctgacttggtactgcaaaaaa

SEQ ID NO: 144727 - DNA, 685 bp, Homo sapiens
  misc_feature (1)...(685): n = a,t,c or g
gaggggatgtcggtcagtgcgagatccgctgctgctgaggagaggagcgtcaacagcagcaccatggtagctcaacagaagaaccttgaaggctatgtgggatttgccaatctcccaaatcaagtatacagaaaatcggtgaagagaggttttgaattcacgcttatggtagtggaggtgatgtttcaccatgttgccgtggctaatcttgaactcctgggctcaagcgatccatccgccttggcctcccaaagtgctaggattacaggtgaatctggattgggaaagtcgacattaatcaactcattattcctcacagatttgtattctccagagtatccaggtccttctcatagaattaaaaagactgtacaggtggaacaatccaaagttttaatcaaagaaggtggtgttcagttgctgctcacaataagttgataccccaggattttggagatgcagtggataataagtaattgcctggcagcctgtttatcgactacattgatagtaaatttgaggactacctaaatgcagaatcacgagtgaccagacgtcagatgcctgattaacaggggtgcagtgttgtttatacttcattgctccttcaggacatggactttaaaccattggatattgagtttatgaagcgtttgcatggaaaagtgnatatcatcccncttaa

SEQ ID NO: 144728 - DNA, 2945 bp, Homo sapiens
tttttttttttttttttgccggtgaataatataattttattttacccaatatatccagaatattatcacttcaacatgaaaccaatctaaaactcttaaatgagatatttcacattccccacctccttattctaagtcttaaaaatcaggtgtgaactttgcacttgcagcaggttttggtttggacgagccaaatcccaagtgctccagagccctggtggccagtggctccaccctggtcagagagaccctagaagcctcagcactccctggaggaccaaggacgtggggagggaggaagggaaagcagagtgtgacttgcacatttaggcgtgcctgtactgtttatacttgagattagttggctgcttttaaatacccgacagtttcacataaaaatttgaatgacctggttttcttgaaaaattagaaggtctcagaactctggacccaggttcttccagaactacggccctgtcccctttacagagtcccagctctcagggtccccactgccacacccgtttgcatgagatgcctgggccactgatacctgatctgtgccctagaatgctgggctgcctggcatgctctgagacactttctgacatgtccccacatgctctgacatgttcctgatggctctgggacactgacatgttcctgatggctctgggacactgacatgttcctgacatcctctggggccgaggagcccccctgttgtgtgctaggggctttacccatgctatctcacttaatcctcactttgaccctgcaaggcagatattccttgctgtacccattttacatggggggaaactgaggctccagctggtttagcagctctcccaagtcacacagtaggtaaagagctcagccggcaacatgatattgaacaggcaaaaattggaagcaatccccctaaaaactggaacaagacaaggatgtccactctcacccctcctattcaatagagtactggaagtcctagtcagagcaattaggcaagagaaagaaataaaagggatccaaatgaaaaaaaaaaaaagaggaagtcaaattatctttgttcatccatgatatgattctatacctagaaaaccctgaagattcctccaaaagactcctagacttgataaacaacttcagtaaagtctcaatgttataagtaaaatgcttgtttagaaacagaatgcttgttcctcggtactgcaaggaaaaatcagcatttagacaaaaagtttttttagcaagccaattttactttctgcagaaagggtgctcctcgcagatggaacaatggcgagagcacacctgaataatggagagaagcaatttttattccttacgcagcttgtccctgctaccgtgtcctgtctccattggctggagccaaacctcacagtctaaactaaaacccgactggctaataacttaaaacttttctaaataggtaaaagcagtggaaagacaaaggaaaagaggaagttgcttatgaaaggacttagaaaagtaataacatttccaaataaggaaggggcatgggctgcaagctgggacatgcctgtgagcacgtccagcacaaatatcttggttaaagtacaaggacatagaatgtactcattcccttatatctaacagctacatatgatagggcttaacaaaaagttattagcacaaagcgaaaaggcttaaaaaaagttagtctttagaaaaaactattatttctaacacataatttactccttaacaaaaaaaaaacttttgactttctacactcaagatacaaaatcagtgtacaaaaatcagtagcatttctttttatttgagacggagtctcactatcacccaggctggagtgcagtggtgtgatcgcagctcactgcaacctccgcctcccaggttcaagcaattctcctgcctcagcctcccaagtagctgggattacaggcaggtgttaccacacctggctaatttttgtatttttaattgagacggggtttcaccatgttggtcaggctggtctcaaactcctgacctcaggtgatctgcccacctcggcctcccaaagtgctgggattacaggcgtgagccactgtgcctggcctaaaaatcagtagcatttctatgcaccaacaatgttcaggttcaggctgagaaccatatcaggaacgtggtgatctcagttacaatagtcccccatacacaaaataaaataccaaagaatgtatccagccaaggaggtgaaagagctctacagagagaactataaaacactgatgaaagaaatcatagatgacacaaaaaaatggaaaaacatcccagctaatgggttggaagaaagcaatctacagatacaacacaattcctatcaaattatcaacatcatttttcacagaattagaaaaaaaaatcctaaaattcatatggaaccaaaaaatagccgaatagccaaagcaatcctaggcaaaaatacaaagctggaggcatcacattacctgacttcaaactatactacaagactacagtaacaaaaacagcatggtatactggtacaaaaataggcacagagatcaatggaacagaacagagaacccagaaataaagccatatacctgcaaccaactgatttttgacaaaatcaacaaaaataaacaataaggaaaggacatcctattcaataaatagtgttggaaaaactggctacctatatgcagaagaatgacgctgggcccctacctctcaccatatacaaaaattacctctagatggattacagacttaaatgtaagacttcaaactttaaacattctagaagaaaacctaggaaaaaatcttatggacatttcctaggcaaagaatttatgactagacctcaaaggcatatgcaacaaaaacaaaaattgacaaatgagacttaatcaaattaaagagcttctgca

SEQ ID NO: 144729 - DNA, 1050 bp, Homo sapiens
atggtctcgatctcctggcctcgtgatctgcccgcctcggcctcccaaagtgctgggattacaggtctgattggggccctggtcctgtctgtgggcatctatgcagaggttgagcggcagaaatataaaacccttgaaagtgccttcctggctccagccatcatcctcatcctcctgggcgtcgtcatgttcatggtctccttcattggtgtgctggcgtccctccgtgacaacctgtaccttctccaagcattcatgtacatccttgggatctgcctcatcatggagctcattggtggcgtggtggccttgaccttccggaaccagcagttgctcttaaggcagcaggtgctgtcccacaccctgggttgtgcagacctctcagatggcccaggatctggccctgtgaaaatgttcatgggagtgcctgtgattccagcccagccaccagagctcctggccagcctgcggctttccaggggctacgggttagtgctttcctggctggagcccaggtatgagaagatgatcagtggtatgtacctgggtgaaatcgtccgcaacatcttaatcgacttcaccaagaagggattcctcttccgagggcagatctctgagacgctgaagacccggggcatctttgagaccaagtttctctctcagatcgagagtgaccgattagcactgctccaggtccgggctatcctccagcagctaggtctgaatagcacctgcgatgacagtatcctcgtcaagacagtgtgcggggtggtgtccaggagggccgcacagctgtgtggcgcaggcatggctgcggttgtggataagatccgcgagaacagaggactggaccgtctgaatgtgactgtgggagtggacgggacactctacaagcttcatccacacttctccagaatcatgcaccagacggtgaaggaactgtcaccaaaatgtaacgtgtccttcctcctgtctgaggatggcagcggcaagggggccgccctcatcacggccgtgggcgtgcggttacgcacagaggcaagcagctaa

SEQ ID NO: 144730 - DNA, 940 bp, Homo sapiens
cctttttgagacagtctcactctgtcacccaggctggagtgcagtggcgcaatagctcactgcagcctcaacctcctgggctcaggcgatcctcccacttcagcctcccaggtagctgggaccacagccaccatgcccagctaatttttcgtattttttgtagagatggggtttcactgtgttgccaaggctcaagcatataatattttttttttttttttgagatggagtctcgctctgtcgcccaggcgggagtgctgtggcgcgatctccgttcactgcaagctccgccttccgggttcacgccattctccttgcctcagcctcccaagtagctgggattacaggcgcctgccaccacgcccggctaatttttttttcgtatttttagtagagacggggtttcacccatgttagccagggatgggtctcgatctcctgacctcgtgatccgccccgcctcggcctcccaaagtgctggggattacagggcgtgagccatcgcgcccggcaaaatgagactatttaatagcttataagtgactgaaaaggtacagaacagtctgaggtgccattctatgagtaggagatggggtgatggacagcagctatgccacgaaatacaaccacttacagtatggtatctaatgaactgagataccacttaagtgataagtaataaagactatctgtgggtacaatgtattatttacaaaatagcctgaaaatggttgcttcatcccattatttagaaatactacagaaaataatggggaaaaaaactccaccataattttggaaaaggcaagagttccaaactacattcggagagtcacccacattattgacatttctctttaaaacactgtttggtgaaactggagcaacatttctttccccagaatttagtccatactccctcatagggttacccctggga

SEQ ID NO: 144731 - DNA, 881 bp, Homo sapiens
agagaagagcaactctcacagatagggatccagataacattagcagctgatttctcgggcagaaaccttgaaggccagcaggcagtggattatatatttaaaataatgaagaaacctgtcaattgagaaatatatagctggaaaacttatccttcaaaaatgaaggagaaattaagacatttccggatttttttttaaaactgaaaaaaaatccatttatccctgaatttgacattcaggaagtgttaagtccttcaggttgaaataaatgaactctaggcaataactatgtaagtaaataagcaagctgtatgaatatacaaagctctctggtaaaggtaaatacataaacaaacataaaaacagtcctattgtaattttggtttgtaactctgctttttattttctacataatttaaaaggcaaatgcataaaatgtaattagtagatctgttagcatggtatacaatgaataaagatataatttgtcacatcaataacataaaaagagtagagctatatatatatagcagtagaattttggtatgtgattgaacttaagttgaaataaattcaaattaaaatgttataactctaggatgttatatgtaattctcatagtaaccaaaaatgaaatatacatagaatataaacaaaaggaaatgagactagaaacaaaatgtgtcactacaaaaaaaatcaactaaagataaaagaagtaaataattgagaaaatgactggcaaaaatcagtaactctgacgtattaaaactttccatgctacataaatctgaaaactctatttcacataaaactggagctgaaagaaacaaatatttacttataaagttaaaagttatatggaaaaccaacactaattt

SEQ ID NO: 144732 - DNA, 492 bp, Homo sapiens
ggagaaacacaaacaccacccagtaacacgcagacatatgcccatagcatcccacaggcccaggcaggaggtcccaccccagaccctgccccagacgctccctcaccctctcggccccctcgccctggcccccaggttctctgcagagatctctcctggacccccagcggtctccttggcgcccacgaacacaggcgtgcacacgcagcgcacatgcattgagacacacgatacctcgttccaccttgggcgtcacggtggggctggaggcagccccccccccacaacacttgagggccaaagggacacccctgtccccggggctcaacctccccctgggccgaggccttggcccacacagctgagggagaggcccagccctgagcctcccccaccaggactgggcctccccggcagcaagaccccggcactccccgccaggcccagggtggggtagatgggcccaaaggcccagccccacactcctttccc

SEQ ID NO: 144733 - DNA, 669 bp, Homo sapiens
cggacgcgtgggcggacgcgtgggttctttttggcttaatctttgttgaattgaaaatatgtataactcttctggtgaaagtgtagcaagtacagtcatgaaattttgtggtcttcctgacatgttcttccagcataacgttgccacctttagttggaaacgtatccttatctaataattaagccctggagaaaaattaatttatatattttattaattacataaggacattgttattagctaagcagagtaagtaaatcgaaataaaactttaaaaatgcctttatggagagaatgactatctctgaaagcttgtttttaatgatgataaaattcatgatcagaatttgtttctgtttgctttaattcaggggtcaaaaactgaaataccatcagaggcccaggaggggctagttgtaactggcaaatatagtaaattaatttgctctggttgataggtagcaagcagggtttatatacattgtcacctacttttccagttaacaggagagactggagattttatgaaatttgatatttaaatgttggtaactgggttgggcaccatggctcacacctctaatcccagcacttcgggaggctgaggcgggtggagcacctgaggtcaggagttaaagaccatcctgaccagcctggtgaaacacagtc

SEQ ID NO: 144734 - DNA, 1328 bp, Homo sapiens
cgctcccccgtaagcccacgtctcggtttccacacagataccacgccaacgcccacaagtcgcggtcacgctgtccgtcccacccatctcaggctagttccgtgcgccacaagggaagttgccaaatggccagatgctctatggccgacacccccatccccttcaggcaccgcccacagctagagcctctcccagccatgttctcaccctgcttggaacagaacaacccccgcgggcctaaacccactctcctgaaaagtggtagggagttcccgcctggttgaggacaagcccaagaccaaggcctgtaggcagaagggagcaagttaccttgatttggaaaccaaaacaaaactaaagcgcagagagcctccccttcccaccgtgcttaccctgaaatcccattcaggctattgtgcttgcagcccaggactgggcctgtgcttctgcttgggccctgaagttcaaagtgcccagaaccgccctgtgaccaagagcaagccagggtgggggaaggcatgctcccctctcactgggccctgcctgccttctcctctgaccttccctccgtgcctagccctccgagccctgtcctaccagatccaaacagaacagctactgcttccaggaatccaacggtcaccgagagatacctaaatgcctcactgtgctggagccagccagaccttccccagggaccaatcattactgacatgccctctgctccagctgtgcctttaacatctgacaactgccccagcatgtccccagctccctcagggaaggcagtaaggcagatgccacctggcacatggtggggttcagggtagcagaatcaagccacagcaactgggggcatggggaaggaggcagagggacataggcaacaggggctcaagggggctttggggagagaaggaggagaaggcaggggagagaaaagatgagcctgccctcgcaagatcaacctctcaggccccaagcagacttcatccttgcattttcaatcccctgggggtcaggtaccccaggtgggctctgcacccccagctgtgtgcccctcctacatcaggggtaaggcccagctccccatcagcttccttgaactgtaaatcagattagatttggggatctgggctcagtctcaggagcagataaaactgggacactcagccttggggaagacaaagaaaagccacataggaaagagatagacagaccatgggcaagggaagattgcacagggaatgtgacatcagggaacagatgagggaggaggaggctgaaggaggcgaggcctggagggatcaaaagagccagggatattc

SEQ ID NO: 144735 - DNA, 389 bp, Homo sapiens
tcaggtttctgggtgttgagtgtccaggtgtctgggtgtcaggtgtctgggtgtctgagtgtcaggtgtctaggtgtctgggtgtcaggcgtctcagtgtctgggtgtcaggtgtctcggtgtccgggtgtccaggtgtccgggtgtcaggtgtctgggtgtcaggtgtccgggtgtctggatgtctgggtgtcaggtgtctgggtgtcaggtgtcttagtatctgggcgtcatgcgtctgcatttactgtattttgaatatctaggatcctgatacattgatggcgtcgctgttcactctcttactattactactaatgaatccgatgctttgctctgagattttcatcacttctttcttttattcatctttatctattattcttcct

SEQ ID NO: 144736 - DNA, 516 bp, Homo sapiens
agcagccccaaaccttttagctaccaccacgggttgatttactagacccatttttgctctcaccgacttcgaactgtgcattttctcccactcttttgactgggggtggtatgcggggggaggatggggcttggtgaagaaaaccagggaaaggcaaacgctgcctaaaactcccagggtggctcccctaagaattgctatcctgcttgtttcttttctcggctgggatccgaccgactcccaggtcgcctcggacttctttggaacttggtgggcggcgcctaggtgcggggttcgtggtgatctgggcgccgacacttaggccgggggcaggtttccttcctgggaccctttctcttccagaggctctcaagcctctaagcccgtgcgcatgccgcctaccaggtagatgcggcgagtggaaggcagccttgtcccgggcacgatcggcggactcagcttttcgcagtctctgctcccagcagggatttacagaactgctcccgagagcgtttc

SEQ ID NO: 144737 - DNA, 583 bp, Homo sapiens
attgacccctgaggctcgagcccgtttgaacggtccgacccacgcgtccgaaggaagccccgtggtcccaggggacagaaatggcggttgctgacgcctggaaattcccctgaaggtggagcaccacccaaccgcccctgggtcccaccctccctcaaggcctcctccacctccacctccaccccgcctggcctggcgtccacctctgcggctcctacctgggtgcaatcgagttaaatggctgataagcagatcagcctgccagccaagctcatcaatggcggcatcgccgggcctgatcggtgtcacctgcgtgtttcccatcgacctggccaagaccaggctgcagaaccagcagaacggccagcgcgtgtacacgagcatgtccgactgcctcatcaagaccgtccgctcccagggctacttcggcatgtaccggggagctgctgtgaacttgaccctcgtcacccccgagaaggccatcaagctgggcagccaacgacttcttccgacatcagctcttttaaggacgggcagaagcttgaccctgcttaaagagattgttgggcgggttttggggttg

SEQ ID NO: 144738 - DNA, 492 bp, Homo sapiens
tttcgtcgggcctcgggtgcgcgggcacgcgggactcccagctgtcaatcaggcgcgggctgagctctacgaggcggagcggcggcggtggcgacggcgatgggaccccagcgagagatctgcagctaggctggctgcacttgctccacgggtcaggggatcggagggggattgaagaatgcgccattaaaaggaaagatcaaggagtaaaccagaagaagaagaaaaagaggacttcaaagctgggaaggatgagttcttgcagcaacgtctgtgggtccaggcaggcacaggctgcagctgagggtggttaccagcgctatggagtccggtcctacctgcaccagttttatgaggactgtacagcctcaattttgggagcatgaggatgattttcatatcctaagatcacctaccaggcggagctttatatctttgaaggggttgactcattctcaggtacacttttgtgatacctcgcatggactggcc

SEQ ID NO: 144739 - DNA, 390 bp, Homo sapiens
ggcccaggaaccggcccggagccgtggacgccctacagctgagaaggggacccaaggggtcggccgcggccaaggcccctaggaccgccgccccagctcacgctgccgacggcagctatagacattctgcgtcaggtccgggctcctggacttcgcctttcccgagccctggaggtggggagaaaagtggaagaactggccagagagtctggaagtttgggttctggtcctggctgtgccactgactcactgtgaccttgggatcttgtgctgtgaagacatttcccaagtgcttcatgttagccagcaaatctgacccacaaggcctggaaagaggtgattgttaggttgcgcagaggtggtcttatccagctcagcttcccctgggag

SEQ ID NO: 144740 - DNA, 1049 bp, Homo sapiens
  misc_feature (1)...(1049): n = a,t,c or g
attgancgccctnggnaccgttgaggaacttccgggtcgacccacgcgttcgcggtgaacgcacacggtcaggcaatctgcttacttgtcattccgcggatcctggttccatgaaccggaccggagccgtggacgccctacagctgagaaggggacccaaggggtcggccgcggccaaggcccctaggaccgccgccccagctcacgctgccgacggcagctatagacattctgcgtcaggtccgggctcctggacttcgcctttcccgagccctggaggtggggagaaaaggttcaccaatttttaaaatccaaatatatctcatggtacagtggaagaactggccatagagtctggaagttagggttctggtcctggctggggccactgactcactgtgaccttgggatcttgtgctgtgaagacatttcccaagtgcttcatgttagccagcaaatctgacccacaaggcctggaaagaggtgattgttaggttgcgcagaggtggtcttatccagctcagcttcccctgggacccaccgtgggacctgaggcagaactgggggtggacttggcctcctccatgggcacacccggcttgcagataccgacttgcttgaccgtgggatgttgaaggacacgcttgctcaggctccgccaccccctttaggggaggcctattgccaccaaggcccgggcccatgggctggaggtggagccctcagccctggaacaaggcttcaggcaggcatacaagggctcagagccacagcttccccaactacggcctgagccacggccttaacctcccgccaagtggtggctggatgtggtcctgcagaccttccacctggcgggtgtccaggatgctcaggctgtagcccccatcgctgaacagcttttataaagacttcagccaaccctgcaaccttggcaggtgttggatggggctgaggacaccctgagggagtgccgcacacggcgtctgagactggcagtgatctccaactttgaccgacggctatagggcatactggggggccttggc

SEQ ID NO: 144741 - DNA, 1083 bp, Homo sapiens
agtccgtgttgtggaaatcaaaccctgaagtggaaatggagagatgtgtatgcatggcacagtgtttgtttttttagaggatcatcattgctggcctggtctgagacctctgtcttggaagaactgtgctatacaggaaaaagtgaacaaggtggaggaataggggttattctgctcagaagtcccatgaaaggaaaagcttattcaagctcaagacataaagatggaccctttgatatatcttctctccattcttagtctgccttcaccttatctaacaaaaaacaacatgcagctactgagttgtatgtagagacatactcttggtgggccagggaaggtaaaaacagggaccagcaatgtcaagtttttgaactagaaaagtgggatgtttttagttttgtctataacctgtagctgtgccaacccttgagaggacttgtgcaaagcatgtgtgcccagacccatcagactcctcagatatgggcctcaattacctaggaggtgtaggagttaccgtgggagggcctccaataaggaggggcaagcacacagatgggctaggaagcctgttatggcttctggtcaggatgaacccttggccaagttcttgaggaaaccaggtctatattcctgaagggacagttcggtttgggactctattaggtttccagtagtaatataggctgcttgcatccattttaacattccataggggaaactctttgagccaggctataaatggagctgttgcaggtaggggagaacagacctggaaaatgggaaccaggaagtgagatcctgttggcaaagggaatgtagagcttccagggcgcattgcccactgttttcattgcttaccagtcctccatgtctgtctatctctttctgttctctgtgtctgttttgtcttattttggtgcttttcgacgtccctattttagcgaattattgtttttgagcgataccttacttttttggtctgtgttttgtgttgttgaggtctttgttttatctgcacttgctttcttttattgctctctcgttttttagttgtttgctagttgttttctctattcctcg

SEQ ID NO: 144742 - DNA, 919 bp, Homo sapiens
aatccagtcatctgcttcctgcttcccttcctggaggaaacttcagctactaatttcttatgttttttaagagatattctgttactgtgtaaagtatacatacatacagacacatgccccctttaaattttttagatttatttatttatttagagacagggtctcactctagcccaggctggagtgctgtggcgtagtcttggctcactgcaacctccgcctcctgggcccaagtgatcctcccatctcagcctcctgagtagctgggattacaggcgcacaccaccaatgcccagctggtttttgtgtttttcataaagacggggtcctcaccatgtcattcaggttggtcttgaactcctgggctcaagcagtctgcctgccttggcttcccagtgctgggattacaggcgtgagcagccgtggcccggctaaaaagtatttttaagttctgcatattgcttatttcacttaacactatattagagattgttttatatcaatacatatagatatgcttattcttgttgacagttgcataattttccattaaattgatgtatcatgggcagttaaccagttactcgttttactcttagcataactttagggaacaatgtggatgtttggtggttaaagctatttaaaacagtggttcttgaccagatgtgtgtttcagaatgttcatctcacatttccagttgctactgatgctgctggtcttgggaaccacatatcaaaaccatttgggtctccgactaagataaaccctactttatccaattctgtgctcctcttaatatcatatacagataggtttttgttttgtctgtgattaaatgtatcatctaagatactacctactgatcataacgttcatattaaagtattgggttaacattaaaaaaaaaaaaaaaaa

SEQ ID NO: 144743 - DNA, 434 bp, Homo sapiens
  misc_feature (1)...(434): n = a,t,c or g
attgcttacgtncctttagactagagccaaggagacagtgctttccaaaaaaaaaaaatgtgttctgtggccataagttttcattgatagagaagcataaatttggtgaatttagaattaggtcttttatcatatcctataaaaagttgagttaacaggctgggcacggtggctcatgcctgtaatcccagcactttgggaggccaaggcagctggatgccccaaggtcaggcatttgagaccagcctggccaacatggcgaaaccccatctctactaaaaatacaaaaattagccgggcatggtggcaggcgcctgtaatcccagctacctcgagagactgaaggcaggagaatcacttgaaaccaggaggcgggggctgcagtgagccaagatcacgccactgcattccagcctgggtgacagagcgagact

SEQ ID NO: 144744 - DNA, 1904 bp, Homo sapiens
taggtatttcaaatccaggcagagcagcacaccagtttattttgaaatgcaacacagatcagtattttatgaatacaaccttattactacattatcaggtaaaaaacagctttcaaatgcatgcatagaaagttaagcgtagtctctcggactccttatttctaaatatacaaaaaatacatttaaattatataattttagtgaatcaaagacttataaaattacaattttggttttcacaacattagaaaaaatacaaaaatgactatatatacggttgtacaattttttacccaaatttcaaaggagcagtatgtattgaatttaatgttttataatgttttatctggaaactccagaactggcaagtaatttgcagggttggtaccatatccatgccaacccttttattataaatggaataaccaaaaaaataagtgaaaaatgagggccaccgatctcttcttaccaccctctccaacttctcccaggcattcttaaaccttttcctggtcaggaaggtcttgcttctggagacttttttccatcctgccaaggacagtgcctttaatccccatgaactaactctcccatggtgccctctggataatggttggtacgtgtttaaatggattaggcccaacctcagcaaacagaaccgcagcaagatgtagattaagcagtctgtgctgacaaaagcaactactgcgtacctcaaagaattctctgtccagaagaaggcccccacggagggatctgaaatacataatcaagtgggtagttgggaggatgatgccttttgactatgccctgaaatgaaacctctaagtctgacaaaatacccacaaaaacatgaccttccttgttcacactttataagaaggtgtgacatttggtggtgtggttgttctcaatttataaaataataaatgacttcaaaggagaaatgaaattccatggttaagggataaaagaaacccagttacctggagagaggttacctgaaggacacagtgacatgcccttacttatcctgcccataagtattcctaaatgttgatgtacaaaaatacacactggggttgagaccctttttgaaaagggagctgtgtgctgtgttctcattgccaaagttcaattcaatgcaacaccactgtttgcaacagaatgttttttataagtagtgacaaattataataaggaggcccaaataaaacccccagtccagcaaccctggaaaaagctgcatttttcatcctgatttgtagaatttttccaaaaactatctgaaaaaatctaacagaacaaagtaaatgacaaatataaccccaagttgattctattttatagtagaaatccattatggaagaataaaatgagagaaaagtcatgcaaaaaatctttccccacatattttgtctatcaaatacaagaatagattctaatttcaacatgtccaagttgagtgctgactttaagaagcagaattttaatgttcaattcaaaaataatttattacacacctgcctgcattaaattttcaaacttctataaaaataagcacttaaaaatttagttttccaggggttgggtgcagtggctcacgccctgtaatccccagcactttgggaggctgaggcgggtggatcacgaggtcaggagatcgagacccatccctggctaaacacggtgaaaccccgtctctactaaaaatatacaaaaaattagctgggcgtggtggcaggagcctgtagtcccagctactcaggaggctgaggcaggagaatggcataaacccaggaggcagagcttgcagtaagccaagatcacaccactgcactccagcctgggcgacagcgagactctgcctcaaaaaaataaaaaataaaaaaaaaagtcgtagc

SEQ ID NO: 144745 - DNA, 1155 bp, Homo sapiens
  misc_feature (1)...(1155): n = a,t,c or g
cggcacgaggctgtatttgcggcctgtgcgagtaggcgcttgggcactcagtctccctggcgagcgacgggcagaaatctcgaaccagtggagcgcactcgtaacctggatcccagaaggtcgcgaaggcagtaccgtttcctcagcggcggactgctgcagtaagaatgtcttttccacctcatttgaatcgccctcccatgggaatcccagcactcccaccagggatcccaaccccgcagtttccagggatttcctccacctgtacctccaggggaccccaatgatttcctgtaccaatgagcattatggctcctgctccaacttgtcttaggtacccactgtgtctatgggttnggaaagcattttggggcgcaagaaagggatcatccaggcttaaaggctaaagtaaaatgatagaaaatttgtgggtcctactacccactgtttttgttggcaacattttccgaggaaagctttcagagcatgcttattaagacaactcttagcttaaatgtgggtttggttttgagctggaagaggagtacaaggtgcttcccggaaagcttcaaggcctttcggaattctgtgagtcacaaggagcccagaatcttaccctccgtgcacttagattattacatgacctgcaaattggagagaaaaagctactcgttaaagttgatgcaaagacaaaggcacagctggatgaatggaaagcaaagaagaaagcttctcaatgggaatgcaaggcccagaaactgtcacctaatgactgatgaagaagcccttggatgaagaaacaaagaggagagatcagatgattaaaggggctattgaagttttaactcgtgaatactccagtgagctaaatgccccctcacaggaatctgattctcacccccaggaagaagaagaaggaaaagaaggaggccattttccgcagattctccagtggccccactgatgaccttatccactcatcactaaggaggatataagtgctatagaaatggaagatgactatatagacctgatatctcgagagatcagcatattcagagacacacataagagatcatatggtgactaatgcaagatgaaactctcagcttggaaagtaacaaggaataggataaactggaagaagagaaaggc

SEQ ID NO: 144746 - DNA, 418 bp, Homo sapiens
  misc_feature (1)...(418): n = a,t,c or g
cggtgtttgcccggggggccnnnnnnnnnnntnnnnnnnnnnnncccccccccttggggccccccnnnnnnnnnnnnnnnnnnnnnnnnnnnnnnnnnnnnnnnnnnnnnnnnnnnnnnnnnnnnnnnnnnnnnnnnnnnnnnnnnnnnnnnnnnnnnnnnnnngaagctgaaccagnnnnnnnnnnnnnnnnnnnnnnnnnnnnnnnnnnnnnnnnnnnnnnnnnnnnnnnnnnnnnnnnnnnnnnnnnnnnnnnnnnnnnnnnnnnnnnnnnnnnnnnnnnnnnnnnnnnnnnnnnnnnnnnnnnnnnnnnnnnnnnnnnnnnnnnnnnnnnnntctcatcgcaaatttgatgtttcttcttgtttcagttttagcagaatttacattgccttgattgagtctcttttcaaactca

SEQ ID NO: 144747 - DNA, 1370 bp, Homo sapiens
gtagagaaggtggtttcaccattctgcccaggctggtcttgagtaccggggcccacgtgacccaactgtctcagcctctgaaaattatgggattacaggcctgagccacagcatctggtctcatcgcaaatttgatgtttcttcttgtttcagttttagcagaatttacattgccttgattgagtctcttttcaaactcatgtcttacccatctgagtgcctcaaaccaaaccctgttcagacatgttataacggatttgtaccagtttatcttggtgcaaaaaatgtgatatcatgcacaattttctcataatatgtatttttccatgaacttcctgaagaccccttgtactagcgaactgtattcaagaggttataaaaaggattgttgatatgcaagtgccacttatttctgggatgcaacatggttcaacatagtcaagcaaatcaatgtgatataccacttgaacataatgaaagatgaaaaccacatcatctcaatacatggagaaaaagcatttcacaaaattcaacatccagtcatcatggaaatcctaaacaaaatagaaagagaaggaaatttacctcaacaatacaaagaccatccatgaaatgaccacagcagaaataaccagtcagggaaaatggaatgcttttcctgtaggatctcacatgatgcaagaatgctctcaccccttctattcaatcaatactggctgtcctagctagagcaatgaaatagcaaaagaaatcaaactcatcgaaatcagaaagaaagaagtaaaattatatttgtttgtagacgacatgatcttctgtgcagaaaatcacaaagagtcaaccaaaatactactggaactaagtaacatattcagtggatttgcacaatacagtatcagcaccaaaaattagttgaatttccatacttttaacaataaacaactttaaaagaaaattttaaaacacttccattggctggagaacttaaagtaagaaatacttaaaaataaacgtaaaaaggtcagaggtttttaccttgaaatctacaaacattgatgcaaatgattaaaaacatatatagagacacaacccatattgatggtttggaaaaattaatattgtgaaatgattatataataacccaatgtgatttagattcaacatgatatccataaaaatccctatcagtttttgttaaagaaacaaaaaacaagctgggaaaatggctcacgtctgttggccaggctgatctcaaactcctgacctcaagtgatctacccaccttggcctcccaaagcgctcagattacaggtgtaagctgatgtgcctggcccaatcctcttaacataaacactaatgtcaattaatgc

SEQ ID NO: 144748 - DNA, 411 bp, Homo sapiens
gatttatggtagctttggacttgcttcaccgtctgactgtccttgacttctagaatggaagaaaaaggccttgagggagaaatggcttctagatggaatcagcagcggaaaagaacaggaagagatgaagaagcaaaatcaacaagaccagcaccagatccaggttctagaacaaagtatcctcaggcttgagaaagagatccaagatcttgaaaaagctgaactgcaaatctcagcgaaggaagaggccattttaaagaaactaaagtcaattgagcggacaacagaagacattataagatctgtgaaagtggaaagagaagaaagagcagaagagtcaattgaggacatctatgctaatatccctggccttccaaagtcctacataccttctaggttaaggaaggagat

SEQ ID NO: 144749 - DNA, 656 bp, Homo sapiens
ggaagactccaggccatcacagataaaagaaaaatacaggaagaaatctcacagaagcgtctgaaaatagaggaagacaaactaaagcaccagcatttgaagaaaaaggccttgagggagaaatggcttctagatggaatcagcagcggaaaagaacaggaagagatgaagaagcaaaatcaacaaaggaagaggccattttaaagaaactaaagtcaattgagcggacaacagaagacattataagatctgtgaaagtggaacgagaagaaagagcagaagagtcaattgaggacatctatgctaatatccctgaccttccaaagtcctacataccttcctaggttaaaggaaggagataaatgaagaaaaagaagatgatgaacaaaattaggaaagctttatattgccatggaaatttaaagtttgaaaaagactttgaagactggagaaagtacagttctgtcttcaatacctctgccatcagatgactttaaaggtacaggaataatagtttatgatgatgggcataagtcagtgtatgcatgatgttctaatcacagtgcagcatacaatggcaccgatggcctggcaccaggtgaagtataggaacttctactacaagcctcagagagaaactctaaatccccaacaga

SEQ ID NO: 144750 - DNA, 976 bp, Homo sapiens
ggcacgagccggggatggctgtgtgttgctagagcacaggctgattaagcgctcactgtgctggctctctgtgccactcctggaaaataatgaattgggtaaggaacagttaataagaaaatgtgccttgctaactgtgcacattacaacaaagagctggcagctcctgaaggaaaagggcttgtgccgctgccgttcaaacttgtcagtcaactcatgccagcagcctcagcgtctgcctccccagcacaccctcattacatgtgtctgtctggcctgatctgtgcatctgctcggagacgctccttgacaagttcgggaatttctctatttctccactggtgcaaagagcggatttctccctgcttctcttctgtcacccccgctcctctcccccaggaggcgtccttgatttatggtagctttgggacttgcttccccgtctggactgtcctttgacttctaaggattgggaaggaagctgagcttggtggaaggggaagacttccaggccattcacagattaaaagaaaattacaggaagaaatctcacagaaggcgtctgaaaactaggggaagacaaactaaagcaccagcattttgaagacaaaggcccttgagggagaaatggccttcctagatggaatccagccagcggaaaagaaccaggaagagattgaagaagccaaaatcaaccaagacccagcacccagatcccaggttcctagaacaaagtatccctcaggcttgagaaagagatcccaagatcttgaaaaagctgaactgcaaatctcaacgaaggaagaggccattttaaagaaactaaagtcaattgagcggacaacagaagacattataagatctgtgaaagtggaaagagaagaaagagcagaagagtcaattgaggacatctatgctaatatccctgaccttccaaagtcctacataccttctaggttaaggaaggagataaatg

SEQ ID NO: 144751 - DNA, 533 bp, Homo sapiens
tttttttttttttttttccttaatttgggggaggatatattccaacttgggggaagggtgaaggcattttagctctgaagctcaatcatgacatttctagagagttctgcagtgcccccgcattggacaggacaggatggaagagtgtgctggactggctggattccccagtgtcaagctggcagcgctcctgaggttcttgagtgtttatcaactcagcaggtcaaaagtctgcagacactgggtggagcagcagtaagccacaaaactaacatttgtcttcctttcaccaagctgtggtaggtatgatacagccctctcatagccaattcctgatgaaaaggaaagcagcttcacctcggaaacttgaatgggagcaccacagccactgcacccgatgactttattgtacagatgagatgggaagcctttcaggtgagtgttgttatccacgtatacatactgtagttctcgagatcgacctaaatcaagtggcaaaaatgcaagacggtttccagcccatgggagctcat

SEQ ID NO: 144752 - DNA, 420 bp, Homo sapiens
  misc_feature (1)...(420): n = a,t,c or g
tttcgtctgcggtgagnttgaagcctagggcgcgggcccgggtggagccgccgcaggtgcagatcttggtggtagtagcaaatattcaaacgagannnnnnnnnnnnnnnnnnnnnnnnnnnnnnnnnnnnnnnnnnnnnnnnnnnnnnnnnnnnnnnnnnnnnnnnnnnnnnnnnnnnnnnnnnnnnnnnnnnntttacccgggcttgataatgcttgcctgaacccccagttatggggggaggctggggggaaaaaattgggtgacctannnnnnnnnnnnnnnnnnnnnnnnnnnnnggggttgttgccctccacctgggtggaaaaagggaccccctgtctcaaaaggaatgaaggaatccccagggggggaattgccccaaacaggaaaaaagcccgtttttttattttaagaaa

SEQ ID NO: 144753 - DNA, 323 bp, Homo sapiens
aaagttcatcgagttcagatttcgctggtcagacgctataaagtacacaaacggtacagaattagttcaaaaaagtccttaaaccaggacgtctatatcccgtaccaatagcaaccatgggaataaaggagcctctgatttcctgagtcccccccttggggtgtttaaaaatccctttttcaataacggcaaaaaataaaaaattaggcaaagaatcaacagcggagatgggcgccgcgaggcgtccagtgcggtaacgcgaccgatcccggagaagccggcgggagccccggggagagttctctcctctttgtgaagggcag

SEQ ID NO: 144754 - DNA, 470 bp, Homo sapiens
taaagtcatcgggtgcagtggctgtggtgctcccattcaagtttccgaggtgaagctgctttccttttcatcagggcagcgaaccgttttcctcccagctgaggtgaaggccatagggacggagcatgatcacgtcctccctctgcaggaattggctatggagagggctgtatcatacctaccacagcttgctgaaaggaagacaactgttagttttgtggcttactgctgctccacccagtgtctgcagacttttgacctgctgagttgataaacactcaagaacctcaggagcgctgccagcttgacactggggaatccagccgagtccagcacactcttccatcctgtcctgtccaatgcgggggcactgcagaactctctagaaatgtcatgattggagcttcagagctaaaatgccttcacccttcccccaagttggaatatatcctccccggaaattaaggaaa

SEQ ID NO: 144755 - DNA, 730 bp, Homo sapiens
ggaggagaggaagcatcactgaaggtatgtgtgttcaaaagggaatctggctagatgatcaagtcactgttctccaaggaccggaaacttgctttaaattagatttggggaggcccatcaatctaaatggtttctgtaaaagacacactcacataaaaaggaaaaacacagaagacaaatgggtccttaatttgggggaggatatattccaacttgggggaagggtgaaggcattttagctctgaagctcaatcatgacatttctagagagttctgcagtgcccccgcattggacaggacaggatggaagagtgtgctggactggctggattccccagtgtcaagctggcagcgctcctgaggttcttgagtgtttatcaactcagcaggtcaaaagtctgcagacactgggtggagcagcagtaagccacaaaactaacagttgtcttccactggtgcagccctgccattggcgtctctctcaagggaaagagcttggggtagacgatggtaaacataggctcactacaccgatgacagtgccccagagggcagtgcagcagctctaggaaacttctgggtaatgagattggagacagaaagttcaaatctttcagcaagctgtggtaggtatgatacagccctctcatagccaattcctgcagagggaggacgtgatcatgctccgtccctttggccttcacctcagctgggaggaaaacggttcgct

SEQ ID NO: 144756 - DNA, 962 bp, Homo sapiens
tttttccttaatttgggggaggatatattccaacttgggggaagggtgaaggcattttagctctggagctcaatcatgacatttctagagagttctgcagtgcccccgcattggcttcaaggcccccccccacgcctcctcccctcctcccgcccacgccccgctccccgccccccggagccccgcggacgctacgccgcgacgagtaggagggccgctgcggtgagccttgaagcctagggcgccgggcccggggtggagccgccgcaggtgcagatcttggtggtagtagcaaatattcaaacgaagaacttttgaaggccgaagtggagaagggttccaattgtaaccaagcagttgaaacatgggtcagtcggtcctgagagatgggcgagcgccgttccgaagggacggggcgatggcctccggtgcccctcggccgattcgaaaggggagtcgggttcagatccccgaatccggagtggcggagatggcgcgccgcgaggcgtccagtgtcggtaacgcgaccgatcccggagaagaccggcgggagccccggggagagttctcttttctttgttatgggttttgtgcgccctggtaatgggttcgccacaagagaggggttcgttccttggaaagcgtcgcgcttccggcggcgtccggtgagctctcgctggcccttgaaaatccgggggagagggtgtaaatctcgcgccgggccgtacccatatccgcagcaggtctccaaggtgaacaggcctttggcatgttggaacaatgtaggtaagggaaagtcggcaagccggatccgtaacttcgggataacggattggctctaagggctgggtcggtcgggctggggcgcgaagcggggctgggcgcgcgccgcggcggcgactctggacgcgagccgggcccttaccgtggatcgccccagctgcggcgggcgtcgcggccgc

SEQ ID NO: 144757 - DNA, 347 bp, Homo sapiens
gtcgacgcggccgcggtctccagaagataaggactacatttaaaaacaagcacatgaccattatcactccaaggagaaatgaattacattttcttaatatggtcagttagcgttcagatttccaatagcctgaaatgtcataatctttagcatagggagaatcatgattctgataacatccatatgttgaaattgatggcttagtacacatcatggatgacctgtacacaaatgcttacatacatctgagcttcgaggagttcatcatgctgatggcgaggctaacctgggccttccacgagtagatgcactatgatttcaaagggccctggtccacaacataagcc

SEQ ID NO: 144758 - DNA, 712 bp, Homo sapiens
gcaccaagacccagtgcttccctgacctctggtccctctaaatcagcatctatcacagtagatcaacctggataaagccaggattcacagcagaagtggcacctcagacaccaaagcagctttccttctcaaagcttttaaacatcattgggaaaacttagagcaaatcaaaccaatgtttttcaatacatggaaggaaagatgtgtgtgcttggttttgttttttgctgagacccaaacattgttagtgcaagcccccgccaggggtgcaggtggagtcaaagctgaatgaagagctcgtcttcaatgtagctctccaagctttcagagcaagacaaccatgggccatcctcttgttcagactggcctgtcttcttcttgaccaatgtcactttgctcctcactgctgtcctcttgtagatcctggaatccatttcccatctgttatatgttgccattaggcacaggcggtcactctgtgaatgtggtcctgcttaggtatttcttttggcaactcctctctctcacgtgctccctcctgttcccctactgcagcatcttcctcctcctcctcctcctcctcctcttcctcttctgaatccaccaaaaccatgacatcatccatgttttgtatagttagaataagagcgcatatttttaaagctatgaattcctttgccatagcgttgactatataataaatacgttgtcc

SEQ ID NO: 144759 - DNA, 344 bp, Homo sapiens
  misc_feature (1)...(344): n = a,t,c or g
cccctccccacacaaaactggccccagggccagagcttcttgcactaccctgtactgctccctgcagtctctgtcctctggtcatcnnnnnnnnnnnnnnnnnggaaacaaatcttgcttttgcccccaaggttggagggcatggccagaattcgggttaatggaaatttccgcttccgggcccaagccttttttcttgcccaagcttccaaaccagtgggaattacgggcccccgcaacaagcccgggccattttttggaagtttaagataaaaacagggtttcatggggtaaccagggagggcctgaatttcctgacctcgggatcggcccccttaggttcg

SEQ ID NO: 144760 - DNA, 349 bp, Homo sapiens
agttgatcctggaacatattgttatgccagaaagtgaagaactgctaaatctggttcaaccaagttttcactgaattctaagtatggcactgtactagcagttctatttatgaagaaaatacttgttttaagacttagccctaaaaaaaatgaccagacagtgaaatatataaaaagacccttaacctcactcaaaataagagaaatacatattaaaactgcactgctatactatctaacagaatggaaaactcctaaagtttgatgacacatgccattagtaagcctgtgaggaattattgctggcgggtatgtgtattgatacaacctctatggaggcaaatgtggc

SEQ ID NO: 144761 - DNA, 970 bp, Homo sapiens
tctgcatctgcactgtgcccgcaggagagaagacccaccaaggcggagaaccgaggaacttcaggtgtctacgccagacacgtgtggccaagattataaatacattgcactaagtgacctgggccctcttcaacgttacgctttgcaaaaatgtaaatcctgtgtggttttaaaccctgtgctggctgcctatgaagaggacagggtgttggggggtaagagtccaggacaaggggtgctgaggcagcgggactggccccttcctgcacctcaccgcaggcccacggcccagccccactgcccacacatgtctgctgtggtgtggccatcgggatggagccgggacacactgcaataagcccgtgggtggagctggccgtgcacctcacaggcctggtgtctagccacgacgccctgggtatgatgccgtctcagcaaggctgacaatggggcagacaaaggggtttagcttcaggtaactgagggagaatgtcattccccaactcttggcctgttacccccatatgcgcggctcgtcttcctcccggcctcctcttgatctgtggatttgatggtgcaggccactctgatagatcagagggattctgaggtttaaggtttcctttctgttttaaaagacagggtctcactctgtctcccaggctagagtgtagtggtgtgatcatggctcactgcagcctccatcttctgggctcaagcaatcctcctgtctcagcctcccaagtagctgggactacaggcatgtggcaccgtgcctggctagtttgtttgtttgagacggagtcctgctctgttgcccaggctagagtgcagtggcgcgatcttggatcactacaacctctgcgtcccgggttcaagcaatcctcctgtctcagcctcctgagtagctgggactacaggcatgtggcaccgtgcctggctagtttgtttgtttgtttaagacggagtc

SEQ ID NO: 144762 - DNA, 369 bp, Homo sapiens
ctactttccttcaactgcaggtgtaaactatgctactttataatgttcgggaaccaaaacccgaacataacccaaagtgatgactaatgtatcagttacactagtgaatgcaaaactttcatttccactaagaaaagcatatctaatattgcactgagagctacacaaggatcctcacttcttcctggttaacacctaaacataagctgcacttagcctaaactagtgattttcaaaccttattttttttgagacggagtctccctctgttacccagtggcataatctcagctcaccgcaacccccgcctcccaggttccagcgactctcccacctcagcctctcgagtagctgggaccacagacacgc

SEQ ID NO: 144763 - DNA, 1017 bp, Homo sapiens
  misc_feature (1)...(1017): n = a,t,c or g
cggcacgaggcattatggcatagtgattaagatgagggaccctggaaccagcccgtgattttgggcaagttattttaggtccactttggactgcttcatctcttaaatgaagacagcaaccaccttcaggagtgtgaaggtgacaacacttattatctgtgcctggcacattgtatttgctattgtcttaatgttctggaataatggtttccataacttgggaagaaaactttgagaacaagattggttacatcaagttgtgtagtgaaaagataaagatctgttatttaaacttgcagtttaaaagtccattaggaatcattcttttccgtaaaggctttctttgcaagagatctgcatttaaataaaagttgctagggaaataactaaaattggggaaataatctaataatagcaagatgttaagcatactattattgtattttgggggggttggtaataacattcacatggatttatcaatacacactgagaagcaaagcctctcaagctgtcccatatcctccatttccaaaggcacacatacattttaggtaactcataatttagaaaggttatttaatcttttccacatgtaaatatttgaatatgtacaaagatttgatttgactcttgtctgtttttgttttgttttgtttgtttgagacagaggctccgtcgcccaggctggagtaaaatggcatggtctcagctcactgcaagttccgcctcccgggttcacgccattctcctggctcagcctccggagtagttgggactacaggcacccgtcaccacacctggctaatgttttttgttttttgggtttttttgtatttttagtagagagagggtttcaccgtgttagccaggggtngtctcgatctcctgacctcatgatccgcccaccccggcctcccaaaatgctgggattacaggtgtgagccactgcgcctggccgactcttgtctgtttgaatgcaaagttctcaatagtggtttttgtccataaggatta

SEQ ID NO: 144764 - DNA, 336 bp, Homo sapiens
accgtttctcaggctccctctccggaatcgaacccccatggtaggcgcggcgactaccatcgaaagttgatagggcagacgttcgaatgggtcgtcgccgccacggggggcgtgcgatcggcccgaggttatctagagtcaccaaagccgccggcgcccgacccccggaacccaaagactttggtttcccggaagctgcccggcgggtcatgggaataacgccggttcttgacctcggccgacagcccgtacgaggggcccttgttgaactgcgtggagctcatggctggcgggcgggcggcgggacgggctcgtgcggaattcctgcacgactat

SEQ ID NO: 144765 - DNA, 460 bp, Homo sapiens
  misc_feature (1)...(460): n = a,t,c or g
ngtggtagccgtttctcaggctccctctccggaatcgaaccttgattccccgtcacccgtggtcaccatggtaggcacggcgactaccatcgaaagttgatagggcagacgttcgaatgggtcgtcgccgccacggggggcgtgcgatcggcccgaggttatctagagtcaccaaagccgccggcgcccgccccccggccggggccggagaggggctgaccgggttggttttgatctgataaatgcacgcatcccccccgcgaagggggcgaatgggtcgtcgccgccacggggggcgtgcgatcggcccgaggttatctagagtcaccaaagccgccggcgcccgccccccggccggggccggagaggggctgaccgggttggttttgatctgataaatgcacgcatcccccccgcgaagggggtcagcgcccgtcggcatgtattagctctagaatta

SEQ ID NO: 144766 - DNA, 881 bp, Homo sapiens
  misc_feature (1)...(881): n = a,t,c or g
ccgcccacgcgtccgctgccagtagcatatgcttgtctcaattattaagccatgcatgtttaagtacgcacggccgggacagtgaaactgcgagtggctcattaaatcacttatggttcctttggtcgctcgctcctctcctacttggataactgtggtacttctagagctaatacatgccgacgggcgctgacccccttcgcgggggggatgcgtgcatttatcagatcaaaaccaacccggtcagcccctctccggccccggccggggggcgggcgccggcggctttggtgactctagataacctcgggccgatcgcacgccccccgtggcggcgacgacccattcgaacgtctgcgcctatcaactttcgatggtagtcgccgtgcctaccatggtgaccacgggtgacggggaatcaggggggcgggcgccggcggctttggtgactctagataacctcgggccgatcgcacgccccccgtggcggcgacgacccattcgaacgtctgccctatcaactttcgatggtagtcgccgtgcctaccatggtgaccacgggtgacggggaatcagggttcgattccggagagggagcctgagaaacggctaccacatccaaggaaggcagcaggcgcgcaaattacccactcccgacccggggaggtagtgacgaaaaataacaatacaggacttgcaacctannnnnnnnnnnnnnnnnnnnnnnnnnnnnnnnnnnnnnnggggggggcccttttaaaaaatcccttggggggcccaaattttcccggggttggaaaataaaaatttttttcttttgggggggggttttaaaaacctcctgggggtttttgggaaaaaaccctttttttgggggggga

SEQ ID NO: 144767 - DNA, 417 bp, Homo sapiens
  misc_feature (1)...(417): n = a,t,c or g
atggatgccacttgccatgggtgcctgcaatttcaaataatgagaaataagaaatttcagcttctcagtccctctagccaacatttcaggtgcatgacagcctcaggtggcaagcagctactctgccggacagggcagaagatggaacaccccatccctgnnnnnnnnnnnnnnnnnnnnnnnnnnnnnnnnnnnnnnnnnnnnnnnnnnnnnnnnnnnnnnnnnnnnnnnnnnnnnnnnnnnnnnnnnnnnnnnnnnnnnnnnnnnnnnnnnnnnnnnnnnnnnnnnnnnnnnnnnnnnnnnnnnnnnnnnnnnnnnnnnnnnnnnnnnnnnnnnnnnnnnnnnnnnnnnnnnnnnnnnnnnnnnnnnnnnnnnnnnnnnnnnnnnnnnnnnnnnnnnnnggggcggcccgtttag

SEQ ID NO: 144768 - DNA, 403 bp, Homo sapiens
  misc_feature (1)...(403): n = a,t,c or g
atggatgccacttgccatgggtgcctgcaatttcaaataatgagaaataagaaatttcagcttctcagtccctctagccaacatttcaggtgcatgacagcctcaggtggcaagcagctactctgccggacagggcagaagatggaacaccccatccctgnnnnnnnnnnnnnnnnnnnnnnnnnnnnnnnnnnnnnnnnnnnnnnnnnnnnnnnnnnnnnnnnnnnnnnnnnnnnnnnnnnnnnnnnnnnnnnnnnnnnnnnnnnnnnnnnnnnnnnnnnnnnnnnnnnnnnnnnnnnnnnnnnnnnnnnnnnnnnnnnnnnnnnnnnnnnnnnnnnnnnnnnnnnnnnnnnnnnnnnnnnnnnnnnnnnnnnnnnnnnnnnnnnnnnnnnnnnnnnnnggg

SEQ ID NO: 144769 - DNA, 1113 bp, Homo sapiens
  misc_feature (1)...(1113): n = a,t,c or g
cggccgcgtcgacataaaagtatattgtggacagacaatgccaaattgcctttcagagactgtggccctgtgcaccccatcaggcatgtgtgactaccaaagctcctgtcagctgttttattttatctcctttccagtctcaggctcaatggcagaactttggagggtaagcttttctaaaatgtaggctcctaaacgccacagccagctctgccacatgaaggagagctcaaatgagacagaaacagcctctgggcaggatttctatcctgccacagatatattttccacattctgggaancccgtgaagcttccagagccacaattccccagaaacacatccccctgctggtaccagcccaagcccccagaaacaagctgtgcttgcctggcacctcaaagccaagcacccatggatgcccacttgccatgggtgccctgcaatttcaaataatgagaaataagaaatttcagcttctcagtccctctagccaacatttcaggtgcatgacagcctcaggtggcaagcagctactctgccggacagggcagaagatggaacaccccatccctggggaagatcacgaggtcaggagatcgagaccatcctggctaacacagtgaaaccccgtctctactgaaaatacaaaacattagctgggtgtggtggcaggcacctgtagtcccagctactcaggaggctgaggcaggagaatggcgtgaacctgggaggtggaggttgcagtgagccaagattgcgccactgcactccagcctgggcaacagagtaagactccatatcaaaaaaaagagaaaagaagaagaagaaagaaagaaagaagaagaagaggaagaagaagaagtggaagaagaaggaaagaggaagaggagaagcaggagaagaacaaggagaagaagaaggagagagaagaagagacaagaagaagaaggagaagaaggagagagaagagacaagagaagaaggaagaaggaggaggagaagaaggaagaagaaaagaaggagaagaaagaagaaggaagaagaaagaacaacaaaaagaaggagaagaacaaggaagaagaaataactaaggagaaggaagaaggagaag

SEQ ID NO: 144770 - DNA, 939 bp, Homo sapiens; identical to SEQ ID NO: 126917

SEQ ID NO: 144771 - DNA, 1026 bp, Homo sapiens
tcatggagaggttatagctcctgacttctctgacttcttgctcttggacaaagcagctgcctgcttcaggagctctcggtttttggcctgcagttgttctgtgacttctttgtgggttttctccatctggttcattttggctctcatctgcgattcctggtactgaaaatcagccttcaactctgtaatcttcttctctttctctaaaatcatttgatccttttgatgcaacatcttcttcagggtagccacttcttccttcagttgggcaatgatgacaaagtggtcagtgcctggtgagtccagagccaggtctggggagaagctgtctccattagttgtgattgactcaaacttggactttttctttgggatttcattttgaattgaagatgtagaaagtgttttctggctgttataatggccaccaccactcaggcgactatactgctccttctcctggtggccagcacgagaagagctactcaggtgtttcctctgctctttggtcttctgaaggacccgtttgtatgaaagtgtgcacagccagcacagcaatttcccatctaccttctttctatcatctttcctgtcaaatgcacactgctgcttgcactgttcacaagaatagggtggtccatacttcttttctgaatttgtgcagcgctggcatttattcccaataaatgctgcaattatgttgcaatactgacaaggtttgggcgttccatacaactgcacgttctgagcacatttcttgcatattgtattggttttaatgcctgtaatcccagctactcgggaggatgaggcaggagaatcgcttgaacctgggaggtggaggttgcagtgagccgagatcgtgccattgcactctagcctctcctgctggtactcagtcctgcagtaggtgcacttcacaacagggtgtgcaatccgacattccttgcacagctgctgcccctgagacagcgcctcgaaggggaagcgctggtggcacttggtgcaggcgtagagcgccgccat

SEQ ID NO: 144772 - DNA, 312 bp, Homo sapiens
  misc_feature (1)...(312): n = a,t,c or g
gcccctacagaaaattaccaaactgcaatgatgaacactaatagagaaagaaccaaaggatataccaaatagccagaaaacgattgaacgaaatggcaagaataagtcccctcagatcaatgataatcttaaatgtaagtggattaaattttcccctgaaaagatgcagactggctgaatggacagnnnnnnnnnnntgacccaattatatgctgcctaaaaaaactcacttcactggtaagacatatatagactgaaaataaagggatggaaaaagatattccacgcaaatggaagccaatagcaaacaag

SEQ ID NO: 144773 - DNA, 411 bp, Homo sapiens
  misc_feature (1)...(411): n = a,t,c or g
ggtccccgtacagcgatttcccaatctgcaatgtgtaacaataatagagaaagggtcaaaggatttccgaaatagccataaagcgattgaacaaaatggcaagaataagtcccctcatatcaataataatcttaaatgtaagtggattaaattttccactgaaaagatacagacgggctgaatggacagnnnnnnnnnnntgacccaattatatgctgcctaaaaaaactcacttcactggtaagacatatataggctgaaaataaagggatggaaaaagatattccacacaaatggaagccaatagcgaacaaggtttaggcgcctcggaattcgcatcctcgaggtatgctcgggtatgggatcgtcgggtgattgtcatctacggaccaagataatcagcacctctaa

SEQ ID NO: 144774 - DNA, 639 bp, Homo sapiens
agagacggggttccactaagagacggggttccactacgttcaccagcttggccttgaactcctgacctcatgatccgcccgcctcagcctcccaaagcactgggattagaggagtgagccaccgtgcccagccagcaattgatttttgacaaagattcaaaggcaattcagtggagagatacatctttttaataaatggtgctactagatcaattagatctctacatgcaaaaaactggacattgattcataccttgcaccacgtaacaaaaattaaccccaaacgaatcctagatctcaatgtaaagcccaaaactataaaatgtctacaagaaaatacaggggaaaactgttgggactttgggtcaggcaaacatttcttggacatgacaccaaaaatgcaatccacaaagtaacaaattagtaaattaatcaaaatttaaaacttctcttcaaaaacacagcattttgcactactgatcatcagaattttttagaagacattgttaacaggatcaaaatacaaagccacaacctggaaaaaagatttgtaaatcacatacctgataaaaggcttatatcccaaatatatcaagaactcttcagaactcaacactaaaaaccccacttcagattggt

SEQ ID NO: 144775 - DNA, 715 bp, Homo sapiens
aaaattttagtcacattatgtcatcagaattctaggaggaaatgaatacctgattattttgtacttcacaaaataaactggataaactggataaatgactgaaagtttcttttttatattgctgagtcagattggatccggttcattaagggccaaaatttgtatttggcagtaatcctcatgtgttctcagaatgcttgattggtcattatcagttgcttaatgcttaccaaacacttccagtgttttgagtcactgaattggctcatggtaattgttaatcttgtggttactgagtcaagagccagcagtgtgtgttttggctgcttcacttcctcctcaacacttgatattgtcagattttaaattaattttttttttctaatctggtgggtttgaaattgtatctatagtgttttttatcagcatttcctgaagctgggcatcttttcatgtattttcgttggtcatttgtgcttctgcgaagtgtatattcaatttcgttgcctatttttttggtcttttctctttttctgatttatttttaagagttctttatatattctggatactaattatttgttaatttataggttgcaaatatcctttcccaatttgtgacttgtcttttcatctcttcatagtcttctggtgagaaaagctcctaattgtaatgaactgaatttttcagtctttcatggtttgtgttttgtgt

SEQ ID NO: 144776 - DNA, 834 bp, Homo sapiens
tttttcattttattagcattcctttattttagaagttcacacctataattttataacaatcgtgaaaatgttactcagaactagatgttttgatgacacatagcagaaatctgtggttcaagatggtcattgcaaacttaaccaatctcagcattctattctgccttttgttttgattgcacagaatcaatataattctgattcatatggaaaaataacttaatatcttaacctccgctcagggatcttcatcataaatgtaggtcagtacataccctaaaaaatggtcaatggatcccaacatggtcacatgtgacattgctacacttggcacctaggtaccaaacaagctggataccttccaatggagatctggttgggcatatacacccaagccttgtctgtcccctcagagcactgcacacagatagtgaaagaacttgtgtaacaataagaaattccacagggatgaaggctgggcgcagtgtctcacgcctgtaatcccagcactttcagaggcccgaagcaggttgtatcacttgaggttcaggagttcgaaactagcctggacaacatgggtgaaaacacggtctctactggataatgcaaaacttagctggggcgtggtggcacatgcctgtagtcccagctactcgggcaactgaggcaggagaatagcttaaacctgcaaggcggaggatgcagtgagccaagatcacgccactgcactccagcctgggtgacagagcgagactctgtctcaacaacaacaacaaagatattcacaaggatgaatttaaataggtaaatggcagtgtagaactacatccttcc

SEQ ID NO: 144777 - DNA, 386 bp, Homo sapiens
  misc_feature (1)...(386): n = a,t,c or g
cggcagataaaaaaaaactaaacaacgtacaataaaaagaaaatactcagtaacgagtaaattaatggccatcagaagatatcaagtatacaatacatgagaccaggtccatcaaagccaccataggtagtatcctctccatccaatttgatcttatgaaattttactcagcttcaccaggaactttagtagtttccctcactgtaggcaaagatttctcagcnnnnnnnnnnnnnnnnnnnnnnnnnnnnnnnnnnnnnnnnnnnnnnnnnnnnnnnnnnnnnnnnnnnnnnnnnnnnnnnnnnnnnnnnnnnnnnnnnnnnnnnnnnnnnnnttcgtcagtcccgcagccaccgcagccgggtccccgcgtactgcctcgtgcc

SEQ ID NO: 144778 - DNA, 391 bp, Homo sapiens
ggcactaggtattctcctaaccaggcaaacgcttattaccttaagcgaggatgaacagtaagctggccctggccgtgagctttacagaagcggtcactgcgacaccaatccaatgtcttctcaatgtttgaccagtcccagatccaggagtttaaggaggctttcaacatgattgaccagaaccgtgatggcttcattgacaaggaggacctgcacgacatgctggcctcgctgggtgagctgggacagggacaggggtgagatggatgaggccaggcaggctctgccagtcatttacagggcacctcctgtgtagtgagacggatgaggccaggcaggctctgccagtcatttacagggcacctcctgtgtagtgagactcgtggtgtcc

SEQ ID NO: 144779 - DNA, 468 bp, Homo sapiens
ggcacgaggcccatggaggatatgtaccgtattttctctgatccgtatacctttaatccggcagtgaccgtgtgtcagaacaatcttgaatcatgaagctactaacccagagccggctctttctcgagattttattccctcaaagtaggccccataagctaaagccacagctgcgcctgcaggagcaccgccacaacctcaggaccttgagtttaccaagttaccgaagggctggctgattgctcctttggaaaactatccgcccggatgatgaattggttggttcattaaagcaggcacatgatctgaagacttcaacgctttaggaaccacccatttgctgagtactacatgcagtgtgacgacgaacggagcttcatctttcacgataacccgtggaattgaatcagctgatggcccattaactgtgaccgcatcaagggaatacatggatcatactgtggaatg

SEQ ID NO: 144780 - DNA, 426 bp, Homo sapiens
  misc_feature (1)...(426): n = a,t,c or g
aaggacagagacgctggctaggcgccctccccactgttaccaacatgaagctgctcgcnaaacntgtgctactcctcaccatctgcagccttgaagtacttccagaccgtgactgactatggcaaggacctgatggagaaggtcaagagcccagagcttcaggccgaggcaaaggtcttactttgaaaagtcaaaggagcagctgacacccctgatcaagaaggctggaacggaactggttaacttcttgagctatttcgtgggaacttgggaacacagcctgccacccagtgaagtgtccagaccattgtctttcccaaccccagctggcctcttaggaacacccattnggccagtcctaggagctcctgttcccttacccattttttggttacattaantgctggattgaattccaaaaaaaaa

SEQ ID NO: 144781 - DNA, 427 bp, Homo sapiens
  misc_feature (1)...(427): n = a,t,c or g
agagacgctggctaggcgccctccccacttgttaccaacatgaagctgctcgcagaaacntgtgctactcctcaccatctgcagccttgaaggagctttggttcggagacaggcaaaggagccatgtgtggagagcctggtttctcagtacttccagaccgtgactgactatggcaaggacctgatggagaaggtcaagagcccagagcttcaggccgaggcaaagtcttactttgaaaagtcaaaggagcagcttgacacccctgatcaagaaggctgggaacgggaactggtttaactttctttgagcttattttcgtgggaactttgggaacacagcctgcccacccagttgaagttttcccaggacctttgtctttcccaaccccagcttggcctttaggaancacccattggccagtccttg

SEQ ID NO: 144782 - DNA, 663 bp, Homo sapiens
agagagccaggttggaatgggcagcaggtagggagatccctggggaggagctgaagcccatttggcttcagtgtcccccaaacccccaccaccctcttcctaggccgcccctcccccactgttacccaaacatgaaagctgctcgcaagcaaactgtgcttactccctcacccatctgcagcccttgaaggaagctttggttcggaagaacaggcaaaaggagcccatgtgtggagagccctggtttcctcagtaccttcccagaccgtgactgacctatggccaaggacctgatgggagaaggtccaagaaccccagagcttcacgccgagcgccaagtttttacttttgaaaagttcaaagggagcagcttgacacccctggatccaaggaaggcttgggaacgggaacttggtttaacttctttggagcttatttttcgtgggaactttgggaaccacagccttgccaccccagttgaaagttttcccaggaccatttggtctttccaaaccccaggctgggccttttagggaacaacccattgggccagttccttaggagttcctgttccttaacccatttttttgttaacaataaatagcagcatgaaacatcatgttggttcagtcagtcgacatctatgctacaagcactagtgcg

SEQ ID NO: 144783 - DNA, 389 bp, Homo sapiens
  misc_feature (1)...(389): n = a,t,c or g
nccacccttttagaatctagccttggctagtcgcctaagctcatgagtttgaccccagtctgggcgacccggtgaaccttcatttttggtgaaaaattccaaaaattatcatggtgtggcaactagctcctgtagtcccagcgactcaggaggtttaggcatcgagaatcgcctgaaaccaggaagtctaggattcatttaaccgagatcgggcccatgcactccagcctgggtgtcagaagataaaaaaagaaaaagtatggacttttttgctcaaaagaaaaaaaaaaaagtatgtatgtatgtacacatgtccacccaaagatggttacctaatgagaccaaccaaaatattaatgttctgggttttctaaattttctctcgtgcc

SEQ ID NO: 144784 - DNA, 1122 bp, Homo sapiens
aagcattcgacaatgtcatcctgtactacagcaagatggctgattaccgaaatactggaaaaagcaagagtgaacacttttaaaaggtttgttgcagatacaggaaggcaaatggaggcaaaggcagcccagtgcaagaggtcccggatggggctcctgaaggagctcccctgcagcaaggtcccgccaggatggcttcctctgcccacaacccagtcagtgtctgctcccccagggccaggggaaagcccaactgaaaatcaacctatgtttaaacagacagacccacagatgaaatctttctggacaaagatgggctcccctactctcccttccccaaactctgtagagtgtcccattttccttctccccactttatcagcaactaagagtgggagcaaaaccagcctctttccctggtcctaagtggcagaggcgatgagttgcacagtgacggtggtcagaaaacacagggactggacaagcagcagttgccagcgtggttggcatggtttggtctcctttggcagggcagcttgctctaagcttgggaagaacttacgtccccaggaaattaagtggtcttccaagttgcacctgccaatcccagagtcacagtgttagtctcccctggttggtgtagaacagtggggaggaaaactgggcagtgtggggctcctgctgcagcctaaaggtggcattcccactgccctctctccctgtgctttacctgctgggcaccccacccttccctatggaaacaatgctgggactgacttgaggcttcacacagagccggagggcccacatggagagccagggttgccagccaggtgggggcaggatggcatggagcccaggtgggcagctgcagggctgggaaagggttacctgcttcaagccagcagaggggtgggatcagaaacagggcaggtaggttttctctttgggaaaaaaacaaaatcaaatcgcttaatagctgtaaacgacagtgtacattttttgttgtgatctttctgtgaagaccctaaggcaacaaagaacaaagcccaaggcaggtatctcctgaaatgcccgcgactaaaatgggtgatgtgatagtggacattaacatacacaaat

SEQ ID NO: 144785 - DNA, 336 bp, Homo sapiens
ggcacgaggaaaaagcatttgacaaaaggggcctttcatgataaaaacaggggatttaacatggtaggactagaatagaactgctgcaacacaataaaaagcatttctgaaaaaccacagctaactcaatacgctaggctaaaaaacaagaaggtttcttccaaatatcaggaataagacagggatgcctgctttcatcatttctattcattatactggaagttctagctagaggaaataggtaagacaaaaatgcatccaaattggaaagaaaaaagtaaaactatctctattctcagagaccatgagatttaatatatggaaaagactaaggaa

SEQ ID NO: 144786 - DNA, 508 bp, Homo sapiens
cctctgtgtgtgtacgagctcatgaaagtgttgtgaagagcgaagacttttcgctcccagcttatatggatcggcgtgaccaccccttgccggaggtggcccatgtcaagcacctgtctgccagccagaaggcactgaaggagaaggagaaggcctcctggagcagcctctccatggatgagaaagtcgagttgtatcgcattaagttcaaggagagctttgctgagatgaacaggggctcgaacgagtggaagacggttgtgggcggtgccatgttcttcatcggtttcaccgcgctcgttatcatgtggcagaagcactatgggcttagcctccaagtgggactacgaaaagaacgagtggaagaagtgagagatgctggcctgcgcctgcacctgcgcctggctctgtcaccgccatgcaactccatgcctatttactggaaacctgttatgccaaacagttgtaccactgctaataaatgaccagtttacctgaaaaaaaaaaa

SEQ ID NO: 144787 - DNA, 1173 bp, Homo sapiens
tttcgtcgggacaccgggtgtagagggcggtcgcggcgggcagtggcggcagaatgttggctaccagggtatttagcctagttggcaagcgagcaatttccacctctgtgtgtgtacgagctcatgaaagtgttgtgaagagcgaagacttttcgctcccagcttatatggatcggcgtgaccaccccttgccggaggtggcccatgtcaagcacctgtctgccagccagaaggcactgaaggagaaggagaaggcctcctggagcagcctctccatggatgagaaagtcgagtgtgggtattgaagggacccacaggcgcgcccagcagctctcggaagcgtgtgtgtgacagagcctctgctcacttctgggcctactgtctagagagcagtcttgcacaggagggttgctctgctggggtttcgggtcactgtgccagggccccagtttatgtgctcaccagtcacttagctctgccagctgacaggatcttttgctaggcccccttctctgtgctgagtggaggtagcctctcagcatatctgctgggtaagacatagttaactgtcaattattgaaagaaactcatcacaatgcatagtgtttgggatgaaaggggcagaaaaataacaggattaaatagaccctaatactgtaattcaagtaagaaataattttgcagttttaatttgcacctgaagcgaactgtatgcattttcttccttccttgccctgtcacatgcctgcgtgggcacgtgtgtgcacgtatgtgcgtgaacatgatgtggcctggcttggtgtatccttcagctctgtgtttcctccttcacaagtgtggttttggggagaagtggttgaatgttgcagaggagggagctgctgacctttgtgcctgtaaatggctgtcctctctgcccccagtgtatcgcattaagttcaaggagagctttgctgagatgaacaggggctcgaacgagtggaagacggttgtgggcggtgccatgttcttcatcggtttcaccgcgctcgttatcatgtggcagaggcactatgtgtacggccccctcccgcaaagctttgacaaagagtgggtggccaagcagaccaagaggatgctggacatgaaggtgaaccccatccagggcttagcctccaagtgggaccgtgtatt

SEQ ID NO: 144788 - DNA, 888 bp, Homo sapiens
  misc_feature (1)...(888): n = a,t,c or g
cgacgttcgcagcgctacccttttccgctccacggtgacctccgtgcggccgggtgcgggcggagtcttcctcgatcccgtggtgctccgcggcgcggccttgctctcttccggtcgcgggacaccgggtgtagagggcggtcgcggcagggcagtggcggcagaatgttggcttaccaggggtattttaccctagttggcaagcgagcaattttcaacctctgtggtgtgtacgagctcaatgaaagtgttgtgaagagcgaagcacttttcgcttcccagccttatatgcatcggcggtgacaccacccttgcccggagggtggcccatgtcaaagcacctgtcctgccagccagaaggcacctgaaaggagaaggagaaggccttcctggaagcaagcctctccatggaatgagaaagtcgaagttgtattcgcattaaagttcaaggagaggctttgcttgaagattgaacaagggggctccgaaccgagttgggaaagaccggtttgtttgggccggtgccattgtttccttcaatcgggttttcaccgcgctccgtttatcatgttggcagaaagcactatgtgtaacggcccccttccccgcaaaagcttttgacaaaagagtgggttggccaagcagacccaagaaggatgcttggacaatgaaggtgaacccccatcccagggcttagcctccaagttggngcttacgaaaagaacgagttggaagaagtgagagatgcttggcctgcgcctgcaacttgcggctggctctttcaccgccatgcaaactccatgcctatttactggaaacctgttatgccaaacacgttgttcccnctgctaataaatgaccagtttacctgaaaaaaaaaaaaaaaaa

SEQ ID NO: 144789 - DNA, 395 bp, Homo sapiens
ggcacgagatctgtctcttccacgtggtaactatgctcggtttcatgttctgcgcgtaccatttcatggataagggactgaatttgctcttttgctccatcttccatattctggggttctgccttcactggaacctgctcctcgacctcagtgcgtgcagcagcaccccccgggaccccacagagacctagtatggatgcacacatgacagggaggaaaggccgtctctcctgaacttcattcttcacgtggtctatggtgactgcattgctgggcgtctggacatctgtatctgtcgtctggtttgatcttgctgactatgacgactgattatgagcactagcgatctatgatcgctgatggcgatgtgagattccttcgtggattatcccacc

SEQ ID NO: 144790 - DNA, 594 bp, Homo sapiens
tatacattatagtgcttgtatgtgtgcatcgcaatagaaatctatatataggatatgtatgaatatgcatacttatgtacgtaaaatgtctacataattagtgcgactcttgaactctattacgattacgtaggtgataacactcactatagtgagtccggccctcgtggccaataattcggcacgaggactcaccctgcctgccccgcactccctacaggaagtagacggactgagggcacccagctgggagccaggagacctgggctctagtctggcctcctgctgaaaccctccaggggctcctggcccgaagagttagagccagactggacgccctgcactgcccgccctggcctcccggctctccggccccctcctacagctgccgtgcttcctttctgttcctagatctcctgagcgtgccccagggcctcggcacaagctgctgcttctgcagagcctcatggctgtctcatttatttctcaattcaaatgccacctgcctggggaggtccttccagaccgtgcagccccaggaggcagctggcccggagacagcagggccttgacaaagagtcccccctgtacacg

SEQ ID NO: 144791 - DNA, 404 bp, Homo sapiens
  misc_feature (1)...(404): n = a,t,c or g
aagggcccgacgcgggctggggagaccgcattcccttggaaatcctggtgcagattttcgggttgttggtggcggctgacggccccatgcccttcctgggcagggctgcgcgcgtgtgccgccgctggcaggaggccgcttcccaacccgcgctctggcacaccgtgaccctgtcgtccccgctggtcggccggcctgccaagggcggngtcaaggcggagaagaagctccttgcttccctggagtggcttatgcccaatcggttttcacagctccagaggctgaccctcatccactggaagtctcagctggtaggtgagtgctgtcctcggctcactttcctcaagctctccggctgccacggtgtgactgctgacgctctggtcatgctagccaaagcctgc

SEQ ID NO: 144792 - DNA, 851 bp, Homo sapiens
tgcggccgcgcccgcacccgcaccggcacccacgcccacgcccgaggaagggcccgacgcgggctggggagaccgcattcccttggaaatcctggtgcagattttcgggttgttggtggcggcggacggccccatgcccttcctgggcagggctgcgcgcgtgtgccgccgctggcaggaggccgcttcccaacccgcgctctggcacaccgtgaccctgtcgtccccgctggtcggccggcctgccaagggcggaggtcaaggcggagaagaagctccttgcttccctggagtggcttatgcccaatcggttttcacagctccagaggctgaccctcatccactggaagtctcaggtacaccccgtgttgaagctggtaggtgagtgctgtcctcggctcactttcctcaagctctccggctgccacggtgtgactgctgacgctctggtcatgctagccaaagcctgctgccagctccatagcctggacctacagcactccatggtggagtccacagctgtggtgagcttcttggaggaggcagggtcccgaatgcgcaagttgtggctgacctacagctcccagacgacagccatcctgggcgatttgctgggcagctgctgcccccagctccaggtcctggaggtgagcaccggcatcaaccgtaatagcattccccttcagctgcctgtcgaggctctgcagaaaggctgccctcagctccaggtgctgcggctgttgaacctgatgtggctgcccaagcctccgggacgaggggtggctcccggaccaggcttccctagcctagaggagctctgcctggcgagctcaacctgcaactttgtgagc

SEQ ID NO: 144793 - DNA, 568 bp, Homo sapiens
ggaattcgggaaggactcgtgtgggaacattagtgcagctctgcctccgctgtcggcccaggttttcacagctccagaggctgaccctcatccactggaagtctcaggtacaccccgtgttgaaggtgagagctccaggctgtgactgcacatcacctgcgacactctgggactggtcagtactctaggaagtgggtcaggcaccttgggggcccaacgctgctccgtggggatgtctgcttgcctgcctggttctcttttcctgctgtttcctccagcagggaggtatcagaggcggggacacccaagtaggcctggcatgggcagaaaggaggtcacagctaaggcggttagagtggggttggcaccagccactttgtctgtttcccttgtggatcttagcctgtcgtctcccaaccccagctgcccctctgtctccccgcagctggtaggtgagtgctgtcctcggctcactttcctcaagctctccggcttgccacggtgtgacttgcttgacgctctggtcatgcttagccaaagcctgctgccagttccataagccttggac

SEQ ID NO: 144794 - DNA, 333 bp, Homo sapiens
ggcacgagacagtacaagtacaacagaaatgaatccccaggtacttttccaaagggtctgatagcaatttcttttgataactacatcctggagaaaagtgattagccaaacatttggaagacttgtggacacagggtctaaattgatgtccagatgcctagaatatcatccccttctgttagagtggctgcatgtggtggccaggtaattgatggagttctgctaaaggtccagcttacagtggacccatagacctagtggactgatctagtgatattttcttagccttcgagtgagtaattggcattgacatacttggcagtgaatgctcat

SEQ ID NO: 144795 - DNA, 363 bp, Homo sapiens
  misc_feature (1)...(363): n = a,t,c or g
ggcacgagaggtcttcactcaacattcagcaccttacatatcactgaacaattcacactggtgagaaaccttacaagtgcattgagtgcggcacagcctttggtgttagatcatgcctatctattcatctggtagttcacaccggataattgccttacagatgtcatgaatgcggcatggtctttatgcgtaatacacaccttgtaaggcatcagctaattcatactggagagaaaccttatatgtgtaatgagtgtggcagagcctttatagcacattcaaacctagctacccatcaggctatccatactggagaaaagccttacatatgtactgaatgtggcacggtcttcactcaaaatn

SEQ ID NO: 144796 - DNA, 1026 bp, Homo sapiens
  misc_feature (1)...(1026): n = a,t,c or g
aacccagatcttgtgaagtactcaggtcttgtgaagggttgccttgaggtccagggatacccccatttaaccctgnatgtgttccatatacatttccatgactgtatccaaaatacctcatgtacccccataaacatatacacctactttgtacccacaaaaatttaaaaataaagttaatttcaatgtttgaagactccatttattaaaataatagcagtttcctataaatttaatatttcaataaaactccccaatatttattcttaacactggaaaaacttttccaaaatgcatatggcagaaatatgggcgttgatgaaaggacagcatcaattaatgagggatcctcccccttgacgaaaataccttccaccaagacccacctttaacgctgaggcattacctctcaaagtgaggatttggggcaggggactaatatccaaactatatcactagctatatcaggagctgtaactataactatatcagggacttataacaattctattagaaaaaaaattaatctgaaaactggacaaaaatctgaataggcatttctcgaaagaagacatacaaatggcaaacaggcatatgaaaatgtactcaacatcattgatccattagagaaatgcaaatcaaaactacaatgagatatccatctccaccccagttaaaatatcttctgtcccaaaagacaggtaacaacaaatgctgaagaggatgtggagaaaagggaaccctcgtgcactgtggaagtgtatattagtacaaccactatggagaacagtttgtaggtacctcaaaaactaaaaatagagttaccatacaatccagcaattccactggtaggtatataccccaaagaaaggaaatcagtatattgaagataaatctgcagcatgtttactgtagcactactcgcaatagccaagatttggaagcaatccaagtgtccatcagcagatgaatggataaataaaatatggtacgcatacacaacggagtactattcagccataaaaa

SEQ ID NO: 144797 - DNA, 366 bp, Homo sapiens
  misc_feature (1)...(366): n = a,t,c or g
ggcacgagnnnnnnnnnnnnnnnnnnnnnnnnnnnnnnnnnnnnnnnnnnnnnnnnnnnnnnnnnnnnnnnnnnnnnnnnnnnnnnnnnnnncttatgnnnnnnnnnnnnnnnnnnnnnnnnnnnnnnnngttcacataattttatttagataatgatttattatctcaatgaattttgtttttttatattttgtatttgacttgtctattaatgaaatcttacttgggttaaaagaatggtcaatttatttatcttctgtcattctttatcttctctttgctctttctatttactattactaatgttttttttatgtatgttgttactcttattactatgttcttctattataattagttaaccg

SEQ ID NO: 144798 - DNA, 476 bp, Homo sapiens; identical to SEQ ID NO: 119066
  misc_feature (1)...(476): n = a,t,c or g

SEQ ID NO: 144799 - DNA, 452 bp, Homo sapiens
  misc_feature (1)...(452): n = a,t,c or g
tgctgttcataagtttattatctatatctgaaaaaatcatagaaaattgctgggtttagctctcagcagcccgctcctgagctctgaggaagcttgccttcttttgagctacccgatccttcttctgagcaagggacattttgggacggttccacctcttctttttaacttctttcttgggcttcttttcatagactggattctctcgtatagcagcatgagctttcttatacatctcctccatcctgcgggccagcagcaggccagtacaatatgctgcagcataatttgtcaggccaaccttcacaccatattttggcagttcgtgtgcatacgctgcgcagactatcatatccccctctatacgggcataagcaatctgacaaatgatatctctgtttgtcacacgaactatcatcctgtaattggggtgtggtgnaattaattttaac

SEQ ID NO: 144800 - DNA, 752 bp, Homo sapiens
  misc_feature (1)...(752): n = a,t,c or g
atggctgaccaggttccaagccatgtgggatcctaaacaagaagactgtgtcatagttggcagcatggcccatccacgacgggtagaaatcttccatgagacaggaaagagggtgcattcgtttggtggagaataccttgtctctgtgtgttccatcaatgccatgcacccaactcggtatattttggctggaggtaattccagcgggaagatacatgtttttatgaatgaaaaaagctgctgagtttttggtttaggaacatcaatttgttcaaattgaccactgtctaaggagcctagtaatcggcgtgccttagtgtgtttatgtggtaatgtgttacatttagcaattataacaatgaattattaataagactataagaagagtgtacttttagtaagggagaagtcttggagggttgcttctgcaggacggggagggaatttgaggggaggctgagagtgccgtcaggactttttttttttttttttttgagatggagttttgctcttgttgcccaggctggagtgcaatagcgcgatcttggctcaccgcaacctccgcctcccaggttcaagcgattctcctgcctcanactcctaagtnnctgggattacaggcacctgccaccacgcctggctattttttttgtatttttagtananatngggtttcatcatgttggccangctggtctcgaacctcctgacctccaggtgatctgcccgccctcggcctccaaaaattgctg

SEQ ID NO: 144801 - DNA, 2876 bp, Homo sapiens
  misc_feature (1)...(2876): n = a,t,c or g
cccctccaaactgactcttaaggcccatccagatccacatatcctgattttgaactatgtgaaagtgggactgttaagtgcaagactaaaataaattatagcagactttttagtaataactttccattttcaaacagtatatcctgtgggccaaagggctatttcttaaagaggcatgtaaatgtatttatttatctaatgtttttttccccatgtaaacttgatatacaaggtttagtatttgctcctctttcatattattttcacacgtatactcagatttggcatgtacctttcaacatctccataaaattaaacaccttttggagaaaagatccactattttctgctcaaaggtttcgcctacctaaagtggaacatgttaaaaatctatgttgaccatcactggacagctttctctcaaaacttcccttcaacgccatggattagcaccagttttgtttactttaaggtacttttcccattcatcatcctggttataataaatggatggaagaatatttcccactgatggttggtctgttgcttgccaaatttttagggagagctgttcatcatacaacataagggataatgactcctgtcaggtaaaacagaagcccaagaaataacaactttttttcttaaaaagttagttacacttgttttcttggagaaaaaaacctgtcaactcctttgcttttccaaaatatttcagggtatttcctataaggttcataagaataagagcttaacacagaaatagttgctgttcataagtttattatctatatctgaaaaaatcatagaaaattgctgggtttagctctcagcagcccgctcctgagctctgaggaagcttgccttcttttgagctacccgatccttcttctgagcaagggacattttgggacggttccacctacaaaagataggaatatatattttttaaactataactgaagagaatagaatatttaatttaaaattttaataaaatttaattttgatagagaatatttaagactttgcaatcagaaggttaaataatccaagttcaaatacatttacttatgtatgatcttaagctaactttcccaaaccccaacttctgtgatgtcctactaccatagggccaaaagtcaaatagaagacatgttagattcagtaataccacttctaggtatttgcccaaatgttttgaaatcagtttgtccaagagagtggcactcccatgttcattgcagcactatatattaatagcaacagataaatggataaaggaaatgtggtatacatatacataatggattattacccagtctttaaaaatgatggaaattctgtcatttgcaacatgaatgaattggagaatattgtgctcagtgnaaataagccaggcacaaaaagacaaatacttcatattcatatagaatctaaaacaatggaactcacagaagcagagagcagaatggtggttacagaggctggtgggtgcaaagaatgggcagatgatagtcaagtataaaatctccaacaggaggagtagggaggagtatgattttgtttttagttctattgcgcagcatgatgaatatagaatatcgtacatttcacaattaagagaataaatttcaaatgttgttgccacaaagtgttaagtatttgaggtgatatgttaaatacattgatttaattactatacattgtatttgtgggccatcacatcactttatgcttacatgttcattaattattactttctattccatttaaagattcaaaacatgaaaattcaacaaaaagcaacttgtcagccaataaaaaaatgcagtaaccagtacttagactgtactaagatagaaagaaccncctccgttatgtctgaggtaacacattccatccccacagttacttttgcaaacctggttcccttcgcttctgccacatcacgcagagctagtgatcgagtttgcacaattacaccaacagtctgccccacgtgggaaccattcccaaccgttttcttgaaaagacaaaaaaaaagacgacatacctcttctttttaacttcttttcttgggcttcttttcatagacctggattctctcggtatagcagcatgagcttttctaataccatctcctccatcatgtctggagttacgctgttctttacgtattgacgcacgaactgtttcttgtaaggcatcttcatcttcttccattaaggtaggcgcatgtaatcctgcaacaattctgggcccatggatgtggcttccgatggtactttctgcattaaaattcctttgcttttcagaatccataaccagggggaatcggtttgggtactgtggagggaataggacaagccctccatccacaggctccccttcagggcaaccaaaaaactttaatggccagtgggtaggttctgggcaagggcctggcatcccaataggcagggtgaaggcaccctggctgaccatcaatgctttccacattgtattcatcaccagtcaactccaacttggcctttcatagatcttgttcatgccaaacctatggaagaagcctgcgggcccagccagcaggccagtacaatatggctgcagcataatttgtcaggccaacccttcacacccatatttttggcagttcgggtgcatacggntgcgcagactatcatataccccctctatacggggcataagcaatctgacaaatgaatatctctgtttgtcacacgaactatcacctggaatttgggggtggtggaattaatttaatctggtatcaccaagcgtttccgagcagattaatcgggtttaccctctggtcggcttccaaatttcccttggaatcccctaaagagagc

SEQ ID NO: 144802 - DNA, 1790 bp, Homo sapiens
acccactggactcctctggaggtaccttagtctcccgatccatggctgtgtttttttactccctttatcgctgcctgtgtgtagaatgataattgcacaattgatagtgtgaagacctcttgataaatggtaaatctgagcatatgtatttggctgacatgtcattgtgaaacctcacagcttcagtcagtgtcaacgcagctagggagcatgtacctaatgcacatatcactgggcatagtctacaggcacctaataactcaggtaccttaacagtcactaatgagtggctcttccaaggcaaaacaaagggaagactgtagaagatgcttttcatttagaaatcctcaggaatgtggaagactattattcgcttctcatgggacaggactttatagggcacctgaaaaaactcccatgaaaaatcacttttacaaaatgtcaagttatgatatccaagatgaaaccaatgagtcacaacattcacataatacactgtacaaccctgatctcttgactgtcatcaaatgtttcttacctctaaaccaaagtttcattttataatttaatttttctcattttttctgttctcttagcttaagaaaagatcattacaaactttttgtaagtttttcatatatgcttgcaaagggttgtaaaactttattgtgattattcttgctttaagctgaaacttccctaatctttctttagagattgtggcatagcatgttagtttcttttccatatccaattgttgtctgtaatgaatacagaaatacaggcacttgtcttgtaactttaaatagacatcatctcaagtctacaagaattatccaaaatggtatttaatgacatttctaggtcttcagacactattaatgccagattgtagcctctaggtcctgaagattttactagatactggttactgaaactgagctttcttgaattctttttccttccactgtggtttcccgcatttcaacatatcacctatttttgtcctcaaaggttacttaaatgttttcccacagaattaaattaaatatgaatcatccctcctctgatttttgaaatgaccctttgcttcctatgataatgattcttctggtccgctttgtagttatatgttagagatcgtacatagtcacacattttgcaactgcatgtaattttcttattattttttcctcttcctctaaaactgctgttatttcttttaactttttgcgggaaaaattaaacccatctttcactttgttgatatacttatttataattgaactccttgatttttgctcgaattgcttttcaaggttaccccacttttagggaagacatttatttggggttttgtttagtgtatcaggctttttttagttagttgtatcaaggaagtgtagacttttctatacataatatcctttttcccacagtatttttttttttttttaaagtctagccgggtgcagtggctcacgcctgtaatcccagactttgggaggccgaggtgggcagatcacgaagtcaggagaccgagaacatcctggctaacacagtgaaaccccgtctctactaaaaatacaaaaaattagccggacatggtaacgggtgcctgtggtcccagctaatcaggaggctgaggcaggagaatgacatgaacccaggaggcagaggttgcagtgagccgagatcgtgccactgcactccagcctgggtgacagagcaagactccatctcaaaaaaaaaaaaacaaaaacaaaaagaaggactgggagggtcggcag

SEQ ID NO: 144803 - DNA, 572 bp, Homo sapiens
tgtcttctgccagagggtggataggcatcccaggtccagtgcaatgcagtgaggtaggcaggagactccatcctggtccacccgtggaggaccagagcagaagactatggtggaccccaattccccccttccattcgatcctggctcctcctctgaagtgcccaggctctgtcgtgacaggctgggtcttgcacaaggacaagccaaccaagagacagtcggggaagtgacatccagcccgtgggccttgcctttggccgcacacccgcagagctgcaagagctgcacctgtcctctcctaggcctggcagaggtgctgtgtgggcgtgtgggagtctggagcctggccctctccctctgctctccatcactagcggctcacaaccatccctgcagctgtcatctctcccccaatctcccctcttctgtcccctgcctccgtttccccaccccgtccccctccccgggtcggcctcgtacctccgccttaactaacccatgtccctggtctgcagcctactggtcggcctccaccttcaccttcgcggtctccccccgcccctcctccccag

SEQ ID NO: 144804 - DNA, 684 bp, Homo sapiens
ccaattcccgggtcgacgatttcgtcctgtatacccggcaccgcatgctcggtccagagtccgtcccgcccccaaaacgatcccgcagcaaactcatggcaccgccccgaatcgggacgcacaatggcaccttccactgcgacgaggcactggcatgcgcactgcttcgcctcctgccggagtaccgggtacggtccgcgaaaagtgaccctgggactgcgtgcatgcatgcctccggggtggatggcattccgccaacaggggtcacttccgcataggcggcccgggcaggcccaaggcacccttcctaccctttcctgcctccctgaaggtccaggcattaatcccctacccgggcgtacacccgggcaggccccttcacccctgtgtacctcgcaggatgcagagattgtgcgggacccgggatcccgaaaaactcgcttcctgtgacatcgtggtggacgtggggggcgagtacgacccttcggagacaccgatatgaccatcaccagaggtctttcacagagaccatgagctcccttgtcccttgggaagccgtggcaaaaccaagctgagcagtgcgggactcatctatctgcacttcggggcacaagctgctggcccagttgctgggcactagtgaagaggacagcatggtgggcaccctctatgacaagatgtatg

SEQ ID NO: 144805 - DNA, 720 bp, Homo sapiens
aattcccggctgcatgattcggcacgagctcctgcctccctgcagggagctgcttatgggacaccgcttcctgcgcggcctcttaacgctgctgctgccgccgccacccctgtatacccggcaccgcatgctcggtccagagtccgtcccgcccccaaaacgatcccgcagcaaactcatggcaccgccccgaatcgggacgcacaatggcaccttccactgcgacgaggcactggcatgcgcactgcttcgcctcctgccggagtaccgggatgcagagattgtgcggacccgggatcccgaaaaacttcgcttcttgtgacatcgtggtgaacgtggggggcgagtacgacccttcggagacaccgatatgaccatccccagaggtctttcacagagaccatgagctccctgtcccctgggaagccgtggcagaccaagctgagcagtgcgggactcatctatctgcacttcgggcacaagctggctggcccagttgctgggcactagtgaagaggacagcatggtggggcaccctctatgacaagatgtatgagaactttgtggaggaggtggatgctgtggacaatgggatctcccagtgggcagagggggagcctcgatatgcactgaccactaccctgagtgcacgagatgctagacttaatcctacctggaaccaccccgaccaagacactgaggcagggttcaagcgtgcaa

SEQ ID NO: 144806 - DNA, 684 bp, Homo sapiens; identical to SEQ ID NO: 144804

SEQ ID NO: 144807 - DNA, 720 bp, Homo sapiens; identical to SEQ ID NO: 144805

SEQ ID NO: 144808 - DNA, 660 bp, Homo sapiens
cttggcacgaggcttaacgtatatctttgtgtacttgtgcaggtatttctggcagtatagaaacagtaagtggacttgctggtcaaatggtagctacatttaaaaaacagtgatggctactgcttaattgtatatcaaaagagatttataccagtaactttcatacatttctgtttccttattctctcacttaaattcaacaacatcattcctcttaacatttttgccaatggtgaaaagtatttcgtatacaaatttacatattcttactcatgtggttaagtttcttacatgtatttgttgaacttcctgtgaattgcttattcatatctttttctcactttttcctaatgagttttgttatttttctttaatgaattttaggaatgctttatgtattggtgctattaatcttcaattttacgtatatttgcatagtaattgcctacttttagctcttcgttgtcatacagacatttttacatttttatttacttaaatttatcaatctttttctttagagtttctctggattttgtgttttattgaggagggttatccccatcccaagaatatatatatgttttataagaattctttataatacttctataactttgttttcaacctatctcgaagaataattttcatttgatatga

SEQ ID NO: 144809 - DNA, 741 bp, Homo sapiens
ttttttttgagatggaatttagctcttgttgcccaggctggagtgcaatggtgtgatcctggttcactgtaacctccgcctcccaggttcaaatgattctcctgcctcagcctcctgagtagctgagattataggcgtgtgcacagcatccagctaaatttttgtatttgtaggcaccctaacacaatgaaagtccaggctggttgaccaggctggtctcgaactcctggccagcctcaagtgatccgcccatcttgacctcccaaagtgctgggattacaggcgtgacgaccgacattcagccgcctttctttttgtcctcgtttgcaaatacagaatggacctgagtctgccaaactcagaagtgcgagacatgtatttttatttttctaaaattgaactggactcctaccaaaagcccccaatgcagagtggcagaaactttatcggaagtccattttggatcatcatttcccttgggcttgtaccaggccctggaaccttctgtgaggcccacccagtagacacttccacacccacagagagactgagcatgagaaggtccgtgcttgaaaaaggcctaacagtgggatctcggtgcaaggatgggagagtggaaaccgagtggtgaagagatgactgtggcacttagcagggaattcctgggagggtgatgcttcgggaagtttccagggagacaaaccctgttaagaatggctctagggccggacgtggtagctc

SEQ ID NO: 144810 - DNA, 403 bp, Homo sapiens
ggcacgagggaacgtttgaggttatcaataagctcctattccagacgccatgggtcatttcacagaggaggacaaggctactatcacaagcctgtggggcaaggtgaatgtggaagatgctggaggagaaaccctgggaaagctcctggttgtctacccatggacccagaggttctttgacagatttggcaacctgtcctctgcctctgccatcatgggcaggcgctaagttaaggcacctggctagaatgtgcctgacttccttgggagatgccctaatgcacctggatgatctcaaggcgcccttggccaacttaagggaacggacttggaccaaggttgctgggtgaatcctgagaacttctagctactgggaaatgtgctggtgaccgttttggccatt

SEQ ID NO: 144811 - DNA, 361 bp, Homo sapiens
  misc_feature (1)...(361): n = a,t,c or g
ggcacgagggaatagacaacatagtgtaactttaatggaaggatagctatctaatgagaatggcatatttaactgtgtttggggttttagntattctgccaactggattctttatacacagaatctcaaagcctagcacagcactgtgttataacttgctgaacacatgaaatttatcaaaacctcagattattagggtgccttggatacctttaccaaacatttacagatgtctgttgatgcatatgaatgatgaatgatttcaatacttaacccatcatctctgagtgagcgtcagtctctattgctattcatagtcctagacctctccttggtcccttatctcctaatttttgagttc

SEQ ID NO: 144812 - DNA, 423 bp, Homo sapiens
aaaggggtaattcggtttgaatttccccgttttagtttagaagcctagtctgtttgttcccctccaccgctctccctctcattcctgatgagcaatgatttgggggttttgagggtcaagtaggggttggtagcacctggaaagaaggactctttcacttcgatccctggccaattatggaggattcggaggtagaagaggggaaggaagatggtttttttctcatgacccccactccctgtgagagggaatgggggaagcctgatgaccctcagctgttccaatttagtattttttttcctttttaaaattactgtatttattatgacgatggtgactccccagtgcaaaggggggccagattctgtgtgtttctctaccctctttgtaaataaatgcccagtgtaacataaaaaaaaaaaa

SEQ ID NO: 144813 - DNA, 419 bp, Homo sapiens
  misc_feature (1)...(419): n = a,t,c or g
gttttgtgaatgagagggggccatagctgggcaaggaaaggaggaatgagagggctcatcaggaatgagagggagagcggtggaggggaacaaacagactaggcttctaaactaaaacggggaaattcaaaccgaattaccccttttgcatacatggacacttactgnnnnnnnnnnnnnnnnnnnnnnnnnnnnnnnnnnnnnnnnnnnnnnnnnngcttccaagctagaagctgaactgggtcaaacagggctcctccccattcctctcggtggtggtgggggagccttttcaaccaagactgttaggagtggggagagtgaggggggtctttggaagcagagaaaacgatggtctttggaaggtagatgtggaagggtcagtggttgggagtgtggaggtgcagaggccatgaagg

SEQ ID NO: 144814 - DNA, 394 bp, Homo sapiens
  misc_feature (1)...(394): n = a,t,c or g
gtaagatcatactgagagcggtgtgggaaagactgaggcaggagggcaagtgggacgaaatcgtcgacccggaggatcatagtgagagcggaggaggggaacaaacagactaggcttctaaactaaaacggggaaattcaaaccgaattaccccttttgcatacatggacacttactgnnnnnnnnnnnnnnnnnnnnnnnnnnnnnnnnnnnnnnnnnnnnnnnnnngcttccaagctagaagctgaactgggtcaaacagggctcctccccattcctctcggtggtggtgggggagccttttcaaccaagactgttaggagtggggagagtgaggggggtctttggaagcagagaanacgatggtctttggaaggtagatgtggaagggacc

SEQ ID NO: 144815 - DNA, 428 bp, Homo sapiens
  misc_feature (1)...(428): n = a,t,c or g
ttcgtttcctgtttcgacgatttcgtcccttcccatctaccttgcaaagaccatcgttatctctgcttccaaagacccccctcactctccccactcgtaacagtcttggttgaaaaggctcccccaccaccaccgagaggaatggggaggagccctgtttgacccagttcagcttctagcttggaagcnnnnnnnnnnnnnnnnnnnnnnnnnnnnnnnnnnnnnnnnnnnnnnnnnncagtaagcgtccatgtatgcaaaaggggtaattcggtttgaatttccccgttttagtttagaagcctagtctgtttgttcccctccaccgctctcactatgatcctccgggtcgacgatttcgtaccacttgccctcctgcctcagtctttcccccaccgctctcactatgatcctaatcccgcggccat

SEQ ID NO: 144816 - DNA, 1860 bp, Homo sapiens
catcccgcctgaaatcgtatttataaccaaacataacccaatcaaaggttcgattccttgatgtaaaatagccaatggtaggaagatgatgttgagattccccctgggtcctccctggaagctgccatatccacagcaaacagaagttgctcaattaatgttagtccaaaggaaaaagagcatttctcccatttaatcattcagtgagagtccaccacatatgttacactgtgcatttatttacaaagaggttagagaaacacacagaatctggcccccctttgcactggggagtcaccatctgtctataatataataccacgtaattttataaaaagaaaaaaaaatacctagaattggaacacgctgagggtcatctaggcttcccccattccctctcacagggagtgggggtcatgagatagaaaccatcttccttcccctcttctacctccgaatcctccataattgtccaggggacggaaggaaaagagtccttcttccaggggtgttaccaacccctactttgaccctcaaaacccccaaatcagtgcttcctttccctttcccaggccacttctgcagggacccacctgagtcaagacacagagtctctgacccaggttgccaaggggatatcttaagggtcccagggacatggagggggcactttgtgaatgagagggggccatagctgggcaaggaaaggaggaattgagagggctcatcaggaatgagagggagagcggtggaggggaacaaacagactaggcttctaaactaaaacggggaaattcaaaccgaattaccccttttgcatacatggacacttactgtacagatgaggaaagtgacgcccagagaaggggagctgtcttgcccaagggcttccaagctagaagctgaactgggtcaaacagggctcctccccattcctctcggtggtggtgggggagccttgtcaaccaagactgttaggagtggggagagtgaggggggtctttggaagcagagaaaacgatggtctttggaaggtagatgtggaagggtcagtggctgggagtcgtgcaggtgcataggccatgaagggggagcccaagcaaatccccaaactcacactgtagtcatgaccttgagagaacccgaacggaaacgcagtatctttttcttgagcgcgtgggaagctttgattttcacgaagactttggcggggcctgcgggcgcccctgcacctgctccacccccagaggccgcggtggccgccaccagctgctgcggccacacgaggccaccgctgccgtctgagtcgctggaggcagagctgaaggcaggcgattctccctcgctggcgctcgattcgctctccccgtaacccccgccgacgcctcccgcaggcccccggcggtcccaggggcccccaggcgccccagccggagcactcggaagtcgctgcccgcgccagcaggtaaagcagacgacgctggggagctgacggggacgggccggggccgggaacacgcgccgcaggggctcggggccgcacgcggcgcccatcggcagcgtcgatctccgcagtggagcgccagcgacggcaggaccctgcggcctgggccgccagcgtgggcgctgggccgcggcgtggccgtggaggccgaggctcttcccgctccgccgtggggtacttagggggccccgaagggaccgcggaggcgcggcccagcaggctggtctcagactgggagcgcgaggccttgcgggccctgggcgagccgcggcggcccgaagcctcggccatgcgtccacggcggccggcggcccggggacgctcccggggtggtgactgctccacgctgcggccgc

SEQ ID NO: 144817 - DNA, 637 bp, Homo sapiens
  misc_feature (1)...(637): n = a,t,c or g
ggaacgtctgaggttatcaataagctcctagtccagacgccatgggtcaagcctgtggggcaaggtgaatgtggaagatgctggaggagaaaccctgggaaggctcctggttgtctacccatggacccagaggttctttgacagctttggcaacctgtcctctgcctctgccatcatgggcaaccccaaagtcaaggcacatggcaagaaggtgctgacttccttgggagatgccataaagcacctggatgatctcaagggcacctttgcccagctgagtgaactgcactgtgacaagctgcatgtggatcctgagaacttcaagctcctgggaaatgtgctggtgaccgttttggcaatccatttcggcaaagaattcacccctgaggtgcaggcttcctggcagaagatggtgactggagtggccagtgccctgtcctccagataccactgagctcactgcccatgatgcagagctttcaaggataggctttattctgcaagcaatacaaataataaatctattctgctaagagatcccnnnnnananaaaaaaaanaaaaaancttggttnttccccacccattttaaacancanttttcangacttaaaaaagggaaactcaacagatcctta

SEQ ID NO: 144818 - DNA, 781 bp, Homo sapiens
  misc_feature (1)...(781): n = a,t,c or g
gacactcgctttttggaacgtctgaggttatcaataagctcctagtccagacgccatgggtcatttcacagaggaggacaaggctactatcacaagcctgtggggcaaggtgaatgtggaagatgctggaggagaaaccctgggaaggctcctggttgtctacccatggacccagaggttctttgacagctttggcaacctgtcctctgccttctgccatcatgggcaaccccaaagtcaaggcacatggcaagaaggtgctgacttccttggggagatgccataaagcacctgggatgatctcaaagggcaccttttgcccaagcctgaagtgaacttgcacttgtgacaaagctgcatgtgggatcctggaggaactttcaagctcctgggggaaatgttgctggtgacccgtttttgggcaatcccattttcggcaaaagaatttcacccctggaggttgcaggctttcctggcaaaagcagaagatggcagaagatggtgacttggagttggccagtgcccttgttccttccagattaccattgagctcactggcccatgaatgcagagcttttcaaggatatggctttattcttgcaagcaattacaaataataaatctatttctgctaagagatcaccaaannnnnatnntnnnnnnncccccggattttttatttagcgggccgcacctttttccccttttagggggggtaaatttatattgggccttgggccggggttttcaaaagcggggggannnnnnnnnnaaagagccc

SEQ ID NO: 144819 - DNA, 368 bp, Homo sapiens
  misc_feature (1)...(368): n = a,t,c or g
ggcacgagagatcagaaatatgttgtgttccttttaaattgcttcatttgtcaatttcttgggaagataatttagcacctactcttagagcaattttgaagcagatctttgctatatttcnnnnnnnnnngtttgagacggagtctacctatggacccacaggccgtactgcggattgggcagcctgaactttggctctgtgatcattgtccttccctgagtcaaggcatatggctggatggtgctgactagcttgggagatgccatacagcccctggctgatcccgagtgctctttttggtcagctgagggaactgcgctgtgacatgcttcatgtggatcctgaggacttcaggctcctgggaaag

SEQ ID NO: 144820 - DNA, 317 bp, Homo sapiens
ggcacgaggttttgcctcctccctctgctctccctttgtttggagcctgtgctgtttgatttccgtgtcttgtgtgctgcacccttcaggagaattcaggaaaaccaattctgtgtcctcggaggaccacagcccagttgggccccaggcgaaacccagcctggagcttgcaggcaggacgactgttcagcacgcagaccgccgaggacaaggaggaacacctgcactcgattataagcagctcatagagcgtacaggactacacattccaaacataagtttcaggcttcgacatataaacattagagtatagctac

SEQ ID NO: 144821 - DNA, 406 bp, Homo sapiens
ggcacgaggacaaattatgcacagttgcaactcttcgtgaaacctatggtgaaatggctgactgctgtgcaaaacatgaacctgagagaaatgaatgcttcttgcaacacactgattacaacgcaaacctctcccgattgatgagaccagaggaagatgtgatgtgcactgcttttcatgacaatgaagagacattcttgaaaaagtacttatatgatattgccagaagacatccttacttttatgatccggaactcctaatctttgctaataggcataaagctgcttttacagattgtagtcaagctggtgattgagctgcctggctggtgccaaagctcgatgattatctttatgaactttaggctacctcttgcataattatatctaagtgtgccaatctcag

SEQ ID NO: 144822 - DNA, 2954 bp, Homo sapiens
atgaagtgggtaacctttatttcccttctttttctctttagctcggcttattccaggggtgtgtttcgtcgaacccccctgggccctgccagctccctgccccagagcttcctgctcaagtgcttagagcaagtgaggaagatccagggcgatggcgcagcgctccaggagaagctgtgtgccacctacaagctgtgccaccccgaggagctggtgctgctcggacactctctgggcatcccctgggctcccctgagctcctgccccagccaggccctgcagctggcaggctgcttgagccaactccatagcggccttttcctctaccaggggctcctgcaggccctggaagggatatcccccgagttgggtcccaccttggacacactgcagctggacgtcgccgactttgccaccaccatctggcagcagatggaagaactgggaatggcccctgccctgcagcccacccagggtgccatgccggccttcgcctctgctttccagcgccgggcaggaggggtcctggttgctagccatctgcagagcttcctggaggtgtcgtaccgcgttctacgccaccttgcgcagcccggtggaggcggtgatgcacacaagagtgaggttgctcatcggtttaaagatttagggagaagaagatttcacagccttggtgttgattgcctttgctcagtatcttcagcagtgaccatttgaagatcatgtaaaattagcgaatgaagcaactgaatttgcaaaaacatgtgttgctgatgagtcagctgacaaattgtgacaaatcacttcataccctttttgggagacaaattatgcacagttgcaactctttcgtgaaacctatgggtgaaatggctgactgctggtgcaaaacaaggaacctgaggggaaatggaatgcttctttgcaacacaaaggatggacaacccaaaccttcccccgattgggtggaggaccagaggttggatgtggatgttgcactgctttttccatgacaatgaaggagacattttttgaaaaaaatacttattatggaaattgccaggaaggacatcctttaccttttatggcccccgggaactccttttcctttggctaaaaagggtattaaagctggctttttacaggaatgttggccaaggctggctggattaaagctggcctgcctgtttggccaaaggttcggatgaactttcggggatgaaagggaaggcttcgttctgccaaacagagactcaagtgtgccagtctccaaaaaatttgggagaaagagctttccaaaccatgggcagtagctcgcctgagccagagatttcccaaagctgagtttgcagaagtttccaagttagtgacagatcttaccaaagtccacacggaatgctgccatgggagatctgcttgaatgtgctgatgacagggcgggaccttgcccaagtatatctgtgaaaaatcaagattcgatctccagtaaactgaaggaatgctgttgaaaaacctctgttggaataattccactggccttgccgaagtggaaaatgatgagatgcctggctgacttgccttcattagctgctgattttggttgaaaattaaggatgtttggcaaaaactatgctgaggcaaaggatgtcttcctgggcatgtttttgtatgaatatgcaagaaggcatcctgattactctgtcgtgctgctgctgagacttgccaagacatatgaaaccactctagagaagtgctgtgccgctgcagatcctcatgaatgctatgccaaagtgttcgatgaatttaaacctcttgtggaagagcctcagaatttaatcaaacaaaattgtgagctttttgagcagcttggagagtacaaattccagaatgcgctattagttcgttacaccaagaaagtaccccaagtgtcaactccaactcttgtagaggtctcaagaaacctaggaaaagtgggcagcaaatgttgtaaacatcctgaagcaaaaagaatgccctgtgcagaagactatctatccgtggtcctgaaccagttatgtgtgttgcatgagaaaacgccagtaagtgacagagtcaccaaatgctgcacagaatccttggtgaacaggcgaccatgcttttcagctctggaagtcgatgaaacatacgttcccaaagagtttaatgctgaaacattcaccttccatgcagatatatgcacactttctgagaaggagagacaaatcaagaaacaaactgcacttgttgagctcgtgaaacacaagcccaaggcaacaaaagagcaactgaaagctgttatggatgatttcgcagcttttgtagagaagtgctgcaaggctgacgataaggagacctgctttgccgaggagggtaaaaaacttgttgctgcaagtcaagctgccttaggcttaacccccctgggccctgccagctccctgccccagagcttcctgctcaagtgcttagagcaagtgaggaagatccagggcgatggcgcagcgctccaggagaagctgtgtgccacctacaagctgtgccaccccgaggagctggtgctgctcggacactctctgggcatcccctgggctcccctgagctcctgccccagccaggccctgcagctggcaggctgcttgagccaactccatagcggccttttcctctaccaggggctcctgcaggccctggaagggatatcccccgagttgggtcccaccttggacacactgcagctggacgtcgccgactttgccaccaccatctggcagcagatggaagaactgggaatggcccctgccctgcagcccacccagggtgccatgccggccttcgcctctgctttccagcgccgggcaggaggggtcctggttgctagccatctgcagagcttcctggaggtgtcgtaccgcgttctacgccaccttgcgcagccctga

SEQ ID NO: 144823 - DNA, 1259 bp, Homo sapiens
cccacgcgtccgggggtattgttatgagtaaaactttatcataacttggcctgaaaaagagataactcatgatccattgctatctttattactcaaaggctgttcattcccataataccagatccataatagttgtagtttttttgatgttgttgcccttaccttaattatttgtagtttatggtaggccttgctcgagtttttcccacagaattccataattttaatgttgaactaacccatctatataggacttctaaaaactaccgtcaggaatgtaaggttaaatgagaggtagaacttgtagtgtaataggtataatggtagctttcaaagttttatcttctcaaaacattgtcttagccagtgtatttctgagaactcagactgaagcacagaagtcacagtatgcttcctttatttaagcacaccagattcatgacacaagtacttgctgaacaagtgttctcattgcagagatgatctacttgaatatacaagggtcatcatactagattattaaacaagaatcggaaatcttgagttgtggaagaaattgtttatgctttggagatctaaaaaaggctatgaaatgtaggaaattagattaagtcccagtttgttctggtaaatataaaaatggttagatatattaaactgcaagtagtatcagcttcaccataagcttgggccttcctccatcttgttttatttaagtctctttaaatggaaattttgttgtccattgtttcagcattcatgaactttcttactatcacaggttctactttaattttccttgccatatgtgtttccattttgtggggacattagccaccacagggaacacaagagttgtcagaagactcctggggtgtacagaggcaaatcaagctgcatcagtattatagggatacccaaacaggaatcctttctattaggggaaataaggaatcagttaagtgttgggctggggcgcgggtggccttatgccctgtaatccccagcattttgggatgcccaaggtgggcagacccatttgaggcccaggagttctaaaccaagtttggccaacatggcaaaaccccatctctactaaaaatataaaaattagctgggcatggtggtgcacacctgtaaatcccagctacctgggaggcacgagaatcacttgaacccaggaggcggaggttgcagtgagccaaggttgtgccactgcactccagcctgggtgacaaagcgagactgtctcaaaaaac

SEQ ID NO: 144824 - DNA, 354 bp, Homo sapiens
ctcggccgccgcggggcagggagaggagaatcagcttgaggcatcattagatgcactgctgagtcaagtggctgatctgaagaactctctggggagtttcatttgcaagttggagaacgagtatggccggctgacctgctgaacactctgaacaaggtcttgaagcatgaaaaaacaccgctgttccgtaaccaggtcatcattcctctggtgttgtctccagaccgagatgaagatctcatgcggcagactgaaggacgggtgcctgttttcagccatgaggtagtccctgaccatctgagaaccaagcctgaccctgaagtggaagaacaggagaagcaactgacgacagtc

SEQ ID NO: 144825 - DNA, 594 bp, Homo sapiens
  misc_feature (1)...(594): n = a,t,c or g
taatgccttggtggcagctgttgcctttgggaaaggactatctaattggagaccttcaggcagcagtggtcctggccaggcaggccancccaggagctgggacgatccttgcaggaacctcaggattacagcaggtgcagatggcaggagctccaagccagcagcagccaatgctcagtggggtacaaatggctcaggcaggtcaaccgagggaaaatgccaagtggaataaaaaccaacatcaagtcggcttccctgcatcccctaccagcggtgagtgtggctggcaacctcgactccctggtgctctttgcagagttgggcagtgaaattaccttttgctcaaaggctcacctagatgggtacaataaaaagaacatgggctttcagcagcagacaaatcccacttccaccactgactagctgtgtgaccttggacaagtgacctaatttttctgagcctgtttctcatttgtaaatgggtgataatacctacctcatagggttgttgtgaggattaaaatgaggaaatgaatgtaaagcacttagtacagtatatgaaataatgggtattcaataaatgatagtttctac

SEQ ID NO: 144826 - DNA, 1605 bp, Homo sapiens
  misc_feature (1)...(1605): n = a,t,c or g
gcagccctcctttctatgtgtcatactcgtttatctgggtgaccaacctgttcctattggtgcagagaagaggagaagcacgcttgaggcatcattagatgcactgctgagtcaagtggcctgatctgaagaactctctggggagtttcatttgcaagttggagaacgagtatggccggctgacctggccatctgtcctggacagcatttgccttgcttttctggacagcatgaacactctgaacaaggtcttgaagcatgaaaaaacacccgctgttccgtaaccaggtcatcattcctctggttgttgtctccaagaccgaagatgaaagatctcatgccggcagacttgaaaggacgggtgcctgttttcagcccattgaggtaagtcccttgaccatcttgagaaaccaagccttgacccctgaaagttggaagaacaggagaagcaactgacgacagattgctngcccgcatttggtgcagatgcagcccagaagcagatccagagctttgaataaaatgtgtttcaaacctttctgggagaaaatcagcaaagagggagcgaggattcagagagttggaggttttccggccgaacaagcagacttttaacccctacagacacttaatgccttggtggcagctgttgccttttggggaaaggacttatctaattggaggaccttcaggcagcagtggtcctggccaggcaggccagccaggagctgggacgatcctttgcaggaacctcaggattacagctaatgcatattgcagttactccaagccagcagcagccaatgctcagtggggtacaaatggctcaggcaggtcaaccagggaaaatgccaagtggaataaaaaccaacatcaagtcggcttccatgcatccctaccagcggccctcctgcctggggtttcattctggctatccctctaaggcgcaaggtgaagaagcttctggggccaggaaggaaaaaaaaatgcccacctgcagctctggtgaagcttgggcctgctctccttcccaaccctctaaggaaccaacttgccttttacctgtcaaaataatccataaatccccctaccctttaccccaccttatacaacacgagggctttctcgggtaagtggctctgccccggcagggactatgtggggaaagggtttttcccttagacacacgaaaaaaacccccttccccccggattccatgttcccttattttggagggagaagggaattgcaccttcaaactgcccatccagggtttagttgaccctcataatgggtgccccactttcctcgactttggcccaggatttcccttcaaagaaaacgactttcccttcatttcccctaagcctgtggccccaaatggtggacccagaatgatggtggggagggggcaaccccccagtagctttgcctgcttttataaagttgaacaaattgaatttagacattcaggctaacctgcctttcttagtactcctttgttggcatgggcaggggttgagtcagcagaagtggaccaaaggattcctcctgaataaagttatttaaattgaaaaaacctgcagtgcggcggcgagggcaaat

SEQ ID NO: 144827 - DNA, 682 bp, Homo sapiens
  misc_feature (1)...(682): n = a,t,c or g
cttgttttattttgaaaaattgttttcataagatacaattgagcaattgagatttgttctcccagtatctgaagatttttttggtcttgttttgttttttgggtttttggccctaaaattaggtgaattcagctttgggtctatttcatccattctggaaggtccttgggtcactgatctgaggcattcttgatgtggttaggacttcccagcattattttttttagatcctgttgatttaaaatgaaaaggattagcatgagggatggtaacattcctttttgatatctgtagcagcaagttttcttatgattcattattcttcttcttacagctttaaatcatctagggaacttcatataaaatttaaattcccagtttcaactagttgtggagcatttggatccaaaataaaatggaaagtcctctccgaagttgtagaggagactcaagaatcagaacaacctgaagttctttaagctgtcagttgaaggactaggtaaaaaacaaatatcatttagtgtgatcattaatgcacatgagtcattattccatgtggttgctgtcgactggtcaggggcacttcaagccctaatctgtactttgtcctgtctctctacaccctgttctcgnacgcgtgggtcgcgacngnaagtctatnctgtacgggtttcatggggcg

SEQ ID NO: 144828 - DNA, 525 bp, Homo sapiens
  misc_feature (1)...(525): n = a,t,c or g
ctccagcacccagagcagtgagcccagtcccgagtcccggagagagctccagcaataggggccatgtcgccatagccccagcctctcggtccgcagcctcagcagcgtcccagccggctggcttcatgctgcggtgcagctgcaccatgttcctgggttgagggggcaatcgggcacgctcctccccatgggttgcccatcatgtctaatggatatcgcactctgtcccagcacctcaatgacctgaagaaggagaacttcagcctcaagctgcgcatctacttcctggaggagcgcatgcaacagaagtatgaggccagccggcgangacatctacaagcggaacactgagctgaaggttgaagtggagagcttgaaacgagaactccaggacaagaaacagcatctggataaaacatgggctgatgtggagaatctcaacagtcagaatgaagctgaacttcgaccccagtttgaagagcgacagcaggagacggagcatgtttatgagctcttggagaaaaa

SEQ ID NO: 144829 - DNA, 1560 bp, Homo sapiens
  misc_feature (1)...(1560): n = a,t,c or g
ggtggttcagggggcgtgtaacctgggccgattctgccccagcacactggttgtcgggagccccgcctccgctcgcggttgacagctcagctggtgccgagcaactcgtgccagccagtcgtgtctcagcctggagagtgcgcgcaccgccgacgcgggcagccgctggctctttcttatcgaaacagccccgggcgccgcgccgctctgaggccagcctcctactgagaacagtccctcccttgtgcgggtcgcacggctagccgcaggttcaggccacgtcaaatccattttctaaaaaagcagggagcagagctcttctcttcgccgccgacgcagaaaggagctggggaggaaaaagctgctgccttttgcgctggagattcgtggggcaaggcttctcattttcccagggttgcttcccctcccgggtgaggagcgtcctgagattaagggaaagagctgggaaaatgggagcagacctgggacgagagatttattttttgcagaggattgatggggggagatggtaacccagaaacgagttcacacagcagttctgtttcattgacagctttttcttagtgacactaaagatcgaggccctccagtgcagtcacagatctcggagaagtggtgaaaaggtcccgtttgtgcagacatattccttgagagcatttgagaaaccccctcaggtacagacccaggctcttcgagactttgagaagcacctcaatgacctgcaagaaggagaacttcagcctgaacgtgcgcatctacttcctggaggagcgcatgcaacagaagtatgaggccagccgggaggacatctacaagcgggaacactgagctgaaggttgaagtggagagcttgaaacgagaactccaggacaagaaacagccatctggattaaaaccatgggcctgatgtggagaatcttcaaccagttcagaatgaagctgagctccgacgccagtttgaggagccgacagcaggaagacggagcatgtttatgagctctttggagaataagatgcagcttcttgccaggaggaattccaggctagccanagaatgaacgatgcgcggatggcagctcttggtggaangccagaggaagggagtgtaaacctggaagctctcaggggaaacttgaagggagtcacccaaaaactggggaagatgtccccgggagccccaggtcaagcccgacccantacacttgaggcccctggcccagaagggcaaagatctaaaaaaaataatgctgggaagtcctaaccacatcaagaatgcctcagatcagtgacccaaggaacctttccagaattggttgaaatagacccaaagctgaattcaccctaattttagggccaaaaacccaaaaaaaacaaaacaagaccaaaaaaatcttcagatactgggagaacaaatctcaattgctcgaattgtatcttatgaaaacaatttttcaaaataaaacaagagatatttaagattcattaagttcttgtcatttcaaattttaagaaaaatattttctaatggaattacatata

SEQ ID NO: 144830 - DNA, 360 bp, Homo sapiens
ggcacgagcaacatttcaccaggagtcctaaacaggtagtaagataagaaatataaaaggtatacatatcggaagagaagaaatgaaactgatattattcacaaattatatattagtttgtagagaaaacctaaaataatgttcaagctattggcattaatatcaaggtattaagcaacagttgctggatgtaacatctatatacctcccactcccaaattgaattttgatatagttggataaatattgttagcaaaaaagttatttacaaatgcaaataacaatataaggtacttgggaataaatctaataataaatgatgggcatcacctttctaaagaaatttatatcatttcatta

SEQ ID NO: 144831 - DNA, 833 bp, Homo sapiens
cgcaccaacgccaacagggcagcgcgttgtgagagccacgcctgcgcaatcggctccagtgcgcctgcggaggcggtcctatgacgtgaataaccctataccttccaatttgaaatcagaagcaaaaaaggctgccaaaatattaagagaattcacaagaaataacttccagaaatggacctgataagatcaattcctggctcaacggtaattgcgaaggctaaaaggccttgcaaattcttgtctgttgaatcaaagcccggggtccctggtgaccttccagagggggggaccgggggttttagtggcgcgcctttccagatgggaaaatggtcttcacccttcagccattggggatagctggctttggttggaggatttgaaataggaatttgaggtattcagactttggtgataattcttgaatttatgacccgtgctgttaggaagcttttgcaaaaggcggaaatctgaccctcggagggaacttgactgtggcggttgggcccttgggaaggaacttggaaggaaacgtgggccctgagaagctccgctgccgtcttcacgtactgcaagtcaaggggactctttgcaggcgtgtctttagaagggagctgtttgattgaaaggaaagaaactaatagaaagtcagttcaagttaaagtgattttaattgaaagtgtgatgagaaaatagtacttcaaaagttgatataatttgcagagtacatttatatattctttttacaacatgtggttttaagtgtgtatcttacatttaaaaattaaatatacaaataatatatgctcgtagaaaatgcagaagacacatga

SEQ ID NO: 144832 - DNA, 541 bp, Homo sapiens
  misc_feature (1)...(541): n = a,t,c or g
ggcacgagagctagcaccatgagcttcaataccctgattattctgaactcaaatcagcaggagatcatttccgtttcttggatttgaactgttaagttttgggnaattttagggatgagtaaaaacgccatactcccttcaattaatctcatattcttccatccctaagacttttaaaaatgttaaggcaaaggagatttctctcccctccagttggagatggagatgagacataacagagaaattgctgttttaaaaagagaaaaaccggccagatgcgtggtgtcacgcctggtaatcccagcactttgggaggctgactcaggcggatcacctgaagtcatgagttcaagaccggcctggccaacatggtgaaataccatctctacaaaaaatacaaaaattagctgggcatggtggagcaagcctgtaatcccagctacttgggaggctgagacaggagaatcacttgaacccaggaggcggaggttgcagtgaaccactggactccaggctgggcgacagagtgagattctgtctt

SEQ ID NO: 144833 - DNA, 660 bp, Homo sapiens
ggcacgagaaagccgatatagtagctagctacttaagcatccatgggtattgctccatatgaaagcagatttgcaggacagagagagtaaattagccttcagtcttggtttacagcttccaaggagagccttggccacctgaaatgttaactcggtcccttcctgtctctagttcatcagcacctgcagatgcctgactcttgttagccttactattcaatacagtccttagattcacggtatgcctcttcctattccaggcacctattctgaaatcaccatgttgctctgcagctagagttgataggagaaaatccatttgggtagatggcctatgaatttgtagtagactttcaaaatgagtgatttgttagcttggtacttttaagtttgtggtacagatcctccaaacccatactctgagcaattaactgccttgaacatagagaaaaattaaggcctcacaggatgagtctccattctctgtaaatgcttattttatcatagtctttagcctctactatgagtaaaatgttctcttcggccgggtgtggtgactcacacctgtaacctcagcactttgggaggcagaggtgggaggatcacttaggtccaggagttcgagactagcctgggcaacatagtgagacaccggatcta

SEQ ID NO: 144834 - DNA, 347 bp, Homo sapiens
ggcgagcgtctcgcaggccgtaggaggaagatggcggtggagtcgcgcgttacccgggaggaaatcgggaacgattcctagaaaccgattgaccgcgagaagacatgcccactgtcgctacgcggccttcaccaccaataacggccgccaccaccgaatggacgacttctcccggggaaatgtcccgtacagcgagttgcagacctacacttggatggatgcaactttcgaaagatctgacaagcttagcacaagaactctacccacaagctacactcaacggcactcacttcacttttgctgtcgctcttacacacgctacaccacctggctctcgagttaacgac

SEQ ID NO: 144835 - DNA, 525 bp, Homo sapiens
tttcgtgtcagggcgagcgtctcgcaggccgttggaggaagatggcggtggagtcgcgcgtgtacccaggaggaaattaagaaggagccagagaaaccgatcgaccgcgagaagacatgcccactgttgctacgggtcttcaccaccaataacggccgccaccaccgaatggacgagttctcccgggggaggtggtctaaggctccaggaaagcagaagggcccttagcagcagagggagaaagggcacggaggccaagtgagccagagagccaccatcttgaggcccctgcgaggggtcacatgggctggcttatttggagaacaaagttagataactcatgtgatcccacagagggccaggatgatcgccccagggcgctctgtcccctgctgaacactcactcagcatctaagagaaacaggaaggagccatctttctgaggccaccgggggttgtagagcgcagcatctttgcagtcgtgggatttggaagcaatcttttccttcctttggtcactccaag

SEQ ID NO: 144836 - DNA, 3456 bp, Homo sapiens
ctaatcatgaaatatggcattgagctgggcactcatgactcgctcatgatgtgaatggctatcgaaggacataatattgtctatggggatctcgcagcgaggggcagcggtgcctgagaagattgatccgtggctttgggcccctgccagtgtcgctgcaggatagtgcatggtaaaggcataatttttctcaaactcggcggacggttcgtgtttgaaagagaagttgccattgatgctgagcggcgggctgaggggtccatcaaaggaagggctggtgcaatcagtcagagggctttcaaagaagggctccagcgctgcgctgtaggcgtgcggcggaggcttaacgtggaagacatgggagctgtccatggtaccgtaaggcggactgggcagcccaggcgactggtaggagtaggggtgtacagggaaggaagcgctggccgtcggcaggtgggggggcatgtcctggttctgctcaggcagaaaagtccgaggattgagttgcaggcagcccgcaaccaggttggtggtgggttgggataagcccttgcaaagcgtctgaacgaaggagaccaggtctgggcttttgcctgagcgcaggatctccgacagagcccagatgtagttcttggccaagcgcagagtctcgattttggacagcttctgcgtcttagaatagcaaggcaccaccttgcgcaggttgtctagcgccgcgttcagtccgtgcatgcggttccgctcccgggcgttagccttcatgcgtctcaatttaaaacgctccaggcgagccttagtcatcttcttctttttggggccgcgtctcttgggcttttgatcgtcatcctcctcttcctcttcttcctcctcttccaggtcctcatcttcgtcctcctcctctcccccgttcctcagtgagtcctcctctgcgttcatggtttcgaggtcgtcctccttcttgtctgcctcgtgctcctcgtcctgagaactgagacactcgtctgtccagcttggaggaccttggggctgaggctcgcccatcagcccactctcgctgtacgatttggtcatgtttcgatttcctacattcaacaagggagaggcaaacagaaagaaaagcagaaaaacgctatattcaaaagccagatacgccttcagcttccactccctaaacctgtacaaatgcttgcgaaaagtaccttcagctacgactgttcctccagaccctctcactacgtcagtccccacctccatccccaggatcttgtcctcaaagcgagctagttctcgcgaggaggccttggttccattggcctttgcgctctggtagctgtccttgggcttcccatcccgcagcgctccgatgtgaccctcctctgcgcggaaaatttcgacccggggcgccggcatcgcgacgctcagccagtgcccgcgaggctcccaggagatgcggggtagtaaggccctaaaaagaggagcctggacacggcctggattgaggtgcgttttgtttggggttgaaggcgcgagaaattggggcgagagaagagagtcagccggatcccggagaggacagagctgtttctcagggaaacagatgctcgctcttgcaaagggaggtttgcgttcaatgaaaggatcaagtgtggccagggcagcccggccgacctcgagaggttcccgcgtcctctccccgccctgcctaggagtggggtgtcggggcctgtttcccggggatcgaggaacagcttgctgtccaaaggggatcgcagggccagggaactgacaagcacacgctatttgccaacctttgccgacggcgccggagcgtcgcaagaacaatggttgctgcagtgggttgggagagaggacccggacaagttcctgccaatctatacctgctgcttgttgcaaggaacctggaaatttacgcatcttaagaggttgagaatgacgctgaatctgatgcctgtaccatggtaactgtgtagtgggagatgggaaatagccagatctttcagggagtattggctcctgaatataaatgaacacgatgcagaatgtcactgtgatgtatctggcagaatccgggaggagattaagacggagccagagaacccgatcaaccgtgagaaaacatgcctgctgctgctgcgcatcttcaccaccaataatggccaccaccaccgaacggacgagttttcccggggaaacgtacagtccagagagttgcagatctacgcttggatggatgcaaccttgaaagaactgacaagcttggtaaaagaagtctacccagaagctagaaagaagggcactctcttcaattttgcagtcgtttttacagatgttaaaagacctggctatcgagttaaggaagttggtagcaccaagtctggcagaaaggggactgatgattccatgaccctgccgtcgcagaagttccaggtagattacttggacatagcaattacccctccgcatcgggcaccacctcctgggtatgagagacctggcctgtgtataggccaatttctgttgattagtactaaaggctgctcctacgtgcacaggcagaacaggctctacaatgagatgcaggtgctggcagttgaaagtctgtctagcatacaccagggtactttgatacaaaggttgtactctcaatgccttgggtagctccctcatgggctggcgttgagtgtctgcagcttttccaggtgcaaggtgcaagctgtcggtagatctacatttctggagaagctccactaggcagtaccccagtgggaattctgtgagggagctccaaccccacatttcccttccatactgccctagcagaggttttccatgagggctccacccctgcagcagacttaggcctggacatccaggcatttccatacgtccgccgaaatctaggtagaggtttccaagctcaattcttgtcttctgtgcaactaactgcaggcccaacaccacgtggaagctgccaaggcttgcagcttgaaccctctgaagcaatggcccaagctgtaccttgaccccttgattctccttgccttctaagacccacaaggagatgcagaggggacccactggatgctgtccatgcaatgggtttatgttgcagtcagagaattcacctttaagcttggggaatccaactcttttttttagcaagcccatttttatcccagagagagactttacctcattattcacggtaatggttacccacttgaattgtattcccataattcccatgtgttgtgggaggggaaggacctggtgggagataatttgaatcctgggggcagtttcccccatactgttctcgtggtagtgaataagtctcacaaaatctgatggtttatcaggggtttccacttttgcatcttcctcattttctcttgctgctgccaggtaagaagtgcctttcaccacccctgccat

SEQ ID NO: 144837 - DNA, 839 bp, Homo sapiens
gggctgcaggaattcggcacgagggaagatggcggtggagtcgcgcgttacccaagaagaaatttaagaaggagcctgagaaaccgatcgaccgcgagaagacatgcccactgttgctacgggtcttcacccaccaataacggcccgccaaccaccgaaatggacgagtttctccccggggaaatgtaccgtccaccgagttgcaaatcttcccactgggatggatgccaactttgaaagaactgacaagcttaggtaaaagaagtctacccagaagctagaaagaagggcactcacttcaaattttgcaatcgtttttaacagatgtttaaaagtacctggctatcgttgattttctttcttacagagttaaggaggattggccagcacccatgtctgggcagaaaggggactggatgattcccatgaacccctgcagtcgcggaagtttccagataggagattacttgagacatagcgaattacccctccaaatcggggcaccacctccttcagggccgcatgagaccatatttaaattctaattttacttatttgtttgaattttattttttcccgtcagttatgtaaaataaaacatactcttcttcctcccctggatttattggccatttaaggcttttaaaattctaaacgaaattataatgcgatcgatctatttagggagttaggattggggtgtgctattgtatggattacggataggtctgtatgtttcaagcccttctgtaaaatatgaagaaaagtgctcttagcattctgtgtaaaactgtactgttaaatatatgtgtgtaatcagaaaaaaaaaaaagtcgacg

SEQ ID NO: 144838 - DNA, 405 bp, Homo sapiens
  misc_feature (1)...(405): n = a,t,c or g
tttcgtggtttgacggcagccggggacgcgagggacacggcggacgcggtggcggctgagggcgcctactacctggaacaggtcaccataactgaagcatctgaagatgactatgaatatgaagagataccagatgacaattttagcatcccagaaggtgaagaagatctggcaaaagcaattcagatggcccaagaacaggctacagatactgaaattttgatttctggacttcaagaaacattgaagaaactgcaaagaggacatagctaccatggtcctcaaattaaagnnnnnnnnnnnnnnnnnnnnnnnnnnnnnnnnnnnnnnnnnnnnnnnnnnnnnnnnnnnnnnnnnnnnnnnnnnnnnnnnnnnnnnnnnnnnnnnnnnnnnnnnnnnnnnnnn

SEQ ID NO: 144839 - DNA, 448 bp, Homo sapiens
  misc_feature (1)...(448): n = a,t,c or g
gcgccaagaacaggctacagatactgaaattttgccttcactttaaggaacggaaaacagttcttccttcaaagcatgcagtacctgaagtaatagaagactttctctgcaatttcttgatcaaaatgggaatgaccagaactcttgattgcnttcagnctctgaatggtatgagttaatacagaaaggagtgactgaacttagaactgttgggaatgttccagatgtctacacccagattatgcttttggaaaatgagaacaaaaatttaaagaaagatttgaagcactacaaacaagcagctgagtatgttattttttaaatgacattttcttctttttcttttggactaaataaaagagttgagtgaagctgatatatgtaatataccagagccttaattttttggaaaccggaatttttccaggtggtaaagatgtgagagggc

SEQ ID NO: 144840 - DNA, 466 bp, Homo sapiens
tttgatcgcgctccactatccgtgtggtggaattcctcagcgagggatgcccagctccgccgtgagggtcctggaagaggcgttgggcatgggtttgacggcagccggggacgcgagggacacggcggacgcggtggcggctgagggcgcctactacctggaacagcgtcaccataactgaagcatctgaagatgacgatgaatatgaagagatacgcaaatgacgatcttagcatcccacaaggtgaagaagaactggcaaaagcaattcagatggcccaagaacaggctacagatactgaaattttggtatgagttaatacagaaaggagtgactgaacttacaactgttgggaatgttccagatgtctacacccagattatgcttttggaaaatgagaacaaaaatttaaagaaagatttgaagcactacaaacaagcagctgagtatgctattttttaaatg

SEQ ID NO: 144841 - DNA, 1262 bp, Homo sapiens
gcctgctgggggtgggggcccgaagcgccagagatggctgctcagcgagggatgcccagctccgccgtgagggtcctggaagaggcgttgggcatgggtttgacggcagccggggacgcgagggacacggcggacgcggtggcggcttgagggcgcctactacctggaacaggtcaccataactgaagcatctgaagatgactatgaatatgaagaggtaacatgttaattttagataccagatgacaattttagcatcccagaaggtgaagaagatctggcaaaagcaattcagatggcccaagaacaggctacagatactgaaattttggaacggaaaacagttcttccttcaaagcatgcagtacctttaagtaatagaagactttcttcttgcaatttcttggatcaaaatggggaattgaccagaactcttgattgctttcagtctgaatggtatgagttaatacagaaaggagtgactgaacttataactgttgggaatgttccagatgtctacacccagattatgcttttggaaaatgagaacaaaaatttatagaaagatttgaagcactacaaacaagcagctgagtatgttattttttagatgacattttcttctttttcttttggactaaataaaagagcttgagtggaagctgatatatgtaatataccagagccttaatttttgaaaactgaatttttctagttgtaaaggaatgtgaggagggcttcattaggcaaatttaatttaaacaggatgatcaggaactattcacaatttataacttacccaacaggagggggatgcagggtagttggtttagggagatgggtacattttttatataacattccacctccctgtgtaatttggatagtccttttccatggtttataaccattttcctccctgtaaagataggcctaatttcctgaaataataattaaatttataagaaagccgaccaggaaattgcttagtttattcctggtagaggaatttctgtatttgaaaattctccagaaggaataatataaactgtggactttgggtgataatgatatgtaggttcggtcagttgttaacaaatgtatctgtatgttgggggctcttggacatggggcaaggctgtgcatgtgtgggaataggaaggtgtatgcgccctctctgtaaccttctaatcactatctgctatgaacttaaaactgctctaaaaatacagtttattaaaaaaaaaaaaaaaaaaaacact

SEQ ID NO: 144842 - DNA, 502 bp, Homo sapiens
tttaatcatacacataaactttattcatcattgtctttatgttatagtaggaaaattaaggcatttcataaaatatgaaatcaattgtacaatgcatgatacagtcaaagatctggacatggaattggtgtcttaactatcatttctcacctttaatcaataaacattattcctcttgaaagatgatgaaaaattactcatattaaatacagtaaaaataaacatcattaatcaaacactacatttctaacctctttacattcattaacagtgtggaatacaaacaatgatggtttttgttatggctttgtgtttctttaaaatgctaactaggccaggcgtggtgggctcaagcctgtaatctcagcactttgtgaggcccaaggtgggcggcagatcacctcaggtcagaagttcgagaccggactgggccaacatggtgaaaccccgtctctactaaaaatacaaagattagctgggcatggtagtgggtgcctgtaat

SEQ ID NO: 144843 - DNA, 779 bp, Homo sapiens
ggcatggctggtacatcaacagcatagaggcgctgtcatgatttccaggcacagcttgcgtatatcccaaacatctcacacttgataatatacctgttccttagaaacataactgggtaaggaaggattatcttagttcagtgaagccattacatctacggtctcttcagcttttataccttgttcccattctcaagggcagcaacatctcatcagtactggaaaagccagtctgcacagtgaacccagaagtccttggtcaagtaccaagtaacttcagccacgattttcaatgtatcttgggtttacgtatattcctgtaaattatcagttacaaatttcaaggatgattcaggcacagccagcacatgtgcctggtagtcctagctactcaggagactgagagaaagaggattactagagcccaggagtttgaaggcccagccctgtgcaaacatagcaaagacccccatccttccataaataaacaaggttaaggcatggtaagccccacacctgtaatccccaacacttacggggggttgagacaggaagatcccttgagccccaggagttcgagactagcctgggcaacatggggagaacttgtctctacaaaaataaaaattaaaaaaattagcagggcatggtggcatacacctgtgtttccagttactcaggaggccgagacagaagtatcgcttgagcccggaaggtcaagactgcagtgagctatggtctgcactctagcctgggcaacagagcaagaccctgtctcc

SEQ ID NO: 144844 - DNA, 1551 bp, Homo sapiens
ggtaaacatgttgcttggaagtatgcttttccagtttcacaaaatgacaccagtggccacagaagttagtaccctttggcctctgaaaatttcgctttatgaagagaaggctactaaaagacatgtaggacttagggttcaaggtggcagactagaggagctagtgtgtactgctctcgtggagaggaaatagtgacgagtaaacatggactctctaagtggatcatctaagaaaccacgtcaggattcaggatgcatcaagggagtaatgggacatggagaacagagaaaatcgaagctgggcagctgcctgcctgggaccagcatgaagacaggagaagctcctcaacacagggaaagaattagtgagtaagagtcctcaggggatccatacttcccacagtgacctgtgcaatcctgagaatgtgaaaaaccccatgactcccttgggcctctagactgatacagagagctacccagagtttttgcagaggcaacactcaagtccgtggggacccccccaggccctggactctggaacagcctggttgaggtgccatggccctgacagaagctgcagtcatggtgctggagatggacagattgctctactccctcttgacagaaaacctgctaaacccctgtggtttaggagagctttgtgttcccccaggaagcacttcgatggtgaattgggtgactccactcatcctgctcctaactgggcaggattcaacttcaccctgctcctaacttgggcagagccccaagcagggggtggggaggacgccctccctctcagaatactgaaaaggctggataacgcagatgaacaagcagcccagatcagaagggaacttgatggccggctgcaattggcagataaaatggcaaagaaatatgtgaatgttatattggaggagaagaaaagcaggtggcctgagactctgggactgatctgtgaagtggtgccagatgttccttccaatcccatgaatgaactggtgcaagaaagaaaattccccaaatttatagcaaaagatatggagaatatgtatatagaagagttgcggtcttcagtgaatttgctaatggccaatttggaaagtcttccagtttcgaaaggtggtccggaatttaaattacaaaaattaaaacgttcacagagactctgcggttttggacataggagatgagaatgagattcagctgtcaaagtccgacgtggtactgtcattcaccttagagattgtcataatggaagtgcaaggcctgaagtcagttgctcccaatcgaattgtttactgtacaatggaagtggaaggagaaaaacttcagacagaccatgccgaagcctcaaggccacaatgggggactcaaggagatttcaccaccacccatcctcgggctgtgtgtcaaagtgaaactcttcacagaaagcactggagttctggccctggaagataaagaactggtaagggtgatattatacccaacttctaatagctccaaatcagctgaattacaccgaatggtagttccaaaaaatac

SEQ ID NO: 144845 - DNA, 923 bp, Homo sapiens
acatcattacgaatttaatacctctcagtatttggaacctggacgtcaggactcagttgagatcagagtctgaacctagcaaacaagtgtttgtgaagaagaattcatagaaaagggcaatgcgggcatcacatgggctaaggaacagaggggtagcagtagctgttgtgccaagctgcaggtgttatacactaccctctagatctgggtttccttaaaacaccttgagaggacaaccctgcaaagcacggcacagtggccgagagggaaaggagcattcgaggtctcagtcctcgctctgagcctacttctctgcttctgggctccagccatctttgtggaaagggggctgctagtgacaccctctcaagggtctttccagctctaggtcggctgtgctggagtctaggatttgcccactgagaaatctgtttccaagttccttcaacctgatgcatcctgcagcatcacggcagctgttcagagtggtcagaaggcccctgaatgagctcagtagagggaagcctgggaacagggaggcacctgcagctctactcatgggcctgggcagagcttcagcagctcttctcttgccatctagttggggatggcataccatcactggggaccaccctgtgcaaactggtgagcctgagtgcctgttcacagagggaaagaaaggggggggatacaggatttagatgaaatagcaactcctaccctattgtcaaaatcatccagctttttcaaaacatcatattgtactgatttttttttgtttttgacagagtcttgctgtgtcaccaaggctggaatgcagtggcatgatctcggctcactgtagcctctgtctccctggttcaagcaattctgcccccacctccccagtttctcataataaagacagattgcttcttcacttg

SEQ ID NO: 144846 - DNA, 1944 bp, Homo sapiens
  misc_feature (1)...(1944): n = a,t,c or g
ctttcaaagccctttaaagttccgccttgggggaacccctgatttgaaccaaaccttttaaagctgggtttcnnnnnnnnnnnnngttatctggacagcttctttgagactatttaaaaactggtacaacaggtctctacaacgccaagatctaactaagctttaaaaggtcaagaagttttatggctgacaaaggactcgcgcaacgcagaaggcctttcccaccttaagcttccggggatctgggaattttacccccattctcttctgtttgtctgagtctcatctctctgcaagcaagggctgaaatcattttgtttggttgttttgagggagagaggcggggtgggggggtgcaaatctgccagcagctcttacgtaaggcatgttttattggggagggctgagcttttattttctcctctccagtggggttggcttttattgtttcttgtttgggtttggaatggaaatatggatagcagcataaagtacttttattttgacaaaattcatttttttcaacaatggagacatagatttgacccacaataacttctccccctctctttttactctgctcaaaaagcatctctcctcccattacccaaccttggtcataagtgtgcctggctggtttgcagatatttgttctgctttgtaaaaattggccattagtgcatttattgagatgatctctaaagagctatgccctgacctacccctgattctatgacattggggcccttcttttgctgaaactgccttacgtaatggttttactcctttgaaagagatttgacggaatgcattttatgccaagtgcttgcctgcactgtttctgcaatatgtggtgtatgctgtggtgatcttgctgggaatgattataagtgtgtgtgtggtgggggagtgggtattacatgcattgctgaagagtcatcctggtgttcctcattcctcccaccttcccgtggtcattttaattacggggcagtgtcacccgcaaagggaggaaactcaaagccgaaagcaaaattccaggcctgattctggcttttgaggttcctggttcttgaagccaggcctgacccgactctcagatggggtcagtcccgtcgctttgcagactgaccctggaaatctacaaaatgcagattttcctgatttcctcttctcttgcccagtttttttttttttttttttttttttaaagcctggattgtaaccagattttcttttttcccccttctcagctgtagatatgatatctcctttcagggccccagcttaagggcaaagtgagttaatgtgtagacaaaggcgagggcacaagagagagttacatcatctatagcatggtgaatgagccatggtgtgtggtttcctgggaaccaccaaacacttgcaggtttagctttttcccaggggttgacttacaagaaagaaaaccatgtttttgcaagattaaaatgtggttgaagtgtgcctaaattaaccatccccatttttatcatatttccaccatcactttcaggggttttaaggagtcagtgctcacctggggcggagctgggtaggtacatttttgcttcttaggaaaggctaagtcccggggttcccgtccggatttaagggttccagggaacttccccgaggaacacccgattcgcagagggtaaatttttctgggagttttgttttgcagggatagctggggagttatgggccaccctggttccacggatgcggtaaatgaatcccagcagaagtgggtgaagcagcgtttgcaagatgtacaactccgcagcaccggtcagcaatcaggctgcatccggacggtgttggaggaccgaggggttgggggccttctaccggagctacaccacgcagctgaacatgaacatccccttccagtccatccacttcatcacctatgagtcctgc

SEQ ID NO: 144847 - DNA, 381 bp, Homo sapiens
gtctcactgtgttgcccaggctggtctcgcagtcctgggctcaggcaaactttttcttaaaggaccagatagttaatattttcggctttgcaggccatacagcctcgattgctattcaacactgctattcttggtgcaaaagcagccatagacaatgtgcaaatgaatgagcatggctgtgtgccaataaaactttatttctaaatttttatttattttttgagacaagatcttgctgttgtccaggcttgaatgcaataatgcaatcatagcccactgcagtcttctcctcccgggcccaagcgattctcccacctcagcctcccaagtagccggaaccacacgcacgtgccatgacacccagccaatttaaaaaaaaaa

SEQ ID NO: 144848 - DNA, 1283 bp, Homo sapiens
ttttattaaaaaactttttaattggtttacaaaggaggctacagactacattgaaactaatctttgtacaaaaggccaaaaaaaaaaaaaaaaaaagtcccaaaacaccaagagacaaaaggtaggaggaaaggcaagaaaggaggtctcaaaaggagcaggaagacctttctctaagggccaagattagcatcatacataccctaaaagtggggggtgagggggaagaacaagatgaagagagcatttaaaagcatttaccccacacagcccctggtgataattggattggaatcaaaacaaacacagccatgagattaattaagaggttttaaaaggcaacagtggtgtggactggttattgcccagtgttaagagagaaataaacttgggtttttaaggccacccagaacattggaaccacccaccccatccccttcccagaggaatgaacagacttaaggaaaggggaaagccaggcccctggggccagctggcccactggtgtgtgtaaaatgtcctccctcaggtccaatcctcagtgtatccttcccccgaagtcctttgtgcccctagactcctaggtaagggcctatgggatttcactgggagaaagggatgatcaaaaatatgaagacctgcccttgtcccacaatgttcaagagcagttgccgggcatctggagcactgggttaaccaaaccccatatccctggggaaaaggcacagtgtaattcctgaaggcaagatatgggaaagcccccattccagcactaggtatcaacaaaatcctcactaattgcagccctagtctaatcccatttgttaggctttttttttttttttttttcccctgatacttagctaggacttagggcagttgagaggcagatcatcatgcctctactttcttagcagagacaaggaagactggggctgtgggataatgaggagggcgaaattgggacaaaatactcttctttcaaaattgacactgtggagaaactcttcctgggtggggggaggtccagagtaaagcctcgggggagtaataaggccagagaccccccttcttttccttcccctgcctgggaagtcgggccccagttgggggttcctctaaagtcgccctgcggcttgcaccttggcctggccgccgtacccctctatgacccccgtggggggggcccacacaccccaccacacaccccaccacaacaccacaccaccccccccacccacacccaccacacaccaaacacacaccccccacaaacacccaaa

SEQ ID NO: 144849 - DNA, 767 bp, Homo sapiens
tttatttttttttttttaaagaggccaaacaatacatttaataatttccttttaggttgctaaccagggcaaccttccccatctgggaacaatctagcagtcatgtaagaagcacatgcccccacaattagtttgaactccatcctgggaattgcagctggttgtgattctaaggtacaggcatgccagggagcctgggatttgaatagtcagtggggattttgtcacttagtgggaatgggataataagccaaccaatggtcatcagtctcacacataagggagtgcaggctcgtaggggtatacacagtacttttctccaaaagcatttgcaaattgacttgatttctctatgttgaaatttgaaaacccaacatctatctctctaacaccaaaggattgagccttccttgcctggctggtgagtaaggagtgagcctcttataccaaggatgtaccctttggctgtgtgaggttttccagaagtatcagaagctgtatacatttcctgtggttgctgtaacaagtgacccaccaatttgttggagccttaaaacaagaaagatttattctctctccgctctggggaccagaagtctaaagtcaagacgtcagaggggccaagattgctctgaggggtataagggagaatccctcccgcctgtcccagctcctggtggccccaggcattgcctggcctgcggtggcatcactccagtctccgcctgcatcatcacacgaatatcttgtcctctgtactcaaatct

SEQ ID NO: 144850 - DNA, 744 bp, Homo sapiens
  misc_feature (1)...(744): n = a,t,c or g
cggcaccatggctgtttttgtcgtgctcctggcgttggtggcgggtgttttggggaacgagtttactatattaaaatcaccagggtctgttgttttccgaaatggaaattggcctataccaggagagcggatcccaaacgtggctgcattgtccatgggcttctctgtgaaagaagacctttcttggccaggactcgcagtgggtaacctgtttcatcgtcctcgggctaccgtcatggtgatggtgaagggagtgaacaaactggctctacccccaggcagtgtcatttcttaccctttggaaaatgcagttccttttattcttgacagtgttgcaaattccattcactccttattttctgaggaaactcctgttgttttgcaattggctcccactgaggaaagagtgtatatggtaaggaaggcaaactcactgtttgaatacctttcaatcacctttctccagctccataatcgcctgtttcaaaaaaactctgttctcanttcactccccctcacttctctgaataacaacaatgaacttcacctcctctttttttttaacttcaacccctacattaaatttcaaactttctttcttgtgataaacattttacccaaaaaatgattgttttaattaataatcactcaaaccttccaatgttaccaaccaaatttggtaacccttttttaaccaaatccttcccctcttttccaaatctctctctcaagcccttttcggcc

SEQ ID NO: 144851 - DNA, 572 bp, Homo sapiens
  misc_feature (1)...(572): n = a,t,c or g
tcttattgttcaccncttcnccataacgcttcccaatttcatccaaacctgccagctccagtgaatataaatcaggagaatgatccttggctagatgcttatgacgagacagcaagcttgaaatatcatgtagcacttgcagttcagaaagaaagagcaggtcaacttcattgttcctactcagagaattgagggggagtgaactgagaacagagttttcttgaaacaggcgattacggagctggcgcaaggtgactgaaaggtcttccaaacactgagtttgccttccctaccatatacactctattctccaaaggggtacgaaatgacaactgcctgcggggttagagccagtttggttccacttcccttcacccatcacccatgacgggtagccccgaggacgatgaaacaggttacccactgcgaagtcctggccaagaaaggtcttctttcacagagaagcccatggacaatgcagccacgtctgggatccgctctcctggtataggccaatttccatttcggaaaacaacagaccctggtgattttaatatactaaactcgttccc

SEQ ID NO: 144852 - DNA, 449 bp, Homo sapiens
gggaacgagtttagtatattaaaatcaccagggtctgttgttttccgaaatggaaattggcctataccaggagagcggatcccagacgtggctgcattgtccatgggcttctctgtgaaagaagacctttcttggccaggactcgcagtgggtaacctgtttcatcgtcctcgggctaccgtcatggtgatggtgaagggagtgaacaaactggctctacccccagggcagtgtcatttcgtaccctttgggagaatgttgacctgctctttctttctgaactgcaagtgctacatgatatttcaagcttgctgtctcgtcataaggcatctagccaagggatccattctccctgatttatattcactgggagagggcagggtttgggatggaaattgggaagcgttatggggaagactctgaacaattcagagatgcttctaagatcc

SEQ ID NO: 144853 - DNA, 2120 bp, Homo sapiens
gggagctggacgagtccgagcgcgtcacctcctcacgctgcggctgtcgccgtgtcccgccggcccgttccgtgtcgccccgcagtgctgcggccgccgcggcaccatggctgtgtttgtcgtgctcctggcgttggtggcgggtgttttggggaacgagtttagtatattaaaatcacccagggtctgttgttttccgaaaatggaaattggcctatacccagggagagcggatcccccagacgtggctgccattgtcccatgggcttctctgtgaaagaagacctttcttggccagggactcgcagtgggtaacctgtttcatcgtcctcgggctaccgtcatgggtgatgggtgaaggggagtgaacaaaacttggctctacccccagggcagtgtcattttcgtaccctttggaagaatgcagttccttttagtcttgaccagtgtttgcaaattcccattcacttccttatttttctggaggaaacctcctgtttgtttttgcagttgggcttcccagtgagggaaaagagttgtattatggttagggaaggcaaacttcagtgtttgaaggaccttttcagtcaccttggcgccagctccgtaaattcgcctggttttcaaggaaaactctgtttcttcagtttcactccccctcaattctctgagtaggaacaatgaagttgacctgctctttctttctgaactgcaagtgcgtacatgatatttcaagcttgctgtctcgtcataagcatctagccaagggatcattctcctgatttatatttcactgggagctgggcaggtttgggatgaaattggggaaggcgttattgggggaagactctgaacaattcagagatgcttctaagatccttgttgaccgctctgcaaaagtttggcagatgacatgtacagtctttatggtggggaatgcagtggtaggagttagtcactgttcagtccttttgacacctccctccattagggaaggacaagggacttattccttggagggcaaaacaagcgcaggaaccccagcaagtccctataaccttgcatataagtataattttgaatattccgtggttttcaacatggtactttggataatgatccgccttggccttggctggtgattatcacctcttacaatatttggaacatggatcctggatatgatagcatcatttataggatgacaaaccagaagattcgaatggattgaatgttacctgtgccagaattagaaaagggggttggaaattggctgttttgttaaaatatatcttttagtgtgctttaaagtagatagtatactttacatttataaaaaaaaatcaaattttgttctttattttgtgtgtgcctgtgatgtttttctagagtgaattatagtattgacgtgaatcccactgtggtatagattccataatatgcttgaatattatgatatagccatttaataacattgatttcattctgtttaatggatttggaaatatgcactgaaagaaatgtaaaacatttagaatagctcgtgttatggaaaaaagtgcactgaatttattagacaaacttacgaatgcttaacttctttacacagcataggtgaaaatcatatttgggctattgtatactatgaacaatttgtaaatgtcttaatttgatgtaaataactctgaaacaagagaaaaggtttttaacttagagtagccctaaaatatggatgtgcttatataatcgcttagttttggaactgtatctgagtaacagaggacagctgttttttaaccctcttctgcaagtttgttgacctacatgggctaatatggatactaaaaatactacattgatctaagaagaaactagccttgtggagtatatagatgcttttcattatacacacaaaaatccctgagggacattttgaggcatgaatataaaacatttttatttcagtaacttttccccctgtgtaagttactatggtttgtggtacaacttcattctatagaatattaagtggaagtgggtgaattctactttttatgttggagtggaccaatgtctatcaagagtgacaaataaagttaatgatgattccaaaaaaaaaa

SEQ ID NO: 144854 - DNA, 2396 bp, Homo sapiens
atgaacgccgcaattcgcggggttgttcgttctgcgctgacagaaggtcggaaaccgttggtacagctagaccgttacagcgtgtctgacatgatcaaccgtggcggacgttcctcggttctgcgcgtttcccggaattccgcgacgagaacatcccgccgtggctatcgaaaacctgaaaaaacgtggtatcgacgcgctggtgttatcggcggtgacggttcctacatgggtgcaatgcgtctgaccgaaatggcttcccgtgcatcgaatcgtgcgtgcgtctatcctgcttgcaggatcgacgggatgtacgactgccgctaccacatgaagtggatgctcagagaagcggtggcagagaaaagtgatgcgaaaaataagggggagcatgagcgggaggcaactggtgcacctgtacacaagtcgagtgcgtgtaggtacccggtcatctacttccttgcctttagtcgaaaccggcctgccagccacacacgcaaagcaagctctggtgagcgggcagctgaaagactgcgccacggtcctctgggctccggaactggcactttccacgactggtgtgtctcgcaagggcagcttggcggtcagcaaattgttcagatgttgacaaaacaacatggcagggcaaaacggcatttaaagatacggtatcgacatggcgcgttacaaaggcaatgtcgatacgctgaagattgttgtaacgatattcgctacaaagccgacagtttcatctttaacgtcgccggtcgccagaagagggctaaggcgcttaccctctccctactgtgccccatcagcgaccgggacagggacagcatccgttaccccaatgttggggttgctcccaatacttacgcgcgcattaaccgcaatttccacgcgcatcattaccacatgctgttcagcccgttcatcacctctatgctccgtacgtgcttgcgtccttgccgtgtgcccttttggtttggggttacccgtactgctgcctgtgcgtgcgccgtatgcgctggaggatctgtaaatgtggtgccttccatggccaaagcgactctgcaagtgggacgagtgaagggcatggagatgggagataatcctgatgatctggcgggcctatatccccacagtgttctcatgagaggaggtgggagggacaaccaaggaagtcccgctctggatgccgcgtgctgtcgagcggccagcattggcgtggtggccccagccttgtcgtcctcaccctgggagtccttttggggcttccacgtggaccacacggccgagctgcggggatccggtggaccagcagtttgcggcgggagacctcggactatcaccgcagctgacgcccaccctggaggcactgggatgggaactccagtgtcctcgacatttccagctgcactttctgctgcgacccctccagacgctgagcctggcctggaggaggagctattgcagcgagggatccgggcaaggctgcgggacacggcatctccctggctgcctatggcacaattgtgtcggctgagctcaagggaggttccaggccttgtgcagtttggtggccgtccgagcctggggctggccgctgtcagggaactccttttcctgcgggaacagccagtgtgtgaccaaggtgaaccggagtgtgacgaccaggaggactgctccgatgggtccgacgaggcgcatgcgagtgtggcttgcagcctcctggaggatggccggcaggatcgtgggcggcatggaagcatccccggggagtttccgtggcaagccagccttcgagagaacaaggagcacttctgtgggccgccatcatcaacgccagcctctgaggagctgaaaccacaggttccaagacccgacgaagtgggtggcctacgtggtgcgacctacctcagcggctcggaggccagcaccgtgcgggcccagcaagaaggcctgatctcaggctggggctacctcaaggaggacttccgtaagcatctcctcggcctgcaatggtcaagccagaggtgctgcagaaagccactgggagctgctggaccaggcactgtgtgccagcttgtacggccattcactcctgacaggatggtgtgcgctggctacctggacgggaaggtggactcctgcagtgtcctgttcttgtttcgtggtaccatttctttctttttctctgaggatcgtaatttaatccgttatgttcttctatattctatatttgtggttaactgtatttcaggcaaaccacagcctggcccaccagtcctgagagccctgtgtcagcacccccaccaaatcgatgcaggccctcagtaccgtgcctcttgctgggtcaccgttcctaagctacaaggtattttcggggcagaaag

SEQ ID NO: 144855 - DNA, 1282 bp, Homo sapiens
ctacctttctgccccgaaaataccttgtagcttaggaacggtgacccagtcaagaggcacggtactgagggcctgcatcgatttggtgggggtgctgaccacagggctctcaggactggtgggccaggctgtgctgggggcggcaggggcaggagccatggtgggggccagaggcatgctggctttggtggtggcctccaggatccagtcacgtagcctggtgactcgggcatagacccctggacgccgggcttccgcacacccgattccccagctcacgatgccagccagaaagaaccggccagagggctcctcgcagaccaggggtcctcctgagtcaccctggcaggagtccaccttcccgtccaggtagccagcgcacaccatcctgtcagtgagtgaatggccgtacaagctggcacacagtgcctggtccagcagctccacagtggctttctgcagcacctctggcttgaccattgcaggccgaggaagatgcttacggaagtcctccttgaggtagccccagcctgagatcaggcacttcttgctgggtgggaagatgtgtgtggcagccgggaggcacacgggctggatgtgccggccgaaaggcagagggctggtcagctccagcacagccacgtcaaagtcggccgtgtccgcgttgtacagggggtgcttgacgatctggaccacctgggcccgcacggtgctggcctccgagccgctgaggtaggtcgcacccacgtaggccacccacttcgtcgggtcttggaactcattgaagcagtgagcagcagacaccagccacctggcgttgatgatggcggccccacagaagtgctccttgttctctcgaaggctggcttgccacggaaactcccccggggatgcttccatgccgcccacgatcctgccggccatcctccaggcaggctgcaagccacactcgcagtgcgcctcgtcggacccatcggagcagtcctcctggtcgtcacactccgggttcaccttggtcacacactggctgttcccgcaggaaaaggagttccctggacagcggcctgatttgaagtctctttctgccaagggtcccttatgtctccctgtgagctcagccgacacaattgtgccataggcagccagggagatgccgtgctcccgcagccttgcccggatccctcgctgcaatagctcctcctccaggcccaggctcagcgtctggaggggtcgcagcagaaagtgcagctggaaatgtacgaggacactggagttcccatcc

SEQ ID NO: 144856 - DNA, 808 bp, Homo sapiens
atggtgtggtcaagccagaggtgctgcagaaagcactgtggagctgctggaccaggcactgtgtgccagcttgtacggccattactcactgacaggatggtgtgcgctggctacctggacgggaaggtggaccctgccagaccccagaaaaacacagacacgagcgtttcaaatgctgggcgattcacagatatctggatgcccgttcttgaggaatttaaagcagttgggattgagaggcagaatgtggggccaggcctcaatggagaagcccacccgggtcgtgggcgggttcggagctgcctccgggaggtgccctggcaggtcagcctgaaggaagggtcccggcacttctgcgagcaactgtggtgggggaccgctggctgctgtctgccgcccactgcttcaccagtgagtggcatcaaggcgctgacgagtcggagctggccgatgcccggagagtcctggatgagacggctcgagagcgtgcccggctgcagatagagattgggaagctgagggcagagttggacgaggtcaacaagaggtgagtggtcacggctgggcacgacgtcaccctgatcccggcaccacggggtggacgggggcaggtgggcgctgggctcgtgcggggcatgctctgatacgggcacagcctggagctcacagctcccatcctctctcccccaccagtggctgccacgtcactttttctgttctgaggaaagtgatagatgctcacatcggacagcaggaagcgcatggcagcttaagctcacaagtaaaatctcccgcgagcctccccaga

SEQ ID NO: 144857 - DNA, 497 bp, Homo sapiens
gaatatcgacacgccaagcttggcacgaggggcggcgccgagctgaggtggtgagggactagctcccggatgtggagaagctggggagaaggcgtgggaggaagatggactcggtggagaagggggccgccaggctccgtctccaacccgcgggggcgaccgtcccggggccggccgccgaagctgcagcgcaactctcgcggcggccagggccgaggtgtggagaagcccccgcacctggcagccctaattctggcccggggaggcagcaaaaggcatccccctgaagaacattaagcacctggcgggggtcccgctcattggctgggtcctgcgtgcggccctgggattcaggggccttccagaggtgcgcatgtgcgagagtgggcggcgcggcctgggcgggggtcgggagagggagtcgggctgctggaggggctggggcctccggggccaccgctcttggaagggggccatctctcatgccagggatgtgc

SEQ ID NO: 144858 - DNA, 564 bp, Homo sapiens
ggcacgagggcggttgtctgtggccggaggctgatcagtgttcgggaacagatcagacattttgtaatgaggcctgaaataaacactaaccacctcgacaagcaacaggttcaactcctggcagagatgtgtatccttattgatgaactggacaattcaagcttattgtgagaccaagaagaattgtcacctgaacgagaacattgagaaaggtgctgctttgaaacagactttattgttaagcgatttgtgtaggcatttccgatttgctgagaagagcactctgttcaaggaagtgcagacttcagtaataccgtattttctcgttggttccagttcgtttaaatagtgtggtcattagcatctggttttgctgtcttcctgttacagcgatttctcttcacttcatgcctgttactcggcttcttcagagttattctggattcatagaagagggactagccctgacatacagcagcagcctagcctctaatatttctagagagtggagagaggcgggcaccatgcagggaagcgtgtgccttcaccactttccgagaactg

SEQ ID NO: 144859 - DNA, 423 bp, Homo sapiens
tttgagatggagtctcgctctgtcgcccaggctggagtgcagtggggcgatctcggctcactgcaagctccgcctcccgggttcacgccattctcctgcctcagactcccgagcagctgggactacaggtgccagccaccacgcacatagagacggggtttcatcgtgttagccaggatggtttcgatctcctgaccttgtgatccgcccgcctcagcctcccaaagtgctgggattataggcatgagcaccgcgcccggccagggttccccactttcaaaccactcaggagcctgggggtacaacctcacatggatacaggattccacccccctagcaagatctctgttagcttccccagttcccagagaggggaagtgggtcccaaaggtgctgagacaagccaggcagtccgagtctggc

SEQ ID NO: 144860 - DNA, 1564 bp, Homo sapiens
tttttttttttttttttttttgaaagagaaactttattgaagtggcaaagagtgaaagtgagggactggcctggagtgggagttgccacactgccccaacagtgattccctttcaaagagctgtgcttcctaaacattctggggggttttgccagagtcttccccttgctcatcctcatttccagggacactgtcattttagtggtctgagtcaagtcccgtatacattcaagaacagggcataggcgtgggaaggtctgggaaagttggggtcttttttccccttacatttggggtgactttgattgggcccccctctcatgattccctctgttgccctcaagttttcccctttggggtaaaatggggggaaatgtttctccatgtggaatggaagacagcatggcccacaacgtgggccgagtcctcagagaaatactggaaatcattggtgtgggttctggctggttttgttgttttggctggccaacgttgttgggcctaaaggtgcccttcacccccaagctgttagtgatcccagggcacccccaagctgtccagttagaatctgctcttctggctttggtgtcttgggctttgatttcaggtcaagatggaggggcttctccagttctgagtcacccacgtgaaggtaaagaccctttctatttccagaaagtgtcaggagcacagaaacttgaggaagtacagcctggagccagtgtcccagtgtcctttccattggtaagagttggacagggccttcaggaaaggggtaaaccgaggacatttcagtgcttgcttttgtctctgcctactgtcctgtggtagatcagctaccaggggaacacatttgttctcgtggggttttgtcctggagagtgtagtgaagtccgagagccctagctgccaacccatggtggatggtaacttctgtctcatcaagagtaaaacagtcctgcacacagcagggtgggtttgtgcctttggcccaacaggtacatagccccataatttctgaattattctatgcacttgtttccctcttcttttattttttatttgatatatgccgagctagaatcctgtcgggtagcttttgtatactaagaacattattattattattatttttgagacggagtctcaactctgtcacccaggctggagtgcagtggcgcgatcttggctcactgcaagctccgcctcccgggttcacgccattctcccgcctcagcctcccgagtagctgggactacaggcgcctgccaccacgcccggctaattttgtttttgtatttttagtagagacggggtttcaccgtgatgaaaccaggattgtctccatctcctggacctcgtgatccgcccgcctcggcctcccaaagtgctgggatcacaggcgtgaaccaccgtgcctggcctactttttgtattttttgtagagacagagtttcgtcatgttggccaggctggtctcggtctcacactcctggactcaagcgatcctcctgcctcagcctcccaaagttctgggattataggcataaactgccatacccag

SEQ ID NO: 144861 - DNA, 358 bp, Homo sapiens
ggtagatggaaccctcctgtggactcgggtcggaggccctggcccttacccagacctgggcgggctcccactccttgaagtatttccacacttccgtgtcccggcccggccgcggggagccccgcttcatctatgtgggctacgtggacgacacccaattggtgcgcttggacaacgacccccgagtcccaagatggtgccccgggcgccctggattgagcacgaagggtcaaaaatttgggaccgcgagacacacatcgccaaggacacccgacagattttccgagtgaacctgcggacgctgcgcagctactacgatcagatcgaagccggtgattgacccccgtcaggggaaccg

SEQ ID NO: 144862 - DNA, 534 bp, Homo sapiens
actcttctggtccccacagactcagagagaacccaccatggtgctgtctcctgccgacaagaccaacgtcaaggccgcctggggtaaggtcggcgcgcacgctggcgagtatggtgcggaggccctggagaggcacttcgacctgagccacggctctgcccaagttaagggccacggcaagaaggtggccgacgcgctgaccaacgccgtggcgcacgtggacgacatgcccaacgcgctgtccgccctgagcgacctgcacgcgcacaagcttcgggtggacccggtcaacttcaagctaagccactgcctgctggtgaccctggccgcccacctccccgccgagttcacccctgcggtgcacgcttccctggacaagttcctggcttctgtgagcaccgtgctgacctccaaataccgttaagctggagcctcggtagccgttcctcctgcccgctgggcctcccaacgggccctcctcccctccttgcaccggcccttcctggtctttgaataaagtctgagtgggcggca

SEQ ID NO: 144863 - DNA, 661 bp, Homo sapiens
  misc_feature (1)...(661): n = a,t,c or g
atcgagaccatattccatgtggnggaattccacagactcagagagaacccaccatggtgcttgtctcctgccgacaagaccaacgtcaaggcccgcctgggggtaaggtcggcgcgcacgctgtgcgcagtatgtgtgcggaggccctggagaggatgttcctgtccttccccaccaccaagacctacttcccgcacttcgacctgagccacggtttctgcccaggtttaaggggccacgggcaagaaggtaggccgacgcgctgaccaacgccgtggcgcacgtgggacgacatgcccaacgtcgctgtccgccctgaagcgacctgcacgcgcacaagctttcgggtggacccggttcaactttcaagctcctaaagccactgcctgcttggttgaccctggcccgcccaccttccccggccgagtttcacccctggcggttgcacgccttccctgggacaagtttcctgggctttttgttgaagcaccgttgcttgaaccttccaaatacccgttaaagcttggaagccttcggttggcaatgctttctttgccccttgggcacttccccccagcccctcctcccctttcctgcacccgtacccccgtggtctttgaaataaagtcttgagtgggcggcaaaaaaaaaaaaaaaaaaa

SEQ ID NO: 144864 - DNA, 358 bp, Homo sapiens
gcgcccagaaaactgtccagagacgttgaggttactgcttatttgcaacctgccccccgttgttcacttttccgcggcttagttggaaggtgtagcccctgtctgtagcccacgtgacttagaataaggggctgcgttagactccttagattttaagggcggtggaggtcgctgggtcctttccaggcagggtggtggtgggcatctgcgttgcgcttttattttttaatttttgattattttgaggcggagtctcatcctgtcgcccaggctggagtgcaatggctccgtcccagctcactgtagcctcccactcccgggttcaagcgattctcttgcctcagcctctcgagtagct

SEQ ID NO: 144865 - DNA, 261 bp, Homo sapiens
atagagctttaaacctgaatcatttacatctttactttataaaatgtaaaactacttttttacccaagacttaaaatatagaattatgtaacttctactttaaacaaaatgaaaaatgttttgagtatcaaacagtatattatctaccttgtagacagcatcttcatctaacactgccactgtgttagtaattcttaaatgacatcaaactagaagaaaagctgctcctacattgtttttatttaataagacaaatttggc

SEQ ID NO: 144866 - DNA, 535 bp, Homo sapiens
ccaaagtgctgcttcctaataggaattcattaacctaaaacaagatgttactattatatcgatagactatgaatgctatttctagaaaaagtctagtgccaaatttgtcttattaaataaaaacaatgtaggagcagcttttcttctagtttgatgtcatttaagaattactaacacagtggcagtgttagatgaagatgctgtctacaaggtagataatatactgtttgatactcaaaacatttttcattttgtttaaagtagaagttacataattctatattttaagtcttgggtaaaaaagtagttttacattttataaagtaaagatgtaaatgattcaggtttaaagctctatttgacttcctttttttggttgagatagcgtcttgctgtgttgcccaggctggagtgcagtggtgtgatctcagctcagtgcaacctccgccccctgggatcaagcgattctcctacctcagcctcccaaatagctgggactacaaggtgccctccagcatgcctggctgatttttgt

SEQ ID NO: 144867 - DNA, 2174 bp, Homo sapiens
  misc_feature (1)...(2174): n = a,t,c or g
atatatcatggccactctcaagtatgatattaaagtacacatgaagtaaatgcttactcaaacctgaataagaagtttcttgtaactcaagcacttcttgactcacactaagtgtagcactgtaaacaaaagacatcgttgagaaactgaggctatcaaaacattggcatctatgggagttgtggccaaggaaataaaatacctgagcaaccttatacccagtatgcatttcataccaggatcaagtcactaatgacagccaagttccaggcttatctatggctgcctaatgagactggccccactaggatggggactggggaggggacacacatgagtgcccaagcttcagtctacacctccccccttcagccagaagcagccaggggagcacagggacatctgcttcaagagcattttggcagcaaaaatcaatactctgtggttcctggaattcccacccagtaattccaagttcaaaattaccaccagtgcaacatgaaaaactgttaatagtttttaagtaaagtgtacatacagctttaataacgattataatctgaagaaagccattcttcttatacaggatggaaaatcctcaaagcaacattttaaaccatggacactagagttgtcatacatctattcagaggatgagagataaacagacatccttccattgtggaaacagacactccccatgtcaaccaagtcccctaggatcagagagaaaagcagacccgtggtcatcactaggtgtctcttggtgtctcgctaaagatggagtcctatgtaggttggcctaagttggcctcagagggaggtggctgagcagcaaagcaagacagcatgtgtgtaaccagccaggcaaaataacaagtctgtgctacctggagtgtattttcaggaaaacaggacccatatggagtgtggggccagggacattccgctgtgcctaaactgcccactgtaaaagcacactgttgaaagcatgccaggacagaaaactgcaataattcagagcttgaaaacaagaaataacagaaatatgaatatttcaaatacacacttcatatactgaaaataagagcatttgaagaaaggctggaatgggttttccaaagactcacacattttggggttccaaattcaatgttctaagcttctctatcccaaaggagatcaagaacaaaagcaaagctgggggtcctggctcacgctgaatggtaccttgagccgatccctgtgtcctgagggtccctgggccccatatcccatccataacccaagtctgctcagctacagtctgccctggtgctcagtgaacagccacagagtcccacttctgcacaagatgcgccttcacagtgatgacagagcatctgccgcacagtgcacacccccaaaggccagaaatgggaacgctctaactaaggctctccttccactccctcactgttcctttaatattactctctcagcaagtagaaaaataggctataaggaggcttatgcagacacacactcaatcagctctctgcaataaagcgaatctgcctccacatacttgtttgtatattgttctggcttctccaggatttttttttttttttttgagacagagtctcgcttctgtcacccaggctggagtgcagtggcactattcttggctcactgcaagctccgcctcctgggttcacactattctcctgcctcagcctctccgagtagctgggactacaggcgcctgccaccacgcccagctaatttttttgtatttttagtaggagatggggtttcaccgtgttagccagggatgggtctcgatctcctgacctcaggtgatccacccgcctcgggtctctcaaagtgctggggattacagggcgtgagcaacctgcggcccagccaggcttctccaagttttaaagggattaaaggccctcaaactctcagggcttaaatcaattccctaatgtgggggatatgttctccaagtatggcctaccaaaggccattacaagaattaaagtgagcagcagcagcagctaggggtcaggcagatttctgaaagcatgattggttcaaaaggcgggctgtgccccatcatcctgaagccatcggccttgccaaggggcctgttggagccccagagggaanggacngggggcttt

SEQ ID NO: 144868 - DNA, 395 bp, Homo sapiens
tgcttgtggttgtctgtgtgatcggatcccaaaactcccagctgcaggaggagctgcggggcctgagagagacgttcagcaacttcacagcgagcacggaggcccaggtcaagggcttgagcacccaggatcactccagcctgctgctccacgtgaagcagttcgtgtctgacctgcggagcctgagctgtcagatggcggcgctccagggcaatggctcagaaaggacctgctgcccggtcaactgggtggagcacgagcgcagctgctactggttctctcgctccgggaaggcctgggctgacgccgacaactactgccggctggaggacgcgcacctggtggtggtcacgtcctgggaggagcagaaatttgtccagcaccacataggccct

SEQ ID NO: 144869 - DNA, 514 bp, Homo sapiens
gcctcggtgggatggggcggctcagcgcttagcccccttccccagccctcttttctccccgatttccagttgcctctggccctgcagggtcgcccaccgcccgcatttcttcatgtacatggttcctcctagactactagggccgccttagcttgctacccttttaggaccctggagctgtgccagggtcccctctgtccccgcgctcctgacaccccctcctcttgcagggccacctcctccccagcccctcctgcagcgtctctgctccggacctcgcctcctcctgctctccctgggcctcagcctcctgctgcttgtggttgactgtgtgatcggatcccaaaactcccagctgcaggaggagctgcggggcctgagagagacgttcagcaactttcacagcgagcacggagggcccagggtcaagggctttgagcacccaggggagggcaatgtggggaagaaagatggaagttcgtttagagttcccagtttggagaaaacagcagaa

SEQ ID NO: 144870 - DNA, 1073 bp, Homo sapiens
cgcagacacagagacaccggggcccagggccctcctatggaccctgcccgctcccctcccattgtccacggctgtccgcccacccccattctccaagcttcagccccctccttagttcggcatctgcacagcactgaagaacctgggaatcagaccctgagaccctgagcaatcccaggtccagcgccagccctatcatgaccaaggagtatcaagaccttcagcatctggacaatgaggagagtgaccaccatcagctcagaaaagggccacctcctccccagcccctcctgcagcgtctctgctccggacctcgcctcctcctgctcttcctgggcctcagcctcctgctgcttggggttggctgtgtgatcggatcccaaaactcccagctgcaagaggagctgcggggcctgagagagacgttcagcaacttcacagcgagcacggaggcccaggtcaagggcttgagcacccagggaggcaatgtgggaagaaagatgaagtcgctagagtcccagctggagaaacagcagaaggacctgagtgaagatcactccagcctgctgctccacgtgaagcagttcgtgtctgacctgcggagcctgagctgtcagatggcggcgctccagggcaatggctcagaaaggacctgctgcccggtcaactgggtggagcacgagcgcagctgctactggttctctcgctccgggaaggcctgggctgacgccgacaactactgccggctggaggacgcgcacctggtggtggtcacgtcctgggaggagcagaaatttgtccagcaccacataggccctgtgaacacctggatgggcctccacgaccaaaacgggccctggaagtgggtggacgggacggactaccagacgggcttcaagaactggaggccggagcagccggacgactggtacggccacgggctcggaggaggcgaggactgtgcccacttcaccgacgacggccgctggaacgacgacgtctgccagaggccctaccgctgggtctgcgagacagagctggacaaggccagccaggagccacctctcctttaa

SEQ ID NO: 144871 - DNA, 488 bp, Homo sapiens
gtaaagccccgaatccagagtttgagtcaagatcccaaagcccagtacacaagtgtctacggagccctcaagaaaatcatgcggaccgaaggcttctggaggcccttgcgaggcgtcaacgtcatgatcatgggtgcagggccagcccatgccatgtattttgcctgctatgaaaacatgaaaaggactttaaatgacgttttccaccaccaaggaaacagccacctagccaacgggatagctgggagtatggccaccctgctccacgatgcggtaatgaatccagcagaagtggtgaagcagcgcttgcagatgtacaactcgcagcaccggtcagcaatcagctgcatccggacggtgtggaggaccgaggggttgggggccttctaccggagctacaccacgcagcaggtcaacccccaccggacctacaacccgcagtcccacatcatctcaggcgggctggccggggccctcgccgcggccgc

SEQ ID NO: 144872 - DNA, 2107 bp, Homo sapiens
tttcgtgcagcctcctgcgccccgccgagctggcggatggagctgcgcagcgggagcgtgggcagccaggcggtggcgcggaggatggatggggacagccgagatggcggcggcggcaaggacgccaccgggtcggaggactacgagaacctgccgactagcgcctccgtgtccacccacatgacagcaggagcgatggccgggatcctggagcactcggtcatgtacccggtggactcggtgaagacacgaatgcagagtttgagtccatcctcccaaagcccagtacacaagtatctacggagccctcaagaaaatcatgcggaccgaaggcttctggaggcccttgcgaggcgtcaacgtcatgatcatgggtgcagggccggcccatgccatgtattttgcctgctatgaaaacatgaaaaggactttaaatgacgttttccaccaccaaggaaacagccacctagccaacgggatagctgggagtatggccaccctgctccacgatgcggtaatgaatccagcagaagtggtgaagcagcgcttgcagatgtacaactcgcagcaccggtcagcaatcagctgcatccggacggtgtggaggaccgaggggttgggggccttctaccggagctacaccacgcagctgaccatgaacatccccttccagtccatccacttcatcacctatgaattcctgcaggagcaggtcaacccccaccggacctacaacccgcattcccacatcatctcaggcgggctggccggggccctcgccgcggccgccacgacccccctggacgtctgtaaaacccttctgaacactcaggagaacgtggccctctcgctggccaacatcagcggccggctggtggtgcctatgggccctctgctccccaatgccttagagagaggaggggacggcacggccgctcaccggaaggctgtgtgcggggacatccgagaggtctgggagctggaccggctgctgccttgtgacatccgggatggcgccttcattactatgccctttcactgctatgcacaaaaccgtggggagggcctcctgcgccccgccgagctggcggatggagctgcgccgcgggagcttgggcagccaggcggtggcccggaggatggatggggacagccgagatggcggcggcggcaaggaccgccaccgggtcgggaggactacgagaacctgccgactagcgcctccgtgtccacccacatgacagcaggagcgatggccgggatcctggagcactcggtcatgtacccggtggactcggtgaagccgcgtgcccggccccggctgctggcggcgctgaggcgggggaggcggagtggcgagcaccgctggcttcggcggcgactgggctcccgggggacgcgatcgctgaagctctgcacagtcttaccacgctggccgttcgggctggctggggccgcccacacgtgcgcggtttccgagggagttccccgcaggggaagccctcaccacgctggagctgagaaacgtgtggccctggcccggccgcgcgccctcgggacttggtgtgtggctgctgctccccgggttatttcgggaacttggggccggcaagtcttctctcgactagtggcagctctttaccggttcgacagcggcccgtgggatcccctttctgagggttcctgcacttcttcccccgactttgggtcgccgagccgccgggaggcaatgacgtttgccttctccttttgcttgcggggaggaaggcacatgcccagcctcagagaacattactgggccaggatgtctcatgagagacataaagactgggccaatgttggcggcaccatcactgtcctttcagagcccaatttcctgattaacaacacaaggctcgcccggaacagaacgccctgggctcggcatgacaactggtgccaccactggcaacacgtatcacctgaaagcagcctcgactgcgtgaggctccagggccttccctggatggcagcagctgaagtggagatgaagcttcctgctgggcacatgcacatgccagtttcttttcctaataggtccccactgggtgctggctgcatcaactga

SEQ ID NO: 144873 - DNA, 1299 bp, Homo sapiens
tttcggccacgcgtccgcctcctgcgggctcctgcgccccgccgagctggcgtatgttgctgcgccgggtgagcgttgccaaccagggggggggcgcggaggatggatggtgacagccgagatggcggcggcggcaaggacgccaccgggtcggaggactacgagaacctgccgactagcgcctccgtgtccacccacatgacagcaggagcgattggccgggatcctggagcactcggtcatgtacccggtggactcggtgaagacacgaatgcagagtttgagtcaagatcccaaagcccagtacacaagtatctacggagccctcaagaaaatcatgcgtaccgaaggcttctggaggcccttgcgaggcgtcaacgtcatgatcatggggtgcagggccggcccattgccatgtatttttgcctgctattgaaaacattgaaaaggatttttaaatgacgttttttccaccaccaagggaaacagccaccttaggccaacgggtagttttgaacagcgttttgtcatggcagttagaagagttcgtcttcgttcaacacagtcccctccccgaggtgtgttccctcccctgtgaccccagccgccctcgacttcggccccgcttgctcacgaataaagaacctcagagttggtgtgtgcaattgcacacccaagaacacaccgcacgcacacacacgcgcgcgcacacacattgcttttttctgttcccctccgctttctgaagccctggggagaaatcgagtgacagaggtgttttggttttattgttatgtgggttttcttttgtatttttttttgtttgttttgtttttaaacattcaaaagcaattaatgatcagacataggagaaaccctgaatagaaacaaaacttttgaatgctggattcaaaaaaaaaaaaaaagttatctggacagcttctttgagactatttaaaaactggtacaacaggtctctacaacgccaagatctaactaaggctttaaaagggatagctgggagtatggccaccctgctccacgatgcggtaatgaatccagcagaagtggtgaagcagcgcttgcagatgtacaactcgcagcaccggtcagcaatcagctgcatccggacggtgtggaggaccgaggggttgggggccttctaccggagctacaccacgcagctgaccatgaacatccccttccagtccatccacttcatcacctatgagttcctgcaggagcaggtcaacccccaccggacctacaacccgcagtcccacatcatctcaggcgggc

SEQ ID NO: 144874 - DNA, 2610 bp, Homo sapiens
atggcatttgcatggtggccctgtctcatcttggctctgctctccagcttggcagcctctggcttcccgagaagcccctttcggctgcttggggtggccaatggcatcgaggtctacagtaccaaaatcaactccaaggtgacctcccgttttgctcacaatgttgtcaccatgagagccgtcaaccgtgcagacacggccaaggaggtttcctttgatgtggagctgcccaagacggccttcatcaccaacttcaccttgaccatcgacggtgttacctaccctgggaatgtcaaggagaaggaagttgccaagaagcagtatgaaaaggctgtgtcccagggcaagacggccggcttggtcaaggcctctgggaggaagttggagaagttcacagtctcggtcaacgtggctgcaggcagcaaagtcaccttcgagctaacctacgaggagctgctgaagaggcacaagggcaagtacgagatgtacctcaaggtccagcctaagcaactggtcaaacactttgagatcgaggtagacatcttcgagcctcagggaatcagcatgctggatgctgaggcctctttcatcaccaacgacctcctgggaagcgccctcaccaagtccttctcagggaaaaagggccatgtgtccttcaagcccagcttagaccaacagcgttcatgcccaacctgtacagactccctcctcaatggagatttcactatcacctatgacgtgaacagagaatctcctggcaacgtgcagatagtcaatggctacttcgtgcacttctttgcacctcaaggccttccagtggtgcctaagaacgtggcctttgtgattgacatcagcggctccatggctggtcggaaattagagcagacaaaggaggcccttctcagaatcctggaagatatgcaagaggaagactatctgaatttcatcctgttcagtggagatgtgtccacatggaaagagcacttagtccaggccacgcccgagaacctccaggaggccaggacgtttgtgaagagcatggaggataaaggaatgaccaacatcaatgacgggctgctgaggggcatcagtatgctgaacaaggcccgagaggagcacagaatcccagagaggagcacctccattgtcatcatgctgactgatggggatgccaatgttggtgagagcagacccgaaaaaatccaagagaatgtgcggaatgccatcgggggcaagttccccttgtataacctgggctttggcaacaatctgaattataacttcctggagaacatggccctggagaaccatgggtttgcccggcgcatttatgaggactctgatgccgatttgcagttgcagggcttctatgaggaggtggccaacccactgctgacgggtgtggagatggagtaccccgagaacgctatcctggacctcacccagaacacttaccagcacttctacgatggctctgagatcgtggtggccgggcgcctggtggacgaggacatgaacagctttaaggcagatgtgaagggccatggggccaccaacgacctgaccttcacagaggaggtggacatgaaggagatggagaaggccctgcaggagcgggactacatcttcgggaattacattgagcggctctgggcctacctcaccattgagcagctgctggagaagcgcaagaacgcccatggcgaggagaaggagaacctcacggcccgggccctggacctgtccctcaagtatcactttgtgactccactgacctcaatggtggtgaccaagcctgaggacaacgaggatgagagggccattgccgacaagcctggggaagccagctaccagcctcctcaaaacccctactactatgtggacggggatccccacttcatcatccaaattccggagaaagacgatgccctctgcttcaacatcgatgaagccccaggcacagtgctgcgccttattcaggatgcagtcacaggcctcacagttaatgggcagatcactggcgacaagagaggcagccctgactccaagaccagaaagacttactttggaaaactgggcatcgccaatgctcagatggacttccaggtggaggtgacaacggagaagatcaccctgtggaacagggccgtgccgagcactttcagctggctggacacagtcacagtcacgcaggatgggctgtccatgatgatcaacaggaagaacatggtggtctcctttggagatggggttaccttcgtggtcgtcctacaccaggtgtggaagaaacatcctgtccaccgtgactttctaggcttctacgtggtggacagtcaccggatgtcagcacagacgcatgggctgctggggcaattcttccaaccctttgactttaaagtgtctgacatccggccaggctctgaccccacaaagccagatgccacattggtggtgaagaaccatcagctgattgtcaccaggggctcccagaaagactacagaaaggatgccagcatcggcacgaaggttgtctgctggttcgtccacaacaacggagaagggctgattgatggtgtccacactgactacattgtccccaacctgttttga

SEQ ID NO: 144875 - DNA, 1845 bp, Homo sapiens
atggagaaggccctgcagaagcgggactacatcttcgggaattacattgagcggctctgggcctacctcaccattgagcagctgctggagaagcgctcccacattacctgcagaaagctttccctgccacccccaggcttcctggtcatccccatgtctccctctgggctcctgcagcacctggctattttctgggtggcagttatcaccacaggcattgtgtctgccatggtggccctgttgaatcccattgaaaacccagacttgaagctggccatcgtcatgctgatcgtccccttctttgtcaacggtttctacagccaggtagccaaacccctgctggtggatgtggatttgcagtacccccaggatgctgtcttggccctgacccagaaccaccataaacagtactacgaaggctcagagattgtgtatttacatgaaaaacacatccttcatcgagatctgaaaactcaaaatgtcttcctaacaagaacaaacatcatcaaagtaggggacctaggaattgcccgagtgttagagaaccactgtgacatggctagcaccctcattggcacaccctactacatgagccctgaattgttctcaaacaaaccctacaactataagtctgatgtttgggctctaggatgctgtgtctatgaaatggccaccttgaagcatgctttcaatgcaaaagatatgaattctttagtttatcggattattgaaggaaagatgattctgacagacagcaaagcatcatgtgggccctggaagccagactggctgggctccatgactcctgagcgggcctctgggaggaagttggagaagttcacagtctcggtcaacgtggctgcaggcagcaaagtcaccttcgagctaacctacgaggagctgctgaagaggcacaagggcaagtacgagatgtacctcaaggtccagcctaagcaactggtcaaacacttgagccacaccgccagctaccagcctcctcaaaacccctactactatgtggacggggatccccacttcatcatccaaattccggagaaagacgatgccctctgcttcaacatcgatgaagccccaggcacagtgctgcgccttattcaggatgcagtcacaggtgaggcttgtgggctagggccggggccagggggctcttcctgggagggcttgggtcccccgagggcctcggggagaactatggagcaattcaccatccacctcaccgtcaatccccagagcaaggtcacgtttcagctgacttatgaggaagtgctgaagagaaaccatatgcagtatgaaattgtcatcaaagtcaagcccaagcagctggtgcatcattttgaggctggtgctcaggaagcccctatcaagaagaagcgcccccctgtgaaggacgaggacctgaagggggcccgaggaaacctgaccaagaaccaggaaatcaagtccaagacctaccaggtcatgcgagagtgtgggcctggggcagcctttgagctcagcattggtgttattgatggggatcctttagagtcgcacatgcaggcatgcaagcaagatcggtcaagcaagcttgtgtccatcatggattttgccgatttcggaaccaccatcaaacaggattttcgcctgctggggcaaaccagcgtggaccgcttgctgcaactctctcagggccaggcggtgaagggcaatcagctgttgcccgtctcactggtgaaaagaaaaaccaccctggcgcccaatacgcaaaccgcctctccccgcgcgttggccgattcattaatgcagctggcacgacaggtttcccgactggaaagcgggcagtga

SEQ ID NO: 144876 - DNA, 377 bp, Homo sapiens
ccagctaccagcctcctcaaaacccctactactatgtggacggggatccccacttcatcatccaaattccggagaaagacgatgccctctgcttcaacatcgatgaagccccaggcacagtgctgcgccttattcaggatgcagtcacaggtgaggcttgtgggctagggccggggccagggggctcttcctgggagggcttgggtcccccgagggcctcggggagaactatggagcaattcaccatccacctcaccgtcaatccccagagcaaggtcacgtttcagctgacttatgaggaagtgctgaagagaaaccatatgcagtatgaaattgtcatcaaagtcaagcccaagcagctggtgcatcattttgag

SEQ ID NO: 144877 - DNA, 621 bp, Homo sapiens
atgaccaagaggtgcctcgaccacagaggagaatggctacctggtgctggtggtggaggacatactgaaggcacacgctgtctccaccatgctcctgtcacatgggtcgggatcgaggtagacatcttcgagcctcagggaatcagcatgctggatgctgaggcctctttcatcaccaacgacctcctgggaagcgccctcaccaagtccttctcagggaaaaagccagtctggttaagaggaaggcacacccctaaaggcaatctggactcagaagttctcgctggtctctctccctgccccatccctttggcaggcctcacagttaatgggcagatcactggcgacaagagaggcagccctgactccaagaccagaaagacttactttggaaaactgggcatcgccaatgctcagatggacttccaggtggaggtgacaacggagaagatcaccctgggaacagggccgtgccgagcactttcagctggctggacacagtcacagtcacgcaggatgggtaagctcccctacaaggtctccaaggtggactacagggggagggtgaccatagtggcccccaaccaaaccctggggccctatcagagccagaattggtag

SEQ ID NO: 144878 - DNA, 2852 bp, Homo sapiens
tattcagcgatggactttgcatggtggccctgtctcatcttggctctgctctccagcttggcagcctctgcttcccgagaagcccctttcggctgcttgggaaacggagcctcccggaaggggtggccaatggcatcgaggtctacagtaccaaaatcaactccaaggtgacctcccgttttgctcacaatgttgtcaccatgagagccgtcaaccgtgcagacacggccaaggaggtttcctttgatgtggagctgcccaagacggccttcatcaccaacttcaccttgaccatcgacggtgttacctaccctgggaatgtcaaggagaaggaagttgccaagaagcagtatgaaaaggctgtgtcccagggcaagacggccggcttggtcaaggcctctgggaggaagttggagaagttcacagtctcggtcaacgtggctgcaggcagcaaagtcaccttcgagctaacctacgaggagctgctgaagaggcacaagggcaagtacgagatgtacctcaaggtccagcctaagcaactggtcaaacactttgagatcgaggtagacatcttcgagcctcagggaatcagcatgctggatgctgaggcctctttcatcaccaacgacctcctgggaagcgccctcaccaagtccttctcagggaaaaagggccatgtgtccttcaagcccagcttagaccaacagcgttcatgcccaacctgtacagattccctcctcaatggagatttcactatcacctatgacgtgaacagagaatctcctggcaacgtgcagatagtcaatggctacttcgtgcacttctttgcacctcaaggccttccagtggtgcctaagaacgtggcctttgtgattgacatcagcggctccatggctggtcggaaattagagcagacaaaggaggcccttctcagaatcctggaagatatgaaagaggaagactatctgaatttcatcctgttcagtggagatgtgtccacatggaaagagcacttagtccaggccacgcccgagaacctccaggaggccaggacgtttgtgaagagcatggaggataaaggaatgaccaacatcaatgacgggctgctgaggggcatcagtatgctgaacaaggcccgagaggagcacagaatcccagagaggagcacctccattgtcatcatgctgactgatggggatgccaatgttggtgagagcagacccgaaaaaatccaagagaatgtgcggaatgccatcgggggcaagttccccttgtataacctgggctttggcaacaatctgaattataacttcctggagaacatggccctggagaaccatgggtttgcccggcgcatttatgaggactctgatgccgatttgcagttgcagggcttctatgaggaggtggccaacccactgctgacgggtgtggagatggagtaccccgagaacgctatcctggacctcacccagaacacttaccagcacttctacgatggctctgagatcgtggtggccgggcgcctggtggacgaggacatgaacagctttaaggcagatgtgaagggccatggggccaccaacgacctgaccttcacagaggaggtggacatgaaggagatggagaaggccctgcaggagcgggactacatcttcgggaattacattgagcggctctgggcctacctcaccattgagcagctgctggagaagcgcaagaacgcccatggcgaggagaaggagaacctcacggcccgggccctggacctgtccctcaagtatcactttgtgactccactgacctcaatggtggtgaccaagcctgaggacaacgaggatgagagggccattgccgacaagcctggggaagatgcagaagccacaccggtgagccccgccatgtcctacctgaccagctaccagcctcctcaaaacccctactactatgtggacggggatccccactttcaatcatccaaattccggagaaagacgatgccctctgcttcaacatcgatgaagccccaggcacagtgctgcgccttattcaggatgcagtcacaggcctcacagttaatgggcagatcactggccgacaagagaggcagccctgactccaagaccagaaagacttactttgggaaaactggggcatcgccaatggctcagatgggatttccagggtgggaggtgacaacggagaagatcaccctgttggaacaggcccgttgccgagcatttttcagctggctggacacagtcacagtcacggcaggatggccactttctggcttcctctcgtaggctgtccatgatgatcaacaggaagaacatggtggtctcctttggagatggggttaccttcgtggtcgtcctacaccagggtgttggaagaaacatcctgttcccaccgttgactttctaggcttctacgtggtggacagtcaccggatgtcagcacagacgcatgggctgctggggcaattcttccaaccctttgactttaaagtgtctgacatccggccaggctctgaccccacaaagccagatgccacattggtggtgaagaaccatcagctgattgtcaccaggggctcccagaaagactacagaaaggatgccagcatcggcacgaaggttgtctgctggttcgtccacaacaacggagaagggctgattgatggtgtccacactgactacattgtccccaacctgttttgagtagacacaccagctcctgttgggatggatggcccggattttatggcatctggaacatgggcacagagaggggcctgtgggaggggctgggaaaataaagtccaaggtcgagccagaaaaaaaaaaaaa

SEQ ID NO: 144879 - DNA, 1626 bp, Homo sapiens
  misc_feature (1)...(1626): n = a,t,c or g
ttacaaatgtgacctgattacgaacgtatactactacattttgaacctcgacgtcaagaattcgactcgaggacgatccctgcgagttaattgggggtgggttcccttgcccagggagacacaatcagtatgacagtatctatgacctgcaaaaatgagcaatttagcatgtcagtcatttatacttcattagtcccatagcaaccctccaagagggcccttnnnnnnnnnnnnnnnnnnnnnnnnnnnnnnnnnnnnnggggggttaatttgctcagtctgtttgctcacagactcagcagatggccaagctggtacttattccaagtttagactggccccaatgcccatgctgggaattgctggggatcacagtcctctgtgcctctctcaccacaaaactggaacctcacaaactccctgacactaggcagggcctccccagcccctactgacctgcccacacctccatttggactgacacatttggactgtgccatcacattcccctcagaacagccctgataaatgtaccggtgcatgtgagtacatatatgcatgtgcacgcatatgtgtgcagcctgcgagcacgtagtgggtgggtgtttactatcaagaaacaacagacagccgtgagcctcactcaccccatctatggggtgggaagcccacgggtggcgcatatggttgctgtgagcattactcaagagagagaagatgacttaacggcttgcatttcagtcacatcaaaaagccctgcgccaacgataaaatcacatcccatttgccccaacccccataaagggtttccctggacgtgcccgatttccaaagcctaatgtttgtagtcacatctccacctctatctgccagtgttggggcccctctggggcccagcagcgctaagacaggaggaaggcacggggctgggggagaaggaacccctagaccctgctcaccactgcccttcggcttttcagccacaccggtgagccccgccatgtcctatctgagtgagtacatgctggcagctgccactcctcccactgcttagagcctgcccctgccacatgtccctccaccgtggctactcactcagctctccgggatgggcagatggacaatgtgccctgaggagattgcggggtgggagggcaatggcattagcgagcgggaaggggaggggaggggcataagctgaactcctatgggggtcgtcgggcgcgctcccagggccacttgcttagctcagccctctctccctttgtatctgcagccagctaccagcctcctcaaaacccctactactatgtggacggggatccccacttcatcatccaaattccggagaaagacgatgccctctgcttcaacatcgatgaagccccaggcacaggggctgcgccttattcaggatgcagtcacaggcctcacagttaatgggcagatcactggcgacaagagaggcagccctgactccaagaccagaaagacttactttggaaaactgggcatcgccaatgctcagatggacttccaggtggaggtgacaacggagaagatcaccctgtggaacagggccgtgccgagcactttcagctggctggacacagtcacagtcacgcc

SEQ ID NO: 144880 - DNA, 690 bp, Homo sapiens
acgccgctttgtcagccatcatggaaacccagcataatgttgcatgcatgcctagttggttctcaagtagaattttggaacataatctcttcataaattaagggctggttgtgtattcacattggatgatattttatatttcttttctatttttataattataattccctttcaacagtttttcctgattaaagatattttagtagctggcttctttttaaactctttttaaactttttaaagtttttaaactttaaattttaagaagcttttgtaatatgtgatttgtctgtttatgccttattttgtttgttattttgaagcaaacataggaagtggcttactgccttgtataaaaagatatcagagaacagtggagtcatttggaaaaagcgcagtggtaaagtggcttcggaagtgattttttccccttattttctggcacagtgctttctaagatgatgttgctcactgtagttttctttcacttttaaaggcatgatggttccaggcaggataatcttaaatggtgatttgtcatctttttttccccttgcagcattgctatggcaacaaaagaaaatatgacttcacagagaggaatgttgaagtcaattcacaggcaaaatgaacactttgggccaatcgttttcctgctggtaaacagcctgatccagagggtcaacctga

SEQ ID NO: 144881 - DNA, 1024 bp, Homo sapiens
ggacgacaaagatggcggcagggaccagcagttactgggaaggtgaggcgagaaggcctccggatctcaggaaacaggctcgacagctggaaaatgaacttgacctgaaactagtttccttcagcaaactatgtacaagttacagtcatagcagtacccgagatggaagacgcgacaggtatagttctgatacaacaccccttttaaatggatcaagccaagacagaatgtttgagacaatggcgattgagattgaacaacttttggcaaggcttacaggggtaaatgataaaatggcagaatataccaacagtgcaggtgtcccctccttgaaatgcagccctgatgcatacattacagcggcatagagacatattgcaggattatacacatgaattccataaaaccaaagcaaactttatggcaatacgggaaagggagaatcttatgggatcagtacgaaaagatattgagtcatataaaagtgggtctggagtaaacaacagaagaactgagctatttttgaaagaacatgaccaccttcgaaactcagatcgtctgatagaagagacaataagcattgctatgccaacaaaagaaaatatgacttcaccagagaggaatgttgaagtcgattcacagcaagaatgaacactttggcccaatcgttttcctgctgtaaacagcctgatccagaggatcaacctgaggaagcggcgggactcgctcatcctagggggtgttattgggatctgtaccatcctgttgctgctgtatgcgttccatttgatgggacatcttcagggactcttgacagccaccgctttcacaccctggtctggaataaggaaacatcggagggagaagttgactgtcttgataattagcctgaccagcaggatgaatgcaagactgacagtgatggactctgtgacatggtcaggttgagctgaagccacagtttctctgtgctgtgttttctaacacatttttctgtttttaattaaaaaaaaaaaaaaaaaaa

SEQ ID NO: 144882 - DNA, 476 bp, Homo sapiens
ggaagtgatacttagattgagaaggatgcgtaggagttagccaagcaaagagcaggaacacagtgccagacacattactgcccagcttttaaagatatttctagaagcagttttacccttctctgcttttatgtgaatgacactgaatctgcttccagcatgagcctctttggcagaaggcccagccaagcctaactgtggcttctgctccatctggggactgttggggctcagtgagttacacaatcctagttattctcaaaattaagtcatggctgtgctccccagtggcacagctctgaaaacaaattgggagcctggtagattagacctgcagtgcaatggatcatccctcttactttctggtgcaccacatatagtcagtctcctagggtttagaataagggccaaaacaggccgggcgcggtgctcatgcctgtaatcccaacactttgggaggccgaggcgggcgtatc

SEQ ID NO: 144883 - DNA, 534 bp, Homo sapiens; identical to SEQ ID NO: 144862

SEQ ID NO: 144884 - DNA, 654 bp, Homo sapiens
  misc_feature (1)...(654): n = a,t,c or g
cacagactcagagagaacccaccatggtgctgtctcctgccgacaagaccaacgtcaaggccgcctggggtaaggtcggcgcgcacgctggcgagtatggtgcggaggccctggagaggatgttcctgtccttccccaccaccaagacctacttcccgcacttcgacctgagccacggctctgcccaggttaagggccacggcaagaaggtggccgacgcgctgaccaacgccgtggcgcacgtggacgacatgcccaacgcgctgtccgccctgagcgacctgcacgcgcacaagcttcgggtggacccggtcaacttcaagctcctaagccactgcctgctggtgaccctggccgcccacctccccgccgagttcacccctgcggtgcacgcctccctggacaagttcctggcttctgtgagcaccgtgctgacctccaaataccgttaagctggagcctcggtggccatgcttcttgccccttgggcctccccccagcccctcctccccttcctgcacccgtacccncgtggtctttgaataaagtctgagtgggcggcnnnnnnnnnnnnnnnnnnnnnntnnnnnnnnnnnnnnnnnnnnnnnnnnnnnnnnnnnnnnnnnnnnnngggnnnnnnnnnnnngccgcgcg

SEQ ID NO: 144885 - DNA, 634 bp, Homo sapiens
ccccgactcttctggtccccacagactcagagagaacccaccatggttcttgtttcctgcccgacaagaccaacgtcaaggcccgcctggggtaaggtcggcgcgcacgctggcgagtatggtgcggaggccctggagaggatgttcctgtccttccccaccaaccaagacctacttcccgcacttcgaccttgagccacggtttctgcccaggtttaagggccacgggcaagaaggtggccgacgcgctgaccaacgccgtggcgcacgtgggacgacatgcccaacgtcgctgtccgccctgagcgacctgcacgcgcacaagctttcgggtgggacccgttcaacttcaagcttcctagccacttgcctgctggtgaccctgggccgcccacctccccgccgagtttcaccccttgcggtggcacgccctccctgggacaagtttcctgggcttcttgttgagcaccgttgctgaccttccaaatacccgttaagcttggaagcctcgggtagccggttcctcctggcccgctgggcctccccccagcccctcctcccctttcctgcacccgtacccccgtggtctttgaaataaagtcttgagtgggcggcaaaaaaaaaaaaaaaaaaa

SEQ ID NO: 144886 - DNA, 538 bp, Homo sapiens
cacacataatagaaacttattttgaaaaataaatgttgaaacatttagtctcgcctttgttcacatatgaaattagcacgtcttcatttggcttcaccttaatattgcctctcctgtgtactttcctcactgcagaagaaccaacagcaaccatttctggggctgtaatttctggccttctgtaagcttttatgtcaagagagcttttagaaatcttttctttgtgagggcagtattaaaatttaaaaaatgtttttaagtttcttttaaacatattctcttgaagtcctttgcttttcatattgcccttgttcaagttcatacactgttaaatattctcttccctttggcttttcttcattttgtcaataaaagattttattttattttattttttatttttggcacagtctcgctctgtcacctaggctggagtgcagtggcacaatctcggctcactgcaacctctgccttcccaattcaagtgattttcgtgtcctccgcctaggcaacagactgagactcaaaataaaaaaaa

SEQ ID NO: 144887 - DNA, 607 bp, Homo sapiens
tcggggcaggaaatggagttgggtgccccaggtggggtgctccaacgagctctttctcatgggatcccccacagatccatacaaacaggctgaccatcagggctggtcccaggccaccaggctgggtgcaatgcagaaatggagatctgccccggggaaggcagggtttctgcccaaacggagccacgtgaggacgtctttggggatgtgtctccaagaaaagtgtgggctgccttcctcaccctggatgcctgtgggctgccttcctcaccctggatgcctgtgggctgccttcctcaccctggatgcctgtgggcagccttcctcaccctggatgcctgtgggctgccttcctcaccctggatgcctgtgggctgccttcctcaccctggatgcctgtgacttggtttccatgggggcttcctaagctcagggaccccaagcctccatcaaatctaatgacccgccctgtctctgaacacacctgtgttgtccccgagcccctcaccaaccccctctgcaacccggcccacgcatttcccatccctgaagggtccagctcataggccggcccatgtgtttccctttaacccctgctttgtcccta

SEQ ID NO: 144888 - DNA, 363 bp, Homo sapiens
acccctacagagctagggactcgaatcagagttcctcctccggggccttctcaggcctggggagcaggactcagcccttgcttctgccgtgcctggtagcctggcccagacgctgccttttccatggtctcactgtggccatgtccttcccagcacatgctgctccccatcctgcctgctgtcactgcctctcctatctgtctcttgtcctgtttctgtgccctctcttctccctctgggctgccctctgcagcttctaccctcctgccctaactcctgctacccctcacctgctgtgcctacctactgtcctgcagggaaggaagaaaagagaagaagtccctcttgtcaggcttgctccgg

SEQ ID NO: 144889 - DNA, 337 bp, Homo sapiens
ggcctgaaagggcggggccttaaacattatccaatcagggatgctgggctgggaacgtccaatcaggcaggcagctggaggggacaggtcggcttccgggatgtggtcggtcctttgtctctcgctgcagccggaggtcaaggtctcgtccttactgctgtgtgtcctctgctcctagagtcccagcctctgtggccctatgacctgcagggatcattgacatttagggatgtggccatagaattctctctggaggagtggcaatgcctggacactgcacagcagaatttatatagaaatgtgatgttagagaactacagaaacctggtcttcctgg

SEQ ID NO: 144890 - DNA, 416 bp, Homo sapiens; identical to SEQ ID NO: 130787

SEQ ID NO: 144891 - DNA, 511 bp, Homo sapiens
aattcccgggtcgacgatttcgtggggcctttgtccctcgctgtggcctgagctccaggtctcgtcttcagcgctctgtgtcctctgctcctagaggtccaggctctgtggccctgtgacctgcaggtattgggagatctacagctaagacgcccgggagcccctggaagcctagaaatggagaacctgaagtctggagtgtatcctctcaaggaagcaagtggatgccctggggctgacaggaatcttctggtgtactctttttatgaaaaggggccattgacatttagggatgtggccatagaattttctctggaggagtggcaatgcctggacactgctcagcaggatttgtatagaaaagtgatgttagagaactacagaaacctggtcttcttggcaggtattgctgtttctaagccagacctgatcacctgtctggaacaagaaaaagagccttgggagcctatgaggagacatgaaatggtagccaaacccccagttatgtgtc

SEQ ID NO: 144892 - DNA, 389 bp, Homo sapiens
gggaaggacagcgggccgaggaaaagcagtgcggggcacgcggagtatatgaggctagagaattcgtgtggacgtcaggttggaagcgggcgtgacagggtccagcagaagaaaacatggctgccaaaatgtttgagttcatcggcaagtttggcctggccttagttgatgcaggaggcgtggtgaactctgccttatatagcgtggatgctgggcacagagctgtcgtctttgaccgattccgtggagtgcaggacattgtggtaggcaaagggacttactggctcatcccatggttacagaaatcaatatctttgactgccgttctcaaccacgtaatgtgctcgtcttcaccggtagcaaagatttacagattggtaacttacacg

SEQ ID NO: 144893 - DNA, 926 bp, Homo sapiens
tttttttactttttttttttggagagggactttctttttttattttattttattttttttgcagttttgctcttgttgcccaacctggagtgcaatggtgcgatctcggctcacagaaacctccgccttcctgggttctagcgattctcctgcctcagcctcccaagtagctgggattacaggcatgcagcaccatgcctggctaagttttgtatttttagtaaagacagggtttgtccatcttggtcatgctggtctcaaactcccgacctcagatgatccgcccacagctgcctccgacattgttggaattacaggcatgattccacccgtggctggcccaaaacaaaggcatttctgtgctaggtccgttcttgttccttttatctgagtgagctggaggtttgtacaagtttttatccaaatgggccagaggtttttctatctctgccagccacgggcatgtccccaagcacaacaacatatgctagttcccttgttagtgtctgcagcttgattttttccaggcttctttatatgttatgcagggatgaggcactgaccagggacgtttccagggacgtcttctcttgcgtatcgtacctaaggcaagctaacgtaacttctttcacaagtaatgagtattcacttttacttttgtaagacaaaaattatctaaaagctactgcaaaacaatagaactatactaaccacttctaaaccatatacttaaaatttcagaaatgacaatggcatgtttttaactacaattagaaatttaagactaactaaaaggcacagttagaaaacctttcaaacatcaccttcaaataacaaagggttattctcacacaattatatggatttaaactatatgttgattgtaaatttaagattatttccctgatgactcaccaagatagaat

SEQ ID NO: 144894 - DNA, 546 bp, Homo sapiens; identical to SEQ ID NO: 142654
  misc_feature (1)...(546): n = a,t,c or g

SEQ ID NO: 144895 - DNA, 681 bp, Homo sapiens
tgcaagttcatccgtgtcatggcccacaccagattgcgcctgcttcctctgcgcagaaagaaggcccacctaatggagatccaggtgaacgaaggcactgtggccgagaagctggactgggcccgcgagaggcttgagcagcaggtacctgtgaaccaagtgtttgggcaggatgagatgatcgacgtcatcggggtgaccaagggcaaaggctacaaaggggtcaccagtcgttggcacaccaagaagctgccccgcaagacccaccgaggcctgcgcaaggtggcctgtcaaggacggcaagctgatcaagaacaatgcctccactgactatgacctatctgacaagagcatcaaccctctgggtggctttgtccactatggtgaagtgaccaatgactttgtcatgctgaaaggctgtgtggtgggaaccaagaagcgggtgctcaccctccgcaagtctttgctggtgcagacgaagcggcgggctctggagaagattgaccttaagttcattgacaccacctccaagtttggccatggccgcttccagaccatggaggagaagaaagcattcatgggaccactgaagaaagaccgaattgcaaaggaagaaggagcttaatgccaggaacagattttgcagttggtggggtctcaataaaagttattttccactga

SEQ ID NO: 144896 - DNA, 903 bp, Homo sapiens
aagtgcagcagtgggcattgtgggaaggtgaagagcctccctaaggatgacccttccaagccagtctgcctcacaggcttcctgggatacaaggctggcatgactcacatcgtgcaggaagttgacaggccaggatccaaggtgaataagaaggaggtggtagaggctgtgaccattgtagagacactgcccatgatggttgtgggcattgtgggctatgtggaaacccctcaaggcctccggaccttcaagactgtcttcgctgagcacatcagtgatgagtgcaagaggcgcttctataagaactggcataaatctaagaagaaggcctttaccaagtaccgcaagaaatggcaggatgagaatggcaagaagcagctggagaaggacttcagcagcatgaagaagtactgccaaaagaaggcccacctgatggagatccaggtgaatggagacaccatggccaagaagctggactgggcccgcgagaggtttgagcagcagttacctgtgaaccatgtgtttgggcaggatgagatgattgacatcatcagaatgacaaagggcaaaggctacaaaggggtcaccagtcattggcacgccaagaagctgccccgcaagacccaccaaggcccacgcaaggtgtcctgtattggggcatggcatcttgtccatgtggccttctctgtggcacgcacttggcagaaaggctactgtcaccacactgagatcaataagaagatccataagattggccagggctaccttatcaaggatgacaaactgatcaagaacaatgcctccactgactatgacctgtctgacaagagcatcaaccctctgggtgtctttggccactatggtgaagtgaccaatgactttgtcatgctgaagggctgtgtg

SEQ ID NO: 144897 - DNA, 482 bp, Homo sapiens
  misc_feature (1)...(482): n = a,t,c or g
atgtgncccattagagtctacgtaaacagcgcggnggaattccaagccggaccacctcacagcctttctgggatacaaggctggcatgactcacattttttgtgaagacgacaggccgggatccaaggtgaacaagaaggaggtggtggaggctgtgaccattgaagagacaccacccatggcggttgtgggcattgtgggctactgggaaacccctcgaggcctccggaccttcaagactgtctttgctgagcacatcatcgatgaatgcaagaggtgttactataagaattggcataaatctaaaaagaaggcctttaccaagtactgcaagaaatggcaggatgaagatggtgagaagcaactggagaaggacttcactagcatgaagaagtactgccaagtcattcgtgtcattgcccacacccagatgcgcctgcttcctctgcgccagaagaaagcccacctgatggagatccaag

SEQ ID NO: 144898 - DNA, 1134 bp, Homo sapiens
atgtctcacagaaagttctccactcccagacatgggtccctcggcttcctgccttggaagcgcagcagcaggcattgtgggaaggtgaagagcttccctaaggatgacccgtccaagccggtccacctcacagccttcctgggatacaaggctggcatgacccacatcgtgcgggaagtcgacaggccaggatccaaggtgaacaagaaggaggtggtggaggctgtgaccattgtggagaggccaccagtgggcattgtgggctgcgtggaaacccctcaaggcttccggacttgcaagactgtcttcgctgagcacatcagtgatgaatgcaagagacgtttctataagaactggcataaatctaagaagaaggcctttaccaagtactgcaagaaatggcaggatgaggatggcaagaagcagctggagaaggacttcagcagcatgaagaagtactgccaagtcatctgcgtcattgcccacacccagatgcaactgcttcctctgtgccagaagaaggcccacctgatggagatccaggtgaatggaggcactgtggctgagaagctggactgggctggcgagaggctcaagcaccaggtacctgtgaaccaagtgtttgggcaggatgagatgatcgacgtcatcagggtgaccaagggcaaaggctacaaaagggtcaccagtcgttggcacaccaagaagctgccccgcaagacccaccaaggcctgtgcaaggtggcctgtattggggcatggcatcctgctcgtgtgggcttctctgtgggctaccttatcaaggatggcaagctgatcaagaacaatgcctccactgactatgacctgtctgacaagagcatcaaccctttgggtggcttcgtccactatggtgaagtgaccaatgactttgtcatgctgaaaggctgtgtggtgggaaccaagaagtgggtgctcaccctccgcaagtccttgctggtgcagacaaagcagcgggctctggagaagattgaccttaagttcattgacaccccctccaagtttggccatggccacttccagaccatggaggagaagaaagcattcatgggaccactcaagaaagaccgaattgcaaaggaagaaggagcttaa

SEQ ID NO: 144899 - DNA, 1388 bp, Homo sapiens
tcgacccacgcgtccgatggcgtgatgtctcacagaaagttctccgctcccagacatggggtccctcggcttcctgcctcggaagcgcaccagccaggcatcgcgggaaggtgaagagcttccctaaggatgacccatccaaggccggtccacctcacagccttccctgggatacaaggctgggcatgactcacatcgtgcgggaagtcgacaggctctgggatccataggtgtaacaagaaggaaaggtggtggagggctgtgactcattgtatgagaccaccacccatggtggttggtgggcatctggtgggcttacgtggaaaccacctcgagggcctccgggacctttcaagacttgtcttttgcttgagcacatcaagtgatgaattgccaagaggcgttttctataaagaatttgggcattaaaatcttaagaagaaggcctttaccaaagtactgcaaagaaattggcaaggatgaagattggcaagaagccagcttggaagaaggactttcagcagcattgaaagaagttacttgcccaagttcatccgtgttcaattgcccaaacccagattgcgcctgcttcctcttgcgccagaaagaaggcccacctgatggagattccaggttgaacggaggcactgtggcccgagaagctgggactgggcccgcgagaagcttgaagcagcagggtacctgtgaacccaagtgttttgggcaggatgagaatgatcgaccgtcatcgggggtgaccaaagggcaaaaggctacaaaggggggtcacccagttcgttggcacaccaagaaagctgcccccgcaaagacccacccgaggccctgcgcaaggtgggccttgtattgggggcatggcatccttgctcgtgtagccttctctgttggcaagccgctgggcagaaaggttacccatcaaccgcacttgagatcaacaaggaagatttataagattgggccaggggttaccttatcaagggcgggaagcttgatcaaagaacaatgcctccacttgaattatgacctatctgacaagagcatcaaccctctgggtggctttgtccactatggtgaagtgaccaatgactttgtcatgctgaaaggctgtgtggtgggaaccaagaagcgggtgctcaccctccgcaagtccttgctggtgcagacgaagcggcgggctctggagaagattgaccttaagttcattgacaccacctccaagtttggccatggccgcttccagaccatggaggagaagaaagcattcatgggaccactgaagaaagaccgaattgcaaaggaagaaggagcttaatgccaggaacagattttgcagttggtggggtctcaataaaagtaattttccactgaaa

SEQ ID NO: 144900 - DNA, 330 bp, Homo sapiens
ctttaaagggcatatgcataaatgctttcatatataggatactggttccaattacagatacgagacgaaacacaggcatgggcctatcgaatacgaatctggaatccaaacactcctgacgcatataattactaacaacgaaacaaaaaacgtttagtaatttcaaattatagacagctattccagtctaaattgtgtgatttcactccaaattcttccacgcgggtacatggataacatacatataagagcgacacaaggtatgaaagacatgcctgctggggtgcgcttttgtgctatactctggagccacataagggttttacacag

SEQ ID NO: 144901 - DNA, 358 bp, Homo sapiens
cggctgggggatgagcctgggtggtgccggtgtggaaggaatggaggtggggacctcagatttaggattcttctcagggcagcgagcactgagtccctgggtctcacctgtgcctcctgggctgtgtgcctggcgcaaggacagccctgtggagcagaagccccagggcccaagtttgcctctgtctgcccttccctatctctggggactccatggcctcctgctggtcctcagactcgaggtctagggcccttcaggggaacaggctccccaccgtccattcccatctctcgtgcccagaaggactcctggccttggcctgtgcccagcacccctgcatgcttctctgccccaggcg

SEQ ID NO: 144902 - DNA, 556 bp, Homo sapiens
  misc_feature (1)...(556): n = a,t,c or g
atttccangaattttcttaggaagganctacattgtgaagtaaacanttccccaaatggcatcanaaaacaggcaacaattttttgnaaacacccctttnaaactactgaaaagtccacactgtaacatatacaggcttctctctgctaaaagccaaggaaagttttggaaatgaatatatgcttgtttggctacccaatgttcaacagctcatggttttccccccatgaaccccacttcatgtcaatgcaaagtattataagataatacgtccattggcatatacccaaaagatccaaagctatagatctgtaagcttcagatagaaaaaaaaatagtgaaaaatgttcattatcaattaatagctggctgacgagacccaccaaagaactgtaaaataattccaggaaaggaaactcaaaacccactttcttattacacccttaggaatttctgaagtttttgtctattttcctttcagaataaagaaaccaaatgtaatcaatcaggggaataaaaaaatactgatacagatgtttgtctaggttaaactgtt

SEQ ID NO: 144903 - DNA, 1594 bp, Homo sapiens
catgtatgtaaaaataacttagaaattcagtacataatacatgattgaatacatgatcgtatttaacatgttttttttttctgcagtggacaaataaacatcctcaaagtagcaactgcaaatcagttacccttagaaaagcaagaccaaacactgtagttacactattagcagtgaccaaaaagggctaatattttctaagaatagtttaaattacagacatttgttatatttaccttatgtgaaatacatcactatttaattacattaattttaacatctgttgtgtggagttgtatagttcatgcaaaagcctgtgggtatgggtttttcaaaccagcagaaaggtcaaaggtacctgaatgctaaactgcctggctcccagctttttcattaaacttttcagggtcttggtttctttatctgtaaaatgacagagttggaccagttaactttaatggccatccttttacaccacacaagttgataaaatttatctgttcagcaaagagattaaacaaaaaagcacgttagtaatatgaagacaggaaaatgaatgaaagtctaacacataactcatattgatttactttatttctgttagattttacactctgaaaatttcacctcatttagtttgtacaaatactagacatggaaacttaaaatgtgcaggtgtcaaagcttaaaaatcaggtgtgtcctctttaaaggcatgtgcgataagcctgcagtcttaaccagacctggtaccagtttaacagttcattatacttctgtgatgagtggatctgttagtctggtagagattaatgttgaaatttacttaaagcccagctattaattgataatgaacatttttcactatattttttttctatctgaagcttagagatctagagctttggatctttcgggtatatgtcaatggaggcattattttatggtactttgcattgacatgaagggggttcactgggggaaaaccatgagctgtgaacattggtagcaaacaagcatatattcatttcaaaactttccttgcttttagcagagagaagcctgtatatgttacatgtgtgactttcagtagtttaaagagatgtttcaaaaaaattgttgcatgtttttgatgcaatttgggaaattgtttacttcacaatgtagtcattcataaaaaaaattcatgaaaatacttgaacatatgtttgagggatttttcttttcctttttaaatttttttattttttctgggggacggagatctgctcttacggcccggggtgggagtgaagtggccgcgaatcttgggcttacttgcaacctccaccccccggggttcaagcgattctcctgcctcagactccggagtagctgggattacaggcgcccgccaccacgtccggctaatttttgtattttcagtagagacggggttttgctatgttggccaggctggtctcaaactcctgacctcaagtgatccacctgcctcggccttcccaaagtgttaggggttaacaggtgtgaggccaccgtgcccggttgaagatttttcttaattgcaataaatattcagcattttttctaatga

SEQ ID NO: 144904 - DNA, 251 bp, Homo sapiens
tttttttttttttttttttctcagtcagatttcactttatttgtatcgatgacaatattaactcttcagatttatagaatgacaaaacttgataattacctggaaacaatttattattaactaggttaaccctaaatccatcaagaaaaaccacctaacatattcagtgttaaaaagagacattacgactagcctggccaacatgatccgctagcctccgcctcccaaagtgctgggatcacaggcgtggg

SEQ ID NO: 144905 - DNA, 501 bp, Homo sapiens
ctcagtcatgatttcactttatttgtatcgatgacaatattaactcttcagatttataaaatgacaaaacttgataattacctggaaacaatttattattaactaggttaaccctaaatccatcaagaaaaaccacctaacatattcagtgttaaaaagagacattacgactagcctggccaatatggcaaaaccctgtctctactaaaaatacaaattttagcagggtatagtggtacgtgcctgtaagtcccagctactcaggagggttggaagagaagtaatccaattagcattgaaaataagagcgccaatttggaaaatcgaatgtctatgatcattttcttccctaaaacagggaagaaagtgaatgtggaaaatccgattttcagcaatattcgcaggacctaaggcaacaaccacatgcctggggcaactatactttccaaatcctgaatattaaaaaggttttcacatggtaatcatcttaatattttctgt

SEQ ID NO: 144906 - DNA, 525 bp, Homo sapiens
agcctcagtcagatttcactttatttgtatcgatgacaatattaactcttcagatttataaaatgacaaaacttgataattacctggaaaccaattttattattacctgggttacccctaaatccatcaagaaaaaccacctaacatattcagtgttaaaaaagagacattacgactagccttggccaatatgggcaaaaccctgtctctactaaaaatacaaattttagcagggtattagtggtacgtgcctgtaagtcccagcttactcaggaggctaaggcaccagaatcgcttgaatctgggaggcagaggtcggcagcgagcagagatcgtgccacttgcactcctggggcggacacagcgagactgtctcaaaaaaaaaaaaaaaaagagagagacaacaatggagacagattggaacatgtatgccctgagaaataaatcaacagctcccattaaaattctcaatacgctagacagatttaaaagtacaatctggtactttctcttttttgagctgga

SEQ ID NO: 144907 - DNA, 1302 bp, Homo sapiens
tagacctgaacgcttccttgggttctgggaggatggttgaggtcttctgctgatctctgattttctgggtcttgtgtgcctcccagaacgtgtgggctgtgttggatctctacgggccagtccggtgttgtgtcaattgtcagttccacgagactggaggagtcagaaggcacccagcctccttcccccagttcagacaccggcagtgagggcgaggaggatgacgagggcgaggagcatggcctgggaggccagaatgaagtgggtattatacccaccaccctcgagttcctggagaaccatgggaagaatatccttttgtctaatgggaaccgtacggtcacacgggtggccagctacaatcagggcatcgttgtcatcaaccaacctctggtgccccagctgctggtgcaggtgcggatagatttcctaaaccgacagtggacatcttcccttgtcctgggagtcatcacctgcgcgcctgagaggctcaacttccctgcttctgcctgtgccctcaaacgggcagcctggctgctgcggggccgtggggtcttccacaacatctcaagccggtctctcctcccagatctgcgagaagtttgggcccaatctggacacgtgccctgaaggcaccatcctgggactgcggctggacagctctggggggctgcatcttcatgttaatggggtggaccagggggtagctgtgccagatgtgccccagccctgccatgcgcttgtggacctctatgggcagtgtgagcaggtgacaatcgtgaaccctgagccaggggctgccagtgggaaaagtgctggaacccaaggggacatggagaaagcagacatggtggacggtatcaaagagagtgtgtgctggggtccaccacctgccgctagtcctctaaagagctgcgagtaccatgccctttgctctcgcttccaagaactcctgctgcttcctgaagattatttcatgcctccgccaaagcgaagcctgtgctactgtgagtcttgccggaagctgcgaggagacgaggcccacaggcgcagaggggagcctccccgggaatatgcactgccctttggctggtgcaggttcaacctcagagtgaatccccgcctggaggctgggacactaaccaagaagtggcacatggcatatcacgggagcaatgttgccgctgtacggagagtgctggaccgaggggagctgggagcaggtactgcctccatcctgagctgccgacctttgaagggagaacctggagtagggttcgaggagcctggcacgaactgtgg

SEQ ID NO: 144908 - DNA, 939 bp, Homo sapiens; identical to SEQ ID NO: 126917

SEQ ID NO: 144909 - DNA, 1026 bp, Homo sapiens; identical to SEQ ID NO: 126918

SEQ ID NO: 144910 - DNA, 870 bp, Homo sapiens
atgggccggaggagagccccggccggtgggtcgctgggacgggcccttatgcgccatcagactcagcggagccgaagccatcgtcacactgactcctgggggctggctgtttccatcggcgtcactgatagggcccctgaaatagtatgctgtcgtacctgcctccagaaggggctggctgtttccatcggcgtcactgatagggcccctgaaatgatacgctgtcgtacctgcctcccgaaggggctggctgtttccatcggcgtcactgatagggcccctgaaatattgcacacaagtgaactcaatgatggctatgattggggtcgtcttaatcttcagtcagtgactgaacagagctcccttgatgacttccttgctactgcagaacttgcaggaacagagtttgtagctggaggagcgactcaagccttcgcgaaagaaaataaccaaaaagcatacaaagaaacgtacggcgtctctcatattacacgccatgatatgctgcagatccctaaacagcagcaaaacgaaaaataccaagtgcctcaattcgatcaatcaacgattaaaaatattgagtctgcaaaaggacttgatgtgtgggacagctggccgctgcaaaacgctgacggaacagtagctgaatacaacggctatcacgttgtgtttgctcttgcgggaagcccgaaagacgctgatgacacatcaatctacatgttttatcaaaaggtcggcgacaactcaatcgacagctggaaaaacgcgggccgtgtctttaaagacagcgataagttcgacgccaacgatccgatcctgaaagatcagacgcaagaatggtccggttctgcaacctggggtatcctctag

SEQ ID NO: 144911 - DNA, 569 bp, Homo sapiens
agcggtcgtgttgccatgggccggaggagagccccggccggtgggtcgctgggacgggcccttatgcgccatcagactcagcggagccgaagccatcgtcacactgactcctggttgcacacaagtgaactcaatgatggctatgattggggtcgtcttaatcttcagtcagtgactgaacagagctcccttgatgacttccttgctactgcagaacttgcaggaacagagtttgtagctgagaaacttaatattaagtttgtgcctgctgaggctagaactggactactgtctttcgaggagagccagagaattaagaagctccatgaagaaaacaaacagttccttgttgtataccgaggagaccaaacctggaaccaaaatactaccccagaagaactcaaacaagcagagaaagataactttctagaatggagacgtcagctttgtccggctagaagaggaacagaagctgatattgactccatttgaacgaaatttggacttttggcgccagctctggagagtcattgagagaagtgatattgtggtccagatagtagatgctc

SEQ ID NO: 144912 - DNA, 556 bp, Homo sapiens
cctattgaggccgtcggaccggcccggattcccggtcgaccccgcgtccgcccacgcgtccgcccacgcgtccgcccacgcgtccggtgaggggaggcagaaatggaggaacgggcgttcgtcaaccccttcccggactacgaggccgccgccggggcgctgctcgcctccggagcggccgaagagacaggctgtgttcgtcccccggcgaccacggatgagcccggcctcccttttcatcaggacgggaagatcattcataatttcataagacggatccagaccaaaattaaagatcttctgcagcaaatggaagaagggctgaagacggctgatccccatgactgctctgcttatactggctggacaggcatagcccttttgtacctgcagttgtaccgggtcacatgtgaccaaacctacctggctccgatcccttgattaccgaaaaaaaaccacttcggaaattgaatggccgcagggtcaccttcctctgtggggatgctggccccctggctgttggagctgtgatttatcacaaactcagaagtgactg

SEQ ID NO: 144913 - DNA, 1070 bp, Homo sapiens
atgactggaagttatctacgagaagtcatgcactgctgagcctcaggccaggccaggcaaggggtgtggtgaagtcaataatcattgctggaaaaggcatctctagctccaaagtctttacttccacacgctgtggccctcctgtctgcaacacctgctctgggttgttggggaagaggggacaaagttatgtgggggtgttggttgtacaatactctagggtgtgccgagaatttctgaggacttccacttcttggtgggtgccagccttccccatcaattgatggacatttgaaaagaccacttatgattaaaaacctgtctcgaactgcccagtatccacttcactctgcattgcagaaacgctgggctgaaagttccactatttaaaatagtagtgtttttttttgtttgtctgtttgttttaactctttgtaggtctgagacctttgagaaccttatgaaagctttaatgctctggaaaaaacatacaagaataaatacattaaatactgaacaatttttaggggtttccatagacccctcctgaaatcccaactatggaaccccctggggtgatggaccccaagttaagaacccctgagttaacagttcctgtgggtaagcattttcttttgagatgcagataacccagaggaatgatcagtctccctcctgcctgtgaatgactcaatgggtgtgggaaggtggaagggagggttttggaggaaggggcagggaagctggatggtatactacggggaaaggtttgggaatggtttggagatttcagcagacagcactcgatcaatgagttcagtgagtacttgactgagaacatctaaagagtaggagacagatcagaaagggagatagttattctgaagacaaatttcacttacttccaagttttccctaaggctggctgtggttgcttttcttttcttttctctttctttctttcttttttttttttgcggggggagacagagtctcgctctgttgcctaggatgaagtgcagtggtgtgatctcagctcactgcaacctctgcctcccaggttcaagcga

SEQ ID NO: 144914 - DNA, 340 bp, Homo sapiens
  misc_feature (1)...(340): n = a,t,c or g
ttttattttggggtgagcactaggcagagggatatagcagttctgtttcccaaggctttgtggttgacatggnnnnnnnnnnnnnnnnnnnnnnnnnnnnncaactttttgttataaaaatttcaaacagaagtatcacatttttttctttgtaatctcatatgctcttattttattttttttctcttatttcatttcttctgatacacttttttattcgttatttttttttctcttattttgttttatgttttttcttttcattatgatctatcatttttcgttttgttaatcagatatagttacattaaatcattactatttttgatgtcttgtaacg

SEQ ID NO: 144915 - DNA, 383 bp, Homo sapiens
  misc_feature (1)...(383): n = a,t,c or g
tctccgcacgttctgtgtctccacaaagaagattcctgtagactcgtgggcctcgggtcccccactcaggtagtgcttcctcacctgctcagaagtcaggctgcactggacatagaactcggcactggctcggccagcactggtctnatttcgggcgatgcccaacagcaggggctggctcagggtgagcagcggcaggttcacctcatcacagatctcctgaaggacactggaaaagagttcatgtaccaccagctgcccagcgaggtcctggtgctgggggctgccaccagggcacagggcctgaggctcagggtgcccaccaggtacgtccaccagcccagggtggttgagtgcaggcggaacttgggggcgtcgaagag

SEQ ID NO: 144916 - DNA, 3180 bp, Homo sapiens
acgcgtccgctggagcttccgggccctggaaaggggtccccgcgcgctccgtttcggaggcagacccctgggtttgggggacatgggcatttggggcgcctgaacccaagacctctggatggtagggatgcccgggcgtcctggataccctgcgggactcggggctcctgcggggaagatggcacgttttactgcccaaggagtggtcaggggggtggagaagcgctgcggataccctcaggaggtctgcgacagagggggctagctgcgcagcccaggagtggtagtggcccccctggatgacaggcctggccgtatcctcccccagagctgccccgttcagaccatggatcctgaggtgaccttgctgctgcagagccctggcgggggcctgccccaggagcaggatacaggccgagctgatccccgcccatgaccgtcgcccactgccaggtgtggacgaggccatcactgccatctgggagacccggctaaaggcccaacccctggcctctttcgacgcccccaaagttccgcctgcactcagccaccctggcgcctattggctctcgggggccacagctgctcctgcgcctggggccttacttcctaccgagacttcctgggcaccaacttggtccagctcagctgccttggctgcgacagaggggttgccacccgacttggggtgacacgcagggcctaatcttggcggacccactgggggttggggcgcttgcaactaagccacaaccgaatgactttcctttgtccttcctgcgccgctcccggcaggtggctgaggcccctgggctggtggacgtacctggtgggcaccctgagcctcagtcctgtgagaaactagaaaacacgggaggaaagattgggcacaggaagaagatgccctactccacccctgccccctgtgtatctcctttgaagctggacctctggttgtctgtcagggaaaggacaccagactcaggatcactaactctcttacactgtgccacatcagaccctcaaggccagcaggccctgtgccctggtggcagcccccagcaccaggacctcgctgggcagctggtggtacatgaactcttttccagtgtccttcaggagatctgtgatgaggtgaacctgccgctgctcaccctgagccagcccctgctgttgggcatcgcccgaaatgagaccagtgctggccgagccagtgccgagttctatgtccagtgcagcctgacttctgagcaggtgaggaagcactacctgagtgggggacccgaggcccacgagtctacaggaatcttctttgtggagacacagaacgtgcggagattgcccgagacggagatgtgggctgaactctgcccctcggccaaaggcgccatcatcctctacaaccgggtggacgtggtcttggcatccacgccaatgagaatctgcccgcccgccgccatgccgcccttactgcccctgcgcctgtgccggctgtggccccgcaaccctccctcccggctcctcggagcggccgccgggcagcggtccagacccagtacttattatgaactgttgggggtgcatcctggtgccagcactgaggaagttaaacgagctttcttctccaagtccaaagagctgcacccagaccgggaccctgggaacccaagcctgcacagccgctttgtggagctgagcgaggcataccgtgtgctcagccgtgagcagagccgccgcagctatgatgaccagctccgctcaggtagtcccccaaagtctccacgaaccacagtccatgacaagtctgcccaccaaacacacagcagctcctggacaccccccaacgcacagtactggtcccagtttcacagcgtgaggccacaggggccccagttgaggcagcagcaacacaaacaaaacaaacaagtgctggggtactgcctcctcctcatgctggcgggcatgggcctgcactacattgccttcaggaaggtgaagcagatgcaccttaacttcatggatgaaaaggatcggatcatcacagccttctacaacgaagcccgggcacgggccaggtctgtccctgctctattctgctccctgctccctgtccaggaaccacacttcgggatccctatcccaaccacccaggcccctgtctcccagcctgatgcccctggccaccagaggaaagtggtgtcatggatagatgtgtatactcgcgctacctgccagccccgggaggtggtggtgcccttgactgtggagctcatgggcaccgtggccaaacagctggtgcccagctgcgtgactgtgcagcgctgtggtggctgctgccctgacgatggcctggagtgtgtgcccactgggcagcaccaagtccggatgcaggtactgggcacgtggggcaacgggcaggggatgcagatcctcatgatccggtacccgagcagtcagctgggggagatgtccctggaagaacacagccagtgtgaatgcagacctaaaaaaaaggacagtgctgtgaagccagacagccccaggcccctctgcccacgctgcacccagcaccaccagcgccctgacccccggacctgccgctgccgctgccgacgccgcagcttcctccgttgccaagggcggggcttagagctcaacccagacacctgcaggtttagctgcctctcaactgcaggttcattacttcagttgacagatgtttggtggctgctggggcgcctgaaaataagtctggtgggggaacaggcccagccagatcattccagtcatgagtcacagcccaggtgcacaggtagagtactgtccatctgcctgagcgccgtggccacggccacgggggccgagggcaaaaggaagctgcagatcggggtcaagaagcgggtggaccactgtcccatcaaatcgcgcaaaggggatgtcctgcacatgcactacacggggaagctggaagatgggacagagtttgacagcagcctgccccagaaccagccctttgtcttctcccttggcacaggccaggtcatcaagggctgggaccaggggctgctggggatgtgtgagggggaaaagcgcaagctggtgatcccatccgagctaggcggtgcaaccctggtgttcgaggtggagctgctcaaaatagagcgacgaactgagctgtaa

SEQ ID NO: 144917 - DNA, 674 bp, Homo sapiens
ttttttttttttttttccaagaataaagtcgtttattaattttcagagcggcgggagtagggctgtgggaccctagggccgctccagtgggatttccctgaacccggttgtaaagggatgatggcgcctttggccgaggggcaaagttcagcccacatctccgtctggggcaatctccgcacgttctgtgtctccacaaagaaaattcctgtagactcgggggcctccgggtcccccactcaggtaagtgcttccctcacctgctcagaaagtcaggctgcactggacatagaactcggcactgggctcggcaacaacttggtctcatttcggggcgatgccaaacaagcaggggctgggctcagggtgaacaagcgggcaggttcacctccatccacaagatctcctgaaggacactggaaaagagttcatgtaccaccagctgcccagcgaggtcccgggggttgggggttgccaccacgggcacacgggcctgaggctcagggtgcccaccaggtacgtccaccagcccacggggcctcagccacctgccgggagcggcgcaggaagacaaggaagtcatcggctgtggctagtgcagcgcccacccccagtgggtccgccagataggcctgcgtgtcaccccagtcggtggcaccctgctgtcgcagcca

SEQ ID NO: 144918 - DNA, 1831 bp, Homo sapiens
gaattccgggctcgctcagctgctgcccagcctcggctgtgaggataggctggctgggcagcacgtctctccccacagggctccctgagaccaccaggaagagcccccaaccaatcttgggattctcccttcgtgcggttgtctgggacctttttccagggtcaaagcagatcgtgaggaggaagctgagatgccctgtatccaagcccaatatgggacaccagcaccgagtccgggaccccgtgaccacctggcaagcgaccccctgacccctgagttcatcaagcccaccatggacctggccagccccgaggcagcccccgctgcccccactgccctgcccagcttcagcaccttcatggacggctacacaggagagtttgacaccttcctctaccagctgccaggaacagtccagccatgctcctcagcctcctcctcggcctcctccacatcctcgtcctcagccacctcccctgcctctgcctccttcaagttcgaggacttccaggtgtacggctgctaccccggccccctgagcggcccagtggatgaggccctgtcctccagtggctctgactactatggcagcccctgctcggccccgtcgccctccacgcccagcttccagccgccccagctctctccctgggatggctccttcggccacttctcgcccagccagacttacgaaggcctgcgggcatggacagagcagctgcccaaagcctctgggcccccacagcctccagccttcttttccttcagtcctcccaccggccccagccccagcctggcccagagccccctgaagttgttcccctcacaggccacccaccagctgggggagggagagagctattccatgcctacggccttcccaggtttggcacccacttctccacaccttgagggctcggggatactggatacacccgtgacctcaaccaaggcccggagcggggccccaggtggaagtgaaggccgctgtgctgtgtgtggggacaacgcttcatgccagcattatggtgtccgcacatgtgagggctgcaagggcttcttcaaggtaccgcgcagccccaggtggggccttttgttggaaatggagagaggctggcctcatcccattgggacctgtggtctccccctgggttctcctcctagctaagtcctgtcctgcagggtgggatcagccctgccaggtgggccgccttcctggagacccgtagatgccagggctggaagctttcatttgccgggacactcgggcccatgggattgcacagagctggagggaggggtgagataggggcagataggagctgcaggggtgcctggcgagcctctggttttcctctgctcctctgcctgtcctctcccaactcaaggttctagtgggaagggtgcccccaggctctcatgttcctggcgtgagatgaaaggatcctgcggagggtttggttcttgagggctgggggtggacttgggaacaggctgtgtgtttgtcccagcgatggtgcctgcttagcttcccgtccccaccccccagccccttggccctctcctgtctgccctagggagaaggcaggtggacaagggcccatgaaaaaatacaggtgtctagactgccagggagaccctggccccccagtagtgtgtcctggggacttcctcagagcgagaaacctccccccaatgtcttcaagacttttctctcccccccccccaaccccgtctctccctcccttgccacccaaatgttagaaaaatagctgtgaacagagagcgcttttgtctgcaatggcagcaggatctggacggtccggaattc

SEQ ID NO: 144919 - DNA, 2676 bp, Homo sapiens
atgggcgcccctgcggtgcagagcagctcagggccggctggtgcgcgaccccggaaagcgggggtggagaggcgagcggagcccgcggggccagggctccctgagaccaccaggaagagcccccaaccaatcttgggattctcccttcgtgcggttgtctgggacctttttccagggtcaaagcagatcgtgaggaggaagctgcccatccctggccaggctgtcctagtgcaggcagatgtggccaccctcacctctcgcagggtgctgcatgcctgtggactggtgccactggagatgccctgtatccaagcccaatatgggacaccagcaccgagtccaggaccccgtgaccacctggcaagcgaccccctgacccctgagttcatcaagcccaccatggacctggccagccccgaggcagcccccgctgcccccactgccctgcccagcttcagcaccttcatggacggctacacaggagagtttgacaccttcctctaccagctgccaggaacagtccagccatgctcctcagcctcctcctcggcctcctccacatcctcgtcctcagccacctcccctgcctctgcctccttcaagttcgaggacttccaggtgtacggctgctaccccggccccctgagcggcccagtggatgaggccctgtcctccagtggctctgactactatggcagcccctgctcggccccgtcgccctccacgcccagcttccagccgccccagctctctccctgggatggctccttcggccacttctcgcccagccagacttacgaaggcctgcgggcatggacagagcagctgcccaaagcctctgggcccccacagcctccagccttcttttccttcagtcctcccaccggccttagttcccagcctggcccagagccccctgaagttgttcccctcacaggccacccaccagctgggggagggagagagctattccatgcctacggccttcccaggtttggcacccacttctccacaccttgagggctcggggatactggatacacccgtgacctcaaccaaggcccggagcggggccccaggtggaaagtgaaggccgctgtgctgtgtgtggggaaaacgcttcatgccagcattatggtgtccgcacatgtgagggctgcaagggcttcttcaagcgcacagtgcagaaaaacgccaagtacatctgcctggctaacaaggactgccctgtggacaagaggcggcgaaaccgctgccagttctgccgcttccagaagtgcctggcggtgggcatggtgaaggaagttgtccgaacagacagcctgaaggggcggcggggccggctaccttcaaaacccaagcagcccccagatgcctcgcctgccaatctcctcacttccctggtccgtgcacacctggactcagggcccagcactgccaaactggactactccaagttccaggagctggtgctgccccactttgggaaggaagatgctggggatgtacagcagttctacgacctgctctccggttctctggaggtcatccgcaagtgggcggagaagtatccctggctttgctgagctgtcaccggctgaccaggacctgttgctggagtcggccttcctggagctcttcatcctccgcctggcgtacaggtctaagccaggcgagggcaagctcatcttctgctcaggcctggtgctacaccggctgcagtgtgcccgtggcttcggggactggattgacagtatcctggccttctcaaggtccctgcacagcttgcttgtcgatgtccctgccttcgcctgcctctctgcccttgtcctcatcaccgaccggcatgggctgcaggagccgcggcgggtggaggagctgcagaaccgcatcgccagctgcctgaaggagcacgtggcagctgtggcgggcgagccccagccagccagctgcctgtcacgtctgttgggcaaactgcccgagctgcggaccctgtgcacccagggcctgcagcgcatcttctacctcaagctggaggacttggtgccccctccacccatcattgacaagatcttcatggacacgctgcccttctgacccctgcctgcctgggaacacgtgtgcacatgcgcactctctcatatgccaccccatgtgcctttagtccacggacccccagagcacccccaagcctgggcttgagctgcagaatgactccaccttctcacctgcccaaaggggatgaagggagggaggctcaaggcccttgggggagggggatgccttcatgggggtgaccccacgatgtgttcttatcccccccgcctggccaccggcctttatgttttttgtaagataaaccgtttttaacacatagcgccgtgctgtaaataagcccagtactgctgtaaatacaggaagaaagagcttgaggtgggagcggggctgggaggaagggatgggccccggccttcctgggcagcctttccagcctcctgctgggctctctcttcctaccctccttccacatgtacatgtacataaactgtcactctaggaagaagacaaatgacagattctgaccatttatatttgtgtattttccaggatttatagtatgtgacttttctgattaatatatttaatatattgaataaaaaatagacatgtagttgg

SEQ ID NO: 144920 - DNA, 1616 bp, Homo sapiens
ccaacgcttcatgccagcattatggtgtgcgcacatgtgagggctgcaagggcttcttcaaggtaccgtgcagccccaggtggggccttttgttggaaaaggagagaggctggcctcatcccattgggacctgtggtctccccctgggttctcctcctagctaagtcctgtcctgcagggagggatcagccctgccaggtgggccgccttcctggagacccgtagatgccagggctggaagctttcatttgccgggacactcgggcccatgggattgcacagagctggagggaggggtgagataggggcagataggagctgcaggggtgcctggcgagcctctggttttcctctgctcctctgcctgtcctctcccaactcaaggttctagtgggaaggggtgcccccaggctctcatgttcctggcgtgagatgaaaggatccctgcggagggtttggttcttgagggctgggggtggacttgggaacaggctgtgtgtttgtcccagcgatggtgcctgcttagcttcccgtgcccaccccccagccccttggccctctcctgtctgccctagggagaaggcaggtggacaagggcccatgaaaaaatacaggtgtctagactgccagggagaccctggcccccagtagtgtgtcctggggacttcctcagagcgagaaacctcccccaatgtcttcaagacttttctctccccccgcccaaccccgtctctccctcccttgccacccaaatgttagaaaaatagctgtgaacagagagcgcttttgtctgcaatggcagcaggatctggacggtcccctcccctaagttcccccctccccaccccacactctgacagcttgttccgtgttgcccccccacccagcgcacagtgcagaaaaacgccaagtacatctgcctggctaacaaggactgccctgtggacaagaggcggcgaaaccgctgccagttctgccgcttccagaagtgcctggcggtgggcatggtgaaggaaggtgtgtggctggggtgcggcccaccggggcaagggtaggcttgagtggagtgcgaccaccagggcccccaggcttctgccctggaggacccacaggagggcacgtcttatttccaccccacctctgaaccccaggacttggagggaggcagtctactcctgcctggattgtgagggtggtggcagggggaggttcctatagggtaccttggatctcagggactctgggtcctagggactcggtggggcgcgtctcagcagtggtgtgcacggcttgggctgagaggcccttcctcagatcccttccttcctcacccctacccattcctttgcagttgtccgaacagacagcctgaatgtgccgcggtttcccgctacctttttaatccaagcaccctccagatgccttccctgtcaatctcctcactttcctgtgccggggcacacctggactcagggcccagcactgccaaactggactactccaaggtgaggtcccaccccgtgtctgccttggggaggtctatgagcacatgcagtgcctttgtgcgtgttaggagagctaccccctctggaaggactgaatgagaaaggaggttt

SEQ ID NO: 144921 - DNA, 330 bp, Homo sapiens; identical to SEQ ID NO: 104059
  misc_feature (1)...(330): n = a,t,c or g

SEQ ID NO: 144922 - DNA, 324 bp, Homo sapiens
  misc_feature (1)...(324): n = a,t,c or g
ttgtaataataccactatggaaaattatcaaaccacaaaggatgacagcaacagaggaagagagaaacaaagggtctacaaattaactagaaaacaattaacaaaatggcaatagtaagacctcacctatgnnnnnnnnnnnnnnnnnnnnnnnnnnnnnnnnnnnnnnnnnnnnnnnnnnnnnnnnntgaacgaataaaaaaacaagacttatctatatgttgcctacaagtgactcacttcacctttaaggactcacaaagactgaaagtaaagggatggaaaaaagatatttcacacaaataaaaaccaaaagagaatatg

SEQ ID NO: 144923 - DNA, 310 bp, Homo sapiens
  misc_feature (1)...(310): n = a,t,c or g
nnnnnnnnnnnnnnnnnnnnnnnnnnnnaacgcnnnnnnnnnnnnnnnnnnnnnnnnnnnnnnnnnnnnnnnnnnnnnnnnnnntgtgcctggcatgtcaacatacttattggtaaaagactgaatactttcccatacagatcaggaacaagacaaggatgtatgctcttaccattcctattcaatactatactaaaagatctagtcactgcactaaaaaatcaggatataaaaggcaaacaaatcaaaaagaaataaaactgtccctttttacagaaatgattacccgtgtagataaaaatcaatcatt

SEQ ID NO: 144924 - DNA, 624 bp, Homo sapiens
acactttcttctgacataacagtgttcactagcaacctcaaacagacaccatggtgcatctgactcctgaggagaagactgctgtcaatgccctgtggggcaaagtgaacgtggatgcagttggtggtgaggccctgggcaggttactggtggtctacccttggacccagaggttctttgagtcctttggggatctgtcctctcctgatgctgttatgggcaaccctaaggtgaaggctcatggcaagaaggtgctaggtgcctttagtgatggcctggctcacctggacaacctcaagggcactttttctcagctgagtgagctgcactgtgacaagctgcacgtggatcctgagaacttcaggctcttgggcaatgtgctggtgtgtgtgctggcccgcaactttggcaaggaattcaccccacaaatgcaggctgcctatcagaaggtggtggctggtgtggctaatgccttggctcacaagtaccattgagatcctggactgtttcctgataaccataagaagaccctatttccctagattctattttctgaacttgggaacacaatgcctacttcaagggtatggcttctgcctaataaagaatgttcagctcaacttc

SEQ ID NO: 144925 - DNA, 615 bp, Homo sapiens
atggagaccatctggatctaccagttccgcctcatcgtgatcggggactccaccgtgggcaagtcctgcctcctgcaccgcttcacccagggccgcttccccgggctgcgctcccccgcctgcgaccccaccgtcggcgtggacttcttctcccgcctgctggagatcgagccgggcaagaggatcaagctacagctctgggacacggcgggacaggagcggttcagagaggtggatgcggtaatggtttgggcacctcacagcactgaatgtggtcatcagaaatactgggtcatgacccgtgggaatgggtcttgtaggttaactagatgcaacatcagggacactggcacagctgaggacgccgcggcgatgcgctacgtcgcctcctacctgctggctgccctcgggggtaactcctcccccagcgccaaggacatcaagaagatcttggacagcgtgggcatcgaggaggattacgaccggctcaacaaggttatcagctctgcagcccctgctgctggttccgcccctgctgcagcagaggagaagaaagatgagaaggaggagtctgaggagtcggacgatgacatgggatttggcctctttgattaa

SEQ ID NO: 144926 - DNA, 779 bp, Homo sapiens
ccactgaagcgctcagatggctgtaacgacggccgacccacgcgtccgcccacgcgtccggacacaactgtgttcactagcaacctcaaacagacactattggtgcacctgactcctgtggagagagtctgccgttactgccctgtggggcaaggtgaacgtggatgaaagttggtggtaaggccctgggcaggctgctggtggtctacccttggacccagaggttcctttgagtcctttggggatctgtccactcctgatgctgttatgggcaaccctaaggtgaaggctcattcgcaagaaagttctccgcggggcctttagtggtgggcctggctcacctgggacaacctcaagggcacctttgctcacactgaggtgagcttgcactgttgacaagcttgcacgtgggatcctggagaactttcaggctcctggggcaacgtgctggtctgttgttgctgggcccattcacttttgggaaaagaatttcaaccccaccagttgcaggcttgcctaatcaagaaaattggttggcttggtgttggctaaatgcccttggccccacaagtaatcacttaagcctcgctttccttgctggtccaatttccaattaaaaggttcctttggttccctaagtccaaatacttaaactggggggatattattgaaagggccttgagcatctggattctgcctaataaaaaacatttattttcatcgcatacaagaataaaacaagcgcggccgattaagaggatacttcaggggcgcaagat

SEQ ID NO: 144927 - DNA, 376 bp, Homo sapiens
attacaggcgtgagccaccatgcctggcagaaatagcatttcttaagtttaataacatcccaagcaaatctggttgtgaattttatggaattaaataaagccctgtatttgggacagcttaagcatatatcatggtaatattcagcctcttttttaaggatctatgccatttttccatgtagtgcttcctaatttgattttttttttcttttttttttgagacagagtctccatccccaggctggagtctagtggcgcgattttggctcactgtaacttccgcctcttgggttcaagcaattctcctgcctcagcctcccaagtagttgcgattacaggtgcgttctaccacgccgagccctatgcagctcgtgcc

SEQ ID NO: 144928 - DNA, 637 bp, Homo sapiens; identical to SEQ ID NO: 144817
  misc_feature (1)...(637): n = a,t,c or g

SEQ ID NO: 144929 - DNA, 760 bp, Homo sapiens
  misc_feature (1)...(760): n = a,t,c or g
ggcttactcactatagggctcgagcggccgcccgggcaggtgaacgtctgaggttatcaataagctcctagtccagacgcgcatgggtcagtttcacagaggaggacaaggctactatcacaagcctgtggggcaaggtgaatgtggaagatgctggaggagaaaccctgggaaggctcctggttgtctacccatggacccagaggttctttgacagctttggcagacctgacctgtgcctctgccatcatgggccaccccaaagtcaaggctacatggcaagaaggtgctgacttccttgggagatgccatatgagcacctggatgatctcaagggcacctttgcccagctgagtgaactgcactgtgacaagctgcatgtggatcctgagaacttgaagctcctgggaaatgtgctggagaccgctttggcgattcattttcggcaaagcaattcacccctgaggtgcaggcttcctggcagaagatgggtgactggagtggccagtgccctgtgcttcacaaaacacttggacttcatgtgcatgatgcaaagctttcaaagataggctttattctgccagcaatcaaaatataaaatctattcttgctaggagatcaccaaannnnnatnntnnnnnnncccccggattttttatttagcgggccgcacctttttccccttttagggggggtaaatttatattgggccttgggccggggttttcaaaagcggggggannnnnnnnnnaaagagccc

SEQ ID NO: 144930 - DNA, 574 bp, Homo sapiens; identical to SEQ ID NO: 140220
  misc_feature (1)...(574): n = a,t,c or g

SEQ ID NO: 144931 - DNA, 675 bp, Homo sapiens; identical to SEQ ID NO: 140222
  misc_feature (1)...(675): n = a,t,c or g

SEQ ID NO: 144932 - DNA, 945 bp, Homo sapiens
gagggacgtgccctctatatgaggatggggagcggctgagtctgtcttttccgtccgctcccccctccccccgaggcgccgctccggctgcaccgcgctcgctccgagttttcaggctcgtgctaagctagcgccgtcgtcgtctcccttcagtcgccatcatgattatctaccgggacctcatcagccacgatgagatgttctccgacatctacaagatccgggagatcgcggacgggctgtggcctggaggtgggaggggaagatggtcagtaggacagaaggtaacattgatgactcgctcattggtggaaaatgcctccgctgaaggccccgaggggcgaaggtacccgaagcaccagtaatcactggtgtccgatattgtcatgaaccatcaccttgcaggaaacaagttttcacaaaaagaagcctacaagaagtacatcaaaagattacattgaaattcaattcaaaggggaaactttgaaggaaccagaggaccagaaaagagtaaaacctttttatgacaggggcttgcaggaacaattcaagcacatccttggctaattttcaaaaacctaccagttctttattgggtgaaaacatgaatccagatggcatggttgctctattggactaccgtgagggatgggtgtgaccccatatatgattttcttttaaggatgggtttagaaatgggaaaaatgttaacaaatgtgggcaattattttggatctatcacctggtccatcataaactggcttccggcttggtcatccacacaacaccaggacttaagaccaaatggggactgatggtcatcttgagctcttcatttattttgactgtgatttatttggagtggaggcattgtttttaagaaaaacatgtcatgtaggttgtctaaaaataaaatgcatttaaactcaaaaaaaaaaaaaaaaa

SEQ ID NO: 144933 - DNA, 5799 bp, Homo sapiens; identical to SEQ ID NO: 128377

SEQ ID NO: 144934 - DNA, 467 bp, Homo sapiens
tactctttccattccttaccccagtttttgaagcattaaatgtctctctgtttccaaaagataccataaattttttaagtaaatctgtaaacagaatgaagaaaagtcgcctcaacgacaaacaaaagaggccagccgaaggatgtctgcaggtcagggagacaggaccaggtaacccagctgtcactgaagattatatagagtttgagaatgttggaatatttgaaaatgctcccccaaaaaagctgctgatgagttctggaaatgtcaggagattaatctatacggacactgctgaagaaaaagctctgtctgatctggagctcgcagcccagtcaataatcttcatttttgctggctatgaaaccaccagcagtgttctttccttcactttatatgaactggccactcaccctgatgtccagcagaaactgcaaaaggagattgatgcagttttgcccaataag

SEQ ID NO: 144935 - DNA, 1707 bp, Homo sapiens
gggaagctccaggcaaacagcccagcaaacagcagcactcagctaaaaggaagactcacagaacacagttgaagaaggaaagtggcgatggacctcatcccaaatttggcggtggaaacctggcttctcctggctgtcagcctggtgctcctctatctatatgggacccgtacacatggactttttaagagactgggaattccagggcccacacctctgcctttgttgggaaatgttttgtcctatcgtcagggtctctggaaatttgacacagagtgctataaaaagtatggaaaaatgtggggaacgtatgaaggtcaactccctgtgctggccatcacagatcccgacgtgatcagaacagtgctagtgaaagaatgttattctgtcttcacaaatcgaaggtctttaggcccagtgggatttatgaaaagtgccatctctttagctgaggatgaagaatggaagagaatacggtcattgctgtctccaaccttcaccagcggaaaactcaaggagatgttccccatcattgcccagtatggagatgtattggtgagaaacttgaggcgggaagcagagaaaggcaagcctgtcaccttgaaagacatctttggggcctacagcatggatgtgattactggcacatcatttggagtgaacatcgactctctcaacaatccacaagacccctttgtggagagcactaagaagttcctaaaatttggtttcttagatccattatttctctcaataatactctttccattccttaccccagtttttgaagcattaaatgtctctctgtttccaaaagataccataaattttttaagtaaatctgtaaacagaatgaagaaaagtcgcctcaacgacaaacaaaagcaccgactagatttccttcagctgatgattgactcccagaattcgaaagaaactgagtcccacaaagctctgtctgatctggagctcgcagcccagtcaataatcttcatttttgctggctatgaaaccaccagcagtgttctttccttcactttatatgaactggccactcaccctgatgtccagcagaaactgcaaaaggagattgatgcagttttgcccaataaggcaccacctacctatgatgccgtggtacagatggagtaccttgacatggtggtgaatgaaacactcagattattcccagttgctattagacttgagaggacttgcaagaaagatgttgaaatcaatggggtattcattcccaaagggtcaatggtggtgattccaacttatgctcttcaccatgacccaaagtactggacagagcctgaggagttccgccctgaaaggttcagtaagaagaaggacagcatagatccttacatatacacaccctttggaactggacccagaaactgcattggcatgaggtttgctctcatgaacatgaaacttgctctaatcagagtccttcagaacttctccttcaaaccttgtaaagaaacacagatccccttgaaattagacacgcaaggacttcttcaaccagaaaaacccattgttctaaaggtggattcaagagatggaaccctaagtggagaatgagttattctaaggacttctactttggtcttcaagaaagctgtgccccagaacaccagagatttcaacttagtcaataaaaccttgaaataaagatgggcttaatctaatgta

SEQ ID NO: 144936 - DNA, 1599 bp, Homo sapiens
ccagcccagcaaacagcagcactcagctaaaaggaagactcacagaacacagttgaagaaggaaagtggcgatggacctcatcccaaatttggcggtggaaacctggcttctcctggctgtcagcctggtgctcctctatctatatgggacccgtacacatggactttttaagagactgggaattccagggcccacacctctgcctttgttgggaaatgttttgtcctatcgtcagggtctctggaaatttgacacagagtgctataaaaagtatggaaaaatgtggggtacgtcttccctgtttggaccacattacccttcatcatatgaagccttgggtggctcctgtgtgagactcttgctgtgtgtcacaccctaatgaactagaacctaaggttgctgtgtgtcgtacaactagggaacgtatgaaggtcaactccctgtgctggccatcacagatcccgacgtgatcagaacagtgctagtgaaagaatgttattctgtcttcacaaatcgaaggatttgtgcaacgaccagcaccatcaagatgcagacccattccgtcaccatgtggctccctcctgctgtcctacagtcacaacatggagtttgtctttttctctgacagtctttaggcccagtgggatttatgaaaagtgccatctctttagctgaggatgaagaatggaagagaatacggtcattgctgtctccaaccttcaccagcggaaaactcaaggagaaaagacatcacaaaattcattacaaaatgtcacttactgctccatgctggagaaagccatatccttctgggacttgagtctgcacatttaactacagcatctttggggcctacagcatggatgtgattactggcacatcatttggagtgaacatcgactctctcaacaatccacaagacccctttgtggagagcactaagaagttcctaaaatttggtttcttagatccattatttctctcaataatactctttccattccttaccccagtttttgaagcattaaatgtctctctgtttccaaaagataccataaattttttaagtaaatctgtaaacagaatgaagaaaagtcgcctcaacgacaaacaaaagcaccgactagatttccttcagctgatgattgactcccagaattcgaaagaaactgagtcccacaaagctctgtctgatctggagctcgcagcccagtcaataatcttcatttttgctggctatgaaaccaccagcagtgttctttccttcactttatatgaactggccactcaccctgatgtccagcagaaactgcaaaaggagattgatgcagttttgcccaataaggtgaggggatgacccctggagatgaagggaagaggtgaagccttagcaaaaatgcctcctcaccactccccaggagaatttttataaaaagcataatcactgattccttcactgacataatgtaggaagcctctgaggagaaaaacaaagggagaaacatagagaacggttgctactggcagaagcataagatctttgtacaatattgctggccctggttcacctgtttactgttatcacaataatgctaagt

SEQ ID NO: 144937 - DNA, 1165 bp, Homo sapiens
  misc_feature (1)...(1165): n = a,t,c or g
gatatgcagcaatcccggttgacctacgcgtcacaccatctaccacttctcttccctttaatagattgtcaagaggataaagtttcctgtttgaaaatatattttactggtattgtgctttcctcatatcacagattggtaaagaatcattttaagtccaagactcttattttacatattctgcaattaaaggtcctatgaggctacctgccgactgctgacatgtagtgtgtggtaaatgtgagtgtttcacagcctggagtgaacaggggtcttctctgagaattgaggttgcaaggctggctaactcagctttgccttcacgagccctagaggccagccgaaggatgtctgcaggtcagggagacaggaccaggtaacccagctgtcactgaagattatatagagtttgagaatgttggaatatttgaaaatgctcccccaaaaaagctgctgatgagttctggaaatgtcaggagattaatctatacggacactgctgaagaaaaaggtagaagaataaaagatccagtacttcttcctgggtaagcagttatgaccagagatggaaccggcaactctttggccagaaagctgtttccaaaagacagagaagatgagaaccagggagggcaaaggcgaaaaagcaattggacatgatagctagatttgtttcaggaaaacatcctgctttccaaggatttagatgaatgtttttgttcactggtgactcaggtaacacgtcttcaagaagccatatggaggttgagggagggaagtcaagaagggaggttgaggactgcacttttgatttacttctgacttcacgagtcactttctgccaaagaaatctctccttttgcttctagcaccgactagatttccttcagctgatgattgactcccagaattcgaaagaaactgagtcccacaaagctctgtctgatctggagctcgcagcccagtcaataatcttcatttttgctggctatgaaaccaccagcagtgttctttccttcactttatatggaactgggccacttcaccctgatgtccaggcaggaaactgcaaaagggagattgatgcagttttgcccaataagggcaccacctacctatggtgccgtgggtacagatgggagttacctttgacngggtnggtgga

SEQ ID NO: 144938 - DNA, 428 bp, Homo sapiens
agaaaatagtgacagcccttgtccctcactccagaattaaacaacaacaaaccatacacagcacattttccaggtacttttatagagaatgactgataaccaagaatcagaatacatttcttgcacaaaactgttggttttgaagaaggtgctgtaaaggcatcagtacttcatgtcactgtattatcactaatgaaatttttatttttattttttttgaggcagagtctcactctgtcgcccaggctggagtgcagtggtgccgtcttggctcactgcaagctctgcctcccgggtttacgccattgtcctgcctcagctactcgggaggctgaggcaagagaatggcttgaaaccaggagtcggaggttgcagtgagctgagatcgccactgcagtccagtctggggacagagcaagactctgttt

SEQ ID NO: 144939 - DNA, 457 bp, Homo sapiens
gagacagagtctcactcagtctgtcgcccaggctagagtgcaatggcatgatatcgactcactgcaacctccacttcccaggttcaagtgattctcctgacacacccttcaagtagctgagattacaggtgtgcaccaccatgcccagctaatttttgtatttttagtagagacgaggtttcatcacattggccaggctggtcttgaactcctgacctcaagtgatctgcccacctcagcctccccaagtgctgggattataggcgtgagacactgcgcctgggccagaattacttttcaaagaacaaaatgttttagtatttaaatttgtgaaatgaactcaggagtgaacacttccattaatcctgaaatagtaaccattatagcataaaaatgtagaaagatattgtgtgataaagtctcttaagtgctcgtgccgaattcttgagcctcgagg

SEQ ID NO: 144940 - DNA, 450 bp, Homo sapiens
  misc_feature (1)...(450): n = a,t,c or g
taacctgggaaaaattcccaaaaaaagtttagcctggggccntggttacccgggnagccntgtaattccngggcttacttcgggaggcttaaggccaggaaaatcgctttgaaccccaggaggccagaggttncagtgacccgaggaggccacccttnccacttccagcctgggcaacaagagtgaaactacgtctcacaaaaaagaaaaaaattgaatagccctataaactacaacggaaattgaattcatagttttaaaactccccaaaaacgaaacctctaggtccaaatggtttcactgcggaattctaccagacgtttaaaaaaggaatgaacaccaattctagaccatcttttgcagaaaatagatgtaacacttccctatttattttataaaactgattttactctgacactaaaaccaaagacaatacaaaaaactcgtgcc

SEQ ID NO: 144941 - DNA, 334 bp, Homo sapiens
aaaaaacagttcccttataaccatgtgcgtttttatcatgagggaccaggttagcctctcagccagcatgatgagctcctaaaagctcatctgattgtaggcatttgtgtccaggtcctccatgatgtgttctatgaccttgtcattcatattctccttcatgagaaaattgtgcagatctattcgcgccagctcttggaattccccctggttcagggtgtctgggtgccccagcttcacagagtattggtggaaggtgttgatgatggtctatatgttgcgttccagctgagacattttgcaagtcatcgtcttgcactctgtcaaagccgag

SEQ ID NO: 144942 - DNA, 953 bp, Homo sapiens
ggaattcccgggtcgacgatttcgtccgattccttctttccttccctgacccaacttccttccaaatcctcctcctagaagccctccttggttggccctgcctactttaaagcttctttcacattttcttaggtcatgttcccctggggcctcctgccctcaaatgctttgctttttggcactctgtagatattctaaaaaatcattttgtacatgtgtgtgacaggccatctcccagttaagttgcagcctgtgctttctttttattttgcacttcccccactatttctgtgagtgcttagtaggaagtgtcaaagaagcttgacagcattttcttctaagtgtcccaactcttggttttccattacacagacagagtgcaagacgatgacttgcggaatgcctcagcatgtaacgcaacagtagagacccatcatcaacacctcccaccaatactctgtgaagctgggccaccccagacaccctgaaaccagggggagattcaaagagctggtgcgagaaagatctgcaaaattttctcaagaaggagaataagaatgaaaaggtcatagaacacatcatgggaggacttggacacaaatgcagacaagcagctgagctttcgagggagttcatcatgctgatgggcgaggcttaacctggggccttcccacggaggaagattgcacgagggttgacggagggccctggcccaccaccataagccaggccctgggggaggggcaccccctaaagaccacagtgggccaagattcacagtgggccacggccacggccacagtacatggtggccacggccacaggccactaatcacggaggccaggccaccctgcctctacccaaccataggccccggggcctgttatgtcaaactgtcttggctgtggggctaggggctggggccaaataaagtctcttcctccaagtcaaa

SEQ ID NO: 144943 - DNA, 637 bp, Homo sapiens; identical to SEQ ID NO: 144817
  misc_feature (1)...(637): n = a,t,c or g

SEQ ID NO: 144944 - DNA, 789 bp, Homo sapiens
  misc_feature (1)...(789): n = a,t,c or g
gacactcgctttttggaacgtctgaggttatcaataagctccgtagtccagacgcccatgggtcatttcacagaggaggacaaggctactatcacaagcctgtggggcaaggtgaatgtggaaagatgctggaggagaaaccctgggaaggctcctggttgtctacccatggacccagaaggttctttgacagctttggcaacctgtcctctgcctctgccatccatgggcaacccccaaagtcaaggcacatgggcaagaaggtgctgacttccttgggagatgccataaagcacctgggatgatctcaaagggcaccttttgcccaagcctgaagtgaactgcacttgtgacaaagctgcattgttggatcctgaggaactttcaagcttcctgggggaaatgttgctgggtgacccgtttttgggcaatcccattttcgggcaaaagaatttcacccctggaggttgcaaggctttcctggcataagcagaagatggcagaagatggtgacttggagttggccagtgcccttgttccttccagataccactgaagctcaattgcccatgaatgcagagcttttcaaggatatggctttattcttgcaagcaattacaaataataaatctatttctgctaagagatcaccaaannnnnatnntnnnnnnncccccggattttttatttagcgggccgcacctttttccccttttagggggggtaaatttatattgggccttgggccggggttttcaaaagcggggggannnnnnnnnnaaagagccc

SEQ ID NO: 144945 - DNA, 637 bp, Homo sapiens; identical to SEQ ID NO: 144817
  misc_feature (1)...(637): n = a,t,c or g

SEQ ID NO: 144946 - DNA, 781 bp, Homo sapiens
  misc_feature (1)...(781): n = a,t,c or g
gacactcgctttttggaacgtctgaggttatcaataagctcctagtccagacgccatgggtcatttcacagaggaggacaaggctactatcacaaagcctgtggggcaaggtgaatgtggaagatgctggaggagaaaccctgggaaggctcctggttgtctacccatggacccagaggttctttgacagctttggcaacctgtcctctgccttctgccatcatgggcaaccccaaagtcaaggcacatggcaagaaggtgctgacttccttgggacgatgccataaaagcacctgggatgatctcaaagggcacctttgcccaagcctgaagtgaacctgcacctgtgacaagcctgcatgtgggatcctggaggaactttcaagctcctggggaaaatgttgctgggttgacccgtttttggcaatcccattttcggcaaaagaatttcacccctgaaggttgcaggcttcctggcaaaagcagaagatggcagaagatggtgacttggagttggccagtgcccttgttccttccagataccactgaagctcaattgcccatgaatgcagagcttttcaaggatatggctttattctgcaagcaattacaaataataaatctatttctgctaagagatcaccaaannnnnatnntnnnnnnncccccggattttttatttagcgggccgcacctttttccccttttagggggggtaaatttatattgggccttgggccggggttttcaaaagcggggggannnnnnnnnnaaagagccc

SEQ ID NO: 144947 - DNA, 330 bp, Homo sapiens
  misc_feature (1)...(330): n = a,t,c or g
aattagnnnnnnnnnnnnnnnnnnnnnnnnnnnnnnnnnnnnnnnnnnnnnnnnnnnnnnnnnnnnnnnnnnnnnnnnnnnnnnnnnnnnnnnnnnnnnnnnnnnnnnnnnnnnnnnnnnnnnnnnnnnnnnnnnnnnnnnnnnnnnnnnnnnnnnnnnnnnnnnntagctctctgggcttagacttagtttgcggtgacatggccaaatgcaccaagaaagtcagaatcatcagtaaatatgggacccgctatggggcctccctccggaaaatggtgaagcagaattgcaatcacccagcacaccaagtacatttgctcttctcgtgcc

SEQ ID NO: 144948 - DNA, 355 bp, Homo sapiens
ggcacgagccaccatggtgctgtctcctgccgacatgaccaacgtcaaggccgcctggggtaaggtcggcgcgcacgctggcgagtatggtgcggaggccctggaaaggatgttcctgggcttactcaccaccaagacctacttctcgcacttcgacctgagccacggatctgcccaggttaaaggccactgtatgaaagtggtcgacgcgctgactcaacgccggtatcaacgtagacaatcttgcccaacgctctagtacaccctgattgacctactcacaccaatcttttgtaggtcactactcaatttctacttgataagcaattcccttttcataatcatctctgttcac

SEQ ID NO: 144949 - DNA, 413 bp, Homo sapiens
  misc_feature (1)...(413): n = a,t,c or g
actatgtctctaaaatgtagtgaggactcttcttgtcttttaaagttttccccaagtcttcagtttttattttctgcgtgatgggtaagttcttcattcccaatagagttcaggggattggggctatctgagagacaactgggagatagctcaagaggggttgagaaaaaactgagctggactcctgcctgatcccccattacggctaggatgaatgtgggggtggcacacagcgaagtaaaccccaacacccgagtgatgaatagccgaggcatctggctggcctacatcatcttggtaggattgctgcatatggttctactcagcatccccttcttcagcattcctggtggctggaccctgaccaacgtcatccataaccttgctacgtatgtcttccttcatacggngaa

SEQ ID NO: 144950 - DNA, 846 bp, Homo sapiens
cccacgcgtccgcccacgcgtccgaaccaactgtgcttctgcattacagaccaccaaccaatgggtggtggcagcgctgattctgttcctccaataggaaaggggcagaaggagaggcgttacttcctggagacttcaggtgtggtagccggcgccgcgcccatagccggacgggggatctgagcgtggcaggagttgaagtgtgggggtggcacacacgcgaagtaaaccccaacacccgagtgatgaatagccgaaggcatctggctggccctacatcatcttgggtaggattgctgcatatggttctactcagcatcccccttcttaaagcattccctgttgtctgggacccctgaccaacggtcatccaataaccctggctacgtatgtcttccttccatacagacggtgaaaggggcaaccctttgagactcctgacccaaggaaagggctcggcttacttgacacacttgggaagcaaatgggactatggggcttccagttttacctcttttcccgcaaagttccctcaagcatctcttcctattggtggctccaatctccctgggccaagctttctataaccaaagtaatggatggcttgcgaactttcctcatcaaacacaagccctcattgctaagtgtactgctggccggaagttgccccagttccatagggttcgtgtctttggcatcaacaaatactgagggatgggttttggggcagctccatccggcatggggaaggcactgaaacagaggactataaaacatccttctcttattctccatactgtcttctacacctttaaagcctgagaactataaaaaaaaaaaaaaaaa

SEQ ID NO: 144951 - DNA, 351 bp, Homo sapiens
ggcacgagcgggacgagcggtacgagggaacgtatgagggggcaataagctactagtccagacggccatgggtcatttcacagaggaggacaaggctactatcacaagcctgtggggcaaggtgaatgtggaagatgctggaggagaaaccctgggaaggctcctggatggctacccatggacccagaggggctttgacagctttggcaacctgaactatacctctgacgtcatggtcgaccccaaattcatgggacatggcatgaaggtgctgacttacttgggagacgccttatgcgacctggatgatactaacggcaactttgcccatgtgagtactgtgatgtgtag

SEQ ID NO: 144952 - DNA, 921 bp, Homo sapiens
ttttttttttttttatcacattttctttagtactttattgttttacaagtgaacacttaaaatattcaaccccacctactcccgacaaaaaaggcatattaaattgtcccatactaatgttttgaataagcctaacctctccctttgtttctactaagagaggtttctttttggctacaagtaacaatatacatatacccaaagcaaatggaacaatataaaggaatatctcacataacaaaaagtccaaagggtaaagcagttcctgggattggttaattcaggaggcacaattcagggtgctttctatctacatccccactattctcaggtgtgataggctttcatctcccatacttggtcctttcatgggccatcggaagggctgttgcagattagctttcaaacatccctttccacatatcttcactgagaagcagaagagggatgctgggcaaatccctaacttgtatcaattgttaagagcaacagaaaatttcttattcaaagccttcagacttcctttgtctcgttagcctagattccatcaaatgatcaagtaagccaattaccatgattggcacagaatctaatcaacactcaccctcactaggctagggaagcaccctattctatagcacaaggcagccatacagagttttaggccaaaaaaaaagaaaaaaaaactggggctttgtcagcaaggcggcaacccaaccccccaacacaaaacaccccacacccccacccacccaaccccaccccacaccaccccccccccccctcaccacccaccccaaccacactccccaccaccctttcttattctccaaaagcttctactaattgctgttactatctttgatcctacttactgtgtcattagctattcctgggtcattatgacttttaataaacttt

SEQ ID NO: 144953 - DNA, 341 bp, Homo sapiens
gcacgaggaaggatttgtaaaccccggagcgaggttctgcttacccgaggccgctgctgtgcggagacccccgggtgaagccaccgtcatcatgtctgaccaggaggcaaaaccttcaactgaggacttgggggataagaacgaaggcgaatctattaaactccctgccttgcccacgatcgcaccgagactcacttcaacgtgaaaacgacaacacatctcacgagcctcccacaatcctactgccaaatacaggcggttccactgaattcactcacgctcctctttgcacggcccacaactgctgctcaccacactccacccgaactgccaatgcaggc

SEQ ID NO: 144954 - DNA, 485 bp, Homo sapiens
  misc_feature (1)...(485): n = a,t,c or g
ggcacgagctgaccatctgctgtgtgccccgaccccccctaccctgctcctccaccaagcctgatgctaagggctataaaccactggcccaacagaagcttggttcccagagaactggtccctgcctgggacatgctccttgctacagccccttgtgggagctcagagggcatggctgctccccctacggtccctcgccagggggnctgtctctttatggcaggaagcaatgaggctccccaagaacacacctgaggaaaaggacaggcgcacggcggccctacaggagggtctgaggcggccagtctctgtgccgctgacgctggctgaaaacggagcttttgttgtggtcggatatggagaatctgtcggatatatattggtatgcgagcgagtgagtttaatcggatagatggaatccctattggtaagaaggtgttactttacaaagtgctttgtgttgagtgagatttggagtacgtgcg

SEQ ID NO: 144955 - DNA, 379 bp, Homo sapiens
aaattcaaaattttctttttagaaataatgttattcccttataaaatagtatgcattacagaataaagacaatttgtctagtgtaaattcatttttatagggttaaaattttttttcatattttgtgcttctatatttttatacaaatatgtcattattcctttattttttattttttttgcagacagggtctctgtcacccagactggagggcagtggcgcaatcttggctcactgcaacctctgcctcctgggctcaaacgatcctcccacatcagcctcccgagtagctgggactgcaggcacgcaccatcatgcctggctaatttttgtattttttatagagacagggtattgatcggagctctctcctcgtgcc

SEQ ID NO: 144956 - DNA, 315 bp, Homo sapiens
cgaagatggaggcaaggaagcagagagagagcatgcgaggaagagaggcagagagagagaaagagaaggggtatgagaggagtagtgaaggagagagggtggtcgtagagaaacataggccacaaaagaaggagggatgctaagcgtgaggcaagatgggagaagattcatggcgcgaaggaagctagaaggaatcggtataaataataaatcaactccaccaatcataatatactttccctcgctagacatttagaagctctcaaatgttcttaaaaagaaaactatttaaataattattttatttctcgtgcc

SEQ ID NO: 144957 - DNA, 341 bp, Homo sapiens
ggcacgagcggcacgagatccctattattaaaatgtctcataggggcccctggctaatggttgactttctctcctacaagctttcccagaatggatacagctggagtcagtttactgatgtggaagagaacactgactgaggccccagaacggactgaattggacatggactacccccattgccatcaatggcaaccgatcctggcacctggcagacagccccgctgtgaatggaaccactggccacagcagcagttcggatgcccgggacgtgatccccatggcagcagtgcagcatgcgctgtgggaggctagcgacgagtttgaactgcggcaccggc

SEQ ID NO: 144958 - DNA, 550 bp, Homo sapiens
ctgccctggaagcggcctaggcttcctggcgttcctgcgggccgcggatggcgatggattgagtgagaggccccagccaggagggcgctgtgtggccgggttccaagtgaagcgcagagagatgggcaccaggcgccccttctgtcccggagaaggcgtttgtgagcattttttgtcgctgatggcatcttcaaagctgaactgaatgagtttcttactcgggagctggctgaagatggctactctggagttgaggtgcgagttacaccaaccaggacagaaatcattatcttagccaccagaacacagaatgttcttggtgagaagggccggcggattcgggaactgactgctgtagttcagaagaggtttggctttccagagggcagtgtagagctttatgctgaaaaggtggccactagaggtctgtgtgccattgcccaggcagagtctctgcgttacaaactcctaggagggcttgctgtgcggaggtgtgctgggaatcaaagtgaagatcatgcttgcctggggaccaactggtaaggattgc

SEQ ID NO: 144959 - DNA, 565 bp, Homo sapiens
cggagcgcggcggcaagatggcagtgcaaatatccaagaagaggaagtttgtcgctgatggcatcttcaaagctgaactgaatgagtttcttactcgggagctggctgaagatggctactctggagttgaggtgcgagttacaccaaccaggacagaaatcattatcttagccaccagaacacagaatgttcttggtgagaagggccggcggattcgggaactgactgctgtagttcagaagaggtttggctttccagagggcagtgtagagctttatgctgaaaaggtggccactagaggtgtgctgggcatcaaggtgaagatcatgctgccctgggacccaactggtaagattggccctaagaagcccctgcctgaccacgtgagcattgtggaacccaaagatgagatactgcccaccacccccatctcagaacagaagggtgggaagccagagccgcctgccatgccccagccagtccccacagcataacagggtctccttggcagctgtattctggagtctggatgttgctctctaaagacctttaataaaattttgtt

SEQ ID NO: 144960 - DNA, 460 bp, Homo sapiens
  misc_feature (1)...(460): n = a,t,c or g
gaagatggctactctggagttgaggtgcgagttacaccaaccaggacagaaatcattatcttagccaccagaacacagaatgttcttggtgagaagggccggcggattcgggaactgactgctgtagttcagaagaggtttggctttccagagggcagtgtagagctttatgctgaaaaggtggccactagaggtctgtgtgccattgcccaggcagagtctctgcgttacaaactcctaggagggcttgctgtgcggagggcctgctatggtgtgctgcgggtcatcatggaaagtgnggccaaaggctgcgaaggtgtggtgtctgggaaactccgaggacagagggctaattcttgaaatttgggaaggccggtggattccctgggaaactcgttaactactactgtgcacttgtggggcccttgtgtgcttatacaggtgttgttgggcactagcg

SEQ ID NO: 144961 - DNA, 914 bp, Homo sapiens
tcctggtcgacccacgcgtccgtttcagcggagcgcggcggcaagatggcagtgcataatatccaagaagggggagtttgttcgctgatggcatcttcaaagctgaactgaatgagttttctaactccgcagctggctgaagatggcttactctggagttgaggtgcgagttacaccaacccaggacagaaatcattatcttagccaccagaaacacagaatgttcattggtgagaagggccgggcggattcgggaactgacttgctgtaagttcagaagaggtttggctttcccagaagggcaagtgtagagctttatgcctgaaaaggtgggccactataggtcttgtgttgccattgcccaaggcagaagtctctgcgtttacaaactcctaaggaagggctttgcttgtgcgggagggccctgctaatggtgttgctgccggttccatcatggagaagtggggcccaaaggctttcgaggtttgttggtggtctgggaaaacttccgaggaacagagggcttaaatcccatgaagttttgtggaatggccctgatggatccacagcggagaccctgtttaactaactaacgttgacactgctgttcgccaacgtgttgctcagacagggtggtgctggggcatcaaggtgaagatcatgcttgccctggggacccaactgggtaagattggccctaagaagcccctgcctgaccacgtgaagcattgtgggaaccaaaggatgagatactggccaacaaccccaatctcaagaacagaagggtggaaagcccgtaaccgccttgcatggcccaaccaggtccccacagcctaacagggtctccttggcagctgtattctggagtctggatgttgctctctaaagacctttaataaaattttgtacaaaga

SEQ ID NO: 144962 - DNA, 431 bp, Homo sapiens
agcctattcctttatacagccaattctcgtcttgggcccttagttagtccagcatttatgcctcatcgtatctcatgtaatgtgactaaaggtttacctcatgatcattatgcctgtttgcaagagattaagagtagctataagttctatcggtactttgaaactcagcagcagtcagtaccacagtgtttatccagaactcatcagaagtcgagagcattgaataatgtttactcagcagtgcgtagattgcaggtccatatgaaagcattactgaatgagtaagtttagaaattataccaagaaaggtatcggtaattagcaagcttcattcgtgtaccattgtggttgttggcatgtgtcatacctagaagaaagaatcaaatctgccccatgagcccgaagggggatttatagctataaatatagcg

SEQ ID NO: 144963 - DNA, 1407 bp, Homo sapiens
atgccagggaggacctgggagctgtgcctgctactgctgctggggctgggactggggtcccaggaggccctacccccaccctgtgagagaaggacccctttccaggatcaaaaggaactggggcaacaagcagacatccctgcgtgctcacctgaggtggccacgtgtgttcatgaaataaatggacattgcagggcagcagccatgcagagaagagctgaatttagacttagtcctgttttcccgctgaggcacaaaatgccagagaagaagaagacctcacagttgacacctcaacggggctttagtgaaaatgaggatgacgatgatgatgatgatgattcatctgaaactgattctgattctgatgatgatgatgaagagcatggagcccctctggaaggggcctatgaccctgcagactatgagcatttgccagtttctgctgaaattaaggaactcttccagtacatcagtaggtacacacctcagttgattgacctggaccacaaactgaagcctttcattcctgattttatcccagctgtcggggatattgatgcattcttaaaggtcccacgtcctgatggaaagcctgacaaccttggcctattggtattggatgaaccttctacaaagcagtcagaccctacggtgctctcactctggttaacagagaattctaagcagcacaacatcacaacccatccaaatgtggataaaaaacttttcactgcagagtctctaattggcctgaagaatccagagaagtcatttccagtcaacagtgacgtaggggtgctaaagtggagactacaaaccacagaggaatcttttattccactgacaattaattgctggccctcggagagtggaaatggctgtgatgtcaacatagaatatgagctacaagaagataatttagaactgaatgatgtggttatcaccatcccactcccgtctggtgtcggcgcgcctgttatcggtgagatcgatggggagtatcgacatgacagtcgacgaaataccctggagtggtgcctgcctgtgattgatgccaaaaataagagtggcagcctggagtttagcattgctgggcagcccaatgacttcttccctgttcaagtttcctttgtctccaagaaaaattactgtaacatacagcttcgtgagggcaccgcctggctgctgctaaactctggattactgcgccatcctttgtggttccccgacacccacatctttgcaaataaactctcctccagtgatcctattttgaatatgccatctgtttcctgctcaactcatgacccagagtggaccaaggcactgccctttccggccagcccacttcctgggcccctgggagccagcccgcaccccagccacaacatccagttgtgctag

SEQ ID NO: 144964 - DNA, 774 bp, Homo sapiens
atgccacaggctccaggccacagaggcaaagacatggaccctgttccacctgcccctgcaagtctcaagtgccaccagaccccttctcatgtacttgagagggtgggatggtacagagagagccagaagcacagaaaggagaagaagaagacctcacagttgacacctcaacggggctttagtgaaaatgaggatgacgatgatgatgatgatgattcatctgaaactgattctgattctgatgatgatgatgaagagcatggagcccctctggaaggggcctatgaccctgcagactatgagcatttgccagtttctgctgaaattaaggaactcttccagtacatcagtaggtacacacctcagttgattgacctggaccacaaactgaagcctttcattcctgattttatcccagctgtcggggatattgatgcattcttaaaggtcccacgtcctgatggaaagcctgacaaccttggcctattggtattggatgaaccttctacaaagcagtcagaccctacggtgctctcactctggttaacagagaattctaagcagcacaacatcacaagctgtccttccgtggggcagctgtgcagactctataccaattgcctcccttaccctgtggctagagggggtggcaacagtgctttgcttgctcagaggcataacagactgcagtgcctctctcttttggaaactcgctgtgttttaattgtaggtctcctaattaagatctctttgtgcctgcccacattccactag

SEQ ID NO: 144965 - DNA, 1175 bp, Homo sapiens
ggagggctcctgagcacccactctcaggctttgcacgtttccgaaattctgcacacgacagcaatttttgcagcaagggtgtggagggtgcctgtgggccagtcaccagcctgctgcagctgtccgtggttgcctctgtctgccagggctgcacgacctctggttttcacctcaaccactgcggcttcctctctccccgtgggaacagggcatggggctctgcagtcccagggattcgcagtatgaaaggcttggcactgcagcagccaccttgtatccacgaggcagtaaacctcagccgacagccacctgcttcagatggcagcccaggaagtgaattccagatgcccagacctctgcaaacaacttccagcaaatgcagcgaggacagcagggcacctactgttgactcaaaaagacacttccaggtttccccagaaaaggcagcctttgctgctgcagcccctgcggatgacggcttgtttaatagctcagattccccaggcagtttctccaccctccgctgctgggattcttgcaatggcgatgtggagaagaagaagacctcacagttgacacctcaacggggctttagtgaaaatgaggatgacgatgatgatgatgatgattcatctgaaactgattctgattctgatgatgatgatgaagagcatggagcccctctggaaggggcctatgaccctgcagactatgagcatttgccagtttctgctgaaattaaggaactcttccagtacatcagtaggtacacacctcagttgattgacctggaccacaaactgaagcctttcattcctgattttatcccagctgtcggggatattgatgcattcttaaaggtcccacgtcctgatggaaagcctgacaaccttgggcctattggtattggatgaaccttctacaaagcagtcagaccctacggtgctctcactctggttaacagaggaattctaaggcaggcacaacatcacacaacatttggaaagtaaaaagcctaggaggatggcaggaaaaggattccccaaagccatttgacacgtggattgagagcatctctgaattacaccgttctaagccccctgcgactgtgcactacaccagggccatgcccgacattgacacgctgatgcaggaatggtccccggagtttgaag

SEQ ID NO: 144966 - DNA, 822 bp, Homo sapiens
ggcacgaggagagccttcgcgggtgaggcttaacgcgcaggaggtctcacgagagtggaagcaactctcgcgaattttaaaatttatctttttgcctagcgactgacaacaggctggttgcttggcgtggaatcctaaaggggcctggctttgagactggagggagaccccagccctaggctggggttctttccattatagaggagacggattcagaagggctacagaccaaggttgttgaaaaccagacatatggatgagcgtctagagattaatgactccgaagaggttgcaagtatttatactccaaccccaagacaccaaggactttctcgttctgcccatcttcctaacaaggctatggctgataacagcagtgatgaggggtgaaaggaaaataacaagggagaaggaaggaaggaccttcacagtttgacacctcaacggggctttagtggaaatgaggatgacgatgatgatgatgatgattcatctgaaactgattctgattctgatgatgatgatgaagagcatggagccccttctggaaggggcctatgaccctgcagactatgagcatttgccagcttctgctgaaattaaggaactcttccagtacatcagcaggtacacacctcagttgattgacctggggaccacaaactgaagcctttgcattcctgattttatcccagctgtccggggatattgatgcattcttaaagggtcccacgtccttgatgggaaagccttgacaaccttgggcctattgggtattggggtggaacctttttaccaaagcagttcaggacccctacgggt

SEQ ID NO: 144967 - DNA, 383 bp, Homo sapiens
ataccacagcccccaatcctttcaaaggctttgcatgtatttcagctacaagtgacaaggatattaaggatttaaaaggataagagagtgggaaagatgtataaggaagtgcctttgtcaaaaggcagcaaaaagtataatgatataaacataatatgaaataagcaaattttagaatactttgaaacagatttatagaggaatacatagtaaatagttatagacacacacacacccgttttaccattttctcagtgctttttctgctttcattcctttgattttagttagaagcacaagccatgatggatgtgggactcttctcaattgctctttaaattgtcactttttaaatcctattaaatgaagtgtcgattcctgaa

SEQ ID NO: 144968 - DNA, 2316 bp, Homo sapiens; identical to SEQ ID NO: 123560

SEQ ID NO: 144969 - DNA, 1750 bp, Homo sapiens
ttttttttttttcctggaaggaagcaaatttaattttcttttcctctttgacacctttcttccctgtccaaagggaggttcttaattgaagtctgtgaggggagcgctccatctctttatcaccaagtggcctcagtacacagaacgctcgctttttattgtagattataccttccttttcccccttggctctggaaaggataagtgattacaattttgttatcttctaaattaaaaagaaggtgaagttgactgggctggagccatctgcacagcagtttgacaactggggcgacacgataatactgggcaattttttgcacaattcaaaagctttttttctcttttttgccaaggaatcagtttaacaaacatcctactcttgctgaaaataatttcttttcccaactcttctaggaataaaacacttttaatgtatttgtcaggaatcgacacttcatttaataggatttaaaaagtgacaatttaaagagcaattgagaagagtcccacatccatcatgggcttgtgcttctaactaaaatcaaaggaatgaaagcagaaaaagcactgaggaaaatgggtaaaacgggtgtgtgtgtgtgtgtgtgtgtgtgtgtgagagggagagacggtgggggcggggggtggttcatagctgcttcaagtccaaagtgctcacaacggctcctgtgagactgcccctgctggggtgctggctgcacggacacagctgctgcccggcacacaccctacctgccctacagtctcagtccaccccaaatgaccctccccagagctgccagaaggtgactttgaaggcttttttccccaaaagctccaatgaagttgccttcctactctccaaaaaaaaaaaaataataataataataataataataataataataataataatgaaaagtgaagggtgggggtgctggccacctcccatttctttgcctgggtggtggtgaccacggcgcccttgtgtcctttccattggttactgaggaccattgccctcatgggcccaggccacaggcacccacctgtcagcctcacctgccacctctctccatgtgggrttgttgcccctggggctggcctggacatgggggagcttatctccccgacccaggggctgggccatgtctccttcacaacccccactccccgcggactgagcctccactctctgctgggctgagggctctgtggtgccccagaaccctcccacccagtgccaaccccaacccatcaatcaacaacttgcttttaacctttcaaagtgtttaggttgcctttggtcctggtggccccaggggaagaagtgctctgtaaggaccagccaggctctggggaactcccaggctgcccgggggactttctggtagccactcacttgtccctgttccctggagatgaggtccttgccctggtgtgtggtgtgacacaccttgacttggcctccaggcccagctggacacacgaaaagagttcctgccccagtcagaaggcccctcagggaagggcagtacccctccagcctgggaaaggaggtgaacccgtgtccttttggagtccagggcaggctcccagcaaagcgagggggaggcgagctggcagcgcggctgtgagggaatgagactttgccatcagtcctcaccaatgacatctactgttagtgccaccccacctcgtgccaagcttggcgtaatggtgatcaatcagtttcattgcgaccgtc

SEQ ID NO: 144970 - DNA, 538 bp, Homo sapiens
  misc_feature (1)...(538): n = a,t,c or g
ggataaagggatccctaagagaattccttaaaaatttgggactattttaacatccctttggtagacccctgcaaaatccgagggttttaaaaccgccccccgggtaatggtttcaaaataaaacgggccttataaccgtttaaaaaaagggtcccggcgggttctaaacggggaccccgggttacgcctgtaattcccaaaatttgggaggcccaaccggggggatttcgaggtccccagtttaaaaccaacctggtcaaaaaggggaaaccccgggttttctaaaaataccaaaattaacccggggtgggggcagggcccttcaattccaggtacttgggagggttaggccggaaaatccccttaacctgtgcggccaaaatttcaattaacccaaattgtgcccctgcacttcaacctgggggaaaattagactccctttccnnnnnnnnnnnnnnnngcgccacaatctcagagggtgtaactcagtaggtctcaaacagactcctcgctttttttacataagcaccgtcccttc

SEQ ID NO: 144971 - DNA, 1258 bp, Homo sapiens
  misc_feature (1)...(1258): n = a,t,c or g
tttttttttttttttcccgagaaaaaccaatttaatgcttctgttctcagcatttcacagcatgcaggactcaaatggatacaacagaagaaaaaaacccacaatttttggaaaagcctttgtccaatgattaatattttgatatctattgacaatcccttagaactttaaatctcaaaaacaaaaaagtactgtgggatctcccatagtttaatacagaattatgtgaattcctataaacttttctgaacaaaacaattacatgtcaaggaatcccatgaagcctgggggaggatacggctcacggtttttgagggtttgtatttaatgcccagtttttattggtattagggccaaatgctctctgagaatcgaagacttctaaaggtagacaggcccagtttcccattagagttctggaagcagagcctgggggaaggtctgtcacttgcccatcactggaccagccnggaagccagcggggggccaggccggggtctgcaggctgcaggtcccttccagtcctgtccactgctgccctctgtgaccatttctgctaagaagcatcgacagttcgtcctgcagcctccaagcgcactaacctcagccatcagatgttcctgaagcccagggtaagtcctgttcctcaggaagccaaccccagctgcttgtctgggccatgctctctcacaccgcaacctaggtccatctgcggcgaactctccctctgtgctgggcaagccagctcccagctggtcccacgtccctgccacagtgctgccaggggggcagcaaggcacgccttgtgacatgagagtctcgggcaccgtgagggtagggtcaacagtgatgtccacaacttcaataccagcccttccacacctcggcagcacttcggtgggtcctcctcaaccaggcggacacgagaaacagatgataacatggtgcaaggacagacttcagctcacccactcagatgaaggttttggggttgggttttttcagacaacgatgtacattttagcttccaaaatgtgcacaggggcacaaaggtctggatgctgggcactacgggtaccacaagaggatggaaagaaccagctcattcggttttattgtatgtatgtatgtatttattttgagacagaatctcactctgtcgtccaggctggagtgcagtggcgcgatctcgactcactgtaacctccgtctcctgagttcaagcgaatctcctgcctcagcttcctgagtagctggg

SEQ ID NO: 144972 - DNA, 481 bp, Homo sapiens
  misc_feature (1)...(481): n = a,t,c or g
ctggaacgctaattagatgttcgttagaacttctcttcctttccaacacatttttaacgcttctcctattttcatctctttgcttctctgtgctaaattctaagttatttttatttttttgttcactaataaagatatttagtgctgtctgaggctatttttaacctgaactccaggacctcttagaaattaatttactgtatttgatttccataaaagtgttccttccaaatgtagatttacagattaaagaactacaacaacaaccattctcatcctttcagcataagtcttttcctcatctcatctaacattcaaaataattttggaagtaggtacaactgaaaccatttaaaaatgtataaaactgaagctcagaggttaacctgttcaatgctatanaagtcaaaccctcatcttttcattctaaatcgtatgttcttgacaagaaaccttcttggcccacattcattagttccac

SEQ ID NO: 144973 - DNA, 449 bp, Homo sapiens
  misc_feature (1)...(449): n = a,t,c or g
ccagttccccggggtggttccaaacttttaacccaccatttggcccccttaaccctcccaaaggctggggattccggggttaacccccgggttccgcccttttttttaagccctccggccatttggggcccaaaacccaaaattttaggtttggccaaaaccccggtaccccgttttccccttgggaaaaagtttttcccttccccttaattcccccccttttttcccaaaaataaaaccctttaaaagttaaaaggtggnnnnnnnnnnnnnnnnnnnnnnnnnnnnnnnnnnnnnnnnnnnnnnnnnnnnnnnnnnnnnnnnnnnnnnnnnnnnnnnnnnnnnnnnnnnnnnnnnnnnnnnnnnnnnnnnnnnnnnnnnnnnnnnnnnnnnnnnnnnnnnnatgcccggctcccccttctttccagccctagctcaggcccatcgtc

SEQ ID NO: 144974 - DNA, 409 bp, Homo sapiens
  misc_feature (1)...(409): n = a,t,c or g
tccagcacatcactggatacaagggaagcatctagaatggagaagataggagaactcgagaggccagagtccttgggggctctgccagcacccatatgtgcacgcatggatgacaaagcatccagcacctaggatctattttagctcttcattctccccagcatctgggagcttcttgtcagtcccttccttacatgatctgcggtcatagctacttgctcagtcccccatttgattcaccctgaccctttacagggtccaaaggagggacctgggtaatgaggataagtagaaatttcccaggccctggaccagctggggaccctcctgaaaggaaacagggtctaaatatacccctgggacatannnnnnnnnnnnnnnnnnnnnnnnnnnnnnnnnttcaacgaaa

SEQ ID NO: 144975 - DNA, 384 bp, Homo sapiens
  misc_feature (1)...(384): n = a,t,c or g
cagcatctagaatggagaagataggagaactcgagaggccagagtccttgggggctctgccagcacccatatgtgcacgcatggatgacaaagcatccagcacctaggatctattttagctcttcattctccccagcatctgggagcttcttgtcagtcccttccttacatgatctgcggtcatagctacttgctcagtcccccatctgattcaccctgaccctttacagggtccaaaggagggacctgggtaatgaggataagtagaaatttcccaggccctggaccagctggggaccctcctgaaaggaaacagggtctaaatatacccctgggacatannnnnnnnnnnnnnnnnnnnnnnnnnnnnnnnnttcaacgaaa

SEQ ID NO: 144976 - DNA, 497 bp, Homo sapiens
tacagtccattatatgacatttgtaagccactcaacactagccttacaaggttcatgaaaggaggaaaacattaattctttctgcctttgctgatataatccacatagtaataatttaagctataatttatttttaaaatgagtgcctcttgggaagcttcttttctgttctaacagttccctgttaaaatgaaaatcttaggccagtgcagtggctcacacctgtaatcccagcactttgggaggctgaggtgggtggatcacttgaggtcaggagttcgagaccagcctggccaacatggtgaaaccctgtctctactaaaaatacgagaaaaattagccagggttggtgcatgtgcctgtaatcccagctactcaggaggccaaagcaggagaattgcttgaacccgggaggtggaggttgcagtgaaccaagatcgcaccactgcattccagcctaagcaatagagcgagactccctctcaaaaaaaaaaaaa

SEQ ID NO: 144977 - DNA, 1629 bp, Homo sapiens
tgccaaaccttgtatccaaagtcaactatcactgcgatttggccatgatttgacaaaattagactacaaataaaaatccctgataactgtacagctaggcactgaagaatgggtataggttcggcatgaatgctggttgaaatttttgtttacactcagtgaggaagacaaaagtaaaacaatgaaaatgaatgtcagaactccttcttaaatgatttgagcagctgtcagctgaaacggatgacaagtgttcaactactggaagaataatccctccattttttggtgctatacaccatgtattggctacaaacaagacatactttaaagtttaatttgccattactgacattttatccagcatgttctgaagtctagaaaatcaacaaacaataaatcaagccctgatgtgtagtcctctctaatctttgtgatacaaaaacactccccacagccagttaagcaaccaaagactaacactgatgtcattgagtggggaatcaggaaaagatgcgcggtgtctcccctaagtctccataagagttactatgtagaaataacctcaaaagcacagataatagtaacaggtagtaaaattaagtaatgaattttgagtataatttttttgttttaatgtaatttacttaattacaaatttaaatcatttaattttttataatggctgtgtttaccaacttgtaaaaatcctgaaaatgtagcaaccagctctcacaagcttggcaaagccagctccagcacatcactggatacaagggaagcatctagaatcggagaagataggagaactccgagaggccatagtccttgggggctctgccagcacccatatgtgcacgcatggatgacaaagcatccagcaccttaggatctattttagctattcattctccccagcatctgggagcttctttgtcaagtccctttctttacatgatctgcggtcattagctacttgcttcagtccccccattctgattcaccccttgaccctttacagggtcccaaaggagggacctgggtaatgaggataagtagaaatttcccaggcccttggaccagcttggggaccctcctgaaaggaaacagggtctaaatatacccctgggacataattatccccattctgcagatgaggaaactgaggttcagggagttgttatttacttcaagttcaagggctgccaagaggcaaaggcaatattgacaagcaggtttgttggcctccaaaacccatctcctttccgcaaagccatcctgcaccatcctggagacagctcctagaccagcactttagaattccagctcactggagtcaggagaaatcttaagaaatgaccatggtacaggcttcccattatacaaatggggaaactgaggcccgtggtcattcctacagcaatgacaccagcagaccaaggactagaactgaggcctcccgtcaaagagtcagagttgctggtgaaggataaatattctgggtaagagaattagaggggtcaataaaactcagataaaagagtcaaaaggcctgtaatcctagcactctgggaggctgaggtgggtggatcacttgagctcaggagttcacgaccagcctggccaacacaa

SEQ ID NO: 144978 - DNA, 12504 bp, Homo sapiens
  misc_feature (1)...(12504): n = a,t,c or g
tttgactggccgtagagtctgcgcagttggtgaatggcgttggtggcgggaaagttgagtctctcctgcgccgagccttcggggcgatgtgtagtgccttccatagggctgagtctgggaccgagctccttgcccgacttgaaggtagaagttccttgaaagaaatagaaccaaatctgtttgctgatgaagattcacctgtgcatggtgatattcttgaatttcatggcccagaaggaacaggaaaaacagaaatgctttatcacctaacagcacgatgtatacttcccaaatcagaaggtggcctggaagtagaagtcttatttattgatacagattaccactttgatatgctccggctagttacaattcttgagcacagactatcccaaagctctgaagaaataatcaaatactgcctgggaagattttttttggtgtactgcagtagtagcacccacttacttcttacactttactcactagaaagtatgttttgtagtcacccatctctctgccttttgattttggatagcctgtcagctttttactggatagaccgcgtcaatggaggagaaagtgtgaacttacaggagtctactctgaggaaatgttctcagtgcttagagaagcttgtaaatgactatcgcctggttctttttgcaacgacacaaactataatgcagaaagcctcgagctcatcagaagaaccttctcatgcctctcgacgactgtgtgatgtggacatagactacagaccttatctctgtaaggcatggcagcaactggtgaagcacaggatgtttttctccaaacaagatgattctcaaagcagcaaccaattttcattagtttcacgttgtttaaaaagtaacagtttaaaaaaacatttttttattattggagaaagtggggttgaattttgttgatatacatcataaaatagtcttttgcagggtactacgcaagccttaaaatttttcttaagacagagtcttgctctgtctcccaggctggagtgcagtggcacaatcatggctcactgcagccttgaactcctggcctcaagggatcctcctatgtgtgcctcctagagtgcagggattacaggcgtgagccactgctcgtggccaaaagttttctttttttttttttttctttttgaaacagtcttactctgtctcccaggctgctggagtgcagtggcacaatctcggcccgctgcagcctctgcctcttgggttcaagtgattcttccacctcagcctcccaggtagctgggattacaggcacccaccaccacgcctggctaatttttgtatttttaatagagacggggtttcaccatgttggccaggctggtctcgaactcctgacctcaagtgatccacccacctcggcctcccaaagtgctaggattacaggcccgtgcccagccctaaagttttaaactctaggggaattaacagtatttctttacagaatggatttgttaaactagcacagtaaaagtaaagactattctgtttctaggctgttgaatcaaagtgattttagcaattaaactttgtattaatttaccaccaatatttcttcacaaaggaacttttaaaagattatctcagaaagtaaatctgagaggtaagaagtaataatgagtaaatggtaagtacttgagtaaatctaaagaaatattgatagtaaggcaatcctaagcaaaaagaacaaagctggaggcatcacgctacccagcttcaaactatactacaaggctacagtaaccaaaacagcatagtactggcacaaaaacacacgtagactgatggaacagaatagagaatttagaaatgagaccacacacctataatttttttgatcttcgatgaacctgacaaaaacaagcaatgggcaatggattctctattcaataaatcgtgctgggataactggccagccatatggaaaagattgaaaatggacgccttccttatgccatatacaaaaattaactcaagatggattaaagacttaatgtaaaacccaaaacagtaaaaatcctggaagacaacccaggcagtaccattcaggacataggcacaggcaaagatttcatgacgaagacgccaaaaacaattgcaacagaagcaaaaattcacaaatgggatctaattaaactaaagagctgcacagcaaaagaaactatcaagagagtaaacagacagcttacagaatgggagaaaattgttgcaaactatgcatctgagaaaggtctgaaatccagcatctatacgtaatttaaacaaatttagaagaaaaaaccaccccattaaaaagtgggcaaaggacatgaacagacacttttcaaaagaagacatctgtggccaacaatcctatggaaaaaagcccagcatcactgatcattagagaaatgcaaatcgaaacaacaacgagataccatctcacaccagtccaaatggctattataaaaatgtcagaaaataacagatgctggtgaggttgtggagaaaaagatatgcttatacactgttggtggaaatgtaaattaaattagttcagccattgtggaagacagtgtggggataaagacagagataccattcaacccagcaatctcattactgggtatatacccaaaggaatagaaatcattgttataaagacacatgcacgcgtatgttcgttgcagcactgcccatcagtgacagactggattaaaaaaatgtggtacatacacaccagggaatactatacagccataaaaaggaacaagactgactgggcgtggtggctcatgcctgtgatcctagcactttgcgaggccgaggtgggtggattgcccgcgctcaggaggtcaagaccagcctgggcaacacggtgaaaccccatctctagtaaaaatacaaaaaaaattagccaggcttggtggcatgtgcctgtagtcccagctactcaggaggctgaggcagaagaatcgcttgaacccagaaggtgggaggttgcagtgaacagagactgcaccactgcactccagctctgggcaacaagagtgaaactccgtttaaaaaaaaaaaaagaaaagaacaagcgagaacagcactggataccgtggaagaaacccttgagtatgaaccctgacatgtgcccaacactctccaaggcactttcaactctgttgtcctggggagaaaggaccagctgggatagcccttcagcccactgcagctcaagagggattcagatggaatcagggaagtgggaccatgtggggataagtctggctgctgtgggtggcctgagccctttactcggtaggacaaagtcaattcaggaggtacctgtgatggcctggctgcctgctgggactttgctgcccctcccccatcccagggaaccccacttccacttcccatccaagcatcgtagcttatcagaaaacatagttttgacacctataattccagcattttgggaggccgaggtgggtggatcacttgaggtcaggagttcaagaccagcctggccaacatggtgaaacgctcatctctactaaaaatacaaaaaattagctgggtgtggtggtgtgcgcctgtaatcccagctactagggtggctgaggcaggagaattgcttgaccacgggaggcagaggttgcagtgagccatgatcacgccattgcactccaacctgggcgacagagcgagatactgtctcaaaaagaaaagaaaacatagttctggatgacaagagccaggtcctaacgttccactgcatcactgatcataggctgtccttcgagtagcaaatgcaccatttggtagctatgtggccttggacaacttactctctctgaacctgtactttaattatctgaaaacttgggataacaaaccagaattattgggaggaaaaaaatagttaatgtttataaagagcatagtacagtgcctgacacttactgaagcaacctgtatgcattaactagtgctattctaagttcctaggcagacccctgcactaggaggggcttcccacccagccccctggctctggccacacctgatgttgaaggtggagcccataaaggaggctcgacggaactgggcggaagcagctgtgtaggggggctgtggctcgggcttattccagtacatgtccggctccatccgaggcaggtcctggtgcatctcatccacagccaacagggacacctggtcaccagggacagaagaagtcccacagaaagatcatcccaggcaggaccttgtatgtgcctgatgacttggaggaatctctccctctctctggacctcagtttccctgcctgtgaaatggggagatgggtgcctgcctgcagcctcaaagattgaggtgagaatcctgtgagtgaatgactggctgcaggagggaggagctctctttgggtccactttggggaaggtccatggtatggtttctctccctctccccatacctgcaaattcctgtcgacaatccagttggtctcaaaatcatcatcatcctctccaaaggggttgatgagctgctctgccaccttggggacaggtgaggctctgtaaaccctcaggcagaactcctcaaagccagcttccccctttaaacctcagctgctgctatttccacaccccatgaagcccttcctgcctgaccactgtcttcaaaggcagagtttagggctccagccccccacacttgtaggcacccacacacttctggacacagcccctctaactcttctgagccagtccttccctgaacacccacagctgtccctgagtgtatcactcggctgagtcactgcctttatctcacctcatgtatcttacctggagttgcataattttattcattcatgcaacagagatatatactgaagctgggctgaactaaagggcagtctaggtgggcagattcctggatagcaacctctaaaatgccctaacaaagccccgaagaggtgacacgcgtctgccttaggggtccaggggacatcttgcaggccactggggcaccctggagaatttcaagcataaaagtgtgatttgttttgatctgcagaaaccaaagataactgggggtgcagggggaatttagaggaataggaatgtgtgtgtgtgtgtgtgtgtgtgtgtgtgtgtgtgtgtgtgtcacagtgacaggaagggcagagacagagacttacacccccattaccaaaaaataaaggaaggtaggaagggagagagagtgggtgggcaacagaaggaaggaaagataaagagctcgagagaaaactctctgattcagaacatctnnnnnnnnnncaatccttggcggattttacttgcctgatttaataaagtttttttccaactaaaatggggcgggattaagatagatctttctctctctctgtattttgtctcaatgcagaagcagagcatactaacccattcataaattaggaggtagaagaaaaaatggtggcacaaaggaggaattaagagttgaagaaatttgtattagaatctgtcgattatgctgtgtggagaatactggacagctactgagtgaaaaagacacccaacagcatcttaataggagagtgttcgctctgcttctaaagggcaggggcttctgaaccttagggctttgttttgttgttgttgttgtttttgagatagagtttcattcttttgcccaggctggagtgcagtggcacgatctcaactcaccacaacctccgcctcccgggttcaagcgattctcctgcctcagcctcccgagtagctgggattacaggtgtgcgccaccacgcctggctgctttctacccgtgagaccttcctttcctgacactgcatcctcgtctcaagcagctgctggccatgacccctctggccatgcctccagcccagcagggccctggagaggcccaccttcagccagccaacatagaagaagaactgcaggaacgtgaagacgggcacaacgaggtccagctcatggccagggtaggccttggctgggttcagaaactgccgcccaactagacaagtcaggaagaagctgtacaccgccacagtcaccacctgggaggaggaggaggaggaggaggatgtggtagcaaagggctaggtgggaaccctgaaatcaggatgctccaggggctgggagtctgagacaggagaccaaggccttgttctgacttgcacacttatgtgacttaggggctctgttaacccctttgtttgtttgtttgtttgtttgtttgtttgtttgtttgagacagagtcttgctgtgtcgcccaggccgtactgcggactgcagtggcgcaatctcggctcactgcaacctccacctcccgggctcaagcaaattctcctgtctcagcctccctcccaagtagctgggattataggcgcacaccagctagcccggctgatttttttgctgttgtattttttttttagtagtagagacaagggtttcctccatgttggccaggctggtcttgaactcctgacctcaagtgatccacccacctcagcctcccaaagtgctgggattacgggtgtgagccaccatgcccggccaacctctctttaatatggggataatcacattgcctctactggactgggccaggcaggagcctggactcttagaacttggcacttcaaagtccagacccaacttcaaagtgtggacccaactcccaggggagccacttagcctctaggtgagcccttcccaccccagctgcttccttggtccttctagcctcagtttcccaaaagggcagcctcaccagcctagtcctcacctgtgtatacaccagtgggatactaatccagtcgtaggcatacaggtgtccacactgagtacgcaaggtgttcatctcctggggggcagaagagggggatggggttctgaacaccacctgcccccaccctgggctcgcccccacctcttctccaggtaccagggcctggtacctatggtccattcctggctgtgtggccatgggaagctcactaaacctctttgtgtctcagcttcctcatctatcaaaagggaaccaggacctcacagacttggagaagagggaggggcctctgataagggaccacctcgggctgtggattgctgttggaaaagattctgcaaccccacctccggctctcggaagaccctcaggggcccaaggcttctctttgtaggaaaccttgtttcctgtggaccacaacccttcccactctgcggcagccctgtctgtacagtgggctcacgttcagcaggctctggagcaggatagggtcccggattcgacctccaagccacgccttcattgacaggttggcaaaccacacccagggcacccagaacatgttgtgtggtaggctcagtttctccaactgcttgtgttctgccggagtcataaagcctgcagagtggagtgaagaaggcggtgggtgggagaacctgcagaagggatggccggcacctgctgacctataggaacctcagcactcctttgccatcctctttctttcaacaacaaaaaaatttctgagcacctactaggtgctgttctgggctgagcatgtgggcagggtatttatttatttccagagaaagggtctggctctgtcaccgaggttggagtgcagcggtgcgatcttagcgcactgcagcctggaactgctgggctcaagtgatcctcctgcctcagcctcccgatactcagcctcagactacaggcacacgccaccatgccctgctaatttttaatgtttttgtagagatgggggtctcgctatgttgctcaggggcgtctcaaacagctgggctcaagcgatcttcccacctttgcctcctaaagcactgggattacaggcgagagccaccacgcctagcctgggtctgtcttattaaccaggaccaggtcaggccaggctgagggggtgtcagagaccaatgtcccatacctccagagtggaaaccggagatcaagaggggcaagggcagagggaagtagaccctagtacctcaccagttcccaagccgtcacccttctttccattatccctcaagggtccttagccctgcctcagactcctactctcggagggtgggctcctggcctcgccccaccttcagacacccgactctgtcccgcccaattggacccccaaatcttgaccacaccccactcctggctccacccagtcccccgagtccgggggactttggctccacccatcttccgttcctgccgcgcccatctcggcccctggctctgcccggtgcctccccgttgctcccggtccgcccacctgcttgcaccaggtgctgggcgctggggaagcgcttgtagactgcggtgctgacgctgcgcaggatgagcacgttgcccaggttggcgtagcggatgagcgtgcgccgcagcagccggccttgctcgtccttgccttcgacgaagcccgacaccaggctcatgaggcggtcgggccacggcaggttctcgtactggttccaccagcgggtcacgaccagcgtcacgtagaagcctgggcaggaggggcggggggcgaggggcgaggggccaggctgcggccagagcccagggcccagcgcccggcgatgcctcggctcctccagctttctgctgcgagcgggcctagcccccagccctcctggaaggcgctcgggagcgagaggcaggcagagcctcgcatggaggcgcgagagccccaagggttctgtcacccgggggtccccctgctggtcccagaaatccgccagaccccctcccctcccgcgcaggggctccagggaccatgatgtcagcgcttccctcagaaaatggggttttcattgctaacggcaggacgtcttacctaacgtctaacttcagtttctctggctgcagtccgcacctttccctacagagaggcgccgacctgccgctggcgttcccccgccccctccccagccccttgccgcagctcctcgtgatcctcccctggcctgtctggagcctgggcggccacagggacccggaacagccagaagggggaactcacccagcacgaaggaaatggggatgagctggatgtagctgtcgcaatacagagtcagtttctcaaacatcagctgttgttcttccgtgagggccagcctgggggtgggggtgggggtggaattgtgtggacgcagcgaggagatggctgagactgtccccaggtctagcccggccctgggtaggagtgggactgcctcgatgctatcccacattttccccagcccagggcccctcctgaggcctgagccaggtccatgatgctccttgtacagccccaaacccggacaggaggaggccccctccagtggtttcttgtggggagaatcctcacactggccactgggagatgtgtaggaaggaaggtcctgctgcagaggccagtttcagacaccctgatcctttgaatgcatccaagggtcagttgtttaaaagcaggtcgaaacagagtgtttgggacgggcacggtggttcacgcctgtaatcccagagctctgggaggctaaggcaggaccaagagttcaagaccagcctgggcaacatagcaagaccctatctctacaaaaaattagttgggtgccgttgccgtatgcctgcagtcgtagccactggaggctgagataggaggatcacttgagcccaggagttggaggctgcaatgggctgtgattgccattgcacttcagcctggttgacagagcgagacactgtctctaaaaggaaaaaaggaaacagagtgtttggctttaatgagaggggtgaataggcagaggattttgttagagcagtgaaactactctgcctgatgctgtgatggtggagacatcattacacatttatccaaacccatggaatgtactgcccaagagtgaaccctgctgtacgctatgaactttgggtgatagtgatgtgtcactgtgggttcagggattgtaataaatctaccactgtagtgtgggggtgttgatagtggggaggctgggggcagggggaggagcaaagagacacatgagaactctaccttctgctcaattttgctgtgaacctaaaactactctaaaaaatgaacgactctttttcagcatgcattggtgcccaagtaaaaaccaaagaccaatgtgctttgtatttggtattaggaggaacttaagaattttatgtatttgatgttttataatccattgtagtcattagtgctttttcaatttaaaatgctatcatatattcggtgattatatctgtcctttattttattgtttagataaatgtttttggtttattggtttttgtttgtttgtttgtttgtttgtttgttttgagatagggtcttgctctgttacccaggctcaagggcagcggcacagtcatgactcactgcagcctcaacctcctgggctgaagcaatcctcccgcttcagcctcctgaagagctgggtgggactacaggcataagccaccatgcccagatcattttaagattttaatattattttaagacggagtctcactctgtcacctaggctggagtgcaatggcatggtctcggctcactgcagcctctgcctcccgggctcaagcgattctccggcctcatcctcctgagtagctggaactacaggtgcgtgccaccccactcggctaatttttgtatttatagtagagattgggttcactatgttggccaggctggtcttgaactcctgacctcatgatccacccgcctcggcctcccaaagtgctgggattacgggtgtaagccaaagggcctagccaattttttaattttttatagagacaagatcaggatctccctatgttgctcaggtcctaaactcctgggctcaagtgatcctcctgccttggcctcccaaagtgctgggattacaggtgtgagcccctgtggctggccctaactttttttaaagtaccttggtgccctagtaaaaaccaaatgtgccttgttgctagcattattaagaacacaagaatttcatgtatttgatattttacaatccatgtaatcattaatgctttttcaatttaaaatgctatcatatattctgtgattataccttaccgtttagataaacattattttgtttgcttttgagatagcctgtcactcaggctgaagtgcagtggtgtgatcatagctcactgcagcctcgacctcacaggcttcagccatccccacacctcagcttcccaagtagctgggaccacaggcaaatgccaccactcccagctaattttttaaatttttggtagagacggggtctcactatgttgcccacgctgaactcccaggctcaagtgatccccgcaccttggcccctcaaagtgctgggattacagacgcgagtcactgctactggccttagataaacattttaattaaaaaataattttaaaaaatgtaccatgtgggctgtgcatggtggctgacacctgtaatcccagcactttgggaggccgaggtgggtggatcacttgaggtcaggggttcaagaccagcctggccaacatgatgaaaccctgtctctactaaaaatacagaaaaaaaaaaaaattagccaggcgtggtggtgtgtgcctataattccagctactcaggaggctaaggcaggagaatcgcttgcacctgggaggcagaggttacagtgagccaagattgcccccactgcactccagcctgggtgatggagtgaaaccctgtctcaaaaaaaaaaaaaaaaaaaaaaagtaccatgtggttggtcaagtgcagtagctcacacctgtaatcccagccccttgggaggctaaggcagggggattgcttgagcctaggagttcgagaccagcctggacaacacagtgagactccatctctctctctctctctctctctctctcttttttaatgtactatgtgggcctatgagtctgtgtgggattcagtaaaacaggccagtagagtggggccagacaaagcctgggctccaggggtcctcctggggttggaggaagggtggctaaaaccctgctggcctggcttgagcagcctctcagtgtgacttctttactctgcccagcccccagcgcgcagcctcagctccagtgcccaggagctggtcaggagcccagcttagtgttgtagtggactggtgcactgggccctgagctggctgggaggcccccaggagctcccagctcccagccccagccacatccttcccaggccccccggcccagccctgccagctttacctataaataaagcggatgatgtagtagcagagcaggaagattaggaactcgccatatagcagcttgtagatgctgccccgccagcacagcagcaggcgggagaaggagcctaagcgggcattagccacttggcttgtgtaagtgatggtcat

SEQ ID NO: 144979 - DNA, 498 bp, Homo sapiens
cgaggcgccggtgaaggctgaaggcagctaccttaaagatgccgggatccgcagcgaagggctcggagttgtcagagaggatcgagagcttcgtggagaccctgaagcggtgtggtgttccacgcagttccgaggatacggctcgggttaccctcctgatgatgcgctggattttcaatgatcaccgctggatccccccttgagagcttgtggacccttacatttatttcccatggccatgttcaaccctaagctgctgggactggagctaatcgacgcggaggcgatcggtgctgattttgtgcgatttgaggagctgctgctgcaggcctttaaggagctccagctttcccagacaaccataccagaatcgacacttattcagcctcagcctgggttctgcataaagaccaacttcttggaagggaaggttttcatcaacatctgccacttcccctctattcctccttccgtcgacattgactcatgtggggttct

SEQ ID NO: 144980 - DNA, 614 bp, Homo sapiens
cattgaaagcgcttgagaacgatcacaccaaccttggcacgaggcctctctccatctttgaacacttctttggctctcttcctctcctctcttcctctcttctctcttcctctcctctctctcttcctcttctctctcttcccctcctggctctcctcccctcctctctctcttcctctcctctctcttcctctcctctctctacccctcctgactctactcccctactctctcttcctctcctctctatctacctctcctctctcttaccttcctgactctcttcccctcctcgtctctcttcctgacctctatctataccactcctctatctattcctcaactcaatctcttcctcgaatctctctcactcacttttacctcacactcctgtaacgaaaatacacgtaatgcatctaaataagcagctgacaggctcctttacaaaagccgacagtgagaaggcatcccaaccattctaatgctaaaacagagtgtcacacaaataaaatactggagcaactgcaaatcccatgcacactgatcaaaaactccactgtacaacccattcaaacagggactaacataatcttgcaataaaacaaattggaaaa

SEQ ID NO: 144981 - DNA, 1178 bp, Homo sapiens
tttttttttttttttttcaaaataaaaaatgcaatttttatttgttgaacataatttgaaactgtaaaaagatttctctgtccatcaccagaaatccagaagacacctgaagaggactgactgtttctttgccacggggaaggtgtgatgaaaacaattaaaatcccatgcatccctggcccttcctccacgttgcccctcaaaatgccctgcagctgcagacaggcagagaggcagacaggagaaccacgggcttgtggaagggccccctctgcctcttctgggaaagctgctggggaagccagaggtcacagtgcattgggaggcctgggctttcagccactggccagggccaaaatggaaacatctgctcaagtctccccaggcaccttgctgggggtgagtggggagaaagaagtgggaggaaatctgatggctgggaccacaagtttttcaccctgtaccttggctttgaagtggcccctgctggtacaggagcagggtgagagtaaaagtaaataaataaaagcaacatgcttcaaaggagagagggtgacagacccactgaagcaccccgtgtcctggctcgaccagggataagccagggcgtgatgatttaaaacactctgaatcctgaggccaatggccatcaaaatacaaattgcctgaagtggaagaggaagtgaagggctgtttgttagggggactacgagtggagattctggtgagtgtgggtgggctcgccagtgaccccaatattttctttgtgtaacaaccagagtaagcattaggatgcccaggctgccctctactggcagtttctgggaaggaccacaacagcagcacccaacctgcaacccacaacagccgagacaggagagagagaagaaaggaagagagagagaggagaggaagagagagaggagaggaagagatagaggaggggaagagatagaggtcaggaagagagacgaggaggggaagagagtcaggaaggtaagagagaggagaggtagatagagaggagaggaagagagagtaggggagtagagtcaggaggggtagagagaggagaggaagagagaggagaggaagagagagaggaggggaggagagacaggaggggaagagagagaagaggaagagagagaggagaggaagagagaagagaggaagcc

SEQ ID NO: 144982 - DNA, 2208 bp, Homo sapiens
  misc_feature (1)...(2208): n = a,t,c or g
agaaggaagatattcagggtttttatttttattttttgagtctgggtctcgctctgtcacccaggctggagtacagtaagctatgatctcaccactgtactccagtctgggtctcgctctgtcacccaggctggagtacagtggtgagatcatagcttactgtagcctcgacctcccgggctcaaagatcctcacacctcagccttccaagtagttgggactataggcatatatcatcatgcctggctaaattaactattttattttaagagatgtggtctagctatgttacccaggctggtctcgaactcctggcttttagcattccctcccacttcagtcttcttgaatcgttgggaattacagggtgggcccatcatgcccagctctaggtttttaaaaatgtaggcaaggaggtcagcatttaccacaaaagcagggtttgatcttaggaagcttaataaagaggggggtttaatcaaggtttcctgtaggatctgggctttaaagttaggcccttaaaagaacgaagaatgtttgtgggtgtagtagagcaatgacttggagcaggagccctcctaagccattgggctcaccctcaacnaggcaggcgcccactgaccctaaggggggtgtaggcagctggaggaagtactgtgtgtcccccattccagcgatggtggcccctctcagagtcaatacccttccttccaagagactgaacatacaactggacaatggccaggccacatgtgacaatagactctggccagaaacccataaccagcctgggaagccaaggaagccaaaccacagcctcagcagcaatcggacccagaacagtctgaacttagtggctgccagcttcttcccaatccccagccaccacaccccctcttccaactccagaccaaccagagaaagccaaatatacccccccaaccaaccaaagatgcccctccagttagtccgctctgtccccatgccaacaatctccaatcacagcacacccagagccttccctttttttccactataacatttcacagtccctgcctgcctttgacccctgccaaatacaagcaatcatggctgactcctttgcaaactttgaccaaatggcctctctgctcttgtttaggtggtttttatttccacatctccaacagggagtcttggaaacaaacttgacaatactcgtgaaatcaacacccagatgaggtagaccagcactccaggatgcccctccccagtatccctcccctgttaactgttcccctggcttctaacaccatggatcagttttgcttatttctgtactttttgtaggaagagaatcatacaatgaattctctcttgatgatgaggactctgacctcttttgcttgaccttcatgtctgtgaaatttatccatgttgctgtgcatagcgatattttcatttcatattcgttgctgtgcaggtagtattcgaccctgtgacttcactgtaggcttcaactgtgggatgggacatttggggttggtgggatgggacatttggggttttttcaggtttggggcctaacagtccaaccgtgtggttaagaaacattccttgcccaatgtcctcggtggacatagctttctgtggtgtacataccccaggagtggaactgctggatcagtttatacgtatgttcggcttttggcttttggtagatactgccagttttccaacagggtcacaccagcttggtccattcaggttacaatgaaacaccctttaggcctggggtaattttgtaaacaacaaaaaaattattttcttcacagttcttaggagggctggggaagtcccaagatcaaggtgccaggcagatccaggtgtcccagggcgggnttctctgcttcaggagatacggtgccttctcactgcatccacacatggtagaagggacagaagggctccctcaagcctgttttataaggtgctaaccccattcatgatctccaccctcatgacctaaccacctcccacaggccccacatctttattattttttttgagatggagtctcgctctgtcacccaggctggagtgcagtggcacgatctcggctcactgaaatctccacctactgggttnaagctattctcctgtctcagcctcccgagtggctgaaattacagatgtacgccatcacacctggctaatttttgtattttt

SEQ ID NO: 144983 - DNA, 1958 bp, Homo sapiens
gaaattattccttagatttgatctagatgaagaaatggggccccctggcagcagcccaacaccagagcctccacaaaaagaagtgcagaaggaaggggctgcggacccaaagcaggtcggggagcccagcgggcagaagacccttgatggatcctcacggtctgcagagctcagtcccccagggcgaggatgattctgagtatttggagagagacgcccctgcaggagatgctgggaggtggctgcgtgtcagctttggtttgtttggcagcgtttgggtgaacgatttctccagagccaagaaagccaacaagaggggggactggagggacccttccccgaggttggtcctgcactttggtggtggtggcttcctggcattttataattgtcagttgtcttggagctcttccccagtggtcacacccacctgtgacatcctgtctgagaagttccatcgaggacaagccttagaagctctaggccaggctcagcctgtctgctatacactgctggaccagagatacttctcagggctagggaacatcattaagaatgaagccttgtacagagctgggatccatcccctttctctttgttcagttttgagtgcctcgcgtcgggaggtcctggtggatcacgtggtggagttcagtacagcctggctgcagggcaagttccaaggcagaccgcagcacacacaggtctaccagaaagaacagtgccctgctggccaccaggtcatgaaggaggcgtttgggcccgaagatgggttacagaggctcacctggtggtgcccgcagtgccagccccagttgtcagaggagccagagcagtgccagttctcctaaggagctggtggtgctcctcacggaaccttgccgcttggggaacctgacgtctaagtgtccagaaaggaggatgtgggcagggacggggtacagaggatagtgtgggtcagaggtgccagtagtataatattcatctccctggagttatgttgaaggcagagttttcatagggttagattttttttatccttttctagttcagttaattcatcctgttgaattgcaccatcgtgaaaagatgggaaaaatcgtgatgatgggtaaggggaaaacttcccggaaggcaatggggcaaggaaaaagaaagcctatgggaaatggctgtgctcccaacatagctttgcagatgatgtgggtttttttttttttttttggttgtttgttttgagagagagtcttgctctgtctccctgggctagggtgtggtggtgtgatcttggctcacggcagccttgccctcccgggctcaagcagtcttcatctcagcctccagagtagctggggacttacaggcatgtgatatgatgctcggctgatttttgtttacttctttagagagatggggtcttgccatatttgccaggctggtttgaactcctacaactcaagcattcctcccaccttggtctcccaaaatgttgggaccccgggtttgaagccaccgcgccccagctagccccctgtgttttgtttttgttttgtaaactttggttgatgttaaggccctccattttggaaagcaggaaaacaggattttttttttttttatcttgttcccctggaggaacccagggatggaggatagagtggcctgagagcagtgcttggattcagacctcctgctgggtccttctgctgggatacaggcccccaacaggcgggggtggagcagggagctgcgcctttccgggggtgcccggtggtgtgtagagaaaagctgcttgttttactccttaagtcaatgtattggtgactgttgatttgttggaacaatttcagggaatcaaggggctgtgcgagaaacttccctcatgttgtttgggcaacaggtgaatgaacctagagcggtgacatggaaaataaagctcactgttactcaaaaaaaaa

SEQ ID NO: 144984 - DNA, 442 bp, Homo sapiens
tcttggaaagaaaaggctgagaacgtaaaactgaggacagaggaggaaaagcagggtgacccctgatgttgccctagaaaatggaaaacaaaacacagcaaaacagaaaaacagaagatctgactctgcctttagccaggaaaacagtttgggggagtaaaaagtattagggaaaaaagtggtcatttagcctgcaaaattggcatgtacaggcatactgactttcctgcaaccgctactgcagtctgaaggaccatgatttcattaccccatctgatggcggccccgacatcttcctgcacatctgtgatgtggaaggggagtatgtcccagtggaaggcgacgaggtcacctataaaatgtgctccatcccacccaagaatgaaaagctgcaggccgtggaggtcggcatcactcacctgggaccaggcacccagcatgg

SEQ ID NO: 144985 - DNA, 790 bp, Homo sapiens
tctccgttcattcgtccgcccacgcgtccgagcgggtggcggagcagaacggattgcagggtcaagccatgtcatctgttccttccccaccaccacagccccccacccatcaagcttggagtcgggctgctggacacccctcggagccgtgagcgctcaccatcccctctgcggggcaacgtggtcccaagcccactgcccactcgccgggacgaggaccttctcggcgacggtgcggggcttcacagggccccgtctacaaaggagtctgcaaatgcttctgccggtccaagggccatggcttcattaccccccagctgatggcggcccccgacatcttcctgcacatctctgatgtggaaggggagtatgtccccagtggaaggcgacgaggtcaccttataaaatgttgctccatcccacccaagaattgagaagctgcagggccgtggaggtcgtcatcactcaacctggcaccaaggcaccaagcatgagacctggtctggacatgtcatcagcttcctaggagatggtggaagcaccccttgtcctgtgcttgtgggaagactttgcggggaggaggcagcagacactggagatgacattcttccacacgagacggggcttcagcggggcaatggtccctctcacgtatctcctggaggaaaggggtatgggggggcaggtgtggggtgtggggtgttcccggccatcagcacagcctatggaccattgcaacaacctctccaccatctgaagagcattaaaagcatttaaaaaaaaaaaaaaa

SEQ ID NO: 144986 - DNA, 352 bp, Homo sapiens
caataagctcctagtccagacgccatgggtcatttcacagaggaggacaaggctactatcacaagcctgaggggcaaggagaatgtggaagatgctggaggataaaccctgggaaggctcctggatgactacccatggacccataggatcttagacagctgaggtaagctgctgtctgactatgctattatgggcaaacaggacgacaaggaacatgcagagaaggagctgccatccttggaagatgccctagcgcactgggcagatgcaagcgcatccggccattggcctagtgatgtgccctgtgcgtatcgatgagagcattcacctccagcttggcgataggtatgcg

SEQ ID NO: 144987 - DNA, 448 bp, Homo sapiens
tcgggactagggtacttgctggtctgagccatgcacaagacggagctggggagccggtgagcccggacttggaattcggtgcggatggccagctccgggatgacccgccgggacccgctcgcgaataaggtggccctggtaacggcctccaccgacgggatcggcttcgccatcgcccggcgtttggcccaggacggggcccatgtggtcgttagcagccggaagtctcagaatgtggaccaggtgtaggtctctacttgattggctagtgtctgattgatatatcttatgtgtgttttgccttaatgacgatgtcctgactctttatgttgatttcagttttatatttatgtactgttccataatctattagttatagtgtctatatgttgtgtttgttactattctgtctattgtgccttgtgttggtgagctttattatagaatg

SEQ ID NO: 144988 - DNA, 412 bp, Homo sapiens
  misc_feature (1)...(412): n = a,t,c or g
catcatgggcaaccccaaagtcaaggcacatggcaagaaggtgctgacttccttgggagatgccataaagcacctggatgatctcaagggcacctttgcccagctgagtgaactgcactgtgacaagctgcatgtggatcctgagaacttcaagctcctgggaaatgtgctggtgaccgttttggcaatccatttcggcaaagaattcacccctgaggtgcaggcttcctggcagaagatggtgactggagtggccagtgccctgtcctccagataccactgagctcactgcccatgatgcagagctttcaaggataggctttattctgcaagcaatcaaataataaatctattctgctaagagatcacnnnnnnnnnnnnnnnnnnnnnnnnnnnnnnnnnnngggggggg

SEQ ID NO: 144989 - DNA, 814 bp, Homo sapiens
  misc_feature (1)...(814): n = a,t,c or g
acactcgcttctggaacgtctgagattatcaattagcttcctagtccagacgcccattggtcattcaacagaggaggaccaaggctactatccacaagcctgtggggcaaaggtgaaatgtggaaaaatgctggaaggaaaaaacccctgggaaggcctcctgggttgtccctaccccaatggaccccaagaggttcctttgaacaagctttgggaaaaccttgtcccntcctgccctcctgccccatcaatgggcaaacccccccaaaagtcaaagggcaccatggcaaagaagggtgcctgaccttcccttgggaagatgcccataaaagcacccctggatgatcctcaagggcaccctttgccccagcctgaagtgaactgcacttgtgacaagctgcattgttggatcctgagaacttcaagctcctggggaaatgtgctggtgacccgttttggcaatccatttcggcaaagaattcacccctgaggtgcaggcttcctggcagaagatggtgactgcagtggccagtgccctgtcctccagataccactgagctcactgcccatgatgcagagctttcaagggataggctttattctgcaagcaatacaaataataaatctattctgctgagagatcaccaaaaagaagaaatgtaaaaaaagggggggggccgctataagagaaaaaagttaaaaaacccgggatgggaaaggaaataatcttttttagggggccccaaaattaaattccagggcccgggttttaacaccgtggggaggggaaaacccgggggtccccaacttaaac

SEQ ID NO: 144990 - DNA, 368 bp, Homo sapiens
atgagttcttctgtggcctctgtgtaaaatctgaaatctccctccaccttttctgcctagcgaatttcttcccatccttgaaaccccagatcacctcctctggagagatggttccccttctgccttgccagagctgagagtggagaaggaaagatgaatcctcaaccctcccaccaccaccgagctcaggggctgagtgttgtcccacttggctgagaccctctccctctacctccccctgtccttgcctgcctcatccttacgtccaggggtcactttgtgaaacccagtcgcaccttactgtgaatcccgccagctctagctatcgcatctccccacccccactaatctcctctcggactcgctat

SEQ ID NO: 144991 - DNA, 455 bp, Homo sapiens
cagggtgtttggtcttttgagatgtcataactaatatgtactcctcctgtgattaagccagttcaagtttgtttgtttatctattgtaagagattatgtgctgtttaataaatatccttctcttggtttctcgaaactgtccccttaaagaactgaacttggggtagggttgagataagagtttgggtggggtggtggtaagagtttgggcctcccaagggctggactagactaaattggaggatctctgggcttcattccacttctgtccaccccagtctcacattcacatgcgttctcagttggagctataacagctcttatttttctcctggagtccctggcctttcagtggctacttctcctttcatcttctcatttcttatatttttctcttttgttcttccgtcagtcatccttctgttttctgacggaagaacaaaaaaaaaaaaaaa

SEQ ID NO: 144992 - DNA, 424 bp, Homo sapiens
  misc_feature (1)...(424): n = a,t,c or g
nntcccccacggcccttcaggatgaaagctgcggtgctgaccttggccgtnctcttcctgacggggagccaggctcggcatttctggcagcaagatgaacccccccagagcccctgggatcgagtgaagctgcacgagctgcaagagaagctgagcccactgggatgngagatgcgcgaccngcgcgccccaatgtggacgcnttgnaacgcatctggccccctacagcgacgagtgcgccanctttggccgcgcgccttgaggctctcaaggagaacggcggcgcagacttggccgagtaccacgncaaggccaccgagcatcttgagcacgttcagcgagaagggccaagcccgcgttcgaggaacttccgccaaggcttgttgncccttgttggagagtttnaaaggttnagtttcttgag

SEQ ID NO: 144993 - DNA, 671 bp, Homo sapiens
agtggtcgaattcaggaggtcccccacgggcccttcaggatgaaagctgcggtgctgaccttggccggtgctcttcctgacggggagccaggctcggcatttctggcagcaagatgaacccccccagagcccctgggatcgagtgaaggacctggccactgtgtacgtggatgggctcacagaagacagcggcaaagacagcgtgacctccaccttcagcaagctgcgcgaatagctcggccctgtgacccagggagttctgggataacctgggaaaaggagacagagggcctgaggcaggaagatgagcaaggatctgggaggaggtgaaggccaaggtgcagcccttacctgggacgatttccagaagaagtggcaggaggagatggagctctaccgccagaaggtggagccgctgcgcgcagagctccaagagggcgcgcgccagaagctgcacgagctgcaagagaagctgagcccactgggcgaggagatgcgcgaccgcgcgcgcgcccatgtggacgcgctgcgcacgcatctggccccctacagcgacgagctgcgccagcgcttggccgcgcgccttgaggctctcaaggagaacggcggcgccagactggccgagtaccacgccaaggccaccgagcatctgagcacgctcagcgagaagg

SEQ ID NO: 144994 - DNA, 392 bp, Homo sapiens
agctgagcggcggggggcagtgtcgcctcggtctagggacggcggcggagtcggtggtccctgcgcgatggccacctcggtgttgtgctgcctgcggtgctgcagagacggcgggactggccacatccctctgatggagatgccggccgtgcatttgctcactcagctgatgggttctgatgtttgcattgtgcctagctgcctacctttatgcgggatctgagtctggttattgctttgtgcgatccctcgctgtctgatcttttttaccttctggtggggtgttgggtaatgtttcttttgagggtctcttggatccctggtcgtcttgtttagcttttatggctgttggcccttttgtctctctgggggatctgtcatttcctctaccg

SEQ ID NO: 144995 - DNA, 499 bp, Homo sapiens
aatgggttgggcctccagcgtagcatactgacacctacccccacccccacctgatcgccagacctcagggttttccggagctgaagaatgacacattcctgcgagcagcctggggagaggaaacagactacactcccgtttggtgcatgcgccaggcaggccgttacttaccagagtttagggaaacccgggctgcccaggactttttcagcacgtgtcgctctcctgaggcctgctgtgaactgactctgcaggtgaggggtccacaaaagagggaaagatttatgccttcagtctgccacctagcaacctgtctcctgtttcctacagccactgcgtcgcttccctctggatgctgccatcattttctccgacatccttgttgtaccccaggcactgggcatggaggtgaccatggtacctggcaaaggacccagctttccagagtcattaagagaagagcaggacctaaaacgcctactggatccagaaatggtag

SEQ ID NO: 144996 - DNA, 786 bp, Homo sapiens
cccacgcgtccgcccacgcgtccgctcagattcaggttaaattgtggattgagctcgcagttacagacagctgaccatggaagcgaatgggttgggcctccagcgtagcatactgacacctacccccacccccacctgatcgccagacctcagggttttccggagctgaagaatgacacattcctgcgagcagcctggggagaggaaacagactacactcccgtttggtgcatgcgccaggcaggccgttacttaccagagtttagggaaacccgggctgcccaggactttttcagcacgtgtcgctctcctgaggcctgctgtgaactgactctgcagccactgcgtcgcttccctctggatgctgccatcattttctccgacatccttgttgtaccccaggcactgggcatggaggtgaccatggtacctggcaaaggacccagcttcccagagccattaagagaagagcaggacctagaacgcctacgggatccagaagtggtagcctctgagctaggctatgtgttccaagccatcacccttacccgacaacgacgtggctggacgtgtgccgctgattggcctttgctggtgccccatgggaccctgatgacatacatgggctttatcctgacatggacccagaacatgtgggcgcctttgtggatgctgtgcataaacactcacgtctgcttcgacagaactgagtgtatacctttaccctcaagtaccactaacacagatgattgatcgtttccaggacaataaaagtttcggagttga

SEQ ID NO: 144997 - DNA, 379 bp, Homo sapiens
ccacagactcagagagaacccgccatggtgctgtctcctgccgacaagaccaacgtcaaggccgcctggggtaaggtcggcgcgcacgctggcgagtatggtgcggaggccctggagaggatgattctgttctttaccaccaccagaacctactttccgcgcttagacctgagcctcttatctgaccctgtatagttccccgtgattacagaggccttcgcgcgaacatactccggagtcatcgcggaccttctgtccaatacagagccacatatgattcagatggcggcgtcataatttgttcggaaccgagcccttatacctgctacatatatttgcactccgatgatacattaatatgacatcaaaaccttccacg

SEQ ID NO: 144998 - DNA, 412 bp, Homo sapiens
actagtgtttttttccacttgttaaattgatcttgtatttggttttgcgaattttcaaacaaagaataaagaacatgaaattagactatatattctgtcattttcccctgagttttttctaatcttgtcccttcatacttttccccaaaggttcagcgtcttccatttctttcaagctcaaatctttcactggatgttttgaggggtaatgatgacactattggatttgaggatattcttaatgatccatcacaaagcgaagtcatgggagagccacacttgatggtggaatataaacttggtttactgtaatagtgtgctgttcatggaaaccgagggctgcatcttgtttatagtcatctttgtactgtaatttcatctacacaacattaaaagtactgacacctaaaaa

SEQ ID NO: 144999 - DNA, 951 bp, Homo sapiens
gccagccctcggaaacggaagtgatgcggcggggtcgactgacggtaacgggcgcagagaggctgttcgcagagctgcggaaagatgaatgccagaggacttggatctgagctaaaggaccagtttcccagttactgaactttcagcaagtggacctttggaaagtccatgatcttcttcggaaaggttttttcttgtgtgaaaaatgaacttttgcctagtcatcccccttgaattatccagaaaaaaatttccagcttcaaccaagattaaaatgaaatttttccacacttgaggaaacatttcaggggtctattttgctcccgctaaaaattacaggtggggatttccaagggcagtgcaggcaggtttcagcgtcttccattttctttccaagctccaaatctttccactgggatggtttttgaagggggtaatgatgagactatttgggatttggaggatattctttaatgatcccatcacaaaagcgaagtccatggggagagccacacctttgatgggtgggaatataaaccttgggtttactgtaatagtagtgctggttcatggaaaccgagggctgccatcttgtttatagtcatctttgtactgtaatttgatgtacacaacattaaaagtactagacacctgagaatttctgctcaagtagtatcagtgatcatttaaaatttggaggggtctttggtttacagccatgtgacaattaaaagcactaaagggagatcatgttaaagctcttaatttatattaaaacagtagcctttgtctttaaaaaagttgttgctcatgaatattataaaatgatctacaggtttcaattcaacctgtttctaggtttttttgtaaatttagttttgattaagcattataagcatttgagtctataaactttatagtagcatctttcagaataaacatttttaattg

SEQ ID NO: 145000 - DNA, 2037 bp, Homo sapiens
atgacggatgaagatagttcagatggaaggcccagtgtgagcaaagccacagcagcagcaaagcatgaggaagttctggagactgggaagtccaagatcaaggcactggcagattcagtgtctggtgagggcctacttcttcggttaacaggtgatcgtcttctagctgtgtcctcacgtggtggaagggatgtgggaggtccctgtgatctctttaatgagggcactaattccattcatgagggcttcaccctcgagagtaagacgggcagctacacccgcagcagttacctgccagctgagcaactggtcagagtggacagattgctttccgtgccaggacaaaaagacactgtgatgacacttagtgctatccagacaatccagggtaatatcctcatctcagaaactttaataatgtctgcaatggccggctttccaaataagtaccgacaccggagcctcttgcagccaaacaagtttgggggaaccatctgcagtggtgacatctgggatcaagccagctgctccagttctacaacttgtgtaaggcaagcacagtgtggacaggatttccagtgtaaggagacaggtcgctgcctgaaacgccaccttgtgtgtaatggagaccaggactgccttgatggctctgatgaggacgactgtgaagatgtcagggccattgacgaagactgcagccagtatgaaccaattccaggatcacagaaggcagccttggggtacaatatcctgacccaggaagatgctcagagtgtgtacgatgccagttattatgggggccagtgtgagacggtatacaatggggaatggagggagcttcgatatgactccacctgtgaacgtctctactatggagatgatgagaaatactttcggaaaccctacaactttctgaagtaccactttgaagccctggcagatactggaatctcctcagagttttatgataatgcaaatgaccttctttccaaagttaaaaaagacaagtctgactcatttggagtgaccatcggcataggcccagccggcagccctttattgaaattcattttcacaagaatcttcacaaaggtgcagactgcacattttaagatgaggaaggatgacattatgctggatgaaggaatgctgcagtcattaatggagcttccagatcagtacaattatggcatgtatgccaagttcatcaatgactatggcacccattacatcacatctggatccatgggtggcatttatgaatatatcctggtgattgacaaagcaaaaatggaatcccttggtattaccagcagagatatcacgacatgttttggaggctccttgggcattcaatatgaagacaaaataaatgttggtggaggtttatcaggagaccattgtaaaaaatttggagaaagggccaggaaggccatggctgtggaagacattatttctcgggtgcgaggtggcagttctggctggagcggtggcttggcacagaacaggagcaccattacataccgttcctgggggaggtcattaaagtataatcctgttgttatcgattttgagatgcagcctatccacgaggtgctgcggcacacaagcctggggcctctggaggccaagcgccagaacctgcgccgcgccttggaccagtatctgatggaattcaatgcctgccgatgtgggccttgcttcaacaatggggtgcccatcctcgagggcaccagctgcaggtgccagtgccgcctgggtagcttgggtgctgcctgtgagcaaacacagacagaaggtaaggagccaaagcagatgggagctggagttgctggagctcctggtctgtatgcagagcaggcatccaggaaaggagaagagagtgtgacaatccagcacctcagaatggaggggcctcgtgtccagggcggaaagtacagacgcaggcttgctgagggcctctggacacaggctggaccagatgctgtggatgtcgacccctgcactgactattggataaagacttctttcaactaa

SEQ ID NO: 145001 - DNA, 276 bp, Homo sapiens
ttctggagactgggaagtccaagatcaaggcactggcagattcagtgtctggtgagggcctacttcttcggttaacaggtgatcgtcttctagctgtgtcctcacgtggtggaagggatgtgggaggtccctgtgatctctttaatgagggcactaattccattcatgagggcttcaccctcgagagtaagacgggcagctacacccgcagcagttacctgccagctgagcaactggtcagagtggacagattgctttccgtgccaggacaaaaag

SEQ ID NO: 145002 - DNA, 2383 bp, Homo sapiens
gggtgagttttcaacatcagatagatcttacagggcccagcctgtacacatcttttactccaatttcctgaatacatagctttattccttcaaggtaatatagtgcgggggcttctggctgagatgtttgctgttgttttcttcatcttgtctttgatgacttgacagcctggggtaactgcacaggagaaggggaaccaaagagtaagacggccagctacacccgcagcagttacctgccagctgagcaactggtcagagtggacagattgctttccgtgccatgacaaaaagtaccgacaccggaacctcttgcagccaaacaagtttgggggaaccatctgcagtggagacatctgggatcaagccagctgctccagttctacaacttgtgtaaggcaagcacagtgtggacaggatttccagtgtaaggagacaggtcgctgcctgaaacgccaccttgtgtgtaatggagaccaggactgccttgatggctctgatgaggacgactgtgaagatgtcagggccattgacgaagactgcagccagtatgaaccaattccaggatcacagaaggcagccttggggtacaatatcctgacccaggaagatgctcagagtgtgtacgatgccagttattatgggggccagtgtgagacggtatacaatggggaatggagggagcttcgatatgactccacctgtgaacgtctctactatggagatgatgagaaatactttcggaaaccctacaactttctgaagtaccactttgaagccctggcagatactggaatctcctcagagttttatgataatgcaaatgaccttctttccaaagttaaaaaagacaagtctgactcatttggagtgaccatcggcataggcccagccggcagccctttattggtgggtgtaggtgtatcccactcacaagacacttcattcttgaacgaattaaacaagtataatgagaagaaattcattttcacaagaatcttcacaaaggtgcagactgcacattttaagatgaggaaggatgacattatgctggatgaaggaatgctgcagtcattaatggagcttccagatcagtacaattatggcatgtatgccaagttcatcaatgactatggcacccattacatcacatctggatccatgggtggcatttatgaatatatcctggtgattgacaaagcaaaaatggaatcccttggtattaccagcagagatatcacgacatgttttggaggctccttgggcattcaatatgaagacaaaataaatgttggtggaggtttatcaggagaccattgtaaaaaatttggaggtggcaaaactgaaagggccaggaaggccatggctgtggaagacattatttctcgggtgcgaggtggcagttctggctggagcggtggcttggcacagaacaggagcaccattacataccgttcctgggggaggtcattaaagtataatcctgttgttatcgattttgagatgcagcctatccacgaggtgctgcggcacacaagcctggggcctctggaggccaagcgccagaacctgcgccgcgccttggaccagtatctgatggaattcaatgcctgccgatgtgggccttgcttcaacaatggggtgcccatcctcgagggcaccagctgcaggtgccagtgccgcctgggtagcttgggtgctgcctgtgagcaaacacagacagaaggagccaaagcagatgggagctggagttgctggagctcctggtctgtatgcagagcaggcatccaggaaaggagaagagagtgtgacaatccagcacctcagaatggaggggcctcgtgtccagggcggaaagtacagacgcaggcttgctgagggcctctggacacaggctggaccagatgctgtggatgtcgacccctgcactgactattggataaagacttctttcaactaagagaagatgcaaatcagcacacttttttctttgttctgccagcttccaggcctaagactaggttttgctgtctacagccaactattctattagttacaaaactcaatcattttattcagcaactggatgttgactgttaactagaagctctgtcctacttacagcactttggatcatcaaaaaaataaagtaaaatagaaaactgagaaaactcaatccatgaccagggagaacttacaggatgttagagacaaaacaagcagacacctgaaacaatcaacgcccaataaaacaaagtaggatgaaaattctcttagttctttgataacaatttgttcactcatagaaacattattaattggtagggtaagcagacactctgaaacaatgagaaaaatactaaaaattgacttgagttatttc

SEQ ID NO: 145003 - DNA, 487 bp, Homo sapiens
ccaggctggagtgtagtgatgggatcttggctcattgcaacctctacctcccaggctcaagcaattctcctgattttaaaccctggcaacttatccaaagaattttaaagcactaaggagaccaaacaaaacatatttgtgggtcatatccagtcacagacctctaaatttgcaatctctctcatccagatacatcccataaacatgagatcaggcaccaagacattcatgatggtttaaggaaataaacaaagatctaagtttcccatatggactttcaaaattttccctgatatgcttccaagctgacctacctgttcctctctcccagcagcccccagcccgccaacaggactcacagctcttcctcctgcccaagattcctagagtctccctagactcctccaaagcccaagtcccaatccttctaagagacagttccagctagccccacagccaggaacaaacctcgtggccgcgtacatac

SEQ ID NO: 145004 - DNA, 778 bp, Homo sapiens
cgacttttttttgtagtaacatccagtattttaatatttatgcttgataagtcatttaagttgaagactctttatgtattaatttcagcaagtaacataaccacacagaatagacaatgaaagcataattagtcattatacacaattataatttgataaaaaatttcaacatatacagaagtataaagaatgtgtatctatcatgcagcttctacaattatcattccaactcctcgtttctttgatattgccaacaatttacaccctgccccaattccaaatttggaaacaagtcccagatattaatataatttccctcttcaacatttcagtatgcctgagagattcttgtttaaaaaaaacatttttttgaggggcacagggtctctctctgtcacccaggctggagtgtaatggtgcgatcttggctcactgcaacctctgcctcccaggctcaagcaattctcctggttcagcctcctgagtagctgggactataggcatgcaccaccacgcccggctaatgtttgtatttttagtagagtcaggttttcaccatgttggccaggctggtctcgaactcctgacctcaagtgatccgcccgcctcagcttcccaaagtgctgggattaggggcataagccgccgcgccggcctggacttctgacctctaaacaatcacctggccctacccaacaccccacagacacaccatccatgtgcgcaaccatgtgagtctgaaattacagcattagaagttcactcctttgctttctct

SEQ ID NO: 145005 - DNA, 425 bp, Homo sapiens
  misc_feature (1)...(425): n = a,t,c or g
attcactctgtgtaattgtttcnnnnnnnnnnnnnnnnnnnnnnnnnnngatgcaatctcattgcatatttttgcttttgttatctgtgctnnnnnnnnnnnnnnnnnnnnnnnnnnnnnnnnnnnnnnnnnnnnnnnnnnnnnnnnnnnnnnnnnnnnnnnnnnnnnnnnnnnnnnnnnnnnnnnnnnnnnnnnnnnnngaggcttgggggggtggaggagggatggggaaaagggagacttagcctggtgctgcatttgaaatgtggtgtgcagatcttattgatgaccctgaccggtaagaccatctccctgtaattggatcccagtgacaccatcgttaatgtgaaggccttgattcacgatatagaacgcatccctcccgaccatgagatgctcatctttgcatgcaagcagctagaacg

SEQ ID NO: 145006 - DNA, 418 bp, Homo sapiens
  misc_feature (1)...(418): n = a,t,c or g
attcactctgtgtaattgtttcnnnnnnnnnnnnnnnnnnnnnnnnnnngatgcaatctcattgcatatttttgcttttgttatctgtgctnnnnnnnnnnnnnnnnnnnnnnnnnnnnnnnnnnnnnnnnnnnnnnnnnnnnnnnnnnnnnnnnnnnnnnnnnnnnnnnnnnnnnnnnnnnnnnnnnnnnnnnnnnnnngaggcttgggggggtggaggagggatggggaaaagggagactgcgcttgaaccttcgccttagaggaggcttgcacatctacatgattaccattctcgatttgaacatcagcctggaagatatgccaaatcccaccatctaaaatgtgaaggccatgatcctttccaacaatggcatccattcccacgaatagaggcttatctttgagggtatgcggg

SEQ ID NO: 145007 - DNA, 433 bp, Homo sapiens
tgttggatcattccgcctagcttggcacgaggcgcgcaacgggttctaggctgcaggcagctcgaggacccgcttcctcgccccggctcggcctggcagatagcagaggcagcaggccgtgccgggggggcatgttgctgtaaccagtggcccaggggatgttacggtggacagtgcacctggagggcgggccccgcagggtgaaccatgctgcagtggctgtcgggcatcgggtatactccttcgggggttactgctctggtgaagactatgagacactgcgtcagatagatgtgcacattttcaatgcagatacgcacaagtggttcacaccccgagtgtcagggacagttcctggggcccgggatggacattcagcctgtgtcctaggcaagatcatgtacatttttgggggctacgagcagcaggcggg

SEQ ID NO: 145008 - DNA, 3138 bp, Homo sapiens
atgttacggtggacagtgcacctggagggcgggccccgcagggtgaaccatgctgcagtggctgtcgggcatcgggtatactccttcgggggttactgctctggtgaagactatgagacactgcgtcagatagatgtgcacattttcaatgcagggtgggaacgggctgctgatgaggtttggctgtggtctctgggaccaaggggattggggacaaacatctggtttgggaaaagtggacagcctggagggaggttcccagggctgagcagagctgtgcccacagtgtccttgcgttggacaaagctgcccccggtgaagtctgccatccgtgggcaagctcctgtggtaccctacatgcgctatggacactcaaccgtcctcatcgacgacacagtcctcctttggggcgggcggaatgacaccgaaggggcctgcaatgtgctctatgcctttgacgtcaatacgcacaagtggttcacaccccgagtgtcagggacagttcctggggcccgggatggacattcagcctgtgtcctaggcaagatcatgtacatttttgggggctacgagcagcaggcggactgtttttccaatgacattcacaagctagataccagcaccatgacatggactcttatctgtacaaagggcagccctgcacgctggagggacttccactcagccacaatgctgggaagtcacatgtatgtctttgggggccgtgccgaccgctttgggccattccattccaacaatgagatttactgcaaccgcattcgagtctttgacaccagaactgaggcttggctggactgtcccccgactccagtgctgcctgaggggcgccggagccactcggcctttggctacaatggggagctgtacatctttggtggttataatgcaaggctgaaccggcacttccatgacctctggaagtttaatcctgtgtcctttacctggaaaaagattgaaccgaaggggaaggggccatgtccccgccggcgccagtgctgctgtattgttggtgacaagattgtcctctttgggggtaccagtccatctcctgaggaaggcctgggagatgaatttgaccttatagatcattctgacttacacattttggactttagccctagtctgaagactctgtgcaaactggccgtgattcagtataacctagaccagtcctgtttgcctcatgatatcaggtgggagctgaatgccatgaccaccaacagcaatatcagtcgccccatcgtctcctcccatgggcggggcaggggctgccgtgagcggaagcggcgccattcgtcttccgagcgctactgccagctgatgccgggagctaactaccgcgccggggccggggccggggccggggcccgacgtccccgcggggcccgggaccgcgaggaggacggcgggggcctggagcccgcggccgtggcccgcgacctattgaggggcacatctaacatgtcatttgaggagctgttggaattgcagagccaagtggggactaagacgtacaaacaattggtagctggaaatagtcctaagaaacaagcttctagaccacctatccaaaatgcatgtgttgcagataagcacaggcctctggaaatgtcagccaagatccgagtaccatttttacgtcaggttgttcccattagtaaaaaggtgagtgagcagttcgcccggcacattgaccagcagatccagggcagccggatcggtggagcccaggaaatggagaggctggcacagctgcagcaatgcctgcaagctgtcctgattttctccggcttggagatagccaccacttttgagcattattaccagcactacatggcggaccgtctcctgggcgtggtctcgagctggctggagggggccgtgctggagcagatcggtccctgcttccccaaccgcctcccccagcagatgttgcagagcctgagcacctctaaggagctgcagcgccagttccacgtctaccagctccagcagctggatcaggaactcctgaagctggaggatacagagaagaaaatacaggtgggccttggggccagtggcaaggagcacaagagcgagaaggaagaggaagctggggcagcagcagtggtggatgtggcggagggagaggaggaagaggaggagaatgaggacctctactatgaaggggcaatgccagaagtgtctgtgcttgtcctgtcccgacactcctggcctgttgcctcaatctgccacacactgaaccccagaacctgcctgccctcctacctgaggggcactttgaacagatactccaacttctacaacaagagtcagagccaccctgcccttgagcgaggctcacagaggcgactgcagtggacgtggctgggctgggctgagctgcagtttgggaaccagaccctgcatgtgtccaccgtgcagatgtggctactgctgtatctcaacgacctgaaggcggtctctgtggagagtctgctggcgttctcagggctctccgcagacatgctcaatcaggcgattgggcccctcacctcttcaagaggccccctggaccttcacgagcaaaaggatataccaggaggggtcctcaagattcgagatggcagcaaggaacccaggtcgagatgggacattgtgcggctcatcccacctcagacgtacctgcaagctgagggtgaagacggccagaacttggagaagagacggaatcttctgaactgcctcatcgtccgaatcctcaaggcccatggagatgaggggctgcacattgaccagcttgtctgtctggtgctggaggcttggcagaagggcccgtgtcctcccaggggtttggtcagcagccttggtaaggggtctgcatgcagcagcactgacgtcctctcctgcatcctacacctcctgggcaagggcacgctgagacgccatgacgaccggccccaggtgctgtcctatgcagtccctgtgactgtcatggagcctcacactgagtccctgaacccaggctcctcaggccccaacccacccctcaccttccataccctacagattcgctcccggggtgtgccctatgcctcctgcactgccacccagagcttctctaccttccggtag

SEQ ID NO: 145009 - DNA, 929 bp, Homo sapiens
  misc_feature (1)...(929): n = a,t,c or g
ggacccgcggccccgccccggctcggcctggcagatagcagaggcagcaggccgtgccgggggggcatgttgctgtaaccagtggcccaggggatgttacggtggacagtgcacctggagggcgggccccgcagggtgaaccatgctgcagtggctgtcgggcatcgggtatactccttcgggggttactgctctggtgaagactatgagacactgcgtcagatagatgtgcacattttcaatgcagtgtccttgcgttggacaaagcgcttggctgtgtttatctcgttggggactaaggcgtcggttggcgcgcaacgggttctaggctgcaggcagctcgaggacccgcggccccgccccggctcggcctggcagatagcagaggcagcaggccgtgccgggggggcatgttgctgtaaccagtggcccaggggatgttacggtggacagtgcacctggagggcgggccccgcagggtgaaccatgctgcagtggctgtcgggcatcgggtatactccttcgggggttactgctctggtgaagactatgagacactgcgtcagatagatgtgcacattttcaatgcagtgtccttgcgttggacaaagctgcccccggttgcccccggtgaagtctgccatccgtgggcaagctcctgtggtaccctacatgcgctatggacactcatccgtgctcgtctgacgacacagtcctcctttggggcgggcggaatgacaccgaaagggccctgcaatgtgctctatgcctttgacgtcaatacgcacaagtggttcacaccccgagtgtcagggacagttcctggngcccgggatggacattcagcctgtgtcctangcaagatcatgtacattnttggaggctacgagcagcaggcggactggttttccaatgacattcacaagcta

SEQ ID NO: 145010 - DNA, 637 bp, Homo sapiens; identical to SEQ ID NO: 144817
  misc_feature (1)...(637): n = a,t,c or g

SEQ ID NO: 145011 - DNA, 687 bp, Homo sapiens
catcgtagacgtctcgagccagaattcggcacgaggaggttatcaataagctcctagtccagacgccatgggtcagtttcacagaggaggacaaggctactatcacaagcctgtggggcaaggtgaatgtggaagatgctggaggagaaaccctgggaaggctcctggttgtctacccatggacccagaggttctttgacagctttggcaacctgtcctctgcctctgccatcatgggcaaccccaaagtcaaggcacatggcaagaaggtgctgacttccttgggagatgccatatgagcacctggatgatctcaagggcacctttgcccagctgagtgaactgcactgtgacaagctgcatgtggatcctgagaacttgaagctcctgggaaatgtgctggagaccgctttggcaatccaatttcggcgcaaaaattctcccctttaagggcaggcttcctggcagaagatggcagaagatggtgactggagtggccagtgccctgtgcttcacaaaacacttggacttcatgtgcatgatgcaaagctttcaaagataggcttttattctgcaagcaatcaaaatataaaatctattcttgctaggagatcacacatgattttcttcagctcttttttttacatctttttaaatatatgagccacaaagggtttatattgagaa

SEQ ID NO: 145012 - DNA, 420 bp, Homo sapiens
gtcagaagaggcctctaaaggtcaggccagtcagggttgtcatctgccctacagtctgagtcagctccctttccaaaagtccgatgcccagccacaccaatggcacggcctgtccaccttcgcaggtcttcgggtaagtaaaaagtgtgctcccatgtcagcagggtctaagcaccggcaagagcctcacttttccctggtggctctgccactgaactcactgttagacaccggaagcggatgcgctttatagccataatcccggagggaatcttgacaggcacacagcatccaaaccatcagcgcttttgcagccggggcccgcctggcagaggggttctgcctgcagcctgcaaatcctgccagagtcaagggttggctttcctactggtcctccttaggctagaaaagtgtcaatcc

SEQ ID NO: 145013 - DNA, 940 bp, Homo sapiens
cgcgtcgactttttttttttttttaagcccccgagacgggagtcttgctctgtcacccaggctggagtgaaaagtacagtgcaatttgctaatgcacatcctgcacatttctggagaattataataaacttatctgcaagtgaagcaggcctcctcttctgtaatctctgaaaacatctggaatatattgcatatattatgaaagggacatccttttccacagatgcccccaccgttacaacgtgtacctttgccttagtttaaaaaattgactttaatactttatgcaaatagtgcctgtccccaaattcctagcatgcacatggatctaccaacaaaaaaactaagttttcaagtgtgtgaacataaacttcaaattaaacctctggatgccttagccccatggtatcaatttaccaacagatttttcttcatccatggtctggagaccacattcatgatttctataagacagaaatagagcagataaactatactgtatatgctgagtacaagaatagtgtgggaacgataatgcgtgcgaaatgaaagctacaaacactcctgtaaaataggcttagaaagactagtaatagaaatcaccaaagtaccagctaaataacggtgttaataagagtacactgttaactgaaaatggaaaaaaataaatgtattttttgagacagggtctcgctctgctgcccaggctagagtgcaatggtgccatcttggctcactgcaaccttagcatcctaggctcaaagaacctcctgcctcagcctcccaaacagctgggactacaggcatgcaccaccatgcctggctaagttaagtgtcgttcgtaaaaatgaggttaggccacattatacaggatattcgtcgtctcatggactcgatcaatatgcctcattatatgcatcaggcgccacccatgtgtcag

SEQ ID NO: 145014 - DNA, 2616 bp, Homo sapiens
gcgtcgacttttttttttttttttgactcaatgttttcacccactttaatagaatattctaactatggcgggacaaattgaaaacacctgtattcaggttacaaatgtgttctaaggttgaggcgcgagcacctctccacaggcactggtcagtagcggacacggccatctcccggctggccggagagcgccgtcacccacttgaaaaccccacccaccagccagccaagcggtcacaccaaaaccccaggacctttcagacagggatgaatgggtggggggccccgcaatggggcttaacttgaggaaaggcagggactttgacgtttcattacgtttccactggaaacggcagggattttccccaggcccagttcccttcagtggggaggaaggatttgccgaaggcccggctccgggcagccagggtgggcgcctgcgtcatgaaggacggggctccgcatcttcaagccctggttggcagggagctgcgtttcttccgcaacaggccttgcgccctgcctaggaagtgggcacatcttacctgctcgagggcaccaaggtggttcagaaacgtttaaggacgaagccacagcgaaaagcccgcagtcccttacaggcaaagaagggataaataaatatgaggtgacccgcagcagctctcacctgggctggtgtgtcacaaccctgacccacccctaaaaaaaaaaaaaaaatcaagaagcaacatcctaaggagaacagggccctactctacacagccctttctgagatgatcggcatacagcaggtgatgcaggctgcacactcagcagattcagcggctggaaacagcaagtgggtttcttcggatgaaagggaagaattcagtccaactgcaggaggggtgggagaggttccaagatcctgggaaccacatcaccagacctcggccctttttgccaagtgacccccaccccaccctgatgtgtctacagggccctcccacagggaaaggcccagggaagtccagagctacaggcaccaaggctgcagagggtgctggacgaaacctcctatttctgaaatgcatttcagttgccactgtacaagttaatcaaaataataaggaaaaaggaaaagtgaaagtgaaaatcatgcacttgaaaacgagttagatggagtaagctctgtccacgggattgtgctgcggcaaggaccgaggccccgcccacaggcctggagtcccgacagccggtctgccaggcacccgcctccgcttcctactgctgcttgcattccgccggctggctgggttccttctagaaacgtatgaatgattaacagacaaaaattacaccttggggttaatttccgcatcatcctcgtcttctccctcctcgtcaccttctaattcctcctcttctccttcttcaccttcttcaaaattgtcatcatcttctatggcctccccagtgaagtacagcacagcccgcgggactatccgctcacggaaaaagtgtccaatttcaaaatcagaggctaatgtgaattcagaatcttcatccagtgattctccatccccggatgcaacagacttgcctttcaatggattgaagaagttgaaaaaggactcattgggtacttgtttcgtaattgttctaacagtgcctcgacccttatgcttctgctttttcttgatggttttgacagtaacattctttcctttcttccagtcaatagtacacccgtcacagtccacaatctcaggaccttcaaaggaaaagggatcagccttatctggttctgatttcatcttgtaggtttttgtcaggactgagttggtaaagtagtcgttgggttcaaagtggaactctaacacaaaagacataggctgtccagggtcagaaaatttcactttaatatcctgcaggtgtttcaagattggttcatcatattcctggactaattcactcagcatgtccacatttctgaagatggtaaaccagaactctggaattcctttgggatctggctcttcagccgttgccgctgctttttctggtgacgactactttacttttcatgtctccagccaatttctcttcctcttcattttcactgtgccattccgattccgcatctgttggttcaacatcgccggtgataaattctcttctcttgtcaaagagaggctggtatagcgctgccataactttctttcccaagtccatgtaccctccttccatagaacttggccttcctatgtgagcaacatctcacctgaagttgtttcaatggcattaattcttctttttactggctttaggtaaagtttcggatggtagctgggaaggggtgtggaggggacatggtcaagtcggctccggtaaagctggccagaactcgaggattctggcatcacctgatctgtggagcttttctgtgttacttgcatttttaggcagcttccacggaatctgaaggaaccccatctgaaaaactgtgatctgccatctgaatgtttttatccccttaaaaacgggaagcctgaacgctccggcgcgcccggccgcgtaaccgccacagcccccgcacgcgggacgggctgggctagcgggagatttgagcggccgc

SEQ ID NO: 145015 - DNA, 515 bp, Homo sapiens
tagttaggggcctctatatcaaaattttctgaaaccatcactgcctctgttatgtatctctctcgtaatgaagccaactcatacggatccacataaagtcctgcaggaatgtcctgtttaattaagagacggcaggtgtgcaagtcctcaatgctttccccaaacttcactttgattaaaaggtctccagatgtaattaaaagccattagatgctgaagaagaaaagatcagtgacttggagacacagcaacagaaactacccacactgaagcacagagaggaaaaaagaccagggagaaaaaaggaaccgcctccatggcctttaaacaatatcaagtagtctagtatacatatatttggagttcctgtggaaaccatctttcaaaacttcttgcctcaaaataatttcagaacacatggcccttatgccggcgtcagagcgcgcggcggtgaaggccgcggcgggcccgcgcgtgagcccggtcgccgccccgaggagcagccaggcggccgc

SEQ ID NO: 145016 - DNA, 933 bp, Homo sapiens
cggccgcctggctgctcctcggggcggcgaccgggctcacgcgcgggcccgctcgcggccttcaccgccgcgcgctctgacgccggcataagggccatgtgttctgaaattattttgaggcaagaagttttgaaagatggtttccacagagaccttttaatcaaagtgaagtttggggaaagcattgaggacttgcacacctgccgtctcttaattaaacaggacattcctgcaggactttatgtggatccgtatgagttggcttcattacgagagagaaacataacagaggagaagacttcatggcggcggctatggttgccttctgataattgaaggatccctagtggaataaggaacgaatttattgcagacattgtaagcaagaacaactggtaaatgttataggcagtgatggtttcagaaaattttgatataggaggcccctaactatttgtccaaggagtctgaagttctcatttatgccagacgagattcacagtgcattgactgttttcaagcctttttgcctgtgcaactgcccgctatcatcggccgcacagtgaagatggagaagcctcggattgtggtcaataacccagatttgttgatgttttgtgaccaagagttcccgattttgaaatgctgggctcactcagaagtgggcagccccttgtgctttgggagaatgagggatatctgccaatgggaacaaggatgaagtattaaatccagtatataaggactgtggatttctacaagttccagtgggactgactgtacatacctctctagtatgttctgtgactctgctcattacaatcctgtgctctacattgatccttgtagcagttttcaaatatggccatttttccctataagttttatgtagttaaatgcttcctagaaacctaaataagatctattaatttc

SEQ ID NO: 145017 - DNA, 1206 bp, Homo sapiens
ctttttaacttttttattgtaaattaaagcacacacataaaaatctactcaaatacatacgtttagtgaattattataaggcaaataaatacccttgtaactaccacctaggtcaagacatagggccttgccagccagcctagcagaagaaggactttgccaccaatacctttattctgatgtttcaacccttagaaaacacttgcagccctcaccttggtcacaaaaacatcaacaaatctgggttattgaccacaatcgagagcttctccatcttcactgtgcgcgccgatgatagcggcagtgcacaggcaaaaaggcttgaaaacagtcaattgcactgtgaatctcgtctggcataaatgagaacttcagactccttggacaaatagttaggggcctctatatcaaaatttttctgaaaccatcactgcctctgttatgtttctctctcgtaatgaagccaactcatacggatccacataaagtcctgcaggaatgtcctgtttaattaagagacggcaggtgtgcaagtcctcaatgctttccccaaacttcactttgattaaaacggtctctgtggaaaccatctttcaaaacttcttgcctcaaaataatttcagaacacatggcccttatgccctttattgtaattattcccgcacttgcccgtctcagtagtacaagcagtttgccaactactacttgcacgaacaactagcagtttgccacggagtcctatattcagtttggggattctcaggcctcacagggcgctaaggccttgcctggccccttggtgatcagaagcttcgtgcagctcaagagcatcccaagacgcttgacggctgactttccttctcagaactttagtaacagggcggccagtccagcctgggaaccgcagggcccgagcccgactctcccggagacccgggatccgccgcagagcaaagcgcacgggagggaaggagggcacacggctctaatgtctgacctcctccggctcgctctactgatctaggtcccgcgccgggtccccacatccccgcaacccgccgagaggcccgggagccgggaccgctcccacgctctggccccccaagccccgccccccttaccggcgtcagagcgcgcggcggtgaaggccgcggcgggcccgcgcgtgagcccggtcgccgccccgaggagcagccaggcggccgc

SEQ ID NO: 145018 - DNA, 326 bp, Homo sapiens
gctaccacgcccgccagcatgtcttttttaaacattttaaaatctattctttatcttgtttcagagaggatttggagttacagaaacacattagactgggcatggtggctcacacttgtaatcccagcacttcaggaggtttctcctagtgtactctcacacttctgataccagatatgtgggggaggggtttcccccacacattaagcaagtgtgaaacatgatatagaaaaatgacttcactctgggccgggtgtagtcgtcacgcctgtaatcctagcactttgggaagccgaggaatacagatcacccgaggtcaggagttc

SEQ ID NO: 145019 - DNA, 474 bp, Homo sapiens
  misc_feature (1)...(474): n = a,t,c or g
ngagtgctaanaaatataagtgcatttgaaaaaacacagctagtcccggataacatcagtattttgggtaacatatgcaccanaaagaatccacatggaagcattaagtgacccaaacatcaacatgaaaccaatgaaaagccaaactcgagcacctgagcattggatacagcatttatcatgaagaaagccaatgtggaaaatgcaccacatgtgtgaaaggcatggttcaactgttctggcaatatacctgcgacaacagatgccacagcatttcttctctcactccagtcaatacattcacattctggccaacgaaaattatctaggaagcctgccatttttacttcttaagcataaatttttcattaaatgctgtatcccagcttcctcaaacgcccacgccgacttcaggcgcgcgcgcaggaaggagactgctgcgccacaaccctgccggcgtcccgcggcacgaaa

SEQ ID NO: 145020 - DNA, 364 bp, Homo sapiens
tggcttttcattggtttcatgttgatgtttgggtcacttattgcttccatgtggattctttttggtgcatatgttacccaaacactctgatctacaaatttggaagaaccgaagagctatggacctgagatcacttcttaagtcacattttccttttgttatattctgtttgtagataggttttttatctctcagtacccattgccaaatggagtagattgtacattaaatgttttgtttctttacatttttatgttttgagttttgaaatagttttatgaaatttctttatttttcattgcatagactgttaatatgtatataatacaagactatatgaattggaaaaaaaaaaaaaaaaaaa

SEQ ID NO: 145021 - DNA, 547 bp, Homo sapiens
ctgaagtcggcgtgggcgtttgaggaagctgggatacagcatttaatgaaaaatttatgcttaagaagtaaaaatggcaggcttcctagataattttcgttggccagaatgtgaatgtattgactggagtgagagaagaaatgctgtggcatctgttgtcgcaggtatattgttttttacaggctggtcttagactcctgacctcagttgatccacctgcctcagcctctgcattcagtttattcacatatttttggtaactcccatggcagctcctaggatttcagcggtctgtgggccagaaagcaggcaccagggctgacctcaaggccgtatcagagggccaagcagagttcttttggatacctgcttttcatcccacagggccttagagtcagaggtaaggtagcaacagagctagaatggggcaatgcactcttaccctccttctcaacttttatttaagctgtgctaaatgttttcttcaagggaaccagatttagttctttacagaattttccagtgaaataaaacatgttgtaataaa

SEQ ID NO: 145022 - DNA, 440 bp, Homo sapiens
  misc_feature (1)...(440): n = a,t,c or g
cgacgatttcgtgccgcgggacgccggcagggttgtggcgcagcagtctccttcctgcgcgcgcgcctgaagtcggcgtgggcgtttgaggaagctgggatacagcatttagtgaaaaatttatgcttaagaagtaaaaatggcaggcttcctagataattttcgttggccagaatgtgaatgtattgactggagtgagagaagaaatgttgtggcatctgttgtcgcaggtatattggtaagtgagaaagactggttggtgacatgtatcccttaccttttgccctggaaattaatgccggttcctttgaactgagaatggctttccagaactatttatttcactgctgttttgtatagatgattatcagagttctagatactattgccaagcagaatatggtaggccctggattcattntgactttgtaaatgtgtac

SEQ ID NO: 145023 - DNA, 870 bp, Homo sapiens
ctagcttggcacgaggcgggacgccggcagggttgtggcgcaccagtcttcttcctgctcgcgcgcctgaagtcggcgtgggcgtttgaggaagctgggatacagcatttaatgatacagcatttaatgaaaaatttatgcttaagaagtaaaaatggcaggcttcctagataattttccgttggccagaatgtgaatgtattgactggagtgagagaagaaatgctgtggcatctgttgtcgcaggtatattgttttttacaggctggtggataatgattgatgcagctgtggtgtaatcctaagccagaacagtttgaaccatgcctttcacacatgtggtgtattttccacattggctttcttcatgataaatgctgtatccaaattgctccaggtgaagaggtgatagctatggaaaagcggctgttttaaggaagaacaggtgctccgagtttgggcttttcattggggtttcatgttgatgtttgggtcactttattgcttccatgtggattcctttttggtgcatatgttaccccaaaatacttgatgtttatccgggactagctgtgttttttcaaaatgcacttatattttttagcactctgatctacaaatttggaagaaccgaagagctatggacctgagatcacttccttaagtcacattttccttttgttatattctgtttgtagataggttttttatctctcgagtacacattgccaaatggagtagattgtacattaaatgttttgtttctttacatttttatgttctgagttttgaaatagttttatgaaatttctttatttttcattgcatagactgttaatatgtatataatacaagactatatgaattgga

SEQ ID NO: 145024 - DNA, 458 bp, Homo sapiens
  misc_feature (1)...(458): n = a,t,c or g
gtcttttaggccctaaaaactcacaggttttctgggccttggggtccccccaaagcccgttattccatttaaaaaccggccaattggcccggggccatgggtcccccctgtaattcccgcccctttggaggcccaagtgggggggtccccaagtcccgaaattggggcccccccgggttacaagggtgaacccccttttttcttaaaaccccaaaaatttacccggcaatgcggccagcccccgttatcccaagtaccttggagttttaggcccaaaaaaggccttaaccccggaagccgagccttccattaacttagatcccgcccctgcccttcaacctgggccacaaaaccaaactttgtttccnnnnnnnnnnnnnnnngaaagaaaaaaagaaaagaaactggcaaatgaaaaatattacaactactagatcttcttctgtctgtatatttct

SEQ ID NO: 145025 - DNA, 700 bp, Homo sapiens
gccttctaccaggaagaacgatgccttcttcgtagtttcgggttttgggaaaatgagttccccagaatgctgggagcagagttgtgattcactcttgcccattccctgctgatgccaagccttgctcaggaacttaagaacctggttgtggtcgcgttctctacatgaagacacatgggttgctgtcagtgcttcctgaatggtgcttcaaaccctgattatgaaaatgcagtaagaattgagctgtacagatctggcatgtcacttccttgggcttgtgtcatcagcagttgtgaagtccccattggggacttggtagcatggaaagccacacaaagatgtgctgcatctggttttgtctgcgcgggtactttgttttcaataatattttgtctccttgcctaattttatttgtctatgcacatgtgtgcgtgtgtgtgctcgaatgcatgcgtgtatatgtgtttagggtctcttcccagtgatccgtaactcaccaaaaatcacctgtttttcccaaaattccctggagcagtaaattaccattcttaaagaaggatagagaaaggccaggtgcaatggctgacacctgtaatctcagtgctttgggaggctgcagcaggagactagcttgaggccagtagttcaaggctgtatgccacacctccagactgagcgacagggtgagaccctgtatctt

SEQ ID NO: 145026 - DNA, 427 bp, Homo sapiens
tcatgtcatcaaagtgcttcatgatgactggattttcacaccatttatccaagggccctagtcaatggcagcagcaagaatgaaagtagacacattggaagctagagagtcactgggtgacttttggaggtgttgaaaagtctcctctagagctttggaaggctgaatgcactaaacatgaagagcttgaaagcgaagttcaggaagagtgacgtaaattaaataaaactcatagagtgcaaagagacttcgacaaagacagaaaactagctgttggccagagtgaaagtcctggtcatccgacttccgagaaacctccttcaacctcatcgtctgctggctgtatgttatgcagcctacatatctcccgtggctttcagctaaggagaaaaaggcaattaaatggaaaatgttgcccaattcaaaa

SEQ ID NO: 145027 - DNA, 425 bp, Homo sapiens
ggcagcagcaagaatgaaagtagacacattggaagctagagagtcactgggtgacttttggaggtagcaacaagctcatgaagaaggcattcagtggcttgcactccccacccatcctctcaagtgttgaaaagtctcctctagagctttggaaggctgaatgcactaaacatgaagagcttgaaagcgaagttcaggaagagtgacgttaattaaataaaactcatagagtgcaaagagccttcgacagaaaactagctgttggccagagtgaaagtcctggtcatccgacttccgagaaacctccttcaacctcatcgtctgctggctgtatgttatgcagcctacatatctcccctggctttcagctaaggagaaaaaggcaattaaatggaaaatgttgcccaattcagcagaaaaaaaaa

SEQ ID NO: 145028 - DNA, 430 bp, Homo sapiens
tttcgtcgttttcctggggaagcggcgggcggggtgtatcatccagctgggtccggggagcgccgccgccgcctcgatggggtgttgaaaagtctcctctagagctttggaaggctgaatgcactaaacatgaagagcttgaaagcgaagttcaggaagagtgacaccaatgagtggaacaagaatgatgaccggctactgcaggccgtggagaatggagatgcggagaaggtggcctcactgctcggcaagaagggggccagtgccaccaaacacgacagtgagggcaagaccgctttccatcttgctgctgcaaaaggacacgtggaatgcctcagggtcatgattacacatggtgtggatgtgacagcccaagatactaccggtacacagcgccttacatctcgcagccaagaacagtcaccatgaa

SEQ ID NO: 145029 - DNA, 791 bp, Homo sapiens
gggaagcggcggtcggggtggagcagccagctgggtccggggagcgccgccgccgcctcgatggggtgttgaaaagtctcctctagagctttggaaggctgaatgcactaaacatgaagagcttgaaagcgaagttcatgaagagtgacaccaatgagtggaacaagaatgatgaccggctactgcaggccgtgtagaatggagatgcggagaaggtggcctcactgctcggcaagaagggggccagtgccaccaaacacgacagtgagggcaagaccgcgtaagctgaaacactggtttgcagatatgctggttctggctttttggggtgttctctggaatccttagtatccataggggaatttcacacgtgctccctctccactcccatgttgaaatatgtaagaagatattttaatctagtgcctttctctccaaattccaagtcacatatggagctctaccttgaatgggtatacatgttcccaagtataagcaaaggttttacctcctaagattgcaaccaattgtagatgagacatgaattctctcttcgataagaaatagcataaaagagaaaaaagtattttcctataaccctcaaaccttactgtgtatttatcttaaactacttgtttatttatttgatcttccttaacatagatcattaagtacatgagtagtatgattttgctttatggtttgctgtatgtagtactcttccttgccataattaaagctgtatatttgattaagtatttgtgtgtgtttgtgcatgagcatgtatttgt

SEQ ID NO: 145030 - DNA, 534 bp, Homo sapiens; identical to SEQ ID NO: 144862

SEQ ID NO: 145031 - DNA, 658 bp, Homo sapiens
  misc_feature (1)...(658): n = a,t,c or g
atcgagaccatattccatgtggnggaattccacagactcagagagaacccacccatggttgctgtctcctgccgacaagaccaccgtcaaggcccgcctggggtaaggtcggcgcgcacgctggcgagtatggtgcggaggccctggagaggatgttcctgtccttccccaccacaagaacctacttcccgcacttcgacctgagccacggtttctgcccaggtttaaggggccacgggaaagaaggtggccgacgcgctgaccaacgccgtggccaacgtgggacgacatgcccaacgtcgctgtccgccctgagcgacctgcacgcgcacaagctttcgggtgggacccggttcaactttcaagctcctaaagccactggcctgcttggttgaccctgggccggcccacttccccgtccgagtttcaacccctggcggttgcaacgtcttccctggggacaaagtttcctgggcttcttgttgaagcaccgttgctgaccttccaaataacctttaaaggttggaagcctcgggtgggccatgctttctttgccccttgggcctccccccagcccctcctcccctttcctgcacccgtacccccgtggtctttgaaataaagtcttgagtgggcggcaaaaaaaaaaaaaaaaaaa

SEQ ID NO: 145032 - DNA, 334 bp, Homo sapiens
gggcccgcccatagccagttccggggcggttgctcacatcgaccggaactccccgccccctcccgcggcccctggggccgtaggaggccgcagcgaggagctccacaggatccccatatcctgggccatgagtgagttgaaagactgccccttgcagttccacgacttcaagtctgtggatcacctgaaggtctgtccccgctacacggcagtgctggcacgctctgaggatgatggcatcggcatcgaggagctggacaccctgcagctggagctggagaccctgctgtcttctgccagccggcgcctgcgtgtgcttgaggccgaaacccag

SEQ ID NO: 145033 - DNA, 649 bp, Homo sapiens
acgaggatttcgtctcacatcgaccggaactccccgccccctcctgcggcccctggggccgtaggaggccgcagcgaggaggtagagggggcgggggtcgcacatagggtgtccctagagaacgaggactctgaaggcgggacatttgggcgacccccgggcggggccagccattaaacagtcccacttctgtgccagacactgaactgggctcttgacgggcatcatctcttaatcctcagaacatcccagggagctccacaggatccccatatcctgggccatgagtgagttgaaagactgccccttgcagttccacgacttcaagtctgtggatcacctgaaggtctgtccccgctacacggcagtcttggcacgctctgaggatgatggcatcggcatcgaggagctggacaccctgcagctggagctggagaccctgctgtcttctgccagccggcgcctgcgtgtgcttgaggccgaaacccagatcctcaccgactggcaggataagaaaggtgacagacgattcctgaagctgggtcgagaccatgaacttggagctccccccaaacatgggaagcccaagaagcagaaactggaagggaaggcaggacatgggccgagccctggcccaggacgggccaaa

SEQ ID NO: 145034 - DNA, 364 bp, Homo sapiens
  misc_feature (1)...(364): n = a,t,c or g
ctttannnnnnnnnnnnnnnnnnnnnnnnnnnnnnnnnnnnnnnnnnnnnngggatgtggttttataaactatgaactaactctccatgctatgttgtttttggtaattcatttttctcatagataattgaaaacaaaaaacaagaaaacaaagtccaacaagcaggcataagattatatggagctttattaactaaatgccctaggttatattcaaaacagattcacccagcactcctcaggagactgcagcatggggtagatttggtgtactttgaggacattttggataagttaataggacatggcccttccggtgtttgatagcgccctataaattctctttgccagtcatagaaaatac

SEQ ID NO: 145035 - DNA, 1223 bp, Homo sapiens
cgcgtccgaagcagtcctttgttgtggtggttttttatatgtggctgatcccaccttttcctcctgaggcttagaggcccagagcccatcggacttgagatgtggtcactctctgacctcatctctatagatgccaagtgtcaggtaccctgttacatctgaaaactagtcccatatctacctagatagtagtagtttgtatttaagttttaagataggagatatttcagagctgtcacttcacatctgacaaagttcctagggggatgaaggtacctttggaaacaattatatctattgactgaccacttgcccacaaagagatggtcattgtgagcctgagtggctcccatgctagagaggcctgggggaaacttttgtttgaagccccaacagacaatttgcctgcttttgagctgggctacaaatgggggcccaggagcactgaggagacatcaggctcagtggtcttccctggaaagccatgctaggtgtggccataactgacagtgaactatacttgtgttttagcttcttttgggaccagggtcagggacatagaaggatctgaaacaggtctcctaaaatatatcaacagctcgtcaagattctctaaagtcctaagaaaaatctatgattggcaaagaggatttagattgcactaagaaacacaggaaggtccatgtttcattagtatatccaaaatgtcctcaaagtacaccaaatctaccccatgctgcagtctcctgaggagtgctgggtgaatctgctttgaatataacctagggcatttagttaataaagctccatataatcttatgcctgcttgttggattttgttttcttgttttttgtttttaattatctatgagagaaatgaattaacaagaacaacatagcatggagagttagttcatagtttataaaaccacatccctggccgggcgtggtggctcacacctgtaattccagaattttggaaggtagagaggcgagcgagcggatcacttgaggtcaggaattcgagaccaacctggccaacatggtgaaacaccctctctactaataacacaaaaattagctgggcttggtagcgcatgcctgtaatcccaactactagggaggctgaggcaggagaattgcttgaacgccggggtcggaggttgcagtgagccatgatcgcgccactgcactccagcctgggcaacagagcgagactctca

SEQ ID NO: 145036 - DNA, 349 bp, Homo sapiens
  misc_feature (1)...(349): n = a,t,c or g
gatgagatatttgaaattagtcttgtattcataatgtctttgnnnnnnnnnnnnnggaaagggagtctccttttgccccccggcttgaaggaaagggggccaatttgggctaatggaaggctccccttcccgggttaagccctttttcgggcctaagtctcccaagaactgggaattacgggcccccacaaccacccccagtaaattttttttaattttaaggggaaacggggtttccccgtttaacccgggagggcctaaatctccggccctcggaaaacccggcccttgttaaaccccaaaacaaagtcgcccccaaacacggggttgaaaaaccggggggaaaaac

SEQ ID NO: 145037 - DNA, 594 bp, Homo sapiens
gtgtcatcatgaaataccttattactgaatttgttggtaaagaaagtaaatttgcaacttgcaaaataggatttttctttgtgctaaagaaggtactgtttcaattgaattgaagaataagcttttgtttagattttatataatgagacatcaaattatttttactatgtaatttctttttgtttttggttgttaaacttagcacatgaaaaatatggattgtggtttccaagggattattactgtgattaaactctgctaaatgtgtaccctagatagtatcttcttaaagttggctcttcaggctgggtgcaatggctcatgcttataataatagctctttgggaggccaaagtgggaggattgtttgggcccaggagttcaacacccagcctggacaacataggggagaccctggtctctacaaataatttttttttttaattagccaatgtgatggcatgcacctgtggtcccagctactcaggaggctgaggcagaaggatcacctgaacccgagagctcaaggctgcagtgagctgtgattgcactgttgcgctccagcctgggtaacagagcaagacctgtctcaaa

SEQ ID NO: 145038 - DNA, 361 bp, Homo sapiens
gtggcgagtttcggatccctgcctagcgcgggccaaccgttactccacagatcatggctgtcgaggatgtggcgtcgactggcgccgacccatgcgatctggatagcgacggtctgttgcatgagattctcacgtcaccgctcatcctgctgctgctaggcctctgcatcttcctgctctacttgatcgtgcgctgagaccagccggcggccaacggcgacagcgacgacgactagccgtcccctctgccccgcctcaagcggcgcgattttacccccgacgatctgcggcgcttctacagcgtccaggaccctcgcatactcatggacttcaactgcaaggtgttcgatgtgaccaaagg

SEQ ID NO: 145039 - DNA, 555 bp, Homo sapiens
cgagagggagaggaggaaaactcagagggaagtggcgtggcttcagcagactttcttttgcctgtctttgtcccagagcctcttccctggccctgctgagaccactgctctaagaagagaccaccagactgatatgatgactcccagctgccctcagagcggaggccgagtgctgcacagccacagctgctctgaagcccttccatgaatccccggaagaaggtggacctgaaactcattatcgtcggagccattggtgtgggaaagacctccctccttcaccaatatgtgcacaagacgttttatgaggaataccagaccacactgggggccagcatcctctccaagaattaatcatattgggttgacacaactttgaaagttacagatcttggggacacgggcggtcaggagcggttccgctccatggtgtccacgttctacaagggctccgatggctgcatcctaacttttgatgtcaccgacctggagtcttttgaagccctggaattttggccggggggaggtcttgcccaaaatggtcccaatgaagca

SEQ ID NO: 145040 - DNA, 685 bp, Homo sapiens
gagatcaagtatcactcgttacccaggctggaatgtagaggcgagatctcagctcactgaaacctgtgcctccccggttcaagcgattctcctgccacagctacttgggaggctgaggcaggagaatggcgtgaaactgggaggcagagcttgcagtgagccgagatagcgccactgcactccagcctgggcaacagagcgagactccgtctcaaaaataaatataattaattaattatttaattaaaaaaataaaaaataaatgtggataatactagtacctccctcttaaggtcagggctggagctagggtgacatctccagggcagaattttaagaggacaccaaaaaagctcagcaaccaagataaaaaatattttaaagcaatattttgttttgggtttttttttttttttgagatcaagtatcactcgttacccaggctggaatgtagaggcgagatctcggctcactgaaacctgtgcctccccggttcaagcgattctcctgccacagcctcctgagtggctgggattacaggcatgcgccactatgcccagctaatttttctatttttggtggagacatgatttcaccatgttggccagggctggtctcgaactcctgactcaaatgatccccctgcctcggcctcccaaggtgctggggactacaggcgtgacac

SEQ ID NO: 145041 - DNA, 361 bp, Homo sapiens
  misc_feature (1)...(361): n = a,t,c or g
nccctacctgtccttctgacccatacctcttgggtcctaaccatgactttcttgaaagtgtagccccaaaattctccttacctctgaatctacttcctccaatccctgcctcatagatactaatgcttcagactttcactttctctcccaagtattagagtaggttgtatctccaaagggatctaaggaagcgctatgctgcatccttaggcatctaggctatgaaaccagggaatcttgtccctggtgcccctcccaatttaggtatataacttttgacatgggcagttatgtgggacccgttctccaccactcttgccaggccctgagtttgtaaatggctaggattcctcgctcatgg

SEQ ID NO: 145042 - DNA, 332 bp, Homo sapiens
  misc_feature (1)...(332): n = a,t,c or g
caaccccactcgcctttggcacaatgaaggggagaacctttatttcccttctttttctctttagctcggcttattccaggggtgtgtttcgtcgagatgcacacaagagtgaggttgctcatcggtttaacgatttgggagaagaaaatttcagagccttggtgttgattgcctttgctcagtatcttcagcagcgtccatttgaagatcatgtcacatattatgcacagttgcaactcttcgtgaaacctatggtgaaatggctgactgctgtgcaaaacaagaacctgagagaaatgaatgcttcttgcaacacanagatgacaacccac

SEQ ID NO: 145043 - DNA, 671 bp, Homo sapiens
  misc_feature (1)...(671): n = a,t,c or g
tggtgtccnnnnnnnagagcccctttcagtangtnccccagtnntgcttgnaggnncgcnnnnnnnnnntagancggncggcgtgtgctggaattcggcttctcactatngggctcgagcggccgttcnaccccacacgcctttggcacagggaagtgggtgacctttatttcccttctttttctctttagctcggcttattccaggggtgtgtttcgtcgagatgcacacaagagtgaggttgctcatcggtttaaagatttgggagaagaaaatttcaaagccttggtgttgattgcctttgctcagtatcttcagcagtgtccatttgaagatcatgtaaaattagtgaatgaagtaactgaatttgcaaaaacatgtgttgctgatgagtcagctgaaaattgtgacaaatcacttcataccctttttggagacaaattatgcacagttgcaactcttcgtgaaacctatggtgaaatggctgactgctgtgcaaaacaagaacctgagagaaatgaatgcttcttgccacacaaaagagcttcaagcaggcagaactccctgacaaagttccaaagtcggttggaggtccagtaggacgattaccagcaccgatgctcctggaattcttatggctgacagggactcccatattggaacaaaaaccc

SEQ ID NO: 145044 - DNA, 512 bp, Homo sapiens
  misc_feature (1)...(512): n = a,t,c or g
ctggtctccctccaccctctcatatttacacccaaccccttccccaaagctagcttttctcttctgtcaaccccacacgcctttggcacaatgaagtgggtaacctttatttcccttctttttctctttagctcggcttattccaggggtgtgtttcgtcgagatgcacacaagagtgaggttgctcatcggtttaaagatttgggagaagaaaatttcaaagccttggtgttgattgcctttgctcagtatcttcagcagtgtccatttgaagatcatgtaaaattagtgaatgaagtaactgaatttgcaaaaacatgtgttgctgatgagtcagctgaaaattgtgacaaatcacttcataccctttttggagacaaattccttttctttgctaaaaggtntaaagctgctttttacanaatgttgcccaagctgctgaataaanctgcctgcctgttgccaaaagctcgatgaactccgggatgaaagggaaggctccgtcctgccaa

SEQ ID NO: 145045 - DNA, 647 bp, Homo sapiens
gcttttctcttctgtcaaccccacacgcctttggcacaatgaagtgggtaacctttatttcccttctttttctctttagctcggcttattccaggggtgtgtttcgtcgagatgcacacaagagtgaggttgctcatcggtttaaagatttgggagaagaaaatttcaaagccttggtgttgattgcctttgctcagtatcttcagcagtgtccatttgaagatcatgtaaaattagtgaatgaagtaactgaatttgcaaaaacatgtgttgctgatgagtcagctgaaaattgtgacaaatcacttcataccctttttggagacaaattatgcacagttgcaactcttcgtgaaacctatggtgaaatggctgactgctttcttgcaacacaaagatgacaacccaaacctcccccgattggtgagaccagaggttgatgtgatgtgcactgcttttcatgacaatgaagagacatttttgaaaaaatacttatatgaaattgccagaagacatccttacttttatgccccggaactccttttctttgctaaaaggtataaagctgcttttacagaatgttgccaagctgctgataaagctgcctgcctgttgccaaagctcgatgaacttcgggatgaagggaa

SEQ ID NO: 145046 - DNA, 899 bp, Homo sapiens
ctgaaccttgaccagtcgggtcttgtacacatagtccactcctggctcacaggccttgtccagccgttcttccagggtgaccttgtcatccgacttttgtatgaagcaattctcctcagcacagcggcacagttcatcacggcagagcttgttcagctttccatcctccttttccggatggtagaaccgggtacagctttcctccaggttgtaataggcgtagaccttgactgctccaggctggataagctctacattaaagtattggtgaactttgaaagctagacagtcatcctcagagtgtgagaccttgtccaggtagatgatgagggtgttcctatcggagaaggctttgtccagctcatacttggagatgtatctgtcaaccccacacgcctttggcacaatgaagtgggtaacctttatttcccttctttttctctttagctcggcttattccaggggtgtgtttcgtcgagatgcacacaagagtgaggttgctcatcggtttaaagatttgggagaagaaaatttcaaagccttggtgttgattgcctttgctcagtatcttcagcagtgtccatttgaagatcatgtaaaattagtgaatgagtgcaaaacaagaacctgagagaaatgaatgcttcttgcaacacaaagatgacaacccaaacctcccccgattggtgagaccagaggttgatgtgatgtgcactgcttttcatgacaatgaagagacatttttgaaaaaatacttatatgaaattgccagaagacatccttacttttatgccccggaactccttttctttgctaaaaggtataaagctgcttttacagaatgttgccaagctgctgataaagctgcctgcctgttgccaaagctcgatgaacttcgg

SEQ ID NO: 145047 - DNA, 1972 bp, Homo sapiens
agcttttctcttctgtcaaccccacacgcctttggcacaatgaagtgggtaacctttatttcccttctttttctctttagctcggcttattccaggggtgtgtttcgtcgagatgcacacaagagtgaggttgctcatcggtttaaagatttgggagaagaaaatttcaaagccttggtgttgattgcctttgctcagtatcttcagcagtgtccatttgaagatcatgtaaaattagtgaatgaagtaactgaatttgcaaaaacatgtgttgctgatgagtcagctgaaaattgtgacaaatcacttcataccctttttggagacaaattatgcacagttgcaactcttcgtgaaacctatggtgaaatggctgactgctgtgcaaaacaagaacctgggagaaatgaatgcttcttgcaacacaaagatgacaacccaaacctcccccgattggtgagaccagaggttgatgtgatgtgcactgcttttcatgacaatgaagagacatttttgaaaaaatacttatatgaaattgccagaagacatccttacttttatgccccggaactccttttctttgctaaaaggtataaagctgcttttacagaatgttgccaagctgctgataaagctgcctgcctgttgccaaagctcgatgaacttcgggatgaagggaaggcttcgtctgccaaacagagactcaagtgtgccagtctccaaaaacaagaaacctaggaaaagtgggcagcaaatgttgtaaacatcctgaagcaaaaagaatgccctgtgcagaagactatctatccgtggtcctgaaccagttatgtgtgttgcatgagaaaacgccagtaagtgacagagtcaccaaatgctgcacagaatccttggtgaacaggcgaccatgcttttcagctctggaagtcgatgaaacatacgttcccaaagagtttaatgctgaaacattcaccttccatgcagatatatgcacactttctgagaaggagagacaaatcaagaaacaaactgcacttgttgagctcgtgaaacacaagcccaaggcaacaaaagagcaactgaaagctgttatggatgatttcgcagcttttgtagagaagtgctgcaaggctgacgataaggagacctgctttgccgaggagggtaaaaaacttgttgctgcaagtcaagctgccttaggcttataacatcacatttaaaagcatctcaggtaactatattttgaattttttaaaaaagtaactataatagttattattaaaatagcaaagattgaccatttccaagagccatatagaccagcaccgaccactattctaaactatttatgtatgtaaatattagcttttaaaattctcaaaatagttgctgagttgggaaccactattatttctattttgtagatgagaaaatgaagataaacatcaaagcatagattaagtaattttccaaagggtcaaaattcaaaattgaaaccaaggtttcagtgttgcccattgtcctgttctgacttatatgatgcggtacacagagccatccaagtaagtgatggctcagcagtggaatactctgggaattaggctgaaccacatgaaagagtgctttatagggcaaaaacagttgaatatcagtgatttcacatggttcaacctaatagttcaactcatcctttccattggagaatatgatggatctaccttctgtgaactttatagtgaagaatctgctattacatttccaatttgtcaacatgctgagctttaataggacttatcttcttatgacaacatttattggtgtgtccccttgcctagcccaacagaagaattcagcagccgtaagtctaggacaggcttaaattgttttcactggtgtaaattgcagaaagatgatctaagtaatttggcatttattttaataggtttgaaaaacacatgccattttacaaataaga

SEQ ID NO: 145048 - DNA, 1776 bp, Homo sapiens
aggatgtcttctggcaatttcatataagtattttttcaaaaatgtctcttctgtcaaccccacgcctttggcacaatgaagtgggtaacctttatttcccttctttttctctttagctcggcttattccaggggtgtgtttcgtcgagatgcacacaagagtgaggttgctcatcggtttaaagatttgggagaagaaaatttcaaagccttggtgttgattgcctttgctcagtatcttcagcagtgtccatttgaagatcatgtaaaattagtgaatgaagtaactgaatttgcaaaaacatgtgtagctgatgagtcagctgaaaattgtgacaaatcacttcataccctttttggagacaaattatgcacagttgcaactcttcgtgaaacctatggtgaaatggctgactgctgtgcaaaacaagaacctgagagaaatgaatttggagaaagagctttcaaagcatgggcagtagctcgcctgagccagagatttcccaaagctgagtttgcagaagtttccaagttagtgacagatcttaccaaagtccacacggaatgctgccatggagatctgcttgaatgtgctgatgacagggcggaccttgccaagtatatctgtgaaaatcaagattcgatctccagtaaactgaaggaatgctgtgaaaaacctctgttggaaaaatcccactgcattgccgaagtggaaaatgatgagatgcctgctgacttgccttcattagctgctgattttgttgaaagtaaggatgtttgcaaaaactatgctgaggcaaaggatgtcttcttgggcatgtttttgtatgaatatgcaagaaggcatcctgattactctgtcgtgctgctgctgagacttgccaagacatatgaaaccactctagagaagtgctgtgccgctgcagatcctcatgaatgctatgccaaagtgttcgatgaatttaaacctcttgtggaagagcctcagaatttaatcaaacaaaattgtgagctttttgagcagcttggagagtacaaattccagaatgcgctgttagttcgttacaccaagaaagtacccgaagtgtcaactccaactcttgtagaggtctcaagaaacctaggaaaagtgggcagcaaatgttgtaaacatcctgaagcaaaaagaatgccctgtgcagaagactatctatccgtggtcctgaaccagttatgtgtgttgcatgagaaaacgccagtaagtgacagagtcaccaaatgctgcacagaatccttggtgaacaggcgaccatgcttttcagctctggaagtcgatgaaacatacgttcccaaagagtttaatgctgaaacattcaccttccatgcagatatatgcacactttctgagaaggagagacaaatcaagaaacaaactgcacttgttgagctcgtgaaacacaagcccaaggcaacaaaagagcaactgaaagctgttatggatgatttcgctgcttttgtagagaagtgctgcaaggctgacgataaggagacctgctttgccgaggagggtaaaaaacttgttgctgcaagtcaagctgccttaggcttataacatcacatttaaaagcatctcagcctaccatgagaataagagaaagaaaatgaagatcaaaagcttattcatctgtttttctttttcgttggtgtaaagccaacaccctgtctaaaaaacataaatttctttaatcattttgcctcttttctctgtgcttcaattaataaaaaatggaaagaatct

SEQ ID NO: 145049 - DNA, 1654 bp, Homo sapiens
ggcacaatgaagtgggtaacctttatttcccttctttttctctttagctcggcttattccaggggtgtgtttcgtcgagatgcacacaagagtgaggttgctcatcggtttaaagatttgggagaagaaaatttcaaagccttggtgttgattgcctttgctcagtatcttcagcagtgtccacttgaagatcatgtaaaattagtgaatgaaagatgacaacccaaacctcccccgattggtgagaccagaggttgatgtgatgtgcactgcttttcatgacaatgaagagacatttttgaaaaaatacttatatgaaattgccagaagacatccttacttttatgccccggaactccttttctttgctaaaaggtataaagctgcttttacagaatgttgccaagctgctgataaagctgcctgcctgttgccaaagctcgatgaacttcgggatgaagggaaggcttcgtctgccaaacagagactcaagtgtgccagtctccaaaaatttggagaaagagctttcaaagcatgggcagtagctcgcctgagccagagatttcccaaagctgagtttgcagaagtttccaagttagtgacagatcttaccaaagtccacacggaatgctgccatggagatctgcttgaatgtgctgatgacagggcggaccttgccaagtatatctgtgaaaatcaagattcgatctccagtaaactgaaggaatgctgtgaaaaacctctgttggaaaaatcccactgcattgccgaagtggaaaatgatgagatgcctgctgacttgccttcattagctgctgattttgttgaaagtaaggatgtttgcaaaaactatgctgaggcaaaggatgtcttcctgggcatgtttttgtatgaatatgcaagaaggcatcctgattactctgtcgtgctgctgctgagacttgccaagacatatgaaaccactctagagaagtgctgtgccgctgcagatcctcatgaatgctatgccaaagtgttcgatgaatttaaacctcttgtggaagagcctcagaatttaatcaaacaaaattgtgagctttttgagcagcttggagagtacaaattccagaatgcgctattagttcgttacaccaagaaagtaccccaagtgtcaactccaactcttgtagaggtctcaagaaacctaggaaaagtgggcagcaaatgttgtaaacatcctgaagcaaaaagaatgccctgtgcagaagactatctatccgtggtcctgaaccagttatgtgtgttgcatgagaaaacgccagtaagtgacagagtcaccaaatgctgcacagaatccttggtgaacaggcgaccatgcttttcagctctggaagtcgatgaaacatacgttcccaaagagtttaatgctgaaacattcaccttccatgcagatatatgcacactttctgagaaggagagacaaatcaagaaacaaactgcacttgttgagctcgtgaaacacaagcccaaggcaacaaaagagcaactgaaagctgttatggatgatttcgcagcttttgtagagaagtgctgcaaggctgacgataaggagacctgctttgccgaggagggtaaaaaacttgttgctgcaagtcaagctgccttaggcttataa

SEQ ID NO: 145050 - DNA, 1518 bp, Homo sapiens
atgaagtgggtaacctttatttcccttctttttctctttagctcggcttattccaggggtgtgtttcgtcgagatgcacacaagagtgaggttgctcatcggtttaaagatttgggagaagaaaatttcaaagccttggtgttgattgcctttgctcagtatcttcagcagtgtccatttgaagatcatgtaaaattagtgaatgaagtaactgaatttgcaaaaacatgtgttgctgatgagtcagctgaaaattgtgacaaatcacttcataccctttttggagacaaattatgcacagttgcaactcttcgtgaaacctatggtgaaatggctgactgctgtgcaaaacaagaacctgagagaaatgaatgcttcttgcaacacaaagatgacaacccaaacctcccccgattggtgagaccagaggttgatgtgatgtgcactaccaaatgctgcacagaatccttggtgaacaggcgaccatgcttttcagctctggaagtcgatgaaacatacgttcccaaagagtttaatgctgaaacattcaccttccatgcagatatatgcacactttctgagaaggagagacaaatcaagaaacaaactgcacttgttgagcttgtgaaacacaagcccaaggcaacaaaagagcaactgaaagctgttatggatgatttcgcagcttttgtagagaagtgctgcaaggctgacgataaggagacctgctttgccgaggagggtaaaaaacttgttgctgcaagtcaagctgccttaggcttaacctgtgaagcctgccaggagccgggaggcctggtggtgcctcccacagatgccccggtgagccccaccactctgtatgtggaggacatctcggaaccgccgttgcacgatttctactgcagcaggctactggacctggtcttcctgctggatggctcctccaggctgtccgaggctgagtttgaagtgctgaaggcctttgtggtggacatgatggagcggctgcgcatctcccagaagtgggtccgcgtggccgtggtggagtaccacgacggctcccacgcctacatcgggctcaaggaccggaagcgaccgtcagagctgcggcgcattgccagccaggtgaagtatgcgggcagccaggtggcctccaccagcgaggtcttgaaatacacactgttccaaatcttcagcaagatcgaccgccctgaagcctcccgcatcgccctgctcctgatggccagccaggagccccaacggatgtcccggaactttgtccgctacgtccagggcctgaagaagaagaaggtcattgtgatcccggtgggcattgggccccatgccaacctcaagcagatccgcctcatcgagaagcaggcccctgagaacaaggccttcgtgctgagcagtgtggatgagctggagcagcaaagggacgagatcgttagctacctctgtgaccttgcccctgaagcccctcctcctactctgccccccgacatggcacaagtctaa

SEQ ID NO: 145051 - DNA, 2628 bp, Homo sapiens
ccgcttttctcttctgtcaaccccacacgcctttggcacaatgaagtgggtaacctttatttcccttctttttctctttagctcggcttattccaggggtgtgtttcgtcgagatgcacacaagagtgaggttgctcatcggtttaaagatttgggagaagaaaatttcaaagccttggtgttgattgcctttgctcagtatcttcagcagtgtccatttgaagatcatgtaaaattagtgaatgaagtaactgaatttgcaaaaacatgtgttgctgatgagtcagctgaaaattgtgacaaatcacttcataccctttttggagacaaattatgcacagttgcaactcttcgtgaaacctatggtgaaatggctgactgctgtgcaaaacaagaacctgagagaaatgaatgcttcttgcaacacaaagatgacaacccaaacctcccccgattggtgagaccagaggttgatgtgatgtgcactgcttttcatgacaatgaagagacatttttgaaaaaatacttatatgaaattgccagaagacatccttactttttatgccccggaactccttttctttgctaaaaggtataaagctgcttttacagaaatgttgccaagctgctgataaagctgcctgcctgttgccaaagctcgatgaacttcgggagtaactgaatttgcaaaaacatgtgttgctgatgagtcagctgaaaattgtgacaaatcacttcataccctttttggagacaaattatgcacagttgcaactcttcgtgaaacctatggtgaaatggctgactgctgtgcaaaacaagaacctgagagaaatgaatgcttcttgcaacacaaagatgacaacccaaacctcccccgattggtgagaccagaggttgatgtgatgtgcactgcttttcatgacaatgaagagacatttttgaaaaaatacttatatgaaattgccagaagacatccttacttttatgccccggaactccttttctttgctaaaaggtataaagctgcttttacagaatgttgccaagctgctgataaagctgcctgcctgttgcccaaagctcgatgaacttcgggatgaagggaaggcttcgtctgccaaacagagactcaagtgtgccagtctccaaaaatttggagaaagagctttcaaagcatgggcagtagctcgcctgagccagagatttcccaaagctgagtttgcagaagtttccaagttagtgacagatcttaccaaagtccacacggaatgctgccatggagatctgcttgaatgtgctgatgacagggcggaccttgccaagtatatctgtgaaaatcaagattcgatctccagtaaactgaaggaatgctgtgaaaaacctctgttggaaaaatcccactgcattgccgaagtggaaaatgatgagatgcctgctgacttgccttcattagctgctgattttgttgaaagtaaggatgtttgcaaaaactatgctgaggcaaaggatgtcttcttgggcatgtttttgtatgaatatgcaagaaggcatcctgattactctgtcgtgctgctgctgagacttgccaagacatatgaaaccactctagagaagtgctgtgccgctgcagatcctcatgaatgctatgccaaagtgttcgatgaatttaaacctcttgtggaagagcctcagaatttaatcaaacaaaattgtgagctttttgagcagcttggagagtacaaattccagaatgcgctattagttcgttacaccaagaaagtaccccaagtgtcaactccaactcttgtagaggtctcaagaaacctaggaaagttgccaagctgctgataaagctgcctgcctgttgccaaagctcgatgaacttcgggatgaagggaaggcttcgtctgccaaacagagactcaagtgtgccagtctccaaaaatttggagaaagagctttcaaagcatgggcagtagctcgcctgagccagagatttcccaaagctgagtttgcagaagtttccaagttagtgacagatcttaccaaagtccacacggaatgctgccatggagatctgcttgaatgtgctgatgacagggcggaccttgccaagtatatctgtgaaaatcaagattcgatctccagtaaactgaaggaatgctgtgaaaaacctctgttggaaaaatcccactgcattgccgaagtggaaaatgatgagatgcctgctgacttgccttcattagctgctgattttgttgaaagtaaggatgtttgcaaaaactatgctgaggcaaaggatgtcttcttgggcatgtttttgtatgaatatgcaagaaggcatcctgattactctgtcgtgctgctgctgagacttgccaagacatatgaaaccactctagagaagtgctgtgccgctgcagatcctcatgaatgctatgccaaagtgttcgatgaatttaaacctcttgtggaagagcctcagaatttaatcaaacaaaattgtgagctttttgagcagcttggagagtacaaattccagaatgcgctattagttcgttacaccaagaaagtaccccaagtgtcaactccaactcttgtagaggtctcaagaaacctaggaaa

SEQ ID NO: 145052 - DNA, 5688 bp, Homo sapiens
atgaagtgggtaacctttatttcccttctttttctctttagctcggcttattccaggggtgtgtttcgtcgagatgcacacaagagtgaggttgctcatcggtttaaagatttgggagaagaaaatttcaaagccttggtgttgattgcctttgctcagtatcttcagcagtgtccatttgaagatcatgtaaaattagtgaatgaagtaactgaatttgcaaaaacatgtgttgctgatgagtcagctgaaaattgtgacaaatcacttcataccctttttggagacaaattatgcacagttgcaactcttcgtgaaacctatggtgaaatggctgactgctgtgcaaaacaagaacctgagagaaatgaatgcttcttgcaacacaaagatgacaacccaaacctcccccgattggtgagaccagaggttgatgtgatgtgcactgcttttcatgacaatgaagagacatttttgaaaaaatacttatatgaaattgccagaagacatccttacttttatgccccggaactccttttctttgctaaaaggtataaagctgcttttacagaatgttgccaagctgctgataaagctgcctgcctgttgccaaagctcgatgaacttcgggatgaagggaaggcttcgtctgccaaacagagactcaagtgtgccagtctccaaaaatttggagaaagagctttcaaagcatgggcagtagctcgcctgagccagagatttcccaaagctgagtttgcagaagtttccaagttagtgacagatcttaccaaagtccacacggaatgctgccatggagatctgcttgaatgtgctgatgacagggcggaccttgccaagtatatctgtgaaaatcaagattcgatctccagtaaactgaaggaatgctgtgaaaaacctctgttggaaaaatcccactgcattgccgaagtggaaaatgatgagatgcctgctgacttgccttcattagctgctgattttgttgaaagtaaggatgtttgcaaaaactatgctgaggcaaaggatgtcttcctgggcatgtttttgtatgaatatgcaagaaggcatcctgattactctgtcgtactgctgctgagacttgccaagacatatgaaaccactctagagaagtgctgtgccgctgcagatcctcatgaatgctatgccaaagtgttcgatgaatttaaacctcttgtggaagagcctcagaatttaatcaaacaaaattgtgagctttttgagcagcttggagagtacaaattccagaatgcgctattagttcgttacaccaagaaagtaccccaagtgtcaactccaactcttgtagaggtctcaagaaacctaggaaaagtgggcagcaaatgttgtaaacatcctgaagcaaaaagaatgccctgtgcagaagactatctatccgtggtcctgaaccagttatgtgtgttgcatgagaaaacgccagtaagtgacagagtccaagagtgaggttgctcatcggtttaaagatttgggagaagaaaatttcaaagccttggtgttgattgcctttgctcagtatcttcagcagtgtccatttgaagatcatgtaaaattagtgaatgaagtaactgaatttgcaaaaacatgtgttgctgatgagtcagctgaaaattgtgacaaatcacttcataccctttttggagacaaattatgcacagttgcaacttcttcgtgaaacctatggtgaaatggctgactgctgtgcaaaacaagaacctgagagaaatgaatgcttcttgcaacacaatgcttcttgcaacacaaagatgacaacccaaacctcccccgattggtgagaccagaggttgatgtgatgtgcactgcttttcatgacaatgaagagacatttttgaaaaaatacttatatgaaattgccagaagacatccttacttttatgccccggaactccttttctttgctaaaaggtataaagctgcttttacagaatgttgccaagctgctgataaagctgcctgcctgttgccaaaagctcgatgaacttcgggatgaaagggaaggcttcgtctgccaaacagagactcaagtgtgccagtctccaaaaatttggagaaagagctttcaaagcatgggcagtagctcgcctgagccagagatttcccaaagctgagtttgcagaagtttccaagttagtgacagatcttaccaaagtccacacggaatgctgccatggagatctgcttgaatgtgctgatgacagggcggaccttgccaagtatatctgtgaaaatcaagattcgatctccagtaaactgaaggaatgctgtgaaaaacctctgttggaaaaatcccactgcattgccgaagtggaaaatgatgagatgcctgctgacttgccttcattagctgctgattttgttgaaagtaaggatgtttgcaaaaactatgctgaggcaaaggatgtcttcctgggcatgtttttgtatgaatatgcaagaaggcatcctgattactctgtcgtactgctgctgagacttgccaagacatatgaaaccactctagagaagtgctgtgccgctgcagatcctcatgaatgctatgccaaagtgttcgatgaatttaaacctcttgtggaagagcctcagaatttaatcaaacaaaattgtgagctttttgagcagcttggagagtacaaattccagaatgcgctattagttcgttacaccaagaaagtaccccaagtgtcaactccaactcttgtagaggtctcaagaaacctaggaaaagtgggcagcaaatgttgtaaacatcctgaagcaaaaagaatgccctgtgcagaagactatctatccgtggtcctgaaccagttatgtgtgttgcatgagaaaacgccagtaagtgacagagtcaccaaatgctgcacagaatccttggtgaacaggcgaccatgcttttcagctctggaagtcgatgaaacatacgttcccaaagagtttaatgctgaaacattcaccttccatgcagatatatgcacactttctgagaaggagagacaaatcaagaaacaaactgcacttgttgagcttgtgaaacacaagcccaaggcaacaaaagagcaactgaaagctgttatggatgatttcgcagcttttgtagagaagtgctgcaaggctgacgataaggagacctgctttgccgaggagggtaaaaaacttgttgctgcaagtcaagctgccttaggcttaacccccctgggccctgccagctccctgccccagagcttcctgctcaagtgcttagagcaagtgaggaagatccagggcgatggcgcagcgctccaggagaagctgtgtgccacctacaagctgtgccaccccgaggagctggtgctgctcggacactctctgggcatcccctgggctcccctgagctcctgccccagccaggccctgcagctggcaggctgcttgagccaactccatagcggccttttcctctaccaggggctcctgcaggccctggaagggatatcccccgagttgggtcccaccttggacacactgcagctggacgtcgccgactttgccaccaccatctggcagcagatggaagaactgggaatggcccctgccctgcagcccacccagggtgccatgccggccttcgcctctgctttccagcgccgggcaggaggggtcctggttgctagccatctgcagagcttcctggaggtgtcgtaccgcgttctacgccaccttgcgcagccctgagcttttcatgacaatgaagagacatttttgaaaaaatacttatatgaaattgccagaagacatccttacttttatgccccggaactccttttctttgctaaaaggtataaagctgcttttacagaatgttgccaagctgctgataaagctgcctgcctgttgccaaagctcgatgaacttcgggatgaagggaaggcttcgtctgccaaacagagactcaagtgtgccagtctccaaaaatttggagaaagagctttcaaagcatgggcagtagctcgcctgagccagagatttcccaaagctgagtttgcagaagtttccaagttagtgacagatcttaccaaagtccacacggaatgctgccatggagatctgcttgaatgtgctgatgacagggcggaccttgccaagtatatctgtgaaaatcaagattcgatctccagtaaactgaaggaatgctgtgaaaaacctctgttggaaaaatcccactgcattgccgaagtggaaaatgatgagatgcctgctgacttgccttcattagctgctgattttgttgaaagtaaggatgtttgcaaaaactatgctgaggcaaaggatgtcttcctgggcatgtttttgtatgaatatgcaagaaggcatcctgattactctgtcgtactgctgctgagacttgccaagacatatgaaaccactctagagaagtgctgtgccgctgcagatcctcatgaatgctatgccaaagtgttcgatgaatttaaacctcttgtggaagagcctcagaatttaatcaaacaaaattgtgagctttttgagcagcttggagagtacaaattccagaatgcgctattagttcgttacaccaagaaagtaccccaagtgtcaactccaactcttgtagaggtctcaagaaacctaggaaaagtgggcagcaaatgttgtaaacatcctgaagcaaaaagaatgccctgtgcagaagactatctatccgtggtcctgaaccagttatgtgtgttgcatgagaaaacgccagtaagtgacagagtcaccaaatgctgcacagaatccttggtgaacaggcgaccatgcttttcagctctggaagtcgatgaaacatacgttcccaaagagtttaatgctgaaacattcaccttccatgcagatatatgcacactttctgagaaggagagacaaatcaagaaacaaactgcacttgttgagcttgtgaaacacaagcccaaggcaacaaaagagcaactgaaagctgttatggatgatttcgcagcttttgtagagaagtgctgcaaggctgacgataaggagacctgctttgccgaggagggtaaaaaacttgttgctgcaagtcaagctgccttaggcttaacccccctgggccctgccagctccctgccccagagcttcctgctcaagtgcttagagcaagtgaggaagatccagggcgatggcgcagcgctccaggagaagctgtgtgccacctacaagctgtgccaccccgaggagctggtgctgctcggacactctctgggcatcccctgggctcccctgagctcctgccccagccaggccctgcagctggcaggctgcttgagccaactccatagcggccttttcctctaccaggggctcctgcaggccctggaagggatatcccccgagttgggtcccaccttggacacactgcagctggacgtcgccgactttgccaccaccatctggcagcagatggaagaactgggaatggcccctgccctgcagcccacccagggtgccatgccggccttcgcctctgctttccagcgccgggcaggaggggtcctggttgctagccatctgcagagcttcctggaggtgtcgtaccgcgttctacgccaccttgcgcagccctga

SEQ ID NO: 145053 - DNA, 3023 bp, Homo sapiens
gtcaaccccacacgcctttggcacaatgaagtgggtaacctttatttcccttctttttctctttagctcggcttattccaggggtgtgtttcgtcgagatgcacacaagagtgaggttgctcatcggtttaaagatttgggagaagaaaatttcaaagccttggtgttgattgcctttgctcagtatcttcagcagtgtccatttgaagatcatgtaaaattagtgaatgaagtaactgaatttgcaaaaacatgtgttgctgatgagtcagctgaaaattgtgacaaatcacttcataccctttttggagacaaattatgcacagttgcaactcttcgtgaaacctatggtgaaatggctgactgctgtgcaaaacaagaacctgagagaaatgaatgcggcacaatgaagtgggtaacctttatttcccttctttttctctttagctcggcttattccaggggtgtgtttcgtcgagatgcacacaagagtgaggttgctcatcggtttaaagatttgggagaagaaaatttcaaagccttggtgttgattgcctttgctcagtatcttcagcagtgtccatttgaagatcatgtaaaattagtgaatgaagtaactgaatttgcaaaaacatgtgttgctgatgagtcagctgaaaattgtgacaaatcacttcataccctttttggagacaaattatgcacagttgcaactcttcgtgaaacctatggtgaaatggctgactgctgtgcaaaacaagaacctgagagaaatgaaagcttttttgcaaccacaagaaggacaacccaaacctcccccgattgtggagaccagaggttgatgtgatgtgccactgcttttcatgacaatgaagagacactttttgaaaaaatacttatatgaaaattgcccagaaagacatcctttaccttttatggcccccgggaactccttttcctttggctaaaaggtataaagctgcttttacagaatgttgcccaagctgctgataaagctgcctgcctgtttgcccaaagctcgatgaacttcggggatgaaagggaaggcttcgttctgccaaacagagactcaagtgtgccagtctccaaaaatttggagaaagagctttcaaagcatgggcagtagctcgcctgagccagagatttcccaaagctgagtttgcagaagtttccaagttagtgacagatcttaccaaagtccacacggaatgctgccatggagatctgcttgaatgtgctgatgacagggcggaccttgccaagtatatctgtgaaaatcaagattcgatctccagtaaactgaaggaatgctgtgaaaaacctctgttggaaaaatcccactgcattgccgaagtggaaaatgatgagatgcctgctgacttgccttcattagctgctgattttgttgaaagtaaggatgtttgcaaaaactatgctgaggcaaaggatgtcttcctgggcatgtttttgtatgaatatgcaagaaggcatcctgattactctgtcgtgctgctgctgagacttgccaagacatatgaaaccactctagagaagtgctgtgccgctgcagatcctcatgaatgctatgccaaagtgttcgatgaatttaaacctcttgtggaagagcctcagaatttaatcaaacaaaattgtgagctttttgagcagcttggagagtacaaattccagaatgcgctattagttcgttacaccaagaaagtaccccaagtgtcaactccaactcttgtagaggtctcaagaaacctaggaaaagtgggcagcaaatgttgtaaacatcctggagcaaaaagaatgccctgtgcagaagactatctatccgtggtcctgaaccagttatgtgtgttgcatgagaaaacgccagtaagtgacagagtcaccaaatgctgcacagaatccttggtgaacaggcgaccatgcttttcagctctggaagtcgatgaaacatacgttcccaaagagtttaatgctgaaacattcaccttccatgcagatatatgcacactttctgagaaggagagacaaatcaagaaacaaactgcacttgttgagcttgtgaaacacaagcccaaggcaacaaaagagcaactgaaagctgttatggatgatttcgcagcttttgtagagaagtgctgcaaggctgacgataaggagacctgctttgccgaggagggtaaaaaacttgttgctgcaagtcaagctgccttaggcttataacatcacatttaaaagcatctcaggtaactatattttgaattttttaaaaaagtaactataatagttattattaaaatagcaaagattgaccatttccaagagccatatagaccagcaccgaccactattctaaactatttatgtatgtaaatattagcttttaaaattctcaaaatagttgctgagttgggaaccactattatttctattttgtagatgagaaaatgaagataaacatcaaagcatagattaagtaattttccaaagggtcaaaattcaaaattgaaaccaaggtttcagtgttgcccattgtcctgttctgacttatatgatgcggtacacagagccatccaagtaagtgatggctcagcagtggaatactctgggaattaggctgaaccacatgaaagagtgctttatagggcaaaaacagttgaatatcagtgatttcacatggttcaacctaatagttcaactcatcctttccattggagaatatgatggatctaccttctgtgaactttatagtgaagaatctgctattacatttccaatttgtcaacatgctgagctttaataggacttatcttcttatgacaacatttattggtgtgtccccttgcctagcccaacagaagaattcagcagccgtaagtctaggacaggcttaaattgttttcactggtgtaaattgcagaaagatgatctaagtaatttggcatttattttaataggtttgaaaaacacatgccattttacaaataaga

SEQ ID NO: 145054 - DNA, 696 bp, Homo sapiens
ttttataacagagttttgctcttgttgcccaggctggagtgctaaggtgtgatcttccctcaccgcaacctccacctcccgggttcaagcgattctcatgccttagccttccgagtaactgggattacaggcacttgccaccacgcctgcctaatttttgtacttttagtagagacaaggtttctccatgttggccaggctggtcttgaactcctgacctcaagtgatccgccctcctcggcctcccaaagttctgggattacaggcgtgggtcactgcgctgggcctacagctcatttcttaccacataaagttttgcgcctctccacaaaactgccatcagggatgtccccagaaaccattcatcccaggcgccacgcagagaagagctgcttgttctccttttccctttacctcttccatctcacctcatcttgttcattcattcatcccttttccattctcacttttaagtgttaacctttcaaaaccctgttttcccctataagtaatgtcttgtaactcccgccatcaccatatccttctccaaccaaccaaactgccatcctgagtttatggaaagtccataaactaagaagaaatgggaaacattcattgctaacttggcagcccctcatccaccctacgtgagagcacagatcttattgtctttgaagacccggacagtggtcgccc

SEQ ID NO: 145055 - DNA, 390 bp, Homo sapiens
  misc_feature (1)...(390): n = a,t,c or g
ttgggatgctgtacaaaattaccatagaagggggggcttatccaataagcatttatttttcatagttctgcaagctgaaagtctgatgtcagagtgccaaaatggttgagttttggtgaggggccctttccaggttgcagatggccaagttttcattgtgtcctcccgtaaaggaaaggggcgagaaagctcattgggagccnnnnnnnnnnnnaaataaggccactaattccatttgtgaagtttccaccttcatgannnnnnnnnnnnnnnnnnnnnnnnnnnnnnnnnnnnnnnnnnnnnnnngtttgaacattcactacgaaagtgactgggtaataagcaaactcattccaggctgtattaaaatgactgaggccatcacctgca

SEQ ID NO: 145056 - DNA, 1198 bp, Homo sapiens
gagctgtctccacaagcgccttcactctcctagcttcctgaccctgccatgcatcggttctgtacacaacatctgcaggtccaaatacagagagaatttcagcctaaagtacaactttaaagcatatctctgacactcccttccttcaacaaattgtagtgggtgatgggtcaccactgaaaggtaatgagtgtggaacttgtatactcaagagagcttttccttcattgtcaggagagctcaaaatcataagaggcccttctgtttataactgattctcgaaaggtagacaaaattgcctctctctgtgcaaacagacatgcgcctttctctctctttctcctataacctggctttctcctttatggacaaggagatgcaaacatttgctttggggtttgaacattcactacgaaagtgactgggtaataagcaaactcattccaggctgtattaaaatgactgaggccatcacctgcagctaagaaatgtgagtttttgttttaaagtaagtgtacactgagtcctatgctgggttttggtagaagggaacagaaaaccaagaattgaaaaacaagtgatgtaaactccaaggggacccacaactggaattgagcagagtccctcctctgtcacacatctggaagaatgtggagacaggaaaatggctggacacagttgtgtttcagctacattcactcttaaaaagagttttcaaatggggaggggaaaagtgaaaggatttttataaaagtcatatggttagattctttcctcctccacttctgtccagcagagttttaaaaacaaaccctgcggagttcctggcttgctgacccccatccctgggttctcccaccccaacgggggcacatctgagtcaacgacatccacagctgtcttcttcggcaccatgccgtgatgccgcaggaaaatgatgtgctatggaaccagctacctacctgccagcggttaactgctctaagcctccacttatttacttgcaaaatggggatctaacacctactttacaggattgggtgaagattaaaggagatcatgtatatcaggcactttgtaaactggaatgtactagacaaatgctattactcctttctctcagaacatgagcccccccaatctgctctcctctcctcccctcccctcccttcccttacgaaatcgtcgacccgggaaa

SEQ ID NO: 145057 - DNA, 466 bp, Homo sapiens
  misc_feature (1)...(466): n = a,t,c or g
tttctttaaaaatttttaaagtttaatttcccatctagaattgacttttgcatatactgtaaggtagggatccattttttccatatnnnnnnnnnnnnnnnnnnnnnnnnnnnnnnnnnnnnnnnnnntatatatttaaatgcagatattaacacaaatgccagtgttgtcttttgtctttaagctttaaaaactgacatgtggattaggccctctccaagaattttcattctaatcataaaggtaagaaattacaaactctttaatttagagatgaggtttactctaccaaagatgaatgtaaatctaagcagatcttacttgttcaaagatttccattataaaaccagaggtctactgccagaggaaaagaactccttcaagataccagggcattaaaaaaaaactcttaacgagttataaaatatagcaaacaacaggctcaaacctgtgaagggtaaaatat

SEQ ID NO: 145058 - DNA, 1709 bp, Homo sapiens
agagcgagctccagtggcagactctagtttctggaataagagcaatacttttaccttcacaggtttgagcctgttgtttgctatattttataactcgttaagagttttttttaatgcactggtatcttgaaggagttcttttcctctggcagtagacctctggttttataatggaaatctttgaacaagtaagatctgccttagaatttacattcatctttggtagagtaaaccctcacctcctaaattaaagagtttgtaaatttccttaccctttaaggattagaatgaaaaattccttggagaggggccctatccccacatgtcagtttttaaagcttaaagacaaaagacaacactggcatttgtgttaatatctgcatttaaatatatatcatacacacacaaacacacacacacacacacacacttagctatatggaaaaaatggatccctaccttacagtatatgcaaaagtcaattctagatgggaaattaaactttaaaaatttttaaagaaaatacagggcaatatctttatgacctcagagtaaagagggatttcttaaacaagaactacagctcataaaggaaaagagttggtttattttattactttaaggaaaaaaaaccttctatatatcaaaagacgtaaagaaatgaaaagacaagccccacagtacagctactttggaattatctttcagaattcatgtgtacaccctacagagctgcaattctacccctagtcataggccctggagaaactgcacatgtgaaccaggagacattcagaagaatgtttattgcattttcataatagcaaaagactgggaataatccagtgtccatccacaggaaaacagttacattctggaatagaatattttgcagcagtaaaaataattgaacgaacagctacttgtgacagtgtgaatcaattttagaaacaaagttgagaggaagaatctaatagcagaagactgtatatagaatggtaccattttaataaagctcaaaaataaaactaagatctcatttagagagatagatggcaaaattctttttaaaagcagaggagtgacaaaacacgaaattcagcatagtggttaagagaagcaggagagacgaggaggagtacatgtttagctttaataatattggtattccttggttcttcagttgaactcgtgggctattcattttcatgattatggcattattaatttgataaatgtatgtaattaaccagatgtatgtatgtgacatatttacttttgggtaacaaatactacttcattaaaaaaatcacaataaaaataacaagcgtcaatctgggagaagatacttgcagtatacaaatatcttaaacagattaatgtcctgaattcataaaggaattcctatgaatcaataagaaaaaggacaacacaacttaaaaaatactaatggacaaaggatctgaataggaattcataataaaaacctggatggctaattaaaatatgaatatgtgctcaaccctacttgaaataaagtaaatgcaaattaaaacaagatcccagccatgctggcacatccctacagtcccagctactcaggaggctgaggcaggagaatcccttgaggccaggatttcaaggctgcagtgagctatgatcataccactgcactccagcccgggtgacagagcaagaccccatctctt

SEQ ID NO: 145059 - DNA, 353 bp, Homo sapiens
  misc_feature (1)...(353): n = a,t,c or g
nnnnnnnnnnnnnnnnnnnnnnnnnnnnnnnnnnnnnnnnnnnnnnnnnnnnnnnnnnnnnnnnnntaggtctcgttacacatgcctttttcctcacgtgtaaaataaagtggtcgtctatgtgattgctccctgaaagttaaggagttcacaactcagtgaaccagaggtcagacctgactctaccctatccatgctcatgcatgcgcgtgnnnnnnnnnnnnnnnnnnnnnnnnnnnntttattcttaccacatccgtgttcacgtccacacacatccacacctacatgcatgcccatagttacacacagtccgatatacttaaaattccactcacacacatacatacttt

SEQ ID NO: 145060 - DNA, 366 bp, Homo sapiens
ctctcttccagcctccgaccgccctccgatttcctctccgcttgcaacctccgggaccatcttctcggccatctcctgcttctgggacctgccagcaccgtttttgtggttagctccttcttgccaaccaaccatgagctcccagattcgtcagaattattccaccgacgtggaggcagccgtcaacagcctggtcaatttgtacctgcaggcctcctacacctacctctctcctccaggacatcaagaagccagctgaagatgagtggggtaaaaccccagacgccatgaaagctgccatggccctggagaaaaagctgaaccaggcccttttggatcttcatgccctgggttctgcccgcacgg

SEQ ID NO: 145061 - DNA, 944 bp, Homo sapiens
actaatagggaaatttgcccctcgaggcccaagaattcggcaacgaaggggcggtcccgcgcgggtctggtctctttgcttcaaacaagtgtttgggacggaacaagatccggggattctcttcccagcctccggaccgccctccgatttcctgctccgcttgcaaacctccgggaccatcttctcggccatctcctgcttcttgggacctgcccagcaccgttttttgtggttagctccttcttgccaaccaaccatgagctcccagattcgtcaagaattattccacccgacgtggaggcagccgtcaacagcctggtcaatttgtacctgcaggcctcctacacctacctctctctgggcttctatttcgaccgcgaatgatgtggctctggaaggcgtgagccacttcttccgcgaattggccgaggaagaagcgcaagggctacgagcgtctcctgaaagatgcaaaaccaagcgtggcggcccgcgctctcttccaggacatcaagaagccaagctgaagatgagttggggtaaaaccccagacggcaatgaaagctgccatgggccctggagaaaaagctgaaccaggccctttttgggatcttcatgccctggggttctgcccgcacggacccccatctctgtgacttcctggagactcacttcctagatgaggaagtgaagcttatcaagaagatgggtgaccacctgaccaacctccacaggctgggtggcccggaggctgggctgggcgagtatctcttcgaaaggctcactctcaagcacgactaagagccttctgagcccagcgacttctgaagggccccttgcaaagtaatagggcttctgcctaagcctctccctccagccaataggcagctttcttaactatcctaacaagccttggaccaaatggaaataaagctttttgatgcaga

SEQ ID NO: 145062 - DNA, 331 bp, Homo sapiens
cttttttgttttttgttttggaaaacggggtttggccgtatttagggtggaagggaaggggatgaacccgggttaacggaacctttggcttccagggttaaagaatttttctggcttaaccctctggaggggtgggaataacaaaccgggcccaccacttcagccaaaatttggatttttaaaaaaaaaggggttttccccgggtgggcaaggtgggtttaaaattccgaacctggaaattggccccaataagggcccaaaagggtgggaataacgggcttgacccccaaacccaagcccttcaaatttttttaataaaccatgggtgggg

SEQ ID NO: 145063 - DNA, 637 bp, Homo sapiens; identical to SEQ ID NO: 144817
  misc_feature (1)...(637): n = a,t,c or g

SEQ ID NO: 145064 - DNA, 767 bp, Homo sapiens
  misc_feature (1)...(767): n = a,t,c or g
gacactcgctttttggaacgtctgaggttatcaataagctcctagtccagacgcccatgggtcatttcacagaggaggacaaggctactatcacaaagcctgtggggcaaggtgaatgtggaaagatgctggaggagaaaccctgggaaggctcctggttgtctacccatggacccagaggttctttgacagctttggcaacctgtcctctgcctctgccatccatgggcaacccccaaagtcaaggcacatggcaagaaggtgctgacgatccttgggagatgccataaaagcacctggatgatctcaaagggcacctttgcccaagcctgaagtgaacctgcacctgtgacaaagctgcaatgtggatccttgagaacttcaaagctcctggggaaatgttgctggtgacccgtttttggcaatcccattttcggcaaaagaatttcacccctgaaggttgcaggcttcctgggcagaaagatgggtgacttgcagttggccagtgcccttgttccttccagataccactgaagctcaattgcccatgaatgcagagcttttcaaggatatggctttattcttgcaagcaattacaaataataaatctatttctgctaagagatcaccaaannnnnatnntnnnnnnncccccggattttttatttagcgggccgcacctttttccccttttagggggggtaaatttatattgggccttgggccggggttttcaaaagcggggggannnnnnnnnnaaagagccc

SEQ ID NO: 145065 - DNA, 665 bp, Homo sapiens
aggggaaagcatgcagtgattagaggagtcactctcataaactcggccagttgtaggcttgtcactctctgtggatgctaactgagactcagaagagtcccttctcagttccatcaacaagcagggcattgaagaaataactgtagaatccgctacaccatctttctgaacttgagattccagttctacagatccatcttcctccttggctgtctcttgttcagatgcttttggtggggcttcggactcaatgagttcttcaacttttcccactgcctcctccatcttcatttcagaatttcaagttaaatcatggagtagagtctaggaaatgatatcaaagatgcaacaggaaagcaacctgcgctccgcggcgactccgtgccttctcgctcgcttcgcgcgcgccccgtcggggcacgcaccgaacccccggccgggactcttccccgctccggtgactcaggacgcgacggccaccgccgccttctcctcctcggaacaagccccggcagcgagcagtgggtcgcggtcagagcccctgccgggaccaaagtgaacctcgccgcctccgcagcctctaccaccaagtcccttcagtcgtccgcgccgcccccaagaaaatgtcaccagaggccgttccgctgggcgcctcacttccgccc

SEQ ID NO: 145066 - DNA, 361 bp, Homo sapiens
ggtctaagagccctgaaaaagggaagaggaagagcatgcttcttatgtggccagccacagtggggcacataggccatttcacactcctgttcctacatccacccattaagctgcaatgttcgaaactcctctactccccaccaaaggtcacccaatccaccctcctgccgcctcccagctagcctgtcatcacacacactacagtatgcattcctcacttctcttccaaagccaacttgctctgcatttgcatgaatccttttctcctctcctcagcttcagatatactcatgcccctctgccttccaaggctagtcccgcccgcatgacttggaatccccttttctcttgtatagtggag

SEQ ID NO: 145067 - DNA, 643 bp, Homo sapiens
ccggaattcccgggtcgagcttctgtggtctctgcggagatgttcccgggaagcctgtctagagggcggatggcagctgttgagatggcgtggctccccggctcctgcgcccgcgtggctttcgcggcgggcgctgcggcccggtattggacagcctggcagggcagcgcggggccgaatccggctgccgtggctgaggctcatggatcactcttttgtggtagggccacatctgccagagcctggagtctgcgaaggccgggacccggttccccggcccacagtgggggtgtgcaaacccgagagaactgggtaagttggggtcggcttgcagtttggggtaccccgagggcggtgtacgtcggtaagattgtaacagtattactggaagacttattcgactggcctgatgatacttgtaataggaagtgccgtcagaagcgataactgacgacgtctaatgtctatctgaccgcagtcgctgaaacctctacaacttagttgaccgtaactgccagagccctgccctgaattcctgtccttactccctctttaagattgcgtacccactgcagagtgctgaagacggggtagccacgaggtgagaggctctctggtgtagggtttaacatggaacgtattt

SEQ ID NO: 145068 - DNA, 1399 bp, Homo sapiens
  misc_feature (1)...(1399): n = a,t,c or g
ggccccccctttgatttctattatcatctgantacgccaagcttggcacgaggtatggagggaggctannnaaaaagagggggagtagtagctggggtgcaagatcaaataaagagctcgagcttctgtggtctctggggagatgttcccgggaagcctgtctatagggcggagggcaactgttgagatggcgtggctccccggctcctgcgcccgcgtggctttcccggcgggcgctgcggcccggtattggacagcctggcagggcagcgcggggccgaatccggctgccgtggctgaggctcatggatcactcttttgtggtagggccacatttgccacagcctggagtctgctaatgccctgacccgaatccccgggcctcaatgtgggcgtttttacccgattatagctggattgcaaattcgtgaagaatcagcatcatgtttgggcagctgagtattgggagccagggagcctgccatgaaggtttttgagaaccagagtgctgttttagaagctgggcaagcagcattctcaggcccaagaagaaggttataattcccagaggatgtcagtcccaaggaccaagtagctgccattcagtttggattctgaaaactaacttggcatcaacactgggtgtaagaaacatgcttggcctttatgtatcagaggacatgctcagcagattccaagagatatatttggcaactttttctagaaaagggccccatggggtaccatccattacatttttgagtttttttggggttttttttttttttttttgagacagtccttgctgtattgccccaggctgggagtgtgggtgggcacaatcacagctccattgcatcctcaaatcaccccagggcctaagcaaatcctccccaccttgtagctggggactacaagctcacagcacaacctggcttaaaattttttttttgttggagactggattctcctatgtttgcccaggctgggtctcaggctccctgggctcaaatggtcctcctgccccagctttccaaaggcacagggccaagtttgttagctttgtcccttgccatcatgcccaacaaaaaggttctataccttttaatgaattgactttcataaattgggttatgttgggtggggcaagttctttaagctgggaaattgtaaattcctcctgaaaatgtttttttcatggcagtttaccctgaactaatactacaataaaggatgggtcctggggtgtcaattcttgaaaatgtgtatttgaagaaaaagtaaatttcgcctactgttgtcagatattagcagtccagatattcgctctagcttgtaaacttcccctgtgtcagcctaagctctttaacccctattctacagctttagactggaggca

SEQ ID NO: 145069 - DNA, 355 bp, Homo sapiens
  misc_feature (1)...(355): n = a,t,c or g
aataaagaaattttggcccggcccaatgggtcaagcccggaattcccacccctttgggggcttaggcaagtggatcccccagagtccggagttcaaagcccggccagcccacatgggaaaactttatttttactaaaaaaaccaaccttaactgggcaaggggggccaaacccggtattcccggttctccggagggttaaaccccagggtccccttaacccgggaggtggagggttccattaacccaaatcatgcccctgccctcccgaatggggggcaaaattagaccccgttttttnnnnnnnnnnnnngtagggaaatctgtcataggttacaacatagttgaaccttaaag

SEQ ID NO: 145070 - DNA, 351 bp, Homo sapiens
  misc_feature (1)...(351): n = a,t,c or g
nnnnnnnnnnnnnnnnnnnnnnnnnnnnnnnnnnnnnnnnnnnnnnnnnnnnnnnnnnnnnnnnnnnnnnnnnnnnnnnnnnnnnnnnnnnnnnnnnnnnnnnnnnnnnnnnnnnnnnnnnnnnnnnnnnnnnnnnnnnnnnnnntaataaaaaaaagatacagcattaaatttttaaagacatgtagggataaaacacggtgatcatgaagcaacagagaaattcattgatgagtttgccaaggtcattgctgataaacatctgacactagaacaagtctataatgccaatgaaacatcactgttttgacattattatcctagaaagacaccaattacagctgctgagag

SEQ ID NO: 145071 - DNA, 327 bp, Homo sapiens
ccaggggtacccatgcagcgagccgagttcgagcagccctacaagcgttcccgttgcgatgacagcccgagaaccccctcgaacaccccttccgcagaggcagactgggccccgggcctggagctccatcccgactacaagacatggggtccggaacatgggtgctccttcctcaggcgcggaggctttgataagccggtgctgctgaagaacattcgagaaaatgaaatcacgggcgcattactggcttgtcctgatgagtctagttttgagaaccttggagtaagtgtcttgaggtagacgtagaagctgcttaattactattcg

SEQ ID NO: 145072 - DNA, 483 bp, Homo sapiens
aaaggtatgtcatccatactcattttccagagaaggtactagaaggaagccagtcactgcctctgagtcagaccagaggacacccccctgacatcaaggtgaggccaaggggagaggaaacagggctaagtagggcctgtgatgtcagcatgtctggttgggcatgtggcagggacgatgactgagatagaagacataaacctccatggtccaaacatgggagctaaactcggaaagccaacaggacggggacatgatgaggggacttgagggtcacaggagctccctccgtgtctctctctccataattaggtctgccctgagtgtcccggccgtgagtccccagcccactggcttcaggcacttccaagccccttgctcgcttccctgaagaggctgtgggtttctccaggccaggcctctgccttctaatcagttttccgggtctatgaggagtcgcagcaggctgtgctcgggtgcaga

SEQ ID NO: 145073 - DNA, 1008 bp, Homo sapiens
tggagacagagtcttgctctgtcacccaggctatagtgcagtggcgtgatctcgaaaaatattaaaattaaaattaaaaatcagtaaaaacattttaatacaagataaatatacaaaaattagtaacttcccactcctctagcaataatcacctggaaattttaaaaaaagggagtcaaaatattccctttgccatggcaactgagtagttgggggtgaaggttaggatgctgtatggagcagctccggccatggggagctcgacagaggcgtcatttctctcccacatggtggctgagaatagctgggtgtgctgctctgtcgccacacatggggtccccccatcacgcctcttctctagccttccaggcatctttcctggctgtggggttctactgggtgcagaaatgcccacgtccagctggcaggaggggccggggccagggcaggagaggagaggccatgttttccaagaccggagctggcaggaacagtgtctccaggtgacaaaagcctccgacaatttggcgagaaaggtgggggtgggcatgagaggatgcagggcccccaccactcaagcaaggagagcggggggcagagccacggagaagacccaagtctggaagcctctccccccaagcctgaaagcccagcctcccaggttcccatgaaatcacctccagttattccaggagaaacggcgcatggcctgccatgagtgtcccggccgtgagtccccagcccactggcttcaggcacttccaagccccttgctcgcttccctgaagaggctgtgggtttctccaggccaggcctgtggtcagcaatgcaggcaggtgtttgtgatcagggcatctgtgctatcaggaacagcccccaaaccacgcagggagggaggaggccctgagagagaaggtgccgttacatgcacgtgaccacagagaaggctgccttcaccccgtctgcaccccgggagtgcctgccacactgaggtccgcgcgcagtttc

SEQ ID NO: 145074 - DNA, 602 bp, Homo sapiens
  misc_feature (1)...(602): n = a,t,c or g
ttttttttttcaggccggaataaaggtttattgtgctggtgcattatatctcagcacctggagagctgtgcagaggttgggggagccccaagatggagggatgggggaagaggacctcctgccaaagcctccctaaagcaggacggagcccaggctccctgtcgaggactgacgaatattgtggacacaggctgccagacaatgtgtgagcaacagggggtggccagggcccccctgctccaggcatgggcgtcagaaacccttccccagcccctcggacttccccagggtggagggtcccctcaaacacagcccctcagcttttaggctgctttggaggccagacaggaagagttccattcattcaacctgatcccagcagcagtagcgggatgagaaactcacccccaggccgggggtgcttggagagcgcttgagaggatttaaatgccctataccccacatccctaatcctggaccaactagaaacagggggccaccttcaggaaaattaagagcagtattttacagagtgaatgctgcaggattttaccctgcggacgcgtgggcggacgcgtgggaattccagcncggtcgtcgtg

SEQ ID NO: 145075 - DNA, 534 bp, Homo sapiens; identical to SEQ ID NO: 144862

SEQ ID NO: 145076 - DNA, 654 bp, Homo sapiens; identical to SEQ ID NO: 144884
  misc_feature (1)...(654): n = a,t,c or g

SEQ ID NO: 145077 - DNA, 626 bp, Homo sapiens
ccccgactcttctggtccccacagactcagagagaacccaccatggtgcttgtctcctgccgacaagaccaacgtcaaggccgcctggggtaaggtcggcgcgcacgttggcgagtatggtgcggaggccctggagaggatgttcctgtccttccccaccaccaagacctacttcccgcacttcgacctgagccacggctctgcccaggtttaagggccacgggcaagaaggtggccgacgcgctgaccaacgccgtggcgcacgtggacgacatgcccaacgcgctgtccgccctgagcgacctgcacgcgcacaagcttcgggtggacccggtcaacttcaagctcctaaagccactgcctgctggtgaccctgggccgcccacctccccgccgagttcaccccttgcggtggcacggcttccctgggacaagttcctgggcttcttgttgaagcaacgttgttgaacttccaaattaccgttaaagcttggaagccttcgggtgggccatgcttcttggccccttgggcctccccccagcccctcctcccctttcctgcacccgtacccccgtggtctttgaaataaagtcttgagtgggcggcaaaaaaaaaaaaaaaaaaa

SEQ ID NO: 145078 - DNA, 352 bp, Homo sapiens
accgcccagcaatagacggtgcctcagcctgccgagccgcagtttccgtggtgtgagtgagtccgggcccgtgtcccctctcccgccgccgccatgggctgcacgttgagcgccgaagacaaggcggcagtggagcgaaacaagaagatcgaccgcaacttacgggaagaccgggaaaaagcggccaaagaagtgaaactgctggtactcggtgctggagaatctgggaaaagcgccattgggaaaccgatggaaatcattcatgaagaaggctatatccaggatgaatggaaaccctttaaaggaattgtgtacagcaatactttacaggccataattggaacttaaaaag

SEQ ID NO: 145079 - DNA, 1088 bp, Homo sapiens
  misc_feature (1)...(1088): n = a,t,c or g
gaaaaatcttctaaatgaaattaagaacttctggaaatatgggcttgctatgtaaattctgtgtatgttgcatacagctttttatttcttggtaaaattttgtgattgtactgaaaattttccttattttcagactactgtactgcctattaaagttgatttcagacatgcaaaaaaacctggaagaaatgttgcagggctagaaacattcttctcttcctcatagtttacttctacccatctacatgatttgatagaagtgctcgcaggaggtgcttccttaacttcggtgtatgtcatgacatctgtccttttcttgaggcccagaacacacattctcccatcctttcccagccaggcaacccaatggataccagcctcactttcccgtatttttcctgactggttcccagagtacaaagcacaggacaacttcgctaactcaccctgatctttgacctatactctgggtataaatctgcctgtaccttacccttgagatgtcctgctctaggggatgaatgccctgaagggaaaacatttgatgaaatccaccagtaattgaggcctcagatttcctgtgcccccggtagaacccatgtgattagtgaacccaaaacatgacccattgaatcccttttccccatattctgatccttaccctggaaacccgagctctcagattttgtggggttatctggcagatagatggtgacaacagtcccatctggtgaaggcttagggatatttagggtggtttccttaccttccttattggtttgaaggaaaccaggttgtgaataaaaattaattcaaaattagagncccaggcacagtggcttacaccctgtaatgcccagcactttgcgaggccgaggcgggcgaatcatctgaggttgggagtttgacaccagactggccaacatggtaaaaccccttctctactaaaagaaaaatacaaaaaaaaaaaaaaagtagccagtcggtcgcacatgtctgtaatcccaactatgtggaaggctgaggcacaagaattgcttgaacctgggaggcagaggtcgcagtgagctgagatcgcaccactgcac

SEQ ID NO: 145080 - DNA, 350 bp, Homo sapiens
  misc_feature (1)...(350): n = a,t,c or g
gcggtagggggtacgggggctggtcccagaagatggcggaggcggtggatttctggtaggtcctactttaggacaagatgtggtaccgttgaagcgtcagtctttgattcacagacagttgagcttttcagctgggaagcctttccannnnnnnnnnnnaaacggttttctgaacctaggaacccatggcaaaaggaaagacagagtcccctggccccaaaaggtgtggcccataaatttaatgggtcattagccaaagggggaccttgaggtttcgaggagcagggctattttttatgggagaatttcttcgcttaggggaaaatttacttgagatccccagaggggcg

SEQ ID NO: 145081 - DNA, 1856 bp, Homo sapiens
tttttttttttttttaaggaattataaactaacttttaattacttcaacaggaagaatttcaaactatgttgtaattcttattttaaagtttaaatctaattaatatattctgactaacataatcatccaaagataaaagtatttgtgatggcaaatggacagaacaatcatttaggtagcatctagggaatattgctacaattactttacataaataggaaatccacgtctttattaggtaatgtgccacacatcttaggaggtaaaaatttacataaggatagggcttattaaatatacataaatctccaaaattaattcacaaacattggggtacacaattgttattaaaacaaattttaacctattcaatgtctatggtaagggcataggttttttacaaaataggattttgtagacagtctcaaaaaagtatattaatactcctggagccagactgttccagcatatcagcatgtctgtggaaataaggcatccggagaagctgcattcactcttccccatggccagggccttctatgtgatgaaacaggtaggaatctagtgacctgggtgaatgctacacccactgcagcaccccattaccttagagaatcaattactctccagaagaatccaaccaaatggctatcatcctaatatgcaaatatccaggggaaaactgaacacattaatcaagcagcagtgtgttttatgttaaaaatcccaaatagcttgatgaatccattacattttgagttgccagacatacttaaaatcacactagcctagccactattttcatgaagaggaacttatatgcaagtcttttattaaatataaaaacaaagaaatctaccttgaaactaaataactggatacttgaataactgaataaggaacctaattaaatacaaaacctgtataggttgcatccaacatgcccagttactcagctaacactagtcctggtttccttaactaacagtaatagaaaagtccacattcaaacagtggtactttatatgttccttaacaattccaaataatgttgaaagggaggaggaaaggccttagtaaaaacatcccgggaaccctttcctacaaacctacattgcctataaactcaagccatagttttgccctgtaaatatgccataatgttcctacctcttgggtttaaaaagtagccaaagagatcagaaaacagaaacaaccttgacaaagaccttcaaatgcctcatggtgtgatatattcaggccttttgtgtataaacacacaccatcatgtatgtacaaatatacacatgctcctcaaagttacaagaggggttatggccccagtaacccccctcaatggtaagttgaaaaatatccataagtcaaaacaattatggggacataaccccccatgtaagttgtagggaatgtaatccaaaatgtaatatccactttccatatccatccgtaagtttgaaaaactccttaagttgaacccatcccaaattcggggatccgtcctgtgtatataaacacacggagaacccaccctaactgttcactaaacataaccaattcccatttagagaacaaggacatacaattatacacggcagcaaagtatacacatcccagcctttggcctagtgcagtggttctcaaacatttttccattatcggtacataaggtagatgccacatcacatgtgtaaaacactcccatggtgcagcagattttgatacaacttttattttattttattttattttattttattttattttatttattttttagacggaatcttgctctgttacccaggctggagtgcagaggggcaatctcggctcattg

SEQ ID NO: 145082 - DNA, 411 bp, Homo sapiens
tttttgtttctaaaaatggctttgtcttatctctatttttaaggagtatttttgctgggtatagaaatagattggcaggggttggtctctttgtcaaactctaattgcatctgatctaatttccagttatcaaggaaactatacttttgattcttccagggaaaaagtaaacacaatgaatatttcattatatttgagtgaacataaattctacatttcctaaacttgggaatagtaatatataactatggaacctcattcaggaaaaataggatgaagcgaaaatgggtaaatgacaagatgggacagcaacaaaaacatggctgaggggcccctttaaaaaaaccccccgggggctcctgttacttaagggtgtaagacagtgccctgttacctctagagaggagaaat

SEQ ID NO: 145083 - DNA, 819 bp, Homo sapiens
  misc_feature (1)...(819): n = a,t,c or g
ccccaacttctccccaagtccagccnagtgtcctgccagggttttcaggatttggggtaaggaaaacagaangatctccacacatgtcgtgcctgaattttaaataaggcatctgtctcctgaagacaccctgggaagagcacagcccacccttcctcacggtgccctgccctgtctcttccggaagtcgcctctgcttgcccacatgatgctggtgtaacccacaaaagatcccaggacttctcgatgactgcagaagtacaggtgctcctacacacgattacaggcgctcccacagacaattggtaaagattttcacttggggaacaggagtgtgaggtttgttaccgcctgcgacctacacctggctggactccaggggaaaccgcgggagtcgctggcagggagcccctggtctgctctcctcctcctcctccaccggcctctccctgtgcccccccaaaggtcagatcagatatggggcctcagtgtccttgtgcctcctgatggccgtcaggcctgaccaagggtccaagctgccccttcccagtggccagccacggtggaatcacaccaggccagtggcctggagaggaagagaccagcaggaaggaaagatcctcagcaacaaagtaaaaccagaacaacagaggacctttctgtgtaagaatatttggctttagaaggtaaataaaataattatatttcttagaattttctgactatccctaaatcctgcaggtaaattattcccaacaaattttcaaaaggcaatcaataataagtaggttcttcttcaataacatgagcatatgcttc

SEQ ID NO: 145084 - DNA, 331 bp, Homo sapiens
cccagctgctgagaggagttgcctgagagtgacctttgcatctgcctgtccagccagcatggaaccaaagcggatcagagagggctaccttgtgaagaaggggagcgtgttcaatacgtggaaacccatgtgggttgtattgatagaagatggaattgaactctataaaaagaactgtgacaacagcccctaaggaatgatcccgctgagagggatcactctgactagaccttggctagactttggcagaaggaagtgttggtttactaagtcttctatctatcagtatctctaagttcgttttgctggtcttctgtgtgatatctgtccg

SEQ ID NO: 145085 - DNA, 511 bp, Homo sapiens
acctaactgtccactttataatgataatttaacacgtttgtaaagtgaaatagttttaagtatgatgctatgatgcacctgcatataaatgaaaatggcgtgcacaaagacactttactatgggagctgcactggaagatttatgaaagcatgtgaaatttgcacctaaaattgtgttattagtgactataagcagcaatgctaaatttattgtacttgatgaatgaatgtatttagtcccagttactttggtttaaaaggataaatgtcctttagggttttttttttaaatgtgtttgtaatttgtactattgtgggggtatacttggactgcaggggttattgtcaatgtgtgatttgtgtttttattttatagaatcatctaatgggatataccaatttttataagtgatatttacataattctaataactggatatttgacaacctattaaaatgttttgcattggaaaaaaataatatatttttatattgctttaattgttttgag

SEQ ID NO: 145086 - DNA, 333 bp, Homo sapiens
  misc_feature (1)...(333): n = a,t,c or g
gctggatagtattaacgataggttagactatctactgttaattagagataagagagggtagaattactaaatttgaggacaaaacaatggaatccacccaatcagagcaatagaccaaaaatagactgaaaaaatgaacaggaccccagagatctgtgagacaatgacaaatggcccaacattcatgtcattggagtcccagaagaggataaagataatgggactgaaagagtatttgattagctgacnnnnnnnnnnnnnnnnnnnnnnnnnnnnnnnnnnnnnnnnnnnnnnnnnnnnnnnnnnnnnnnnnnnnnnnnnnnnnnnnnnnnn

SEQ ID NO: 145087 - DNA, 473 bp, Homo sapiens
tgcccgagggccttgccgctccaggattcgcaccacctgggaccagtgattcttgaagaccatgaggcaggtctcgggatcagccatgactggggtttggagattggccccttgaggtatacggtgcccagggccccgggaggccagtctgctcagccaattcatcctctccatgaggcaggctgggcaggactggcagccagaggcctacactctgaggatttgccagctggaggttttctccacttgtgtctccagtctgcttcatccggtctgtaggagccagtagctgcccatggagccagaggttataccaggctggaatggcaagcccagaggtcactggccagtccagatttttaaatcgttcactcacggaacgccgaacctggccgggcccggttgctgctgcggtgttaggtgagttcagaccgccgccatcgcttctcaagcgcaccagccgcgccacgaaa

SEQ ID NO: 145088 - DNA, 345 bp, Homo sapiens
  misc_feature (1)...(345): n = a,t,c or g
acaaccgatgccgcgctgctcgtcgagctcctttgcagcctgaagcccttcccaggttgatgacagctattataacaatnnnnnnnnnnnnnnnnnnnnnnnnnnnnnnnnnnnnnnnnnnnnnnnnnnnnnnnnnnnnnnnnnnnnnnnnnnnnnnnnnnnnnnnnnnnnnnnnnnnnnnnnnnnnnnnnnnnnnnnnnnnnnnnnnnnnnnnnnnnnnnnnnnnnnnnnnnnnnnnnnnnnnnnnnnnnnnnnnnnnnnnnnnnnnnnnnnnnnnnnnnnnnnnnnnnnnnnnnnnnnnnnnnnnnnnnnnnnnnnnnnnnnnnnnnnnnnnnnnnnnnnnnn

SEQ ID NO: 145089 - DNA, 342 bp, Homo sapiens
ctttaacagtgaattttgtgacgatgaatataatacaatataaccaactgtgtacactagcaacctcaaacagacaccatggggcacctgactcctgaggaaaagtctgccgtgactgacctgtggggcaaggtgaacgcggatgaagctgatggcgaggccctggtcacgctgctgggggtctacccttggacccagaggatgtttgagtcctttggggatctggacactcctgaagctgatatgggcaaccctaaggtgaaggctcatggctggaaagtgctctgagcctttattgatggaccggctcatccggaccaactaaagggcaacctttgcacg

SEQ ID NO: 145090 - DNA, 816 bp, Homo sapiens
tacactttggatgcttgacaggcattttgcatacctcctaaggctatatgagatgagatggttataagtctctaaggcattaattgagtgggactctttgacagtacccatgttttgttgcatgaacgtatgaaggcagagactgcctatatcatctcctgttgccattcagaagtacaccttgtcctgttgtgatcagagtttcacaaagtgctctcagtgcctaaggcaaactggcacattctctatgaaaaagacaattattgttcttggtcaggtggccagttggcccagttgattttggagcatagtgttaataaaggttagtctcttcagatatgagccagttgacttggctatataaatagctgttgtcacgggcaggtcagaggtatgtgtgtggatagactggatctgtaaccaccaatcagaaatcaatcagcaatcatttactgagcatttgctatgtgcctggcactatactaggagtggagctttgaaagattttttaaaaatacatgagctataggctaggtacagtggcttatatctgtaatctcggcacttcgagagaccatgggtggatcatttaaggctaggagtttgagaccagcctgggcaacatggcgaaaccccatctctacaaaaaatacaaaaattagccagaagtggtggcacacacctgtagtccagctacttgggaggataaagtgggaaaaatcacctgaacccgggaagtcagggctgcagtgagccatgatcgtgccactgcactccaggctgggtgacagagcaaaactctgtctcaaaaaaaaa

SEQ ID NO: 145091 - DNA, 339 bp, Homo sapiens
  misc_feature (1)...(339): n = a,t,c or g
ntntgcctaatgccacatgtaacatattgtcacctgctccctgctagacccccattcnccgctgcccatcagatatgtccctggaacttccaactcagcccatcccaaattgaacccatgccttctctcctcttcacactctactccactacactgtcccagccaataatcccggcccacactctgcacttgactcctgccattccctccatcatgttcttccaactccacttcctggggaatcctaccgcagagtcaactcttcttcgccttccactcccaaccctcaccccagtcttggccttcaatatcagtcaccagaattattacagaatctcc

SEQ ID NO: 145092 - DNA, 322 bp, Homo sapiens; identical to SEQ ID NO: 39628

SEQ ID NO: 145093 - DNA, 309 bp, Homo sapiens
gctggcttttgggcggcttttgggggttgatttctagagttaggacctggaaaaccgtttggcaatatgtacgacgcggatgatgatatgcaatatgatgaggatgatgatgaaattaccccggatttgttgcaagaaacatgctgtattgtaatccgctcttattttgacaagaaaggctaggttatacaacagctggattcttttgactagtctattcatatgactgctctcagaattggggaatacgctgctcctatagacctacaggctgatgctcaccatgctagtggagaaggtgaaaaaccc

SEQ ID NO: 145094 - DNA, 521 bp, Homo sapiens
ctaaagtagctttgtcttcattttcattctcatttaaaaggtagttctacaacctctcaaatgagaatgaaaatgaagacaaagctactttagtgttttaaagatacagagaatgactcaattatttaaaaagcaaaatttagaactttttgttttacttcctcattttataattgagacttggattttaaaatttacccaagcccaattaaggtggcagagccttcatgattgtccggtcaatgtttctcatcactattttttcatcaagatcttggcttttgttttgtattgctttttgagacagagtcttgctctgtcacccaggtagagcacagtggtgccatctcggctcactgcaacctccgcctcccaggttaaagcaattctcctgtctcagtctccttagcagctgggactacaggcacacaccactacacccagctaatttttgtacttgtagcagagatggggttttgtcatgttggccagtctggtcttgaactcgcctcgtgccgaat

SEQ ID NO: 145095 - DNA, 637 bp, Homo sapiens; identical to SEQ ID NO: 144817
  misc_feature (1)...(637): n = a,t,c or g

SEQ ID NO: 145096 - DNA, 674 bp, Homo sapiens
gacactcgctttctggaacgtctgaggttatcaataagctcctagtccagacgccatgggtcatttcacagaggaggacaaggctactatcacaagcctgtggggcaaggtgaatgtggaagatgctggaggagaaaccctgggaaggctcctggttgtctacccatggacccagaggttctttgacagctttggcaacctgtcctctgcctctgccatcatgggcaaccccaaagtcaaggcacatggcaagaaggtgctgacttccttgggagatgccataaagcacctggatgatctcaagggcacctttgcccagctgacgtgaactgcacctgtgacaagctgcatgtggatcctgagaacttcaagctcctggggaaatgtgctggtgaccgttttggcaatccatttcgggcaaagaattcacccctgaaggtgcagagcttcctgggcagaagatgggtgactgggagtggccagtgccctggtcctccaggataccactgagctcacttgcccatgatgcagagcttttcaagggataggcttttattctgcaagcaattacaaataataaatctatttctgctaagagatcacacatgattttcttcagctcttttttttacatctttttaaatatatgagccacaaagggtttatattgagaa

SEQ ID NO: 145097 - DNA, 982 bp, Homo sapiens
  misc_feature (1)...(982): n = a,t,c or g
tttttttttttttttttcaattccaagttttaattaaatatctctaatggttagaaaatcaatgtcaaatacgaacattggtatacagcttaaaatacaaatgtcagcaattattaaagaacatgattaatcattgttccaagtaaatgctagatcattatttcccaggaggcaagttaagcatcaggtgcctgaggggtaagggacagggcttcagtcggctctgatagctgcatggctgtcccaatgagcgttccactcagatagtgccagggggnggctctcatcacaggctgggctcactgggcctttatccccaggctccaagggaaacaccaggggcttttttctgccatgaagaatccgtgtttcagagtcaaatgatccactttaaagatggaaattttggacagctccagttccagaatattctagtttaacccttggaagttaagacttcccaaaggctgaagataggctactaaggggctgattggacaagagtcaggccagagtcactctaaacacatctttgttttgttctgtataattaattatactgtatcttctttaagtaactcaagttcaagctctctatatttcacttatgtttaaaagatgccaatttgattgtgtctaaactgaactttacccagtgtgctgaatactaaagaccttttaggccaaaggaaaaagatgtttatatattaacatacctcaaagtttacattttcattataataaattagccttaatgttaacaaataacatctcagaaagctgaatctaagtagcctgatctatcatgctaatttgagtttgttttttgtttttgtttttttgagatggagtttcgctcatgttgcccaggcttgagtgcaatggcacaatctcggctcaccgcaacctctgcttcccgggttcaagcgattctcctgtctcagcctgagtccaggagcttgaggttgcagtgagctatgat

SEQ ID NO: 145098 - DNA, 416 bp, Homo sapiens
  misc_feature (1)...(416): n = a,t,c or g
ggcacgagatcggtaaccgcctagttcaaaccccatggggcatttcacataggaggacacggctactatcacaagcctgtggggcacggtgaatgcggaaaatgctggaggaaaaaccctgctaaggctcctgggtgcttacccgtggacacagaggctgtttgacagctttggcaacctgtcctctgcctctgccatcatgggcaacccccaaggcaaggcacatggcttgaaggtgctgactttattgtgagatgccgtaaagcacctggatgatcttatgggcacgttttcccatccgactgaactgccctgttacaagctgcatctggattctgagaacttgaagctcctgggatatgtgctggcgatcgtgatggccatccattttggaaaagaagtgatccctgcagtgn

SEQ ID NO: 145099 - DNA, 637 bp, Homo sapiens; identical to SEQ ID NO: 144817
  misc_feature (1)...(637): n = a,t,c or g

SEQ ID NO: 145100 - DNA, 700 bp, Homo sapiens
ctcgctttctggaacgtctgaggttatcaataagctcctagtccagacgcccatgggtcatttcacagaggaggacaaggctactatcacaagcctgtggggcaaaggtgaatgtggaaagatgctggaggagaaaccctgggaaggctcctggttgtctacccatggacccagaggttctttgacagctttggcaacctgtcctctgcctctgccatccatgggcaacccccaaagtcaaggcacatggcaagaaggtgctgacttccttgggagatgccataaagcacctggatgatctcaagggcacctttgcccagctgacgtgaactgcacttgtgacaaagctgcatgtggatcctgagaacttcaagctcctggggaaatgttgctggtgacccgttttgggcaatcccattttcgggcaaagaatttcacccctgaaggttgcagggcttcctggcaaaagcagaagatggcagaagatggtgacttgcagtggccagtgccctgttcctccaggataccactgaagcctcttggcccatgaattcagaagctttcaaggataaggcttttattcttgcaagcaattacaaataataaatctatttctgctaagagatcacacatgattttcttcagctcttttttttacatctttttaaatatatgagccacaaagggtttatattgagaa

SEQ ID NO: 145101 - DNA, 1022 bp, Homo sapiens
ttttttttatcagtgaaaaatactttttttcatgtgtttaagaatacgattcttagggtgggcccgtgcagaggagacgaggccgtccacatctccttcccaatagtgtgtcccaggtcgtttccaaaatctgtgggtccctcacagcttctgatgacagctgctagatgccatttgctgaggaacaagggatggggagggatggcgagggcctggcccccagggcggccatcaccagaagtgtcgtagaaaggcccaaaggcggatgccacgcccagcagtgggtgactgcccccccactccttttcctgagtctatcagcattgtttggttttcttcttgttgcttttaaatcctccgagcggcacccctgaccaaagcagatgggtaggagggtattctatgtctgttagatccggcctctcacctgccggtgcagggggaaggctgccacaagctcagagcagattttccatgggcctccccttctgaccggttctccattgtcccctggggcttctgctgaggctgggcttctgcttttctttggcttatcaaaccgggaagtccgcgggggtacaggtgcaatcctcaccatgtgatccttccggtctctgctggtcttgaacttcctctgtgcagccttctaccaagcactgatacatgtcctgcctctcagacaggatctggaagagcgaatcgtgccactccaggatgtgggcgtccagcaggtgtccggaagggaaggcccgcttgcaaaaggagcaaaaatttccgtgcagcgtgtggtagtggtgctcgtagtcgtccagggcatcgaacacctggcagcagccggccacctggcaggcaaaagcgggcaccctgggcttctcaggcacgtcggccacctgcatgatcacgtcctggaggtagaggtggcgctgcacgtccccatcctcgaagaactggtgctcccgcgggaagcgcacggggcgcgcaacgaagcgaaagggcgcggccccagccgcgggatcccgctc

SEQ ID NO: 145102 - DNA, 379 bp, Homo sapiens
agctccttcttgccaaccaaccatgagctcccagattcggcagaattattccaccgacgtggaggcagccgtcaacagcctggtcaatttgtacctgcaggcctcctacacctacctctctctgggcttctatttcgaccgcgatgatgtggctctggaaggcgtgagccacttcacctcggcttgcaatggaccccaactgctcctgcgaggctggtggctcctgcgcctgcgccggctcctgcaagtgcaaaaagtgcaaatgcacctcctgcaagaagagctgctgctcctgttgccccctgggctgtgccaagtgtgcccagggctgcatctgcaaaggggcgtcagagaagtgcagctgctgtgcctgatgtcg

SEQ ID NO: 145103 - DNA, 748 bp, Homo sapiens
cggtcccgcgggtctgtctcttgcttcaacagtgtttggacggaacagatccggggactgggcttccagcctccgaccgccctccgatttcctctccgcttgcaacctccgggaccatcttctcggccatctcctgcttctgggacctgccagcaccgtttttgtggttagctccttcttgccaaccaaccatgagctcccagattcgtcagaattattccaccgacgtggaggcagccgtcaacagcctggtcaatttgtacctgcaggcctcctacacctacctctctctgggcttctatttcgaccgcgatgatgtggctctggaaggcgtgagccacttcttccgcgaactggccgaggagaagccgcgagggctacgagcgtcttcttgagaatgcaaaaccaagcgtggcggccgcgctctcttccaggacatcaagaagccagctgaagatgagtggggtaaaaccccagacgccatgaaagctgccatggccctggagaaaaagctgaaccaggcccttttggatcttcatgccctgggttctgcccgcacggacccccatctctgtgacttcctggagactcacttcctagatgaggaagtgaagcttatcaagaagatgggtgaccacctgaccaacctccacaggctgggtggcccggaggctgggctgggcgagtatctcttcgaaaggctcactctcaagcacgactaaaagccttctgagcccagcgacttctg

SEQ ID NO: 145104 - DNA, 355 bp, Homo sapiens
ggcacgagcgtgactaagatggaagcgtttttggggtcgcggtccggactttgggcggggggtccggccccaggacagttttaccgtattacgttcactcccgattccttcatggatccggcgtctgcactttacagaggtccaatcacgcggacccagaaccccatggtgaccgggacctcagtcctcggcgtttagatcgagggcggatgggtgattgccggacacatgctgggattctacgtgtgcttggatcgtttgcgggacttctatcgctttacgcgagtgaacctcagtaccgtgctggatgcctctggcgacttcgctgaatagcactatttgtagcagggtgtcg

SEQ ID NO: 145105 - DNA, 401 bp, Homo sapiens
ggcacgaggaagtgggtaacctttatttcccttctttttctctttagctcggcttattccaggggtgtgtttcgtcgagatgcacacaagagtgaggttgctcatcggtttaaagatttgggataagagaatttcaaagccttggtggtgattgcctttgctcagtatcttcaacagtgtccatttgaagatcatgtaaaactagtgaatgaagtaactgaatttgcaaaaacatgtgttgctgatgagtcacctgacaattgagactaatcacttcataccctttttggagacaaattatgcacagttgcaattcttcctgaaacctatggcgaaatggctgactgttgtgtccagctagaacctgagagaaatgaatgcttcttgcaactcaaggatgg

SEQ ID NO: 145106 - DNA, 411 bp, Homo sapiens; identical to SEQ ID NO: 144748

SEQ ID NO: 145107 - DNA, 493 bp, Homo sapiens
cgagatccctagtccagtgcggtggaattcctggggcaggaggctcctggagcgctggattcgtggcacagtctgaggccctgagagggaaatccatgcttttaagaactaattcattgttaggagatcaatcaggaattaggggccatcttacctatctcctgacattcacagtttaatagagacttcctgcctttattccctcccagggagaggctgaaggaatggaattgaaagcaccatttggagggttttgctgacacagcggggactgctcagcactccctaaaaacacaccatggaggccactggtgactgctggtgggcaggctggccctgcctgagggagatcgacacgaccagcaccagatccagggtctagaacaaagtatcctcaagcttgagaaagagatccaagatcttgaaaatgctgaactgcaaatctcaacgaaggaagaggccattttatagaaactaaaggcaattgagcggg

SEQ ID NO: 145108 - DNA, 526 bp, Homo sapiens
ggcacgagacttgcttccccgtctgactgtccttgacttctagaatggaagaagctgagctggtgaagggaagactccaggccatcacagataaaagaaaaatacaggaagaaatctcacagaagcgtctgaaaatagaggaagacaaactaaagcaccagcatttgaagaaaaaggccttgagggagaaatggcttctagatggaatcagcagcggaaaagaacaggaagagatgaagaagcaaaatcaaccaagaccagcaccagatccaggttctagaacaaagtatcctcaggcttgagaaagagatccaagatcttgaaaaagctgaactgcaaatctcaacgaaggaagaggccattttaaagaaactaaagtcaattgagcggacaacagaagacattataagatctgtgaaagtggaaagagaagaaagagcagaagagtcaattgaggacatctatgctaatatccctgaccttccaaagtcctacataccttctaggttaaggaaggagataaatg

SEQ ID NO: 145109 - DNA, 374 bp, Homo sapiens
ttcatcctgattagatttatgtaagtctctaggattgaggcagtcagtggctcccatggctttagcattcacaaacttctcactgtcaatgtcattacgtatgattgtgtaagctcctggtgcttatacgtctcattccagcagaaagacccactcgtcttaggccaaagacagctcaagtctaaaccagcgggagacctgaatacgagcttcatgagccttggggagagctacttcaacctcttcaatgcaaaggggcttgcctgctttccaggcaatggctgctttgcatttaataactttgccctaggtgtccttttttcattgccaaactgtgttgaacccttctctttgagttaagaaagcctcgtgcc

SEQ ID NO: 145110 - DNA, 637 bp, Homo sapiens; identical to SEQ ID NO: 144817
  misc_feature (1)...(637): n = a,t,c or g

SEQ ID NO: 145111 - DNA, 753 bp, Homo sapiens
  misc_feature (1)...(753): n = a,t,c or g
gtcctagtggccaagaattcggcacgagggaacgtctgaggttatcaataagctcctagtccagacgccatgggtcatttcacatatggaggacaaggctactatcacaagcctgtggggcaaggtgaatgtggaagatgctggaggagaaaccctgggaaggctcctggttgtctacccatggacccagaggttctttgacagctttggcaacctgtcctctgcctctgccatcatgggcaaccccaaagtcaaggcacatggcaagaaggtgctgacttccttgggagatgccatataagcacctggatgatctcaagggcacctttgcccagctgagtgaactgcactgtgacaagctgcatgtggatcctgagaacttcaagctcctgggaaatgtgctggtgaccgttttggcaatccattttcggcaaagaattcacccctgaggtgcaggcttcctggcagaagatggcagaagatggtgactggagtggccagtgccctgtgcttcacaaaacacttggacttcatgtgcatgatgcaaagctttcaaagataggctttattctgccagcaatcaaaatataaaatctattcttgctaggagatcaccaaannnnnatnntnnnnnnncccccggattttttatttagcgggccgcacctttttccccttttagggggggtaaatttatattgggccttgggccggggttttcaaaagcggggggannnnnnnnnnaaagagccc

SEQ ID NO: 145112 - DNA, 927 bp, Homo sapiens
tcatttcttgcttctcttggccgtagttttggttgtgctgggggcctcagccacagaggccttgggggctgtggctgctcgtgcccccttccttccccagaaagagctttggtggcccctgggaatcagactgcatggtttcttggtgggagaggaggcctggggtgaggagacggcctcagggactgtctcctccccttgcgcaggagtggcagaagggctgctgtccccagccatgggcaccccaggtagcaggggcaggtcggtgagggtgggctgcatctccatcctcagcaggtgctctgtcagggccgtctgttgccggtgctccctgtgcctgctcagctcctgctccagctccttgaggaagcctcgttctgagcagaatgggccactcagctctgggaactcctcatcgcttgaggcttcatcctcctcatccgaaatccagcgctccaccacaggctgcccgtccaggtccaggagaagtggcagggcttctgtcaccagctcgcggtagccatcctggttggtgcagctgtttccagacaggttgaggatgagaaggctctgggggaactcatccagcttcaatgtttctatcaggttctcagaaaggtccagaaactggaggcatgggaggtcgaggaggttttccacctgcctgatttggtttcctgccagagacaggaagcgcaaggaggggatgcaagccaggttctcaatttgctggatcttattcccttgcagatagagactgtgaagattctggaggccttctaagttcctgatagtagtaatcccctcccggtccaggcggacagtctgcagttcatcaagagtgtgaaaccctgtactcccagcactttgggaggccgaggcaggaggatcgctcgagcccaggaggtcgaggctgcagtgtgccat

SEQ ID NO: 145113 - DNA, 837 bp, Homo sapiens
agaacctgccgacattctagctaatttctctctcacgtccaggagccccgtaatagacaggcgagcctgttttctcatcattgacccaggctgcttccaccttctggctccaccacctgtatcctgccacctcatggtatgagacagctgcccaagctctagccattacgtcccaggaggcaagtaagaaaaaaggagacttaaattgtacacagcaagtctgcttacacctttgcccagaatttaatctcagtactatatgtagctgcaggggaacctgggaaatgtagttttatttcccatggccttattcttagctaaaatttagatttgattgctaagtgaaaaggggagactcaatattggagtaggcagccgggaatgtcactagttctgaggtgctcccttagtggagctgaaaggagccatcagacaccaggatggtacctgtagatgatgccctccccacttttggttctttgattaattacacagatatttatggagcacctgttttgtacaggcactattctgggaactgggaagagagtaatggaaaagcaaacggggtctccacccttgcagagctcgtattttaaaagagcagctagatagtaagcaagtcagttacttagtgcgtcagagataaggggtgtgaagaaaaataaaggaggctgggcatagaggctctcaactgtactcccagcactttgggaggctgaggcaggaggattgcttgagcccaggaggtcaaggctgcagtgagccgagattgcaccgctgcgttccagcctgggtgacaggctaaaaaaaaaccctgcctaaaaacaaacaaac

SEQ ID NO: 145114 - DNA, 501 bp, Homo sapiens
agggtaaaaaaatcgagatcgtagtccgtgtggtggaattcgggcctgctatctgtcacccaacaggtatgctgccccacaaaaccaagcgaggccaggccgctctggaccgtctcaaggtgtttgacggcatcccaccgtcctacgacaaggtgagctatgccaaaccccacaggcagcggccttacctgtggcgtccatgatgttccgcaactacctacattgtttgatcctcatgaaagcagcactggctgagacgccagtccagccgacctccttccctgtctgtccctcccgggctcttaagcccctctctttctctaacagaaaaagcggatggtggttcctgctgccctcaaggtcgtgcgtctgaagcctacaagaaaggtgagtcccagcttacgctgcaccatctacttgggagatttcaggcctgctgagggacctggggacctggagcctggcagatgatgtccttatctcacgatggtctgcggatgt

SEQ ID NO: 145115 - DNA, 840 bp, Homo sapiens
  misc_feature (1)...(840): n = a,t,c or g
cccacgcgtccgcccacgcgtncgcccacgcgtccggatggcggaggtgcaggtcctggtgcttgatggtcgagagccatctccctgggccgcctggcggcccatccgtggctaaacaggtactgctgggccggaaggtggtggtcgtacgctgtgaaggcatcaacatttctggcaatttctacagaaacaagttgaagtacctggctttcctccgcaagcggatgaacaccaacccttcccgaggcccctacaacttccgggcccccagccgcatcttctggcaggaccgtgcgaggtatgctgccccacaaaaccaagcgaggccaggccgctctggacgcgtctcaaggtgtttgacggcatgccaccgccctacgacaagcccctctctttctctaacagaaaaagcggatggtggttcctgctgccctcaaggtcgtgcgtctgaagcctacaagaaagttttgcctatctggggcgcctggctggacgaggttggctggaagtaccaggcagtgacagccacccctggaggagaagaggaaagagaaagccaaggatccactaccggaagaagaaatagcttcatgaggctacggaaacagggccgagagaaacgtgagaagaatatttgccaataccccagaggtcctcaagacccacggactcctggtctgagcccaataaagactgttaattcctcatgcgttgcctgcccttcctccattgttgccctggaatgtacgggacccaggggcagcagcagtccaggtgccacaggcagccctgggacataggaagctgggagcaaggaaagggtcttagtcactgcctccc

SEQ ID NO: 145116 - DNA, 370 bp, Homo sapiens
  misc_feature (1)...(370): n = a,t,c or g
ggcacgagnnnnnnnnnnnnnnnnnnnnnnnnnnnnnnnnnnnnnnnnnnnnnnttttgtctcctctnnnnnnnnnnnnnnnnnnnnnnnnnnnnnnnnnnnnnnnnnnnnnnnnnnnnnnnnnnnnnnnnnnnnnnnnnnnnnnnnnnnnnnnnnnnnnnnnnnnnnnnnnnnnnnnnnnnnnnnnnnnnnnnnnnnnnnnnnnnnnnnnnnnnnnnnnnnnnnnnnnnnnnnnnnnnnnnnnnngtcttggaggtcttgtttctctgggtttatgcctcaaggtggcgcctgctcccctgtgctccctggtagcctggtagtgagcctgcttctcacacagtcatacctggttgtggtcccacagtgg

SEQ ID NO: 145117 - DNA, 1500 bp, Homo sapiens
atggtgtttctctcgggaaatgcttccgacagctccaactgcacccaaccgccggcaccggtgaacatttccaaggccattctgctcggggtgatcttggggggcctcattcttttcggggtgctgggtaacatcctagtgatcctctccgtagcctgtcaccgacacctgcactcagtcacgcactactacatcgtcaacctggcggtggccgacctcctgctcacctccacggtgctgcccttctccgccatcttcgaggtcctaggctactgggccttcggcagggtcttctgcaacatctgggcggcagtggatgtgctgtgctgcaccgcgtccatcatgggcctctgcatcatctccatcgaccgctacatcggcgtgagctacccgctgcgctacccaaccatcgtcacccagaggaggggtctcatggctctgctctgcgtctgggcactctccctggtcatatccattggacccctgttcggctggaggcagccggcccccgaggacgagaccatctgccagatcaacgaggagccgggctacgtgctcttctcagcgctgggctccttctacctgcctctggccatcatcctggtcatgtactgccgcgtctacgtggtggccaagagggagagccggggcctcaagtctggcctcaagaccgacaagtcggactcggagcaagtgacgctccgcatccatcggaaaaacgccccggcaggaggcagcgggatggccagcgccaagaccaagacgcacttctcagtgaggctcctcaagttctcccgggagaagaaagcggccaaaacgctgggcatcgtggtcggctgcttcgtcctctgctggctgccttttttcttagtcatgcccattgggtctttcttccctgatttcaagccctctgaaacagtttttaaaatagtattttggctcggatatctaaacagctgcatcaaccccatcatatacccatgctccagccaagagttcaaaaaggcctttcagaatgtcttgagaatccagtgtctccgcagaaagcagtcttccaaacatgccctgggctacaccctgcacccgcccagccaggccgtggaagggcaacacaaggacatggtgcgcatccccgtgggatcaagagagaccttctacaggatctccaagacggatggcgtttgtgaatggaaatttttctcttccatgccccgtggatctgccaggattacagtgtccaaagaccaatcctcctgtaccacagcccggacgaagtctcgctctgtcaccaggctggagtgcagtggcatgatcttggctcactgcaacctccgcctcccgggttcaagagattctcctgcctcagcctcccaagcagctgggactacaggggatgtgccaccaggccgacgccaccaggcccagctaatttttgtatttttagtagagacggggtttcaccatgttggccaggatgatctcgatctcttgacctcatga

SEQ ID NO: 145118 - DNA, 1341 bp, Homo sapiens
ccctgtccacagcccccacacagactcgaggggcccccatctcctgttctgaacccaacagggtggtcccactgtgggaccacaaccaggtatgactgtgtgagaagcaggctcactaccaggctaccagggagcacaggggagcaggcgccaccttgaggcataaacccagagaaacaagacctccaagacggccaggcactggggcacacgccggtaacacagcaccgtgggagctgagacgggaagggatcgccctgagcccccaggattttgaaacccaccccctgggcaacaccaggtgagacccccgtatcctacaaaaaaatacacattagcccaggcatggcggcatgcgccctggggtccccaagtactcgggaggtagaggagagaaaaatcacttgagcccagagaggtcaaggctacagggagctgagatcgcatcactgtactccagctggggtgaaacggcgagactctacctcaaaaataaataaatacatacataattaataaataaaacatcaaagaccagccgacctaactccatctaaaatacccaacttctacgcaaaatataaataaaattagaaaaccaactccaatctcagaaaagccctagcaacttaggcgacatactaaaggccaaaaataccctcctgacacccagctaataaagaaaaagtcaactattccagttaaaaagaagaaaaggaaactggctgtggtggcttatgcctgtaatcccagtgctttgggaaggccaggagtttgagacccaggatggacagcatagcaagaccccatctctacaaggaaaaaaagaatcagccaggcatggtggtgtggagctgtagttccaactactcggggggctgaggaggaaggatcgcttgagcccagggaggtagaggcctgcagtgagctatgattgtgcccactgcagtccagcctgggcgacagagcaaagacccggtctcgaaagaaaagaaagagaaagcaagaaaagaaagatggctgggcacggtggctcactcctgtaatcccagaactttgggaggccaaggtgggtggatcatgagatcaagagatcgagaccatcctggccaacagggtgaaaccccgtctctactaaaaatgcaaaaattagctgggcgtggtggtgggcaccagtccaggctactcgggaggctgaggcaggagaatggtgtgaacccaggaggcggagcttgcagtgagccgagatggcactgctgcactccagcctgggcaacagagtgagactccatctcaaataataataaaaaataaataaataaataaataaataaaagacaa

SEQ ID NO: 145119 - DNA, 383 bp, Homo sapiens; identical to SEQ ID NO: 62749

SEQ ID NO: 145120 - DNA, 368 bp, Homo sapiens
ggcacgaggtctgttgtgacttgatgcgggcaccgcatgcgccgagacgatggcgtgtaccagccgcttgtatggtcttccgagaagcacatggcccaaccatccggacgcgattttaccggagggctactttagctcggagatatgatctagacctgattgtggactgagagtgatatatagaggtcttactatttcatctgcctgataaactgttgagtatgccaaatatgtgtgatttaaataccatagtatcaaacctaataccataagtattttgagaaaaataattgagacatggaacttatcatgagcttctcctggtttcccattttatattctagatcattgggtgacctcagggtttg

SEQ ID NO: 145121 - DNA, 375 bp, Homo sapiens
ggcacgagcggtccccgcgtgcactttagggccggtcaggccctaaagtattcactgagcacttaggaagaccgggcattgggctggtgtcatgaagaatactggaatataggaggtagggtctggagccctgacaagcacacagttcttttgcaggagtcaagatgtgctcataggagccaagggcaaactcgaaaacagccctgccctgtggttaggggaggtagtgtgtggctttaggagctatgagggggatgagaagactgccggctggtgcacctaaaatgcttatgggtgtatgatgagaactcgatagacttggctacattgcccacccgcagcttgggaagcgtgctcgagccgggattgtcctgg

SEQ ID NO: 145122 - DNA, 574 bp, Homo sapiens
  misc_feature (1)...(574): n = a,t,c or g
agatgtcctttggagctgggagtgaaggtagcacttaagcggtggctttgcatgtcttgataaaagtaatgagttgtttgcctcaatacagcttcaactaaaattcggattttgagctcaaaaaatgttaatgcccttcatagaaattaaggggaatggaaatcttttcttaacattttacacctctacccctaaaattttaaagaactgtacctttaataaaaatgtgccaattttccatacagcatccccagtgttgatcatggaggttaatgattctttattgttagggaccctatccttgtaattcccagagttatttatgttttctacagttgaagaggaaaaataccgcttcttattgccctccttttcaggatttcttctggcttcttgagtagctggagtatttttgagagactcctacaggcctgcggggtggcacatgcctgtaatcctagctacntaggaggctgaggtgggagaattgcttaaacccgggaggcagaggttgcagtgagccgagatcgcatcactgcactccagcctgggcgacagagcaagactctgncta

SEQ ID NO: 145123 - DNA, 420 bp, Homo sapiens
ggcacgagcgcggctctggctcttgcttcaacagtggttggacggaacagatccggggactctgttgcagcctccgagcgcgctccgatttcctatgcgcttgcaacctgcgggaccatcttctcggccatctgctgcttctgggacctgtcagcaccgcctatggggttagctccttcttgccaaccaactcatgagcttacagattcgccagaattattccaccgacctggaggcagccgtcaacagactgggcaatctggacctgcaggcctactacacctacctctatctgggcttctattacgaccgcgatgatgagggtctggaaggcgtgagccacttcttccgcgaactggccgaggacaaacgcgatcgctactagcgtctgctgactatgcagaaccagcgtggcgggcg

SEQ ID NO: 145124 - DNA, 415 bp, Homo sapiens
  misc_feature (1)...(415): n = a,t,c or g
ggcacgagggtcatcaatatgctcctaatccagacgccatgggtcattttacagaggaggacaaggctactatcacaagcctgtggatcaaggtgaatgaggaaaatgctggatgagaaaccctggcaaggcttctggctggctacccatggacccagaggatctttgacaggtttggcaatctgttctttgcctctgacatcatgggcaactcaccagtccaggcacatggcaagaacgtgctgacttccttgttagatgccacaaagcacctggatgatctcaagggcacctttgcccagctgagtgaactgcactgttacaagctgcatgtggatcctgagaacttccatgctctggcaaatgagctggcgaccgccttggctatgcatttccgctaataattcacccctgn

SEQ ID NO: 145125 - DNA, 359 bp, Homo sapiens
ggcacgagctgtcaaccccacacgcctttggcacaatgaagtggggaacctttatttcccttctttttctctttagctcggcttattccaggggtgtgtttcgtcgagatgcacacaagagtgaggttgctcatcggtttaaagatttgggagaagaaagtaccccaagtgtcaactccaactcttgtagaggtctcaagaaacctaagaaaagtgggcagcaaatgttgtaaacatcctgaagcaaaaagaatgccctgtgcagaagactatctatccgtggtcctgaaccagttatgtgtgttgcatgagaaaacgccagtaagtgacagagtcaccaaatgctgcacagaatcctg

SEQ ID NO: 145126 - DNA, 2364 bp, Homo sapiens
atgaagtgggtaacctttatttcccttctttttctctttagctcggcttattccaggggtgtgtttcgtcgaacccccctgggccctgccagctccctgccccagagcttcctgctcaagtgcttagagcaagtgaggaagatccagggcgatggcgcagcgctccaggagaagctgtgtgccacctacaagctgtgccaccccgaggagctggtgctgctcggacactctctgggcatcccctgggctcccctgagctcctgccccagccaggccctgcagctggcaggctgcttgagccaactccatagcggccttttcctctaccaggggctcctgcaggccctggaagggatatcccccgagttgggtcccaccttggacacactgcagctggacgtcgccgactttgccaccaccatctggcagcagatggaagaactgggaatggcccctgccctgcagcccacccagggtgccatgccggccttcgcctctgctttccagcgccgggcaggaggggtcctggttgctagccatctgcagagcttcctggaggtgtcgtaccgcgttctacgccaccttgcgcagcccggtggaggcggtgatgcacacaagagtgaggttgctcatcggtttaaagatttgggagaagaaaatttcaaagccttggtgttgattgcctttgctcagtatcttcagcagtgtccatttgaagatcatgtaaaattagtgaatgaagtaactgaatttgcaaaaacatgtgttgctgatgagtcagctgaaaattgtgacaaatcacttcataccctttttggagacaaattatgcacagttgcaactcttcgtgaaacctatggtgaaatggctgactgctgtgcaaaacaagaacctgagagaaatgaatgcttcttgcaacacaaagatgacaacccaaacctcccccgattggtgagaccagaggttgatgtgatgtgcactgcttttcatgacaatgaagagacatttttgaaaaaatacttatatgaaattgccagaagacatccttacttttatgccccggaactccttttctttgctaaaaggtataaagctgcttttacagaatgttgccaagctgctgataaagctgcctgcctgttgccaaagctcgatgaacttcgggatgaagggaaggcttcgtctgccaaacagagactcaagtgtgccagtctccaaaaatttggagaaagagctttcaaagcatgggcagtagctcgcctgagccagagatttcccaaagctgagtttgcagaagtttccaagttagtgacagatcttaccaaagtccacacggaatgctgccatggagatctgcttgaatgtgctgatgacagggcggaccttgccaagtatatctgtgaaaatcaagattcgatctccagtaaactgaaggaatgctgtgaaaaacctctgttggaaaaatcccactgcattgccgaagtggaaaatgatgagatgcctgctgacttgccttcattagctgctgattttgttgaaagtaaggatgtttgcaaaaactatgctgaggcaaaggatgtcttcctgggcatgtttttgtatgaatatgcaagaaggcatcctgattactctgtcgtactgctgctgagacttgccaagacatatgaaaccactctagagaagtgctgtgccgctgcagatcctcatgaatgctatgccaaagtgttcgatgaatttaaacctcttgtggaagagcctcagaatttaatcaaacaaaattgtgagctttttgagcagcttggagagtacaaattccagaatgcgctattagttcgttacaccaagaaagtaccccaagtgtcaactccaactcttgtagaggtctcaagaaacctaggaaaagtgggcagcaaatgttgtaaacatcctgaagcaaaaagaatgccctgtgcagaagactatctatccgtggtcctgaaccagttatgtgtgttgcatgagaaaacgccagtaagtgacagagtcaccaaatgctgcacagaatccttggtgaacaggcgaccatgcttttcagctctggaagtcgatgaaacatacgttcccaaagagtttaatgctgaaacattcaccttccatgcagatatatgcacactttctgagaaggagagacaaatcaagaaacaaactgcacttgttgagcttgtgaaacacaagcccaaggcaacaaaagagcaactgaaagctgttatggatgatttcgcagcttttgtagagaagtgctgcaaggctgacgataaggagacctgctttgccgaggagggtaaaaaacttgttgctgcaagtcaagctgccttaggcttataa

SEQ ID NO: 145127 - DNA, 16505 bp, Homo sapiens
agagatcatttttttttctaatatagggatatttatgacattgtaaatgccctttggaccaactcaggacaaggtacaaaatggggcccatggatggagctgtgagcccagctcaccactgttcaactctcttctctgaaacaaattgtccatggggaccctcagcatctgggggcaaaagggccaagtacacaggggtctctgcaccttcttctgggctcttggtggccttgggtcccgccatgtcagttctcacccaccctgggcagcaggcattcaggaggatcttgtcccctttcctctgctcactcagtttcctggcgtggatcctggacagaacggtgacgccaatcttcgtcaccccgtatgcgctgctgggccagccctccttctggtgcactcccttctttgtatcctccacaaacttgttcatgagccccaccagctcctcctcagtgatggtctcactgcggaacttctgctgcagctctgggctgcagcttttctcttctgtcaaccccacacgcctttggcacaatgaagtgggtaacctttatttcccttctttttctctttagctcggcttattccaggggtgtgtttcgtcgagatgcacgtaagaaatccatttttctattgttcaacttttattctattttcccactaaaataaagttttagtaaactctgcatctttaaagacttattttggcatttatttctaaaatggcatcgtattttgtatttgtgaagtcttacaaggttatcttattaataaaattcaaacatcctaggtaaaaaaaaaaaaaggtcagaattgtttagtgactgtaattttcttttgcgcactaaggaaagtgcaaagtaacttagagtgactgaaacttcacagaatagggttgaagattgaattcataactatcccaaagacctatccattgcactatgctttatttaaaaaccacaaaccctgtgctgttgatctcataaatagaacttgtatttatatttattttcattttagtctgtcttcttggttgctgttgatagacactaaaagagtattagatattatctaagtttgaatataaggctataaatatttaataatttttaaaatagtattcttggtaattgaattattcttctgtttaaaggcagaagaaataattgaacatcatcctgagtttttctgtaggaatcagagcccaatattttgaaacaaatgcataatctaagtcaaatggaaagaaatataaaaagtaacattattacttcttgttttcttcagtatttaacaatccttttttttcttcccttgcccagacaagagtgaggttgctcatcggtttaaagatttgggagaagaaaatttcaaagccttgtaagttaaaatattgatgaatcaaatttaatgtttctaatagtgttgtttattattctaaagtgcttatatttccttgtcatcagggttcagattctaaaacagtgctgcctcgtagagttttctgcgttgaggaagatattctgtatctgggctatccactaaggtcgtcactggtcacatggctattgagtacttcaaatatgaccagtgcaactgagaaacaaaaacttaaattgtatttaattgtagttaatttgaatgtatatagtcacatgtggctaatggctactgtattggacagtacagctctggaacttgcttggtggaaaggactttaatataggtttcctttggtggcttacccactaaatcttctttacatagcaagcattcctgtgcttagttgggaatatttaatttttttttttttttaagacagggtctcgctctgtcgcccaggctggagtgcagtggcgcaatctcggctcactgcaaactccgctcccgggttcacgccattctcctgcctcagcctcccgagtagctgggactacaggcgcccgccatcacgcccggctaatcttttgtatttttagtagagatggggtttcaccgtgtgccaggatggtctcaatctcctgacatcgtgatctgcccacctcggcctcccaaagtgctgggattacaggagtgagtcaccgcgcccggcctatttaaatgttttttaatctagtaaaaaatgagaaaattgtttttttaaaagtctacctaatcctacaggctaattaaagacgtgtgtggggatcaggtgcggtggttcacacctgtaatcccagcactttggaaggctgatgcaggaggattgcttgagcccaggagtacaagaccagcctgggcaagtctctttaaaaaaaacaaaacaaacaaacaaaaaaattaggcatggtggcacatgcctgtagtcctagctacttaggaggctgacgtaggaggatcgtttggacctgagaggtcaaggctacagtgagccatgattgtgccactgcactccagcctgggtgacagagtgagactctgtctcaaaaaagaaaaaggaaatctgtggggtttgttttagttttaagtaattctaaggactttaaaaatgcctagtcttgacaattagatctatttggcatacaatttgcttgcttaatctatgtgtgtgcatagatctactgacacacgcatacatataaacattagggaactaccattctctttgcgtaggaagccacatatgcctatctaggcctcagatcatacctgatatgaataggctttctggataatggtgaagaagatgtataaaagatagaacctatacccatacatgatttgttctctagcgtagcaacctgttacatattaaagttttattatactacatttttctacatcctttgtttcagggtgttgattgcctttgctcagtatcttcagcagtgtccatttgaagatcatgtaaaaattagtgaatgaagtaactgaatttgcaaaaacatgtgttgctgatgagtcagctgaaaattgtgacaaatcacttgtaagtacattctaattgtggagattctttcttctgtttgaagtaatcccaagcatttcaaaggaattttttttaagttttctcaattattattaagtgtcctgatttgtaagaaacactaaaaagttgctcatagactgataagccattgtttcttttgtgatagagatgctttagctatgtccacagttttaaaatcatttctttattgagaccaaacacaacagtcatggtgtatttaaatggcaatttgtcatttataaacacctctttttaaaatttgaggtttggtttctttttgtagaggctaatagggatatgatagcatgtatttatttatttatttatcttattttattatagtaagaacccttaacatgagatctaccctgttatatttttaagtgtacaatccattattgttaactacgggtacactgttgtatagcttactcatcttgctgtattaaaactttgtgcccattgattagtaacccctcgtttcgtcctcccccagccactggcaaccagcattatactctttgattctatgagtttgactactttagctaccttatataagtggtattatgtactgtttatctttttatgactgacttatttcccttagcatagtgcattcaaagtccaaccatgttgttgcctattgcagaatttccttcttttcaaggctgaataatattccagtgcatgtgtgtaccacattttctttatccattaatttgttgattgatagacatttaggttggttttctacatcttgactatcatgaatagtgttgcaatgaacacaggagagctactatctcttagagatgatatcatggtttttatcatcagaaaacacccactgatttctatgctaattttgttacctgggtggaataatagtacagctatatattcctcattttagatatctttgtatttctacatacaataaaaaagcagagtacttagtcatgttgaagaactttaaacttttagtatttccagatcaatcttcaaaacaaggacaggtttatctttctctcaccactcaatctatatatacctcttgtgggcaaggccagtttttatcactggagcctttcccctttttattatgtacctctccctcacagcagagtcaggactttaactttacacaatactatggctctacatatgaaatcttaaaaatacataaaaattaataaattcbgtctagagtagtatattttccctggggttacgattactttcataataaaaattagagataaggaaaggactcatttattggaaagtgattttaggtaacatttctggaagaaaaatctctatatcttaatagtcacttaatctatgatggattgtgttactcctcagttttcaatggcatatattaaaacatggccctctaaaaagggggcaaatgaaatgagaaactctctgaatgtttttctcccctaggtgaattcacctgctgcttagaagcttattttctcttgatttctgttataatgattgctcttaccctttagttttaagtttcaaaataggagtcatataactttccttaaagctattgactgtctttttgtcctgttttattcaccatgagttatagtgtgacagttaattcttatgaaaattatatagagatggttaaatcatcagaaactgtaaaccaacgattgggaggggaagcggatttttaaatgatttcctgaccaagcttaaccagtatattaaatcctttgtactgttctttggctataaagaaaaaaggtactgtccagcaactgaaacctagctttcttccatttagcataccctttttggagacaaattatgcacagttgcaactcttcgtgaaacctatggtgaaatggctgactgctgtgcaaaacaagaacctgagagaaatgaatgcttcttgcaacacaaagatgacaacccaaacctcccccgattggtgagaccagaggttgatgtgatgtgcactgcttttcatgacaatggagagacatttttgaaaaagtaagtaatcagatgtttatagttcaaaattaaaaagcatggagtaactccataggccaacactctataaaaattaccataacaaaaatattttcaacattaagacttggaagttttgttatgatgattttttaaagaagtagtatttgataccacaaaattctacacagcaaaaaatatgatcaaagatattttgaagtttattgaaacaggatacaatctttctcaaaaatttaagatagacaaattctttaatgtattccgcagatatgtatatatggttgttataattgatttcgttttagtcagcaacattatattgccaaaatttaaccatttatgcacacacacacacacacacacacacttaacccttttttccacatacttaaagaatgacagagacaagaccatcatgtgcaaattgagcttaattggttaattagatatctttggaatttggaggttctggggagaatgtcgattacaattatttctgtaatattgtctgctatagaaaagtgactgtttttcttttttaaaatttagatacttatatgaaattgccagaagacatccttacttttatgccccggaactccttttctttgctaaaaggtataaagctgcttttacagaatgttgccaagctgctgataaagctgcctgcctgttgccaaaggtattatgcacacgaatagaaaaaaagagtttattatccaacctgattttgtccattttgtggctagatttagggaccctgagtgtctgatacaaactttcccacatggtcaaaaaagccttccttttatctgtcttgaaaatctttcatctttgaaggcctacactctcgtttcttcttttaagatttgccaatgctgatctgtcagaggtaatcactgtgcatgtgtttaaagatttcaccactttttctgctggtgatcactatagtgaaatactgaaacttgtttgtcaaattgcacagcaaggggacacagttcttgtttatcttttcatgataatttttagtagggagggaattcaaagtagagaattttactgcatctagatgcctgagttcatgcattcattccataaatatatattatggaatgctttattttcttttctgaggagtttactgatgttggtggaggagagactgaaatgaattatacacaaaatttaaaaattagcaaaattgcagcccctgggatattagcgtactctttctctgacttttctcccacttttaaggctctttttcctggcaatgtttccagttggtttctaactacatagggaattccgctgtgaccagaatgatcgaatgatctttccttttcttagagagcaaaatcattattcgctaaagggagtacttgggaatttaggcataaattatgccttcaaaatttaatttggcacagtctcatctgagcttatggaggggtgtttcatgtagaatttttcttctaattttcatcaaattattcctttttgtagctcgatgaacttcgggatgaagggaaggcttcgtctgccaaacagagactcaagtgtgccagtctccaaaaatttggagaaagagctttcaaagcatggtaaatacttttaaacatagttggcatctttataacgatgtaaatgataatgcttcagtgacaaattgtacatttttctgtattttgcaaagtgctgtcaaatacatttctttggttgtctaacaggtagcactctaatagaggtcaaaatcagaatatcaatgacaatttgacattatttttaatcttttcttttctaaatagttgaataatttagaggacgctgtcctttttgtcctaaaaaaagggacacatatttaagttctatttatttataaaatcttggactcttattctaatggttcattatttttatagagctgtaggcatggttctttatttaattttttaaagttatttttaatttttgtggatatagagtaggtatacatatttacggggtatatgagatattttgatctaagtatacaacatatataatccctttatttaattttatcttccccccaatgatctaaaactatttgcttgtccttttctgtcttatagttaaattcagtcaccaactaagttgaagttacttcttatttttgcatagctccagctctgatcttcatctcatgtttttgcctgagcctctgttttcatattacttagttggttctgggagcatactttaatagccgagtcaagaaaaatactagctgccccgtcacccacactcctcacctgctagtcaacagcaaatcaacacaacaggaaataaaatgaaaataatagacattatgtatgctctctagaaactgtcaattgaactgtatttgctcatcattcctaccatctacaccaccaaaatcaacccaatttatgaaaaaaaaaccgccccaccatacaattctacacagataaacaggctatgattggttttgggaaagcagtcacctttacctgatttaggcaactgtgaaatgactagagaatgccgaaaattagacgtttacatcttgtcatagactttgcagatagtgctggatctttctttttataagtaagatcaataaaaactccctcattctgtagaagttatgatttcttttctaagagacctttagaagtcagaaaaaatgtgtttcccttgcgaaaaaagataactggagtttgtgtagtacttcccagattataaaatgcttttgtatgtattatctaatttaatcctcaaaacttcttcaatttagcatgttgtcatgacactgcagaggctgaagctcagagacgctgagccctctgctaacaagtcctactgctaacaagtgataaagcccgagctggaagtcacatctggactccaaacctgatgcttctcagcctgttgccccttttagagttcctttttaatttctgcttttatgacttgctagatttctacctaccacacacactcttaaatggataattctgccctcaggataagtgattaccatttggttcacaactcgaactaatgaattttaaaaattatttctgtatgtccattttgaattttcttatgagaaatagtatttgcctagtgttttcatataaaatctcgcatgataataccattttgattggcgattttctttttagggcagtagctcgcctgagccagagatttcccaaagctgagtttgcagaagtttccaagttagtgacagatcttaccaaagtccacacggaatgctgccatggagatctgcttgaatgtgctgatgacagggtaaagagtcgtcgatatgctttttggtagcttgcatgctcaagttggtagaatggatgcgtttggtatcattggtgatagctgacagtgggttggattgtcttctgtgctttcgtctgtcctatcttcaatctttccctgcctatggtggtggtacctttctgtttttaacctgctataaattaccagataaacccattcactgatttgtaactcctttcagtcatgctctaactgtaaatgaaggcttaaactgaagtagaacagttacaaggttttacttggcagaacatcttgcaaggtagatgtctaagaagatttttttttctttttttaagacagagtttcgctcttgtttcccaggctggggtgcaatggtgtgatcttggctcagcgcaacctctgcctcctgggttcaagtgattttcatgcctcagcctcccaagtagctgggattacaggcatgcgccaccacacctggctaattttgtatttttagtagaggcggggtttcaccatattgtccagactggtctcgaactcctgacctcaggtgatccacccgccttggcctcccaaagtgctgggattacaggcatgagccaccttgcccagcctaagaagattttttgagggaggtaggtggacttggagaaggtcactacttgaagagatttttggaaatgatgtatttttcttctctatattccttccctaaattcactctgtttgttagatgtgcaaatatttggaatgatatctcttttctcaaaacttataatattttctttctccctttcttcaagattaaacttatgggcaaatactagaatcctaatctctcatggcactttctggaaaatttaaggcggttattttatatatgtaagcagggcctatgactatgatcttgattcatttttcaaaaatcttctatattttatttagttatttggtttcaaaaggcctgcacttaattttgggggattatttggaaaaccagcattgagttttaatgaaaaaaacttaaatgccctaacagtagaaatataaaattaataaataactgagctgagcacctgctactgattagtctattttacttccgtgggaatgtttttgtagtcctatctccatctccaggtttaggagcaaacagagtatgttcatagaaggaatatgtgtatggtcttagaatacaatgaacatgttctgccaacttaataaaggtctgaggagaaagtgtagcaatgtcccttcgtgttgaacaatttccaccaacttacttataggcgccccttgccccgtatatctgtgaaaatcaagattcgctctccagtaaactgaaggaatgctgtgaaaaacctctgttggaaaaatcccactgcattgccgaagtggaaaatgatgagatgcctgctgacttgccttcattagctgctgattttgttgaaagtaaggatgtttgcaaaaactatgctcaggcaaacgatgtcttcctgggcatgtacgtagataagaaattattcttttatagctttggcatgacctcacaacttaggaggatagcctaggcttttctgtggagttcctacaatttccctgctgcccacaatgtttcttcctccttccctttcccacgctttcccaatttttgacatcgttaattcgttgaatacattgtcataacataatacatgttcacggcaaagctcaacattccttactccttaggggtatttctgaaaatacgtctagaaacattttgtgtatatataaattatgtatacttcagtcattcattccaagtgtatttcttgaacatctataatatatgtgtgtgactatgtattgcctgtctatctaactaatctaatctaatctagtctatctatctactctatgcaatgatagcaaagaagtataaaaagaaatatagagtctgacacaggtgctttatatttggtgaaaagaccagaagttcagtatcctggcaatatggtaggcaactcaattacaaaataaatgtttacgtattgtcagaagttgtggtgataaactgcatttttgttgttggattatgataatgcactaaataatatttcctaaaattatgtaccctacaagatttcactcatacagagaagaaagagaatattttaagaacatatctctgcccatctatttatcagaatccttttgagatgtagtttaaatcaaacaacctgttaataaaaataacaagtatcattcatcaaagacttcatatgtgccaagcagtgtgtgttttgtgtagattatgtcatatagttctcataatccaccttccgagacagatactatttattttttgagacagagttttactcttgttgcccaggctggagtgcaatggtgccatctcggctcactataaccttcgcctcccaggttcaagcgattctcctgcctcagcctcctgggattacaggcatgcaccaccatgcctggctaattttgtatttttactagagatggggtttcaccatgttggtcagactggtctcaaactcctgacctctggtgatatgcctgcctcagcctcctaaagtgctgggattacaggcatgagccactgtgcccagccgacagatactattattatttccattctaccgagaaggagactaaggctctgatcatttaaataagttgcctaaggtgatgcagtgatataagtagcagagctaggaattgagccttggtaactttaactctggaccccaagtccttagctactaagctttactgcatggggtttagtcaaattaagacttttggaatatgcgttacttttgagattagctttgtgatattttttgtgctcatttgtccaacaaagtctattttattttcatcttaattcgctttttgtatgaatatccaagaaggcatcctgattactctgtcgtgctgctgctgagacttgccaagacatatgaaaccactctagagaagtgctgtgccggtgcagatcctcatgaatgctatgccaaagtggtaggtttattgttcgcaaaaaatgtagttctttgactgatgattccaataatgagaaagaaaaataatgcaagaatgtaaaatgatatacagtgcaatttagatcttttcttgagatcgtttcaattctggaatcttaaacatgaaagaaaaagtagccttagaatgattaacaaaatttagactagttagaatagaaagatctgaatagagcaatctctacacacttttgatctttttttctctttttcacaatcctgagaacaaaaaaaaattaaatttaaatgttaattagaagatatttaacttagatgtaaagtgagttaacctgattccaggattcatcacgtactagaattagtatcttatggtaaattatagaacctatccctttagaatattttcaaatctttttgaggatgtttaggaatagttttacaagaaattaagttaggagaggaaatctgttctggaggatttttagggttcccactagcatatgtaatggtttctgaactattcagaatcagagaaaactcatttttcctgctttcaagaagctactgtatgccaggcaccatgcacaaacaatgaccaacgtaaaatctctcattttggagagcctggaatctaactggaaaggtgaactaataataatactatgtacaatcatagccatcatttattaaacttttcttctatgcaaggcactgtttaatttccttagcttacctggtttacagagcagctctatgagatgagtgccatctttgcccctattttagggataaggattccgaaatgtggagatggtaagtcaaattgcacaactgaagcatgacttacatgacttggctcaaatactggtcattgaactccagagcctgaatattcttaaccacttacatgatgcaagctgaccaaataaatagttcgaatgtattgtgacagagcggcattgatattcatctattcatgtggctttgagtaggaagaagaaaggatatcattctgaccagagcggtgaaaaacaacctgcatctgatcctgaggcataatactattaacacaattcttttatgtttcagttcgatgaatttaaacctcttgtggaagagcctcagaaatttaatcaaacaaaattgtgagctttttgagcagcttggagagtacaaattccagaatgcgtaagtaatttttattgactgattttttttatcaatttgtaattatttaagacttaatatagagccacctagcatagaacttttcagaatgaaaatacattgcatatttctaatcactctttgtcaagaaagataggagaggagagataaaatagttgatggggtggagaggtctatatttgwatgtagtctaaaaattgttctcttaagattggaagtatgtaggctgggagggtaaataccaaatcttggtatatcagaactgagcatgtcccttgacggttaagaaatagttaatgggcaaatagagcatggcaatattttgtagagcagcaagtagtaggccttgaatagatgtcgctcaaaaagtaatatgtaagctgaacacaaaaatgtaacaaatgaatttagatacatatttgaatattaaattcaggttgtttgggagatgcacctagtctttgatggttaaacctttccctccatagaagagacagagacagaatggcttgctggactaatgtcccaattcaatagagtcttatctacgaaggttaaaaacaagaagagacatattatacagtagatatttcttgtgtggctcatacacatggtgctcttctgattatggattttagagataataacagtgaacaagacatagtttctttcctcgagtagattaaagtcctacattgacttttaatggtgactggcattcttaatacatgattattatatattaggtactatgtcacattaattataatactttactatttttaatttaacccttgaactatccctattgagtcagatatatttccttccattttctacttgtatctttcaagtttagcatatgctgatacatatgaagctctctccaggttttattgaaagaagaaattaatcaatttattactgtccctgaattaggcaactcactttcccaagattatgcccgtggtacaggtggaactcaaagccaagtttaactagttgttcaggagaatgttttctaccctccactaacccactactctgcagatggagataatatgatgaatggaacatagcaacatcttagttgattccggccaagtgttctctgttttatctactatgttagacagtttcttgccttgctgaaaacacatgacttctttttttcaggctattagttcgttacaccaagaaagtaccccaagtgtcaactccaactcttgtagaggtctcaagaaacctaggaaaagtcagcagcaaatgttgtaaacatcctgaagcaaaaagaatgccctgtgcagaagactatgtgagtctttaaaaacatataataaattaataatgaaaaaattttccctttagatattgctaatgctacctttcataagcagaaggaagtaatgtgtgtgtgtgcatgttttgtgcatgtgtgtgtgcatgcacgtgtgtgtatgtgtgatattggcagtcaaggccccgaggatgataattttttttttttttttgagacggagtctcgctttgttgtccaggctggagtgcagtggtgccatctcggctcactgcaacctccgcctcccaagttcaagccattctcctgcctcagcctcccaagtagctgggactacaggtgcatgccaccatgcctggctaattttttgtatttttagtagaaaattttcagcttcacctcttttgaatttctgctctcctgcctgttctttagctatccgtggtcctgaaccagttatgtgtgttgcatgagaaaacgccagtaagtgacagagtcaccaaatgctgcacagaatccttggtgaacaggcgaccatgcttttcagctctggaagtcgatgaaacatacgttcccaaagagtttaatgctgaaacattcaccttccatgcagatatatgcacactttctgagaaggagagacaaatcaagaaacaaacgtgaggagtatttcattactgcatgtgtttgtagtcttgatagcaagaactgtcaattcaagctagcaactttttcctgaagtagtgattatatttcttagaggaaagtattggagtgttgcccttattatgctgataagagtacccagaataaaatgaataactttttaaagataaaatcctctgttataatattgctaaaattattcagagtaatattgtggattaaagccacaatagaataacatgttagaccatattcagtagaaaaagatgaccaattaactgataaatttgtgcacatggcaaattagttaatgggaaccataggagaatttatttctagatgtaaataattattttaagtttgccctatggtggccccacacatgagacaaacccccaagatgtgacttttgagaatgagacttggataaaaaacatgtagaaatgcaagccctgaagctcaactccctattgctatcacaggggttataattgcataaaatttagctatagaaagttgctgtcatctcttgtgggctgtactcctcgtctaggcttaagagtaatattgcaaaacctgtcatgcccacaccaatctctccctggcattgttgtctttgcagatgtcagtgaacgcgacccagcagctcccatgagtttgcatagccttattttctatagcctccccactattagctttgaagggagcaaagtttaagaaccaaatataaagtttctcatctttatagatgagacccattttaaataaagtccaagataattaaatttttaaggatcatttttagctctttaatagcaataaaactcaatatgacataatatggcacttccaaaatctgaataatatataattgcaatgacatacttcttttcagagatttactgaaaagaaatttgttgacactacataacgtgatgagtggtttatactgattgtttcagttggtcttcccaccaactccatgaaagtggattttattatcctcatcatgcagatgagaatattgagacttatagcggtatgcctggcccaagtactcagagttgcctggctccaagatttataatcttaaatgatgggactaccatccttactctctccatttttctatacgtgagtaatgttttttctgttttttttttttctttttccattcaaactcagtgcacttgttgagctcgtgaaacacaagcccaaggcaacaaaagagcaactgaaagttgttatggatgatttcgcagcttttgtagagaagtgctgcaaggctgacgataaggagacctgctttgccgaggaggtactacagttctcttcattttaatatgtccagtattcatttttgcatgtttggttaggctagggcttacggatttatatatcaaaggaggctttgtacatgtgggcccgggatcttattttacacacaattgtcttacaaaatgactaaaacagcactttgtttttatctcctgctctattgtgccatactgttgaatgtttataatgcatgttctgtttccaaatttgtgatgcttatgaatattaataggaatatttgtaaggcctgaaatattttgatcatgaaatcaaaatattaatttatttaaacatttacttgaaatgtggtggtttgtgatttagttgattttataggctagtgggagaatttacattcaaatgtctaaatcacttaaaatttccctttatggcctgacagtaacttttttttattcatttggggacaactatgtccgtgagcttccatccagagattatagtagtaaattgtaattaaaggctatgatgcacgtgaaatcactttgcaatcatcaatagcttcataaatgttaattttgtatcctaatagtaatgctaatattttcctaacatctgtcatgtctttgtgttcagggtcaaaaacttgttgctgcaagtcaagctgccttaggcttataac

SEQ ID NO: 145128 - DNA, 364 bp, Homo sapiens
  misc_feature (1)...(364): n = a,t,c or g
cnnnnnnnnnnnnnnnnnnnnnnnnnnnnnnnnnnnnnnnnnnnnnnnnnnnnnnnnnnnnnnnnnnnnnnnnnnnnnnnnnnnnnnnnnnnnnnnnnnnnnnnnnnnnnnnnnnnnnnnnnnnnnnnnnnnnnnnatctccattgttaagtgacacatgactgtatatgttatctacaacagactcacttttgacccaaagacaaaaatagattgaaacttaaaagatgcaaaaagcaattccatgaaaatagtaaccaaaagagagttgaagtggctctgctaatatcagcccaaagagaccttaggtcaaaaatcgacacagaaggcaaatccattcaacagagaaagaagagctcgtgcc

SEQ ID NO: 145129 - DNA, 1168 bp, Homo sapiens
ttctcaatataaaccctttgtggctcatatatttaaaaagatgtaaaaaaaagagctgaagaaaatcatgtgtgatctcttagcagaaatagatttattatttgtaattgcttgcaagaataaaagccttatccttgaaagcttctgaattcatgggccaagaggcttcagtggtaatctggaaggaacaagggcactggccaactccaagtcacccatctttctgcccaggaagcctgccaacctccaggggtgaaattcttttgccgaaaatgggattgcccaaaacgggtcaccagcaacatttccccaggaagcttgaaagttcttcaggatcccacatgcaagcttgtcaacaagtgcaagttcacttcaggcttgggcaaaggtgccctttgaggatcatccaggggtgctttatgggcatctccccaagggaaggtcagcaccttctttgccatggtgcctttgacttttgggggttgccccatggatgggcaagaaggcagaaggacaaggttgcccaaagctttttcaaaggaacctcttggggtcccatgggggtaggacaaccaggggggcctttcccaggggttttttccttccagcattttttccacattcacctttgccccacaggcttgtgatagtagccttggtcctcctctgtgaaatgacccatgggcgtctgggactaaggagcttattgataacctcagacgttccaaaaagcgagtgtgttggggggtgtgtttgtagttgtagttacatctactcaggaggcagaggcaggagaatgtgttgagcccaggaaggagctcagggctgcaggaagctatgatggagccactgcattttgatagtgagacctggtctcttaaagtgttttatttttaggccaggcgtagtggctcacacctgtaatctcagcactttgggaggccaagatgggtggatcacctaaggtcaggaattggagaccagcctggccaacatggcgaaaccccagctctactaaaaatacaaaaattagccaggtgtggttacatgcgcctgtagtcactcaggaggctgaggcgggagaatcacttgaaccctggaggcggaggctgcagtgagacaaggttgcaccactgcattccagcttgggcaacagagcaagactcct

SEQ ID NO: 145130 - DNA, 329 bp, Homo sapiens
ggcacgagtgcatctcagcatctctgtattcttatatttggctctcggtgcccttctttctggcctctctctgttccctctcctattttcttattttttttcctcttgtcttgcttggaagacaaatgttttgttttctgaactcattctctcttccttctctggtctctttctcaccacagtcccacagtgaacactactctgagaaacctgggagctctgcataggcgccatggaaagctgtaagctgctgaaactcttgatgtattcaaccttacttcctcttgcagtcttctattcaaccccttttatagaaactttgtacgcat

SEQ ID NO: 145131 - DNA, 344 bp, Homo sapiens
  misc_feature (1)...(344): n = a,t,c or g
ggcacgagcatgctcacatggtactgtggcacttactgcatcttgcttccctcttcaactagactataaatgccttcaatatagttttgtttgnnnnnnnnnnnnngaaacaaaatctaattttgtcaccccggttgaagtgcaatggcccaatctcagttaattgaaacttcaacctgccaggtttaaccagatctcaagcttaagcttcccgagaagctggaactacgggaacgtgctaccatgcctagtaaataggatgaatttttataatagatggctgaactaccactcttagaaactaagcgttacctacttctttactgaactctttgcattcaccg

SEQ ID NO: 145132 - DNA, 345 bp, Homo sapiens
ggcacgagggcggcgcctttgaggattcagagcgactgggcgcaagccctcaggaaggatgaaggggaggcctggctgagctgtcatcccccagggaaaccatctttgtatggcagcctgacttgtcatggaattgtcctatatggcattccataggctacctcttctcaccgatttattgcgaatgatccaaacatcatcacttctcactcttctcgtcctacagtcttcgtcccctcctccttctcctctcttattctcttctttctcgcacaccctctttcaatttctcttcccttcttttcacttcctgcctttcctcttaactttctccccttacgttcc

SEQ ID NO: 145133 - DNA, 373 bp, Homo sapiens
ggcacgagccgcgccgccctcagtacagctccggccgccgcgccgcctggctttcgtattcgttgttctcggcgggctgtggggcctccgcgccgcggccgttagtcatgtcggattctggaagttacggtaaatctgatgtagaacacctatattatcgaaactattgaagtacaagaatataaggatacatacaaacatcacatatatagtctggataaggtatgacaactgattcatattatgggataaacatattctacaaattacaataagcgttatataatattaagttacaataatgaccatagcgtagagaaatgaagaaatctatacacaaattttaattataacattacaaataactaacccg

SEQ ID NO: 145134 - DNA, 2482 bp, Homo sapiens
agactgcctgctaatatgaacagaaatgcatttgtaattcatgaaaataaatgtacatcttctatcttcacattcatgttaggattcagtgttgctttcctctggatcagcgtgtctgaatggacagtcaggttcaggttgtgctgaacacagaaatgctcacaggcctcactttgccgcccaggcactggcccagcacttggatttacataagattgagttagaaaggtacttctgtagggtcctttttacctctgctcggcagagaaatcgatgctgtcatgttcctttaattcacaatcttaggtctccaaatattctgtcaaaaccctaacaaaaaaccccgaacacctcaggttggaatcccctggttctctctaaaagaggggcctgccccttgttgccccaaaggtgctgcctgggcacagcccaagagttgggaagggccgccccacagtacgcagtcctcacccacccagccccagggtgctcacactcaccactcctgtggcttgaggaaggatagctggctcatccctcgggaaaacagacccacatctctattctttgccctggaaatacggcgctttttcactttgcgtgctcagagcttgccgtcttgaaggtccacacagcattgacggggacacagaaatgttgactgtttaccggataacactgattagttcagtttttcatttataaaaaagcattgacagttttattactcttgtttctttttaaatggaaagttactattataaggttaatttggagtcctcttctaaatagaaaaccatatccttggctactaacatctggagactgtgagctccttcccattccccttcctgggtactgtggagtcagattggcatgaaaccactaacttcattctaggaatccattgtagccataagttgtgtgctttttattaatcatgccaaacataatgtaactggggcagaggaatggtcctaaccaaggtacctatgaaaaggcgctagctatcatgtgtagtagatgcatcattttggctcttacttacatttgtaaaaatgtacagattaagtcatcttaatttcatattagtgacacgggaaacagcacctccactatttggtatggttcaaaattaaggctttccaggactaatagcttttttgggggtcctaaaatgtaagcaaaaaattcctggctgaaacattccagtcctttcatttagtattaaaaggaaatactggaaccaagccagtggggttggaattggaaagaactaatcatggaggactccggtcctggacacagggtcctcaaaagctagcagagatacgcagacattgtggcatctggggtagaagaatactgtattgtgtgtgcagtgcacaggtgtgtggtgtgtgcacactcattccttctgctcttgggcacaggcagtgggtgtagaggtaaccagtagctttggagaagctacatgtagcttcaccagtggttttctcctaagggaatcaccaaagtaaaactaccccaaccacatggccacgtaattattttcaggccatttcagagggaaactgttttcctctttattttgcttattatgtttaatatggttttttaaattgggtaactttttattattagtttgggtaacagtatgtttaattacacacatacctatggcacacatgctttggggtccttccataatacttttatatttgtaaatcaatggttttgggagcaatccccaagtttaaggggaatattttttggtaaatggtaatggttttgaaaatctgagcaatccttttgcttatacatttttaaagcatttgtgctttaaaattgttatgctgggtgtttgaaacatgatactcctgtgggtgcagatgaggaagctataacagtgaatatgtggggtttctcttacgtcatccaccttgacatgatgggtccagaaacaaatggaaatccagagcaagtcctccaggggttgcaccagggtttacctaaagccttgttgccttttccttggtgctggtttatgccgtggtagagcactccaagaaaggttcctggaactggcttttggtatctgctttgtactgttggtgccttctttggaattggaccccaaaaattttggcttagaattatttattataatggtaagtttaagaaaatgttaaaagggaagattttattaagaatcctgaatgtttattccattatattggttacaatttaacattaacatttatttgtgggaattggtgatttggggtaatcctgattaaaattggtaagtaagaaaagggtttataatttcatcttaattcttttgatgttgtaaacgtactttttaaaagatggattatttgaatgtttatggcacctgacttgtaaaaaaaaaaaactacaaaaaaatccttagaatcattaaattgtgtccctgtattaccaaaataaaaaaaaaaaa

SEQ ID NO: 145135 - DNA, 317 bp, Homo sapiens
  misc_feature (1)...(317): n = a,t,c or g
gaagnnnnnnnnnnnnnnnnnnnnnnnnnnnnnnnnnnnnnnnnnnnnnnnttaacaaacaaagaataaggnnnnnnnnnnnntaaagtatagaagaaaaggaaaaaataaaacaacaataacaagaaacaaaaaaagaacagaataaagaaaataaacaaatcaaataaagatcgacaagaaagaaacacagacaaggcacaaacaaaacaaaagagagaggagagagacagacaccancggtcggaaaccgccagacaccaacgctcggaatacacgccagaccacgacggagggcgaccacctcccctcgtgcc

SEQ ID NO: 145136 - DNA, 1069 bp, Homo sapiens
cttcaacaaaaaatgactgtagcagaagataagtggatacttttatggatatactactcattttacttaaaatctacccagttcagacttgaatgtaaacttgtattaggggaaaattctccaaagagggttttctacatacacagaagcagttcaacttctcaagttaattttgataagcagaatctactactggccagagcgacaggagtggctaggggttgccagccagtccctttctgatgatcaaggccctgcacagcaggatgccacaggatgcccctgccatctagctggaagcatcaaaagtccctctgtatgacccggtgtgggaaagagggttgtcaggatgagaaagtggggctgcagggtgacgatcagaccacctaaccaactccccaccttcaaccaccacaataagaacaaaacctgtagggctctaaagagagggggtggtttacaagtttattgagcatttactaggaagtgacatggcgatgacctctgtacatgagttaggttcactttcatgtggcctcccactacagagatgcgtatgcccagaagtcagctctctgaggagacaggctactttggcccccagtttgaagcattctgtccaaatgtcctgagctctcccagcagtcaagtagttgaatgggatacccatacttattatggttgatggaaaaaagggcagagtttattcctccaattttttttagggaagagaaggaattaaattaaagtggttcaagctgggcatggtgggctcacacctgttaatttgccagccactttgggaggctgaggcaggcagatcccttgaggtcaggagttcaagaccagcctggccaacagggtgaaaccccctctttacttaaaatacaaaaatttccccggcgtgatggtgggcgcctgtaatcccagctacccaggaagctgaggcaggaaaattgctttaaccggggaggcggagattgcagtgagccaagattgtgccccttccttccagcctgggcgacagagcgaaactctgtcaaaggaaaggaaagaaaagaaaaaaaaa

SEQ ID NO: 145137 - DNA, 369 bp, Homo sapiens
ggcacgagggtggtaggaaatgcaggttgaagggaattctctggggctttggggaatttagtgcgtgggtgagccaagaaaatactaattaataatagtaagttgttagtgttggttaagttgttgcttggaagtgagaagttgcttatatacttttctaagtgcttataactttaagtgcgtgctgactatctaacatacgttttttgtttttttttggtctttgtgtgtgtactatttttttattgttttgtgttgtcttgttctggtatggtgcttatcttctctatattatggtataattgtgtattatctctatttttgttattctctctttatagtgttgggctatggtattctcgctgtttg

SEQ ID NO: 145138 - DNA, 331 bp, Homo sapiens
ggcacgagcaccatgtgaacagcaaaatgtgcccgctgtgaggggcttgggctcattaccctctgcctcgactgcattgtggccaacaccctcctgctggtacctaacggggagacctcctggaccaacaccaaccatctcaccttgcaagtctggctcaaggacggctacattggctggggcctaatggcactgtgtacagggattgcacccgttctggcagggggcaaggactgctgcggtgctcggcgctgcggaaaccgctagcagatgctgcgctacgacttctcctaggcgctcgtagtgcttggtgccatctactggctctcgg

SEQ ID NO: 145139 - DNA, 1060 bp, Homo sapiens
aaacctctgagataccttggtttctattaataatattttcagcagtttaatctcaactctgttggcttccctttcttaaagagttaggcagtgatatacatgtcatttagaagtaaagggagggctttagtactgcctgttctgaagtaggagtcttagaaattcagtggcaaactgtataggaagggcctgagtttcatattgtctatattgccttgaaatagccttagtctcctgcttaaaaaggcatcctggaaatcatataaaaagtaacaacaaattaaaatgcatgtgtctgtacctaaggcagctgtaagtggaaatatttttacctcatagtgaaatagaatggatgtattaagaagggagaattttttttcagagtgttttatctcagtgtggctcagaaaagccatttatagggtagggtaatcactagagttgagggttcctccccccaccccccataagattggtatccataaagcagagatttctaagcagtgagagacttcagtattttagattagattcttgggttataatagaataagatcattagtagtagaacatctggtatcagaaaacttgagtgtttttattgccatgttagcatatgaatcttaaaggattacagaattcagttaagagaaacaagcttttattggatgggtatttaaagagtttcttgataagagagaccttagatttcttacgtaaagccatgttcacaaggaccactgtccttgtgattctaatttgccagataaaagtctatgtcctggcgcagtggctcgtgcctgtaatcctggcattttgggaggctgaggtgggcggattatttgaggccaggagctggagatcaacttagccaacatggtgaaatctcatctctactaaaaacacagaagttacctgggtgtggcgacacgcatctgtaatcccagctactagggaggctaaggcaggaaaatcacttgaacctgggaggtggaggttgcagtgagccaagatcccaccactgcacttcagcctgggtgacagagcgagactctgtctc

SEQ ID NO: 145140 - DNA, 637 bp, Homo sapiens; identical to SEQ ID NO: 144817
  misc_feature (1)...(637): n = a,t,c or g

SEQ ID NO: 145141 - DNA, 784 bp, Homo sapiens
  misc_feature (1)...(784): n = a,t,c or g
gacactcgctttttggaacgtctgaggttatcaataagctcctagtccagacgccatgggtcatttcacagaggaggacaaggctactatcacaagcctgtggggcaaggtgaatgtggaagatgctggaggagaaaccctgggaaggctcctggttgtctacccatggacccagaggtttctttgacagctttggcaacctgtcctctgccttctgccatcatgggcaaccccaaagtcaaggcacatggcaagaaggtgctgacttccttgggacgatgccataaaagcacctggaatgatctcaaggggcaccttttgcccaagcctgaagtgaactgcacttgtgacaagcctgcattgttggatcctggaggaactttcaagcttcctggggaaaatgttgctgggttgaccgtttttgggcaatcccattttcgggcaaaagaatttcacccctgaaggttgcaggcttcctggcataagcagaagatggcagaagatggtgacttggagttggccagtgcccttgttccttccagataccactgaagctcaattgcccatgaatgcagagcttttcaaggatatggctttattctgcaagcaattacaaataataaatctatttctgctaagagatcaccaaannnnnatnntnnnnnnncccccggattttttatttagcgggccgcacctttttccccttttagggggggtaaatttatattgggccttgggccggggttttcaaaagcggggggannnnnnnnnnaaagagccc

SEQ ID NO: 145142 - DNA, 348 bp, Homo sapiens
ggcacgagctggggctggccgtctgaggcgggcggcatcggctctgcggctgctgagcccccgcctgcccgtccgggagctgtcgagcctggcccgactctatccccacagggtagatgatcattatgaaaatcctacaaacgcggggtccctagactagacatctaaaaatgttggaactggactgcagctggctccagcatgaggtgacgtagtgaaattacagactctagtggatgaaaaggtgaagaatgttgatgctaggtttaaaacattgggctgcggatccgcaattgcctacagctcattagccactgaatgggtgacaggtaagacggcggatgaagc

SEQ ID NO: 145143 - DNA, 536 bp, Homo sapiens
ccaccaatctggtgagtaagtgagttcttggcgttgtggagaaggactaggaaggtggtggttttggggatgtgataggtcactcaggcccatgacaggtgaatgcttctgtgtgagaaggcagcacggctgaggaagctcactttgcatcagggagcacaaggaccaggccgtacagacactccgcctcccagcacttgatcagagattgtgtttatcctacagaaacagatgacatgtgttgggcatcactccccacggtcctgggtagaagagtccttcacttggcagggctttttcaaccaatgaataaggcaaattatatataagttaataatgccatttcgaaccgagacagatggcagctaaatgaagtttaattaaagaatgagcgctggggccctttttattgggtactgcatctacttcgaccacaaaagacgaagtgaccccaacttcaagaacaggctttgagatggaagaaagaaacagaagcttgccaaggagagagctgggctttccaagttacctgacct

SEQ ID NO: 145144 - DNA, 718 bp, Homo sapiens
  misc_feature (1)...(718): n = a,t,c or g
ccgcgctctgggcctctgctcaggctctgccgcggacgacctcgaggcccttagttgactgggaccggaagtggcgtgtgctcggcctttctgtgttcctggcccgcggacgtcgggtgtgagctgcgccgaccgctctgagggttcgtggcccaccgctccttcgcggtccctgccgccaccgtccacgctcagcgttcgtagagaagatggtgggtcggaacagcgccatcgccgccggtgtatgcggggcccttttcattgggtacgtgcatctacttcgacccgcaaaagacgaagtgaaccccaactttcaagaacaggcttcgagaacgaaggaaagaaacagaatctttgccaacggagagagcttgggcttttccaagttacctgacccttaaagatgctgaaagctgttgcagaaagttcttcctttgaagaaatacaagcttgggtgaagagttacttagcttcaangggtagttgaatattgagaaagggccgtagaccatcttgacaaattgccaattgctgtgttgtggacaagccacagcagtttactgcaggtcttacagcaaactctttccaccaccagtgtttccagatgcttctgactaagctcccaacaattagtcagagaattgtaagtgctcagagcttggctgaaagatgatgttggaatgagaaacaaatgtttacattaataaaatctcagttt

SEQ ID NO: 145145 - DNA, 430 bp, Homo sapiens
tttcgtgccgccggccagatgtggcgggggagagccggggctttgctccgggtgtgggggttttggccgacaggggttcccagaaggagaccgctaagctgcgatgctgcgtcgcaggcgggaagcaattatccccgctgttggaactgcggcggcccatggggccccgggcgggaggacaggttcttctgcccacagtgccgagcgctgcaggcacctgaccccactcgagactacttcagccttatggactgcaaccgttccttcagagttgatacagcgaagctccagcacaggtaccagcaactgcagcgtcttgtccacccagatttcttcagccagaggtctcagctaaagctccatggaatagagattcctgaaaggacagattatgaaatgggcaggcaattcctcatagaaataatggaaa

SEQ ID NO: 145146 - DNA, 373 bp, Homo sapiens
ggaagacttgaatgaataggcaaccgttccttcagagttgatacagcgaagctccagcacagactgaaaaggacttctcagagaagcattcgaccctggtgaatgatgcctataagaccctcctggcccccctgagcagaggactgtaccttctaaagctccatggaatagagattcctgaaaggacagattatgaaatggacaggcaattcctcatagaaataatggaaatcaatgaaaaactcgcagaagctgaaagtgaagctgccatgaaagagattgaatccattgtcaaagctaaacagaaagaatttactgacaatgtgagcagtgcttttgaacaagatgactttgaagaagccaaggaaatttt

SEQ ID NO: 145147 - DNA, 473 bp, Homo sapiens
cagcaactgcagcgtcttgtccacccagatttcttcagccagaggtctcagactgaaaaggacttctcagagaagcattcgaccctggtgaatgatgcctataagaccctcctggcccccctgagcagaggactgtaccttgtaagctaaagctccatggaatagagattcctgaaaggacagattatgaaatggacaggcaattcctcatagaaataatggaaatcaatgaaaaactcgcagaagctgaaagtgaagctgccatgaaagagattgaatccattgtcaaagctaaacagaaagaatttactgacaatgtgagcagtgcttttgaacaagatgactttgaagaagccaaggaaattttgacaaagatgagatacttttcaaatatagaagaaaagatcaagttaaagaagattcccctttaattgtggatagtttaaagtttaaaaaataaagttcttctgggc

SEQ ID NO: 145148 - DNA, 637 bp, Homo sapiens; identical to SEQ ID NO: 144817
  misc_feature (1)...(637): n = a,t,c or g

SEQ ID NO: 145149 - DNA, 780 bp, Homo sapiens
  misc_feature (1)...(780): n = a,t,c or g
gacactcgctttttggaacgtctgaggttatcaataagctcctagtccagacgccatgggtcatttcacagaggaggacaaggctactatcacaagcctgtggggcaaggtgaatgtggaagatgctggaggagaaaccctgggaaggctcctggttgtctacccatggacccagaaggttctttgacagctttggcaacctgtcctctgcctctgccatcatgggcaaccccaaagtcaaggcacatggcaagaaggtgctgacttccttgggagactgccataaagcacctggaatgatctcaaggggcacctttgcccaagcctgaagtgaactgcacttgtgacaaagctgcattgttggatcctgagaactttcaagcttcctgggggaaatgttgctgggtgacccgtttttgggcaatcccattttcgggcaaaagaatttcacccctggaggttgcaaggctttcctggcataagcagaagatggcagaagatggtgacttggagttggccagtgccctgttcctccagataccactgaagctcaattgcccatgaatgcagagcttttcaaggatatggctttattcttgcaagcaattacaaataataaatctatttctgctaagagatcaccaaannnnnatnntnnnnnnncccccggattttttatttagcgggccgcacctttttccccttttagggggggtaaatttatattgggccttgggccggggttttcaaaagcggggggannnnnnnnnnaaagagccc

SEQ ID NO: 145150 - DNA, 495 bp, Homo sapiens
cgacacagtgagaccgcctctcacagtagtaaggaagacataagtaaaactcagtcatgactggcttgagttgtttaatgttggcactaattagcacagcaaaatgggtggtgctaatcttttaatttcctgcttggtttacgaatatttggattatattagtgcagtaatagagttaagagtacctagttataattccatatttttaacatcatctctaatgttatagcctaggttttcattagcataggtttgttatagcataggtttatgttatagcctaggttttcattaataaaatctctggagtgaagcagctgctgctgaaatttgggggcaaataactgcagcctgctgggaataggacttctaaaaggaagtatgtctggaaggctgtggcccaaggccttttctgctggctaaaagcagggtctccagaaccaaaggaaacacacagctcttgttaaaattgaagatgttgacgcatgaggtgaa

SEQ ID NO: 145151 - DNA, 340 bp, Homo sapiens
ggcacgagggcacctggaagatgcgcccattggctggtggttcacgttgggcatgctggctcacaaggtgcttgattagctgctttgacataaacgttcaaggacgtttgttggttaatttcagactatacatgatgagtatatactgcttgacctggcctgctcaaggcggcgatctggggcattgcctacttgcgggccacgtattggacctacgtgctcgcggatctacatccatttgcagacatgttacatgctggctatagcattacctccgaagtcgaacagcctgtactagcagttcaactcacttataatcctgatgaatcataatggcccg

SEQ ID NO: 145152 - DNA, 323 bp, Homo sapiens
taaagaataaaatataaatgtgtgcctatggttttttttaaaaagtaaataatactgaactatggagagtaaaaactaaagttccctctttatgccttcgcctaccacactattttcttctaagaggtaaagtctgtttatttggtgtatatactttcaaatcgtttcttttagtgcacttacatgcatatacttgtatattatgtatattttattggcttaacaatatagctcgaagaacattccatgttagtatatcaaaatctagttcattattttcttgtttttgttaatgttggaatttacctactctatctcgtgcc

SEQ ID NO: 145153 - DNA, 445 bp, Homo sapiens
caaaccatccaacaagacattttaaatactcattgaatttcatagaactgactgctaggattggaaagacattaaagccagctcagccactgcctcgctggttggccagaccacgcctggcacttctgggagggagcactcaccaccccccaagggcacccatctcatcctccgaaggtttatgaaaatgcactcatcatttgctaattcattccactacgtgtattacctaatttgtgacacgatgtgaagtaccagagagataattctaaataaaatatagttatgggtctcaaggagccagatatgctaatctcctatcctcctgcagtttacagtggtcctcaccagatacttatttacaaaaattcagtttattatttatttttttgagacagagtcttgctctatagctcaggctagagtgtaatggtgtgatctcggc

SEQ ID NO: 145154 - DNA, 1011 bp, Homo sapiens
atggatctcaagttcaacaattccaggaaatatatttctatcactgtgccatccaaaacccaaacaatgtcaccacacatcaagtcagttgacgacgttgtggtacttggcatgaatctcagcaagtttaacaaacttactcagtttttcatatgtgttgctggagtttttgtattttacctaatttatgggtatttacaggaattaatattttcagtggagggttttaagtcctgtggctggtaccttaccttagtgcagtttgccttttactccatatttggcctaatagaacttcagcttattcaggacaaaaggaggagaataccaggaaaaacctacatgataatagcttttctaactgtgggtactatggggttatcaaacacttccttgggctacctgaattaccctacccaagtcatcttcaagtgctgcaaattgattcctgttatgctaggaggagtttttattcaaggaaagcgttataatgttgcagatgtgtctgctgccatatgtatgagccttggcctgatatggtttaccctcgctgacagcacaactgcaccaaatttcaacctgcgggtattgtattcgtattcaattggttttgtatacattttactgggattgacatgcactagtggattaggccctgcagtaacattttgtgcaaagaatccagttcggacctatggttatgcgttccttttttccctcactggatattttggaatctcctttgttctggctttgattaaaatttttggtgcacttattgctgtaacagtgacaacaggaagaaaagcaatgaccattgtactttcgtttatattctttgctaaaccattcacgtttcagtatgtatggtctggtttgttagttgtccttggtatatttctcaatgtttacagcaaaaatatggataaaataagactaccatcactgtatgatttgataaacaaatcagtggaagcaagaaagtcaaggacgctggcacagactgtatag

SEQ ID NO: 145155 - DNA, 1409 bp, Homo sapiens
ttccgggtcgacgatttcgtgtggcctgcgggcgccggagttgagagtgctttccggggatggcgaccgccgcggtggaaagtgcaggagtgggcgaggaggaggaggaagaggaggtgatggcgacggaccaggggaggggtgagatgcctctcgtctagctcagacgccacgcagcttgccgtcacccttccgggtgacataccggccttggggccatgattgattccggagcgcagttaatcaaggcataatggcatggacttgacacagcaagcaaaagacatacagaacataacagtccaggaaaccaacaaaaataactctgaaagcattgaatgcagcaaaataacaatggatctcaagttcaacaattccaggaaatatatttctatcactgtgccatccaaaacccaaacaatgtcaccacacatcaagtcagtttgacgagttgtggtacttggcatgaatctcagcaagtttaacaaacttactcagtttttcatatgtgttgctggagtttttgtattttacctaatttatgggtatttacaggaattaatattttcagtggagggttttaagtcctgtggctcggtaccttaccttagtgcagtttgccttttactccatatttggcctaatagaacttcagcttattcaggacaaaaggaggagaataccaggaaaaacctacatgataatagcttttctaactgtggggtactatggggttatcaaacacttccttgggctacctgaattaccctacccaagtcatcttcaagtgctgcaaattgattcctgttatgctaggaggagtttttattcaaggaaagcgttataatgttgcagatgtgtctgctgccatatgtatgagccttggcctgatatggtttaccctcgctgacagcacaactgcaccaaatttcaacctgacgggtgtggtgcttatttccctggcactatgtgcagatgccgtcattggaaatgttcaagagaaagctatgaaacttcataatgcttctaattctgaaatggtattgtattcgtattcaattggttttgtatacattttactgggattgacatgcactagtggattaggccctgcagtaacattttgtgcaaagaatccagttcggacctatggttatgcgttccttttttccctcactggatattttggaatctcctttgttctggctttgattaaaatttttggtgcacttattgctgtaacagtgacaacaggaagaaaagcaatgaccattgtactttcgtttatattctttgctaaaccattcacgtttcagtatgtatggtctggtttgttagttgtccttggtatattcttaatgtttacagcaaaaatatgggataaaataagactaccatcactggtatga

SEQ ID NO: 145156 - DNA, 346 bp, Homo sapiens
ggcacgagaaaagtacacaaaagcagaatgctaaaatgaaaaacctatgggtacccaccacctagatccaacagttgccaacgtttttccatattttctccatcttttttttaattaggtaatttttttacatgaagggatttcgttaactggttttattcatatattgtccacatgtgtatgcttaatcctatttttcattgcttttcttctgttcattgactatttgattcatttctttttctctttactttacattatttcttttattttttacttttcttctattcatctgtgtacttgctatgtttatattcttcgaattacatctttcttatattcctct

SEQ ID NO: 145157 - DNA, 337 bp, Homo sapiens
ggcacgagggaaaggactgagggcctgaggcccagtgccctgaccagcctccgccctggctcagcttccaggggctgccccaagggacaacgtgggccacacacagtgccccctgcagtcccaatctcacctcccgctcctggtgtccagattctgagccaggccgggcagggggtaggggaaggccgcctaccctcgaccacgacgccccacccaccacaccactctaaccgtctaagccacacccctgtatacctcaagctctcccctcctcgcgtacgctaagacccctctacgccactcctcgacaacacgcagccactcaatgcactccccg

SEQ ID NO: 145158 - DNA, 771 bp, Homo sapiens
gaaacagagtcttgctctgtcgcacaggctgggctcaaactccaggcctcaagtgatcctctggcctcccaaagagctgggattacaggcgtgacagctttgcccagcccaaaatgtcctttttttaatattctgtgataaaaacatatcttttgtagggagaagctgatagctcggctgccctggagagaggggacctcacctcggcagagctgcccccttgggagatgccccacgtgtacactgtgtggaaattcagtgtaagcgtttttttccccttgtatcttgggcatactacatttttctctttattagtaatacctgtgttagtcattgtgcgcactagaaacatcagttaatgcaagcctgatctaaactgtgaatgtggtaagatcaaaatcctgacccctctgtggagcacttggtctgcagctcaaggttgctgtccgtttctttgttgttccattagttgtcccaggatgacaaccttgtgcttggtgtgtgtcaccagccttgtgcttctaaccccctcccctgggtgtcccgggcactttgcagtttctcaggccccgggcagcagtgttgataggctcaaaactcctgaggcctggtaggttttgtaggtggattttttcccctcttctacttgttaacatttcttggctgggcacagtggttcatgcctgtaatcccagcactttgggagaccaaggtgggcggatcacttgaggttaggagttcgagaccagcctgccaacatggcgaaactct

SEQ ID NO: 145159 - DNA, 685 bp, Homo sapiens
  misc_feature (1)...(685): n = a,t,c or g
ggggttacaggggccgccccaacaacggcttatttttggtttttaacaaaaaaggntttcaccaagtggccaggcttgttttaactccggcctcaaaaatatggggggggtcttcccaaaaaccttgggggacaggggtgagccaccgccaccgggataaaaaatacttttaggtccaaagcccccccaaacgcccctaaaaataaaaccgatggcgtttttttaaataattcacccccaagtcaaaaaaaaaggggaaaggttccccttatccccatcagtccaaaaattcccccccccataaaaaaaacccttaaagggtgaaaaggggggctcgttaaaaaccaggcccagttttaaaaaaccggatgcaaaaatttaccttaaaaaatccgttggttttttatagaccaaccccgaacaattcaaaaaagaaatccggaataccatcccccttataaaaggtgcccnnnnnnnnnnnnnntccaaaacaaacctaggaataaatttaaccaaagtagtaaaagatctcaacaatgaaaactctagaacactgctaagacaaagtgnnnnnnnnnnnnnnnnnnnnnnnnnnnnnnnnnnnnnnnnnnnnnnnnnnnnnnnnnnnnnnnnnnnnnnnnnnnnnnnnnnnnnnnnnnnnnnnnnnnnnnnnntcgtgccgaag

SEQ ID NO: 145160 - DNA, 339 bp, Homo sapiens
ggcacgagggtttagagatctacttgagatacagagtgttttgcatttaggggtaagggtttcccatatctcaagtgtagctgctgtaggaagtgtcggctctcccagacttgccagctgtgatgttggccggccctaccccctgaccgtcttttccacgcactccttcttacttctccgcccctcctctcttacttcctctctcttgctcctttccccttctccccctcccgatgcctcactcttgtcctccttcgtcctctccttctccgccttccctccttcttctctctatcactccttcccccgctccctctccctttcctctcctcttccccc

SEQ ID NO: 145161 - DNA, 1408 bp, Homo sapiens
  misc_feature (1)...(1408): n = a,t,c or g
tttttttttttttttctggagatttttttttttaatcccttttaagttcaacataaaattgagaaagaaaaaaatatttctgaccattttccaaagaccagaaataggaaagtatgttcatatacattcaacgtatactgcacatattcggttactacaatacaaagcaatgagtttttttttaaagtgtagttttgcaagatgggcacggttagtagggctcactgggctttccatctgttgttgcctggagggtgcagtctgctctccccatacatacaggtacccatgtaaacacatcagggctgaggcgccgtgggtgggtgggtaggggcagggttgggggggcataaagagtttgggaaccaaggcggcaggataaggtcaaccaggcttttttagggggcttttcttggggtaaggccccctttctgggtgaagtagttgggtgacccccacccaagtggaagggggagactgggggaccatgggaaacatgggacagctcccacgaaggggctccttgcactgcnagaattccactcaagggatcttgggtcccaggagccgagctgccccattatcagtggagaaaggaacaaaggtgccatgggggatccccgcccagcaaacatcaggaatggccccatgcccgggcaccccgctttccctctgtgccaaattcaggatgaaagactaggaggggactagaggacctcttgctctccctttccccagaaaaaaaaagggtggaagagtcagtgtattccaaggtctctctcttgttttgaagatcagaaggagataaccccagacccctctcctcagcccccagcccagcagagaagactttggtttctaacaatgaagagaaataaagataacacaaataatagcctactgcgtatgcactgcttcaactggggaaaggagaccactgcatctgtcactggcacaagtaagagctgttcacaattacaatgcctaaaggaaataccttggaacaaaaggtgccaagtccacaatccaaatagaacagaatctggttaaacatttcctcatttaaaacaaaaattcccttttcccctttatttaattaataatgataataacaataatatcaacatttacccaaaaacaatttcctacatgatcaagaattaaaatataggggctgagggtacccagtggggaagaggaggttaggagagaggcagggcccaaggcaacctcctacacttcttccctgtgacaaagaggctgaaagaggagagcatatatatatatattttatatatatattatatatataatatatatataatatatatattatatattatatatataatatatatatacacatatattatattatatatatacacacatatataatatatatatg

SEQ ID NO: 145162 - DNA, 991 bp, Homo sapiens
tttttttttttttttttgattgacggactctttttaatctatacagtgatccttaatctttggggagaactgaaagtaaatttgaggtatcttccccctccaccaccaaagactgttgccattctgatttccagttcaagtgttaagtgcccttctagctgcagctgtcgtgtttgttcaactctggctattcccctaggcgtaccaacccttttggtgaaactgaggatgaatcatttccagaagcagaaggtaagtgactagtttggtgtccttattctttcctctgcacaaaatgacaacggccattgaaataagatgtgaaatcatgttttagagagctatgattaggagtatgaattaagatttgttgttctgaaagtttagtaagatatctgcagtggaggcaagtcttggataaaaactgaggggtagctgaaagaccacctacagctatttcaccattagccatagcgtttttgtagcatagcatagaaatgtgtgaaaatctgaatctgttatcacattcaaatgcagtcttggtgaactggaaatatgctgtgtcattttagaaaaccaaaagcacaaataacttgttcttgaatttgaagatgacacaaatgatatttaagtctttcaaattcaaatttttggttttttacattcttataatgtacttaagaacgtatctgatggccggcacgcgtagtcacgcctgtaatcccagcacttttggaggccgaggcaggtgaatcacgtgagcttaggagttcaagaccagcatgggcaacacagtgagaaccctgtctctacaaaaatatatatatatatacaaaaattagccaggtgtagtgacaggtgcctgtaatcctagctactcaggaggctgagacatgagaatcacttgaacctgggaggcggaggttgcagtgagctgaaatcatgccattgcactccagcctgggctacagagtgagaccctgtctcaaaa

SEQ ID NO: 145163 - DNA, 362 bp, Homo sapiens
ggcacgagcaggcaggtttgcagggaacacagttttcaaagtgtaaagctcagtgcaggtgctaggtcatggtgttttttgtcacactgggatcctgcgggagaggtaagtttaactgattgtagtgaaatatttcttccatttttagggatggctgctgtatatcattattttagtattaatatattttttaagacttctttctttagattgattcttatatattaataatcatattttcatctatatttcttgtattattctatattatgcttatttattttattattatttattatattttattattgctatattttatttatttctaacttatttactattattttcctatttctata

SEQ ID NO: 145164 - DNA, 637 bp, Homo sapiens; identical to SEQ ID NO: 144817
  misc_feature (1)...(637): n = a,t,c or g

SEQ ID NO: 145165 - DNA, 769 bp, Homo sapiens
  misc_feature (1)...(769): n = a,t,c or g
gacactcgctttttggaacgtctgaggttatcaataagctcctagtccagacgccatgggtcatttcacagaggaggacaaggctactatcacaaagcctgtggggcaaaggtgaatgtggaagatgctggaggagaaaccctgggaaggctcctggttgtctacccatggacccagaggttctttgacagctttggcaacctgtcctctgcctctgccatcatgggcaaccccaaagtcaaggcacatggcaagaaggtgctgacgatccttgggagatgccataaaagcacctgggatgatctcaaagggcacctttgcccaagcctgaagtgaacttgcacttgttgacaagcttgcatgtgggatccttgagaacttcaaagctcctggggaaatgttgctggtgacccgtttttggcaatcccattttcggcaaaagaatttcacccctgaaggttgcaaggcttcctgggcagaaagatgggtgacttggnagttggccagtggccctgttcctcccagaataccactgaagcctctttgccccatgatgcagagcttttcaaggatatggctttattcttgcaagcaattacaaataataaatctatttctgctaagagatcaccaaannnnnatnntnnnnnnncccccggattttttatttagcgggccgcacctttttccccttttagggggggtaaatttatattgggccttgggccggggttttcaaaagcggggggannnnnnnnnnaaagagccc

SEQ ID NO: 145166 - DNA, 786 bp, Homo sapiens
tttgagacagtttcgctcttgttgctcaggctggagcacacaggcacgatctccactcactgcaacctccgcctcccgggttcaaacgattctgctgcctcagcctcctgagtagctgggaccacaagtgtgtgccaccacaccgggctaatttctgtattttcaatagagactgagtttcaccatgtcggccagaccggtctcgaactcctgacctctagcgatccactcacctcagcctccccaggtgctgggattaaaggtgggagccactgtgcccagtctccaatttgctttagaggcaataatgagatgaattatcaggcaactgggatctattccaagtccgagattttcttctgcctgggctatgtgaccatgagcaggtgtttaacttcacagggctcaggctcttaaccgactgaatgaggtcaccacctcccgtcaggtagaatgtgttaaacattttgaactcttgagattaaggctaaatgctactgggattatatttacttataattaagcaactctaagcagatcagatgcaagttattaataaggaaccagacaaatgttgtctaaggcaaaatttgcatacaacgtaataaatgattataccagttgtttactgtggaaagtggggtcccatgaaggaaaacagcacatctcttagccttccaggttttcccctatcatggtataaaaacttacttgaggccaggcgcggtggctcatgcctgtaatcccagcactttggaggccaaggttgggattacaggcgggcgc

SEQ ID NO: 145167 - DNA, 334 bp, Homo sapiens
ggcacgagaaggccattgcagtgtaaaagtattgagttaatgtgttgagatgaatttgggcctttggagcaaaaacaattatccattctcaaactgatgaaattagtgccatgctttgtaatttggcccttacactacttaactgtgtatctgcctgaaatatgaatatactactgaaatgtgtgccgactccctgtcacgaatgcagagtctgatgccatgatcaatgatgccatacgccctatcaactttaccggatttctgaccatgttcgcttagaatctgaccggtgccgaccctgctgatgtgatcatcgcagccttcgacgttttgg

SEQ ID NO: 145168 - DNA, 649 bp, Homo sapiens
gtcccatcccaaagggaatgtgttccccaacagtgccccaacacacgacccctgtacccttctggttgggattgggcaatgcaggctgagctggttgttccttcagaaataagcattactgggccaaggttaattatccgtctacagttgggtcttgggcatcctattcgccgagatgtgtccttacaaatgagaagaccatttgcaggggcttttaacatatttctggcctattggggggttttgaatgggggtagcttcaatccaagctgtgcgcttagccacatgctggtgaagcttgccatccaaattgaatagtgatgggcacacgcggcaggtttattgctggaataccaccgggcgtctggactggcaatggctgtatatgaaggtgggagctccgctctggggctgctttcttgcaagtacggtggggcggtgggagtaacatttccggagtgggatgttgacagcagaggcgagcgttcgtccaccccatcagcagccatgactgcggcagcggcggggcatgggaaggccgacccggggttgcgccctcggcgccctggtggctactgctgctgcctctgctgccgctgcagccgctacagctgctgctgctgccgcctccgggagggcccgacgaaat

SEQ ID NO: 145169 - DNA, 651 bp, Homo sapiens
  misc_feature (1)...(651): n = a,t,c or g
cacagactcagagagaacccaccatggtgctgtctcctgccgacaagaccaacgtcaaggccgcctggggtaaggtcggcgcgcacgctggcgagtatggtgcggaggccctggagaggatgttcctgtccttccccaccaccaagacctacttcccgcacttcgacctgagccacggctctgcccaggttaagggccacggcaagaaggtggccgacgcgctgaccaacgccgtggcgcacgtggacgacatgcccaacgcgctgtccgccctgagcgacctgcacgcgcacaagcttcgggtggacccggtcaacttcaagctcctaagccactgcctgctggtgaccctggccgcccacctccccgccgagttcacccctgcggtgcacgcctccctggacaagttcctggcttctgtgagcaccgtgctgacctccaaataccgttaagctggagcctcggtggccatgcttcttgccccttgggcctccccccagcccctacttcccttcctgcacccgtacccccgtggtctttgaataaagtctgagtgggcgcccnnnnnnnnnnnnnnnnnnnnnnnnnnnnnnnnnnnnnnnnnnnnnnnnnnnnnnnnnnnnnnnnnnnannnnnnnnnnnnncggcggc

SEQ ID NO: 145170 - DNA, 606 bp, Homo sapiens
  misc_feature (1)...(606): n = a,t,c or g
atcgagaccatattccatgtggnggaattccacagactcagagagaacccaccatggtgctgtctcctgccgacaagaccaacgtcataggccgcctggggtaaggtcggcgcgcacgctggcgagtatggtgcggaggccctggagagggatgttcctgtccttccccaccaccaagacctacttcccgcacttcgacctgagccacggctctgcccaggttaagggccacggcaagaaggtggccgacgcgctgaccaacgccgtggcgcacgtggacgacatgcccaacgcgctgtccgccctgagcgacctgcacgcgcacaagcttcgggtggacccggtcaacttcaagctcctaagccactgcctgctggtgacccttggcgcgccacctccccgccgagttcacccctgcggtgcacgccctccctgggacaagttcctggcttctgtgagcaccgggctggacttccaaatacccgttaagctggagccctcggtggccatgcttcttggccccttgggcctccccccagcccctcctcccctttcctgcacccgtacccccgtggtctttgaaataaagtctgagtgggcggcaaa

SEQ ID NO: 145171 - DNA, 532 bp, Homo sapiens; identical to SEQ ID NO: 114249

SEQ ID NO: 145172 - DNA, 1243 bp, Homo sapiens
cgcttccttgctccatttgcattactgcaggagcttgtaactagcctgaattcactctcttggactgttaatgtgcatacttatatttgctgctgtacttttttaccatgtaaggaccccacccactgtatttacatcccagctggaagtacctactacttaagacccttagactagtaaaggtagcgtgcataatcttaggtgttatatacacattttcagttgcatacagttgtgccttttatcaggactcctgtacttatcaaagcagagagtgctaatcaatattaagcccttctcttcgaactgtagatggcatgtaattgcagttgtcaatggtccttcaattagacttgggtttctgacctatcacaccctctatgctttattgcatggggtactattcacttaaggcccctttctcaaactgttaatgtgcctaatgacaattacatcagtatccttccttttgaaggacagcatggttggtgacacctaaaggccccatttcttggcctcccaatatgtgtgattgtatttgttcgaggttgctatgcactagagaaggaaagtgctcccctcatccccacttttccccttcagcaagaaagtgcgcaccccataagacccttttatttgaagagtctaggtgcacaattgtaagtgaccacaagcatgcatcttggacatttatgtgcgtaatcgcacactgctcattccatgtgaataaggtcctactctccggccccttttgcaatacagaaagggttgctgataacgcagtccccttttcttggcatgttgtgtgtgattataatcgtctgggatcctatgcactagaaaaaggagggtcctcttcacatacctcagtctcacctttcccttccagcagggagtgcccactccataagactctcacatttggacagtcaaggtgcgtaattgttaagtgaacacaaccatgcaccttagacatggatttgcataactacacacagctcaacctatctgaataaaatcctactctcagaccccttttgcagtacagcaggggtgctgatcaccaaggccctttttcctggcctggtatgcgtgtgattatgtttgtcccggttcctgtgtattagacatggaagcctcccctgccacgctccaccccctaatcagatagtagatgattggttaaacctgttaaaaaccaaatttcgtgaagagccaggttgctgtgttgcagtgcattgtg

SEQ ID NO: 145173 - DNA, 1555 bp, Homo sapiens
gtttttttttttttttttaattgcaagcatatttcttttaatgactccagtaaaattaagcatcaagtaaacaagtggaaagtgacctacacttttaacttgtctcactagtgcctaaatgtagtaaaggctgcttaagttttgtatgtagttggattttttggagtccgaaggtatccatctgcagaaattgaggcccaaattgaatttggattcaagtggattctaaatactttgcttatcttgaagagagaagcttcataaggaataaacaagttgaatagagaaaacactgattgataataggcattttagtggtctttttaatgttttctgctgtgaaacatttcaagatttattgatttttttttttcactttccccatcacactcacacgcacgctcacacttttttattttcctaaatgggccgttcagcccctgtggagatctcctatgagaccatgcgttttatgatgactcgcaaccctaccaatgctactctcaacaagttcacagaggaacttaagaagtatggagtgacgactttggttcgagtttgtgatgctacatatgataaagctccagttgaaaaagaaggaatccacgttctagattggccatttgatgatggagctccaccccctaatcagatagtagatgattggttaaacctgttaaaaaccaaaatttcgtgaaggagccagggtttgctgtgttgccagtgcattgtgttggcagggttggggaaggggcaccggtgctgggttggcacttgctttggattggaatgtgggaatgaagtaacgaagatgcagtttcagtttataagacaaaaaagaaggggagcgttcaattccaaacagcttgctttatttggaggaataccgacctaagatgcgattacgcttcagagataccaatgggcattgcctgtgttcagtagaaggaaatgtaaacgaaggctggacttggattgtgccatttagagggaactcttggtacctggaaatgtgaatctggaatattacctgtgtcatcaaagtagtgatggattcagtactcctcaaccactctcctaatgattggaaccaaaagccaaaccaaaaaagaaatcctctcctaataaaatggaataaaaatggtttaagaaaagagaaagagaaaaggaattaattcagtgaaggatgattttgctcctagttttggagtttgaatttctgccaggattgaattattttgaaatctcctgtctttttaaactttttcaaaataggtctctaaggaaaaccagcagaacattagcctgtgcaaaaccatctgtttggggagcacactcttccattatgcttggcacatagatctccctgtggtgggattttttttttccctttttttgtgggggagggttggtggtatatttttcccctcttttttccttcctctcctacatctcccttttcccccgatccaagttgtagatggaatagaagcccttgttgctgtagatgtgcgtgcagtctggcagccttaagcccacctgggcacttttagat

SEQ ID NO: 145174 - DNA, 450 bp, Homo sapiens; identical to SEQ ID NO: 118344
  misc_feature (1)...(450): n = a,t,c or g

SEQ ID NO: 145175 - DNA, 894 bp, Homo sapiens; identical to SEQ ID NO: 115010

SEQ ID NO: 145176 - DNA, 3520 bp, Homo sapiens
atgtctaagtcagaggtgagttaggcgcgctttcccacttgaattttttcctctccctttcctgaatcggtaagatgctgctgggtttcgttccttgcaccagcccattctacagttccttcggtcgctgccacggcctacccctcccaaagttcaagtcgccattttgtcctcttgatcgccatgaggccgctctccgccaaccatgtgttatcatgcgggactcgttactcgtagcaaaattcttaggcacacaggatctttgtctttttttaaaccttgccttggtgagcgagttttctaaagagcgattagtcccattgtggagatgcacccctaccgcccaagcctttgttgcgcgtgcgtcggaaggcgactagggacgcatgcgcttgcgatttcctagcactcccaactccagcatacggcctcccttgataggcagaagcacgtgtcttgttgcgacctgaacgaacaataagtgctaggtacacagttggtgtctagtttttcttttcctcgatggaaattgtttcgtgttgtagcccatttaacacttccccctccccccactctagtctcctaaagagcccgaacagctgaggaagctcttcattggagggttgagctttgaaacaactgatgagagcctgaggagccattttgagcaatggggaacgctcacggactgtgtggtaagatttggaagggacaaagcagtaaaacagccgatttccttggcttatcttggtgcagtcttctccgaatgcttatgaaagtagttaatagcattatagttagagctttgttggcaaaggaacgtcctgctttgattttaaaagctaacctcttaaatctaagggtagtgggaaactggacgaactttttataaaaggctggtgtaaagtttcctattgccctattcaaagttaaaataacaaaagcttttgcggtcagactttgtgttacataaattaacactgttctcaggtaatgagagatccaaacaccaagcgctctaggggctttgggtttgtcacatatgccactgtggaggaggtggatgcagctatgaatgcaaggccacacaaggtggatggaagagttgtggaaccaaagagagctgtctccagagaagtgagtgggttttttttcttcttcttcttaaacttacttggatatgtgctgctatgaacttaagattcgggagttttctaaacttaccaaaattttttattcgagtataggctttgctaatctaaacctatggtttttctcctattaggattctcaaagaccaggtgcccacttaacttgtgaaaaaagatatttgttggtggcattaaaagaagacacttgaaagaacatcacctaagagattatttttgaacagtatggaaaaattgaagtgattgaaatccatgacttgacccgaggcagtggcaagaaaaaggggctttgcttttgtaaccctttgacgaccatgactccgtggataagattgtcagtaagtatcagatagtggcatttagtaagggttccacaatctgtatggcattctaaaccctgataccatgttgtatctatgttttttttttagttcagaaataccatactgtgaatggccacaactgtgaagttagaaaagccctgtcaaagcaagagatggctagtgcttcatccagccaaagaggtatgcttgttgcttaattaaaccttaaaggtaactttgagttactccagtatgaatgatttaatgcttaaacttcatgtcttaaggtcgaagtggttctggaaactttggtggtggtcgtggaggtggtttcggtgggaatgacaacttcggtcgtggaggaaacttcagtggtcgtggtatgtatggtttatctacatgtagttctgacttctcaccatctttgctatgaagattttacagtacgggaactgcattcagaatgtcactttaagtccaagtcatacttaaaacttgaaactttttcttacaggtggctttggtggcagccgtggtggtggtggatatggtggcagtggggatggctataatggatttggcaatgatggtaagttttttaggaataagtagagaaaaattcctggcaacctggatctttagaataggttagtagagactaaaattctggtgcatgtcaaactcaactttgcccataacacgcatgctgtgagcaggccttcagccgttacacttgcacaagttttcattgtcaaatacttttgtcttattgagaagaattgtattcttgtaggtggttatggaggaggcggccctggttactctggaggaagcagaggctatggaagtggtggacagggttatggaaaccagggcagtggctatggcgggagtggcagctatgacagctataacaacggaggcggaggcggctttggcggtggtagtggtaggtatccagtgatccaagtacttggtgtgacagctagattagccttttagagcttgggttctggtgctgttgaagcattgtgtggtacactgcatggtatattaaaaacaaatgggcttgctatgctacctcctcctagctttaagctggggccgcctcactcccaaatagtagagataagtggatagtgttgtctttgagttagattagtatcatagaaggatttagtattttaactcctttgggaccttaggcgcttagttgatgtatccaagatacttctgcttgctgtggccctggatccgtgaaggccttcaaggctgaagggtatgcttgtgccactctgaaaatctctttattttatgtcatggtgagttaggccagttttctttgtattactggattattcaactgaatgcctttcccagagaatgaaatgcaaagattggagtcaccatagtttgggagaaaggaaggctgataactcaaccttattttattctgactgctaaacagaattggaaactaacatcatcctcaggtaacagataaaggccctctttcccattcataggaagcaattttggaggtggtggaagctacaatgattttgggaattacaacaatcagtcttcaaattttggacccatgaagggaggaaattttggaggcagaagctctggcccctatggcggtggaggccaatactttgcaaaaccacgaaaccaaggtatggtatctatgtaattttggataatgtcaaaagagtgtctgtagctactgctgggaagaaagccctttaactgctatgtctgggcagcaaaacgtttatagtttagaaccttcagaaagtgataatttgatcacaaattagaaaaatcatgggacctctttaccacctcccttgtagtagggccatttttaaatggccagacacttgaatttaacttttattatcccaaatatgaaaacattactgttggcactttgaaactttaaaagaaaaattgtacttttcaggtggctatggcggttccagcagcagcagtagctatggcagtggcagaagattttaa

SEQ ID NO: 145177 - DNA, 381 bp, Homo sapiens
  misc_feature (1)...(381): n = a,t,c or g
aggaaatattaagattcttcttatagtatttaacctattagggtaaaaaggatttaaaataatatatttacatatgtttaaannnnnnnnnnnnnnnnnnnnnnnnnnnnnnnnnnnnnnnnnnnnnnnnnnnnnnnattagggtttttataaaaccaaaagaacttggcaacacccctaggtaccctttataagcctccaattggctacagcctgtgaaggattggcctgtgaccaatcagaggctgaagtggagtcttagctcatggtcaagcagaggctgaagtggaaacttcttgtctttttatcacaggcatgaggatgtggcctgcatgctgcctgatcttgcctagaaccggctgcacctgctgttctcttgtt

SEQ ID NO: 145178 - DNA, 546 bp, Homo sapiens
aggaaatattacgagtcttcttatagtatttaacctattagtgtaaaaaatatttaaaataatatatttacatatgtttaaaaccttggcctccaaagtgctgggattacaggtgtgagccactgcgcccgggcccctaattaggggtttttaataaaaacccaaaagaacttggcaaacaccccctaggtacccctttaagaaagccctcccaattggctacagccctgtgaaggattggcctgtgacccaatcagaggctgaagtggaagtcttagctcatgggtcaaggcagaggctgaaagtggaaacttcttgtccttttttatcacaaggcatgaaggatgtggcctgcattgctggcctggatcttggcctaggaaccggctggcacctgctggtctcttggtttatgcaaactggctgcacctgctattcctttgcttatgcccctacccctggctatcctaattccctgttctcctgcctcactattactgtattctctacttctaaataaaaataaaacaaaatacaaaccgttaa

SEQ ID NO: 145179 - DNA, 556 bp, Homo sapiens
tcaggaaccagctcatgatctcaggatgtatggaaaaataattctttgtattactattgtcagaaattgtgagcatatcagcattaagtaccactgaggtggcaatgcacacttcaaccctccttccttcaagtcacaaaagagttacatcctcatccacagacaaatggagaaacggggacaacttgtcccatcgtttcactgtacccagctccctgtagtgataatactcattattttgtgtgtgatggctggtattattggaacgatcctcttaatttcttactgtattcgatgactgataaaggcatgaggatgtggcctgcatgctgcctgatcttgcctaggaaccagctgcacctgctgttctcttgcttatgcaaactgggctgcacctggctattccttttgcttatgcccctacccctgggctatcctaaattccctgttctcctggccttcactgattactggtattctctacttctaaataaaaataaaacaaaataccaaccgttaaaagagagggttcgaagtggaaggttggctctttctt

SEQ ID NO: 145180 - DNA, 412 bp, Homo sapiens
tgctgaggcgtgagaatggcgtcccgcggccggcgtccggagcatggcggacccccagagctgttttatgacgagacagaagcccggaaatacgttcgcaactcacggatgattgatatccagaccaggatggtgggccaaccttggaacttttttaattggccaaaaattagcccttgttcctggcggaatttgggttggggcattggcctgatggaaagttatcggtcaaatgaagggccctatggggtggccctggatttcagccttgccttgctggataaggctgtggaccgaaagatagagggagacctgctgctgggggatatgggccagggcatcccattcaagccaggcacatttgatggttgcatcagcatttctgctgtgcaggggcttttgaatgctaaca

SEQ ID NO: 145181 - DNA, 479 bp, Homo sapiens
tgaactgggagctgctgctgtggctgctggtgctgtgcgcgctgctcctgctcttggtgcagctgctgcgcttcctgagggctgacggcgacctgacgctactatgggccgagtggcagggacgacgcccagaatggagctgactgatatggtggtgtgggtgactggagcctcgagtggaattggtgaggagctggcttaccagttgtctaaactaggagtttctcttgtgctgtcagccagaagagtgcatgagctggaaagggtgaaaagaagatgcctagagaatggcaatttaaaagaaaaagatatacttgttttgccccttgacctgaccgacactggttcccatgaagcggctaccaaagctgttctccaggagtttggtagaggtttttttaatggccttcgaacagaacttgccacatacccaggtataatagtttctaacatttgcccaggacctgtgcaatcaaata

SEQ ID NO: 145182 - DNA, 747 bp, Homo sapiens
gcggccgcaatgaactgggagctgctgctgtggctgctggtgctgtgcgcgctgctcctgctcttggtgcagctgctgcgcttcctgagggctgacggcgacctgacgctactatgggccgagtggcagggacgacgcccaggtgaggaccggccaaagcctctcccgagtgggaggccgggctcggagctgccgaggcgtgtccgggtctccgggggttctgcagtgatcccgggtcctttgtgggttgcgtggagcttcccgaaggcccggctgccccttacgcaggggctgcgggtacggggaggaagaggcgagggctaaaaagccactttgtcttctgtactggtcggaagatggcatggacttgccattcaggctaggaaacctctccagggagtgccaaactgttaagagagcactggagtcggcggtgctcctgatgactctgacatcttacgcaggactcaagggattctggtgttgtctcagaggacgatactttgagaaacagtgagcgtccccctgcgtttgtaagggaaactcctttgtaagtaccggaagcccggtcgttctactacctgaagtagtctgtcctccacttcccactcctgcagttttgaaataaaatctgagataatccgaagtccttcacctacttactcattctaggccaacactagaaagaactaaaaatggcagtttgctggagcgagatcattattggcatactgcctatctcacttt

SEQ ID NO: 145183 - DNA, 1244 bp, Homo sapiens
  misc_feature (1)...(1244): n = a,t,c or g
tggggccgcgagtgctgagcccggcgcgcccgagccgctcctcctcccggcctgctccctgggcggagccggggcagtgcggctctgggctggccgaaggggtggcgctgcgatcccgcagggcagcgacgcgactctggtgcgggccgtcttcttccccccgagctgggcgtgcgcggccgcaatgaactgggagctgctgctgtggctgctcggtgctgtgcgacgtgcgtcctgctcttggtgcagctgctcgcgcttcctgagggctgacgggcgacctgacgctactatgggccgagtggcagggaccgaccgcccagaatgggaggctgactgatatggtggtggtgggtgaactggagcctcgagtggaatttnggtgaggagctggcttaccagttgtctaaactagggagtttctcttgtgctgtcagccagaaagagtgcatgaactggaaaagggtgaaaaagaaagatgcctaagagaatgggcaatttttaaaagaaaaagatattactttgtttttgcccctttgaccttgacccgacactgggttcccattgaagccggcttaccaaagctgttctccaggaagttttggtaagaatcgacattcttgggtcaacaatggtgggaatgttcccagcgttctctgttgcatggataccagcttggatgtctacagaaagctaattagagcttaactacttagggacggtgtccttgacaaaatgttgttctgcctcacatgatcgagaggaagcaaggaaagattgttactgtgaatagcatcctgggtatcatatctgtacctctttccattggatactgtgctagcaagcatgctctccggggtttttttaatggccttcgaacagaacttgccacatacccaggtataatagtttctaacatttgcccaggacctgtgcaatcaaatattgtggagaattccctagctggagaagtcacaaagactataggcaataatggagaccagtcccacaagatgacaaccagtcgttgtgtgcggctgatgttaatcagcatggccaatgatttgaaagaagtttggatctcagaacaacctttcttgttagtaacatatttgtggcaatacatgccaacctgggcctggtggataaccaacaagatggggaagaaaaggattgagaactttaagagtggtgtggatgcagactcttcttattttaaaatctttaagacaaaacatgactga

SEQ ID NO: 145184 - DNA, 504 bp, Homo sapiens
  misc_feature (1)...(504): n = a,t,c or g
tttttcatatttcatttggttctttttattagaaactgagaatacagcaagtagggaaatcccacatcaatggaaccatcacacagatgcctttctggaaccccaaccttctatgatccccaaaaataaaggggaagagggaaaatactgaaaaaggccactatttaatggtgaaagaatgaagctgtagaggtcccaaccagcctagggccaaaaaagaaaattaaaaatctgcacagagcaagcaagcctctgactgctgagagtaaggcattcaggcgccaacctggtgagagttctcagcgagcactgtcaggtcaagtgcacatgaggctgttggtagtgagctgcacgtagacacacacatagaaatgggcacatgccancatacacacccgaaaaagggagattttactggattacacatcagtgatgttaatttcatttttcctaagggtttgtgctatgttgaaccagatccttccagctttggggtgtgggtga

SEQ ID NO: 145185 - DNA, 2182 bp, Homo sapiens
ttttttttttttttttcatatttcatttgggttctttttattagaaactcgagaatacaagcaaagtaagggaaatcccacatcaatggaacccatcacaacagatgccttatcatggaacccccaacctatctatgatccccaaaaaatgtgactttgtggctttagcataatttataaaggggaagagggaaaaatactgaaaaaaggcccactatttaaatgggtgaaagaatgaagctgtaggaggtccccaacccagcctagggcccaaaaaagaaaattaaaaatctgcacagaggcaagcaaagcctctgactgctgagaagtaaggcattcagggcgccaacctggttgagaagttctcagcgagcacttgttcaggtccaagtgcacattgaggctgttgggtagttgagcttgcacgtaggacacacacttaggaaattggggcacatggccaccatacaccaccccgaaaaaagggagatttttactgggattacacatccagtgatgttaatttccatttttcctaagggtttgtgctaatgttgaaccagatccttccagctttggggtgtggggtgactgcacccagaggctggctaacttctgttggtgttggtgaacagggctgcaccctatacggctgtatccccaaaagtgcaatgaccgaaagagcaagtctggcttctgaatacgtgctgttgctccccaagaaactaagtgggcttctgtcccaaatggccacttgtcctgctggactatgctttctcaaagggattaatactggttctttattcttgtcaggcactgcaccagttcaatccaactgagtcttttgctcggtccacctagcaccctgggacagtgaccttatcccagaacccaaaaacgttcaagttcttcttcaacttctacactggattctttcttcctagatcccaccttttgggtggagattgcaaggggaaggggagggaaaataacttgagaaaaactctattggattaaattagggaggacccttcccaatatttcccaaacacctactgaggacgccagtccccatgctcagggacctccatatttagttctaaatccccacaaccccccaggatataatggagtcatccccaagtctttgatgacagtaaacctaagactcggagcactattttggtggttcacctatgggccaagatcagaagtccatgaaccagatcctttccccaccactttctctgacaccgtatcaggtaggccttgtgacatgagccatcgtctttgtacctcactccctggcaataacaataccattgtaatttaaaagccgacaccactcttaatccctgtaaagtgaggttcagtgagtgctgacaactccgtactacaactggctttaagagttctgctggctttccttattcaaggagagccgaggtgtctgtcacatcccaggcttaccaagacagtgtaccagaggtaaaactcatcctttcctaaatccaaaggaaagggtctacccaatttatgtagatgagctcaggagaaacctggacacgtcagaatctcatttgtggctggctcccatgccaagaactatgtcagagaaaggtccatttcgtattccctcaaggaggaagtgtagttagggcagtgatttttaatagagggaaatttagagagtgttccagagctcccacagcaagagatatggaaaactgtccccatccctcctaataagacttcccataaaagtgagcgggatgcccaggaagtaatcaagatcagcccatgctaatgtttctagagctcctcccatggcctccagcacccctttaccagctgctaggagtgtgtcagtctctcaaatgacaatgacaccctaactaagagcctttatctaacatcctgtcacccactcatgtgctgcttccactgagaaaacacataccactcccctctacctcagggcctcccaaagggagtggtcatgtcaccactgggctagggctatactctctgccccattagggtccaaggtatgtcagcctttaggaaggcatcttggtgcaccaagacactgtacattccggggctatcacctgatcctacagtcactttttgtcgcaaaattcaaacagtgtgtggtacttgcatgtttcatcctcgtgcc

SEQ ID NO: 145186 - DNA, 313 bp, Homo sapiens
tgtgtaagccaagccttgacctccacaacttaaaagggcttaccctgacactgaccccttcttccccaccaggcctttggctttggctggcacaggggtgaaggagagcgaaggctgctgggggcctgctggacactgaatggtcaagaggaaccagtgtcccagcctaccccccaactagaaaatgaggtctcaaggcagcacctgccagccacactgccagagatggttgccttctaccaggagctacacacacccactcaaggccagaccatggtccgccagttgatgcacaaactgttggtgttttcgg

SEQ ID NO: 145187 - DNA, 760 bp, Homo sapiens
ctcacctgaaagaaggtttctggttttcaatggggtgctgataagtgtaacactcatctctctgatagaaggaagaatccccaatttctaaagtttgctgatttccataaggatttagaagggtcttccactacaggaatagaaagggaagaggaagaagactacttagttttattcctggagatggcataatctggataagacagaggtgctgtttcaggtactgggaatatggcaaaagaacaaagcaaatgaaaatccctgctgtgatgatttgtggagcttgaggaactgaacaacaaataaggcctttggctttggctggcacaggggtgaaggagagccagcggcattgagtaaccaggcgaatgtgcccccaggagagttcattccaacccttccagttcctactgctggtgggggtcccagtggcaagtgtcctccttctggcccaatgccttcgatggcactgccctagaaggctgctgggggcctgctggacactgaatggtcaagaggaaccagtgtcccagcctaccccccaactagaaaatgaggtctcaaggcagcacctgccagccacactgccagagatggttgccttctaccaggagctacacacacccactcaaggccagaccatggtccgccagttgatgcacaaactgttggtgttttcggctcgagaggtggatcaccgcggcggttgcctgatgctccaggatacaggcatctccttgctcatcccaccaggtgctgt

SEQ ID NO: 145188 - DNA, 459 bp, Homo sapiens
  misc_feature (1)...(459): n = a,t,c or g
agagttccttgattcttgtgaggattgcatgaaatagagggctcagggcagtcttggcagatagaacttaacatgtaaatgtcagctgttatgtttattactgtaaagcctttgatacgtgcacacttatacagtaaacnnnnnnnnnnnnngcaaaaacctgttcaaaaagcccttttaaaaaaactcaatatttgcaaacttactttatagaaagttttttataaggcctggaacaaaaggggcccaaaaatattttgaaaaccgtatgccctgttttgcatgcccactgggaaaacctgatttatttgggccttttcaaaaatattggaaaatttttaggcctaatcccttggtttttaaaaaaccttttcaacgggtttttttttggggagaaaccccaaattgtcttggaaaatttttaggggccttaattctggtaagggttttttttaatag

SEQ ID NO: 145189 - DNA, 382 bp, Homo sapiens
gaggctgcgagcgagccgcgaaccgagcgggcggcggacgcgcgcacgaggggggataaacccgggaccagggtcttcaagaagtcgagccctaactgcaagctcaccgtgtacttgggcaaacgggacttcgtagatcaccaggacaaggtggaccctgtagacggcgtggtgctcgaggaccctgactacctgaaggaccgcacagcgttagtgagcctcacctgcgccttccgctatggccgtgaagacctggatgtgctgggctggaccttccggaaagacctggtcatcgccgcgtaccaggacttccccccggagctaaatcaacccgggccctacacgcggcatggggaacggctgctgaagaatgagggccacc

SEQ ID NO: 145190 - DNA, 406 bp, Homo sapiens
ccaccatggtgctgtctactgccgacaagaccaacgtcaaggccgcctgcagtaaggccggcgcgcacgctggcgagtatggtgcggaggccctggagaggatgatcctgcccttacacaccaccaagacctactttccgcacttagacctgagccacggctctgaccaggttaagggccacggcaagaacgtggtcgacacgctgaccaacgccgtggctcacgagaaccacatgcacaacgcactgatcgtcctgtgtgagctgagcgcgctcaagcttagcatggaccctgtcaaccttaagctcctaagcctctgcctgatggagaccctggccaggcagctcccagacgagctcacccctgcggtgcacgcatccctggacaaagtcctggcttttgggac

SEQ ID NO: 145191 - DNA, 415 bp, Homo sapiens
  misc_feature (1)...(415): n = a,t,c or g
gcgaagttaagatggtctcaagttgtgatcccgtgggtggaggtggnnnnnnnnnnnnnnnnnnnnnnnnnnnnnnnnnnnnnnnnnnnnnnnnnnnnnnnnnnnnnnnnnnnnnnnnnnnnnnnnnnnnnnnnnnnnnnnnnnnnnnnnnnnnnnnnnnnnnnnnnnnncctatgaattttttccacatttttcatatgaatacttaaaatcttttcgactgaattgtaatacttttatcttatcgttcatcctttatctgtttatcctattttcctacactcttctttattacttttctcatcacttttttctcatatttatcatgtttattccattgatctttttcttatctttctctattcttgttatctttattttttcttccaacttcatattcatcatttctttccct

SEQ ID NO: 145192 - DNA, 534 bp, Homo sapiens; identical to SEQ ID NO: 144862

SEQ ID NO: 145193 - DNA, 658 bp, Homo sapiens
  misc_feature (1)...(658): n = a,t,c or g
atcgagaccatattccatgtggnggaattccacagactcagagagaacccacccatggttgctgtctcctgccgacaagaccaccgtcaaggcccgcctggggtaaggtcggcgcgcacgctggcgagtatggtgcggaggccctggagaggatgttcctgtccttccccaccacaagaacctacttcccgcacttcgacctgagccacggtttctgcccaggtttaaggggccacgggcaagaaggtggccgacgcgctgaccaacgccgtggcgcacgtgggacgacatgcccaacgtcgctgtccgccctgagcgacctgcacgcgcacaagctttcgggtgggacccggttcaactttcaagctcctaaagccactggcctgcttggttgaccctgggccggcccacttccccgtccgagtttcaacccctggcggttgcaacgtcttccctggggacaaagtttcctgggctttctgttgaagcaccgttgctgaccttccaaataacctttaaaggttggaagcctcgggtgggccatgctttctttgccctttgggcttccccccagcccctcctcccctttcctgcacccgtacccccgtggtctttgaaataaagtcttgagtgggcggcaaaaaaaaaaaaaaaaaaa

SEQ ID NO: 145194 - DNA, 594 bp, Homo sapiens
gtgtatgacggttcaagatgtgacaaattaggtcttgcagtgaggtactgggagagttagaacgatgagaaaatcagcgtgaagacagtatggcacaacgaacatacagggtctagtataactaagacgccacgttcatggcatacagggcactaaaagaactaggtcgagcaatattgcgtgccaccagctccgcagcgacggtaatccagactgaatggtacacaggccagaatcacatggggaagcaccaaagtagatgtagaatctgcacgcatgccggtgcaggatctggtgaagtcttggcagaccttccccgcctctgggaatcgcctcccgcgggcagcgctcgccttccccgagccctgtctctcctgattgctcccaagccaaggcggatgcaggcctggcgaggctttcgcaacccgagaaccaggcgcgcagccggctgttacttcctcaccgcgcacggggcggacaggagcctcccccggcctcggcctcgcgcccaccaggccgccggcatctcttccgccgcagccccggctcactcggcgccatgcacccgccggtgctggatgaggtggaagctca

SEQ ID NO: 145195 - DNA, 366 bp, Homo sapiens; identical to SEQ ID NO: 145060

SEQ ID NO: 145196 - DNA, 516 bp, Homo sapiens
  misc_feature (1)...(516): n = a,t,c or g
agtcccgaatttccgggtcgacgatttcgtcccgcgggtctgtctcttgctttatacagcgccagtacggaacacatccggggactttttttcaagcctccgcccgccttccgatttcctctccgcttgcaacctccgggaccatcttctcggccatctcctgcttctgggacctgccagcaccgttttttgtggttagctccttcttgccaaccaaccatgagctcccagattcgtcagaattattccaccgacgtggaggcagccgtcaacagcctggtcaatttgtacctgcaggcctcctacacctacctctctctgggcttctatttcgaccgcgatgatgtggctctggaaggcgtgagccacttcttccgcgaattggccgaggagaagcgcgagggctacgagcgtctcctgaagatgcaaaaccaagcgtggcggccgcgctctcttccaggacatcaagaagccagctgaagatgagtggggtanaaccccagacgccatganagc

SEQ ID NO: 145197 - DNA, 383 bp, Homo sapiens
  misc_feature (1)...(383): n = a,t,c or g
ttctgacgccttcggaaccgcctgagaaccnctgggacgacccacgcgtncggagacctgactctctgaggctcattttgcagttgttgaaattgtccccgcagttttcaatcatgtctgaaccaatcagagtccttgtgacttgtcctggacggtgtcctaatggaactgcaagactgtgcccttcccctcctgaaagatgtcatcgcaacagataaagaagacgttgccttcaaagacctggatgtggccattcttgtgggctccatgccaagaagggaaggcatggagagaaaagatttactgaaagcaaatgtgaaaatcttcaaatcccagggtgcagccttagataaatacgccaagaagtcagttaaggttattgt

SEQ ID NO: 145198 - DNA, 308 bp, Homo sapiens
ggtttgcagttgttgaaattgtccccgcagttttcaatcatgtctgaaccattcatagtccttgtgactggagcagctggtcaaattgcatattcactgctgtacagtattgtcctaatggaactgcaagactgtgcccttcccctcctgaaagatgtcatcgcaacagataaagaagacgttgccttcaaagacctggatgtggccattcttgtgggctccatgccaagaagggaaggcatggagagaaaagatttactgaaagcaaatgtgaaaatcttcaaatcccagggtgcagccttagatat

SEQ ID NO: 145199 - DNA, 476 bp, Homo sapiens
  misc_feature (1)...(476): n = a,t,c or g
gacctgactctctgaggctcattttgcagttgttgaaattgtccccgcagttttcaatcatgtctgaaccaatcagagtncttgtgactggagcagctggtcaaattgcatattcactgctgtacagtattggaaatggntctgtctttggtaaagatcagcctataattcttgtgctgttggatatnacccccatgatgggtgtcctggacggtgtcctaatggaactgcaagactgtgcccttnccctcctgaaagatgtcatcgcaacagataaagaagacgttgccttcaaagacctggatgtggccattcttgtggtttgactcaagtaccaaataataataatgctatacttaaattacttgtgaaaaacaacacattttaaagattacgtgcttcttggtacaggtttgtgaatgacagtttatcgtcatgctgttagtgtgcattctaaataaatatatattcaaatg

SEQ ID NO: 145200 - DNA, 1408 bp, Homo sapiens
gtgacctgactctctgaggctcattttgcatttgtttaaattgtccccgcagttttcaatcatgtctgaaccaatcagagtccttgtgactggagcagctggtcaaattgcatattcactgctgtacagtattggaaatggatctgtctttggtaaagatcagcctataattcttgtgctgttggatatcacccccatgatgggtgtcctggacggtgtcctaatggaactggtcagactgtgcccttcccctcctgaaagatgtggaaatggatctgtctttggtaaagatcagcctataattcttgtgctgttggatatcacccccatgatgggtgtcctggacggtgtcctaatggaactgcaagactgtgcccttcccctcctgaaagatgtcatcgcaacagataaagaagacgttgccttcaaagacctggatgtggccattcttgtgggctccatgccaagaagggaaggcatggagagaaaagatttacttgaataccagatgtgaaaatcttcaaatcccagggtgcagccttagataagtacgcccacgaagtcaggtaaggttattgttgggggtaatccagccaataccgactgcctgactgcttccaagccagctccatgcattcccaaggagaacttcagctgcttgactcgtttggatcacaaccgagctaaagctgaaagtggtcttagacttgttgtgactgctcatgatggacagaatggcattatctggggaaaccattcctcgactcagtatccagatgtcaaccatgccaaggtgaaattgcaaggaaaggaagttggtgtttatgaagctctgaaagatgacagctggctcaagggagaatttgtcacgactgtgcagcagcgtggcgctgctgtcatcaaggctcgaaaactatccagtgccatgtctgctgcaaaagccatctgtgaccacgtcagggacatctggtttggaaccccagagggagagtttgtgtccatgggtgttatctctgatggcaactcctatggtgttcctgatgatctgctctactcattccctgttgtaatcaagaataagacctggaagtttgttgaaggtctccctattaatgatttctcacgtgagaagatggatcttactgcaaaggaactgacagaagaaaaagaaagtgcttttgaatttctttcctctgcctgactagacaatgatgttactaaatgcttcaaagctgaagaatctaaatgtcgtctttgactcaagtaccaaataataataatgctatacttaaattacttgtgaaaaacaacacattttaaagattacgtgcttcttggtacaggtttgtgaatgacagtttatcgtcatgctgttagtgtgcattctaaataaatatatattcaaatg

SEQ ID NO: 145201 - DNA, 493 bp, Homo sapiens
gtgctccgcagccgtctgtgccacccagagccggcgggccgctaggtccccggagaccctgctatggtgcgtgcgggcgccgtggaggctcatctacccgcgttcggcttggatatcttcggagacctgaataatatgagcaagcgccagctctattaccacgttctaagctatgtcatgatcccagcatttggtctcatatgttggcatggctggtacaggctcacgagcaggatcatccgatgctctggttggctttatgaacgtggaatggtctgtgtatgcggatttacccactgaaaaatctatgatagatccaggcttatgtgcgttgacatatgactcagatactcacgtgtggtgtgccagtgcctcatcctgatgatgatttagcacaggtattagatccactaggctcatagattaacagattcctggtaccatggctttacccttgatggctatcacaaccatctttcttgttccattaggg

SEQ ID NO: 145202 - DNA, 1193 bp, Homo sapiens
ctcgtaatgaaaactgctgcgctatagtaagagaattctaccgcgatgtgtacgtgttgtctaccagtacacaggctgttgaagacagagacagaagaaagagatcaagggcagataactgttgataggaatatttgagaaagattgatcctgtttgacttgaggacttattttgttcacaggcatgcacgcttgtggttgtggttttatattacagatgtagaacaatggttatgtttcccgacatgaacattgtcctggaatgaagtgtgatcagccacttgtggaattctttgaagagctcagaggcttccaagtgatctgctcctgaacaagtttgaagacctattgtttcatagacccaagacccaaacgcatcttaaaggatccccagcccccaagacctagcctttgtctgcgattttggcttcatctcccacaaaacccctttatgagttcacgctctttcctgggactgacatacctattcctttccatttgttgggactcctattcatggcttcaaagtccagctttcttaagcccttctttagggaagcctttcccacacagccgaaccctggctgctctctggcctcctttaaattctttgatacagctgctggttgttctgatgttttatgggtattggattcttgttttcctgtgtatatgccagtttttctaggctaggactgttaaactccttaaggacagagactacaccttgtactttttgtgcatgacctggacctgctaaggaaaaaaaaatcttgtggatcgattgctttgccatccccacagcagcttttgcaaattgctttccaaactcacttgaatgatgacattgctgtggacctgggttctggacctgatctgccacttcaagctgtgtaatttttggcaagttgctttctttgcctggacctcagtttgcccatcaatataatgggatggattggatgatttttttttttttaattgagatggagtcttgcactgtcacccaggctggatcagcagagccacgatcttgggttaatgaaaccccggacagctagaggcaagggcttctcatgcctcagcctcccaagtagctgggactacaggtgtgcaccactactcctggatattttttttgtgtttttagtagagatggggtttcgccatgttggccaagctggtcttgaact

SEQ ID NO: 145203 - DNA, 399 bp, Homo sapiens
aaaaggcattcacatctcacatcctctgtgatagcctcctaattcacatttatcaaggtcctaaataagtatctaattaccctactgtgggatgttgtatatttcttcagatccgggctcgaaatccagcatttcagccacaaactttgatggactttggctcaggtactggttctgtcacctggtgagtaactttcttcagccctatcttggtcaattttagctctagaaagccatacttacaccactccaaaattaacagactggaaaaccagagggagaataggcaagttgggaatctataatgtttcttccatcagattaggcaaggcagaagaaggtatatggattggggccagaacttaaaagaaatgtcaagtaaaaaaaggcgcatgtatt

SEQ ID NO: 145204 - DNA, 887 bp, Homo sapiens
gcgtggggaattccacgcagccttaagtcggcccaacacggtttctgcctcacggattatttatatatccattgcttattggctgctggcaaacactcgctcttctcgttggctgaaactgtcgggagaagttctgcgaaggctgctccttgcggcgttgggactgagggtcacaggcacctatatttccgtttccggttcgcctcacggagccatggcggtggcactgaagtgtctactgacattatgaagatggtgccccggccttggagtggctccccaggcccgggcgctcgccgccttagtacccggagtgacccatgtagataacaagtccggtttcctgcaaaagaggcctcatcgccagcaccctggcatcctaaagctgccgcacgtgcggctgcccacaggcactggctaacggtgcccagttattgctacttggggagcgctgggcccactatggagaatcaggtgcaaacactgaccagttattctcttggagcagacattttgcctgttagaagccagagggagtttgcaaaaaaacgggctaaggcatctttgagaaaaaattcctgggaaaacccaggtcctgacttccagtccttggtctcaccacagacttatctcagacagaggagaaacttcgtggagcagtgctacacgcactacgtaaaactacctaccattggcaagaactgagctacactgagggactgagcctggtgtatatggcagcaagactggatggtggctttgcagcagtctccagagcattccatgagatccgggctcgaaatccagcatttcagccacaaactttgatggactttggctcatgtactggatctgacacctgggctgctcacagtatttggcgcccg

SEQ ID NO: 145205 - DNA, 973 bp, Homo sapiens
ttttttttttgccattacttttaatgactgctgcaccaacctattagaatcatttatatttatccatccatcatctgccttcccctctagaaaggaagctccatgagaatagaggccaaatctactcaaatcactccaccttcccagcacattgtttgtcaataatcatttaccaactgactgatagagaaatgccttccctgttgctgggatgaggcacatgacacgcccctttgaaagtcaattccatggacagttagcatttgctcttcactcctgcacccatggcgtggctgggcttaggctgatctagtctggccttgactccaggctaaggatgggaaccatgactgctccacacgcctctcatcccacagccagagccgccgttccctggggcacgtgcatctcatggggaaaatcaagagccttagacggcaggcctggcagtgcccacacattccaggcttctgcttgtgccgtgtctgtgaaaatctcgttggcagaagcaagtcacccagccacaagcaacacctatggggacggataagtccatccaccctccctcgggccctggcaaggttgtggctatgtcatactcttacggggggagtgaaaaattgaggcccaacattaaatcacccacgcgagaaatgtcagcctctgtccccacgctggaatcatttttcaccagcgggtttgcctgaattccctttgcaatggtgtctgcaggtttagcccaatgctggtccccgtggaggacacagaagcctcaatgggcctccgtctgttgggaagaacaaagatattagcttggcgcaaaaccaccgcaagccccagggggcccttgtgccatgagacaggagaggggcagagaactgtgggaactcaggaaagctcacatccccagcccctcccgtgcatccccagcccctccccctgtgaccccagcaccagtcctccctgtgccgaa

SEQ ID NO: 145206 - DNA, 455 bp, Homo sapiens
  misc_feature (1)...(455): n = a,t,c or g
agtgcctgtagtcccagctgctggggaggctgaggcaggagaatggcgtgaatctgggaggcggagcttgcagtgagccgagatcccaccactgcactccagcctggttaggccgggtgcagtagctcatgcctgtaatcccagcacttttggaggccaaggtaggcggatcacctgaagtcaggagtttgagaccagcctggccaacatggtgaaatcttgtctctactaaaactacaataatttcctgggcgtggtggcgcacacctgtaatcccagctacttgggaggctgaagcaggagaatcacttgaacccaggaggtggaggatgcagtgagccgagattgtgccactggactccagtaagggcgacagtgggagactccgttcaaaaaaaataaaaatctcaagatggtcctcgtgccaagcttggcgtntgaagggcatacgattc

SEQ ID NO: 145207 - DNA, 523 bp, Homo sapiens
  misc_feature (1)...(523): n = a,t,c or g
ggtcaggagatcgagaccatcctggctaacacagtgaaaccctgtctctactaaaaatacaanaaagtagccgggcgtggtggtgggcgcctgtagtcccggctactcaggaggctgaggcaggagaatggtgtgagcccgggaggtggagcttgcagtgagccaagatcgcaccactgcactccagcctgggagacagagcgagactccgtctcaaaaaaaaaaaaaaaaaaattatagagttggggtcttgctacattgccaggactggtcttgaactcctggggtcaagcatcctcctgtcttggcctcccaaagtgttgggattagaagcatgagccgctgtgcccagcctgacggggccttttagtgggaggagttgccattacactacgtccagtaagctccagactttcggaaaagattggtggacgggaatgctgtcatggatgggatcttgccaagaaccatcacgtgttaatttagttgcttaaacaaaaggtgttctgtttcttaactaaaa

SEQ ID NO: 145208 - DNA, 4345 bp, Homo sapiens
cggcgtgtgaatccagggcctgaaaacccagaatgaacttgtgtccatcccagagatcactgcagatgtcatgaggtaccctttgtgtcaccagctcaagcaggcctctggccactttatcatctgtggtggtcctgtcccgtgaccaggaggaaaaattagctctttgaagagaaagtagttctctattgcaggcactggcctcttaaattgttgcaggtggggaatggatgagaatatttgttttgggtgatcagaactgagactcctattgtggattagtaacatgcctcctcctagaacaagggagggcagggatcgccgagaccaccaccgggctcccagcgaggaagaggccttggagaaatgggactggaattgtccagagacgcgtcgcctcttggaagatgccttcttccgtgaagaggattacatccgtcagggttctgaggaatgtcagaagttttggaccttctttgaacgcctgcagagattccagaatctcaagacctccaggaaggaggagaaagaccctggacagcccaagcacagcatcccagcgctggccgacctacctcgcacttacgacccacgttaccgcatcaacctctctgttcttggccctgccacgcggggctctcagggactgggcaggcacttgcccgcggagagagtggctgagttccgccgagccctgttgcactacctggactttggccagaagcaggcatttgggcgtctggccaagctgcagcgtgagcgggcagccctccccatcgcccagtatgggaaccgcatcctgcagacgctgaaggagcaccaggtggtggtagtggccggtgacaccggctgtggcaagtccactcaggtgccccagtacctgctggctgctggcttcagtcatgtggcgtgcacccagccccggcggatcgcctgcatctcactggccaagcgtgtgggctttgagagcctcagtcagtatggctcacaggtcggctaccagatccgctttgagagcacacgttcggcggccaccaagattgtattcctgacagtggggctgctcctgcgacaaatccagcgggaacccagcctgccccagtatgaggtcctgattgtggatgaagtccatgagcggcatctccacaacgatttcctcctgggcgtcctccagcgcctgttgcccacgcggcctgacctcaaggtcatcctcatgtcggccaccatcaacatctcgctcttctccagctatttcagcaatgcccctgtggtacaggtgcctgggaggctgttccccatcacggtatttgatgtggcaccccctggagtccggaaatgcatcctctccaccaacattgctgagacctcagtcaccattgacgggatccgcttcgtagtagattccggaaaggtgaaggagatgagctacgatccgcaggccaagctgcaacggctgcaggagttctggattagtcaggccagcgcagagcagcggaagggccgggcgggccgcacgggccccggagtctgcttccgcctctatgccgaatcggactatgatgccttcgccccctaccccgtcccagaaattcggagggtggccctggactcgttggtgctgcagatgaagagcatgagtgtgggggacccccgaaccttccccttcatcgagcccccaccaccagccagcctggaaaccgccatcctctacctccgggaccagggggccctggacagctcagaggccctcacacccattgggtccctgctagcccagctgcctgtggacgttgtgattgggaagatgctgatcctgggctccatgttcagcctggtggagcctgtgctcaccatcgcagccgcacttagcgtccagtcgcccttcacccgcagcgcccagagcagcccagagtgctgcaccccacctgcgtcttcgctggcagccccgaggtgctgcacgcacaggagctggaggccagcaactgcgacggaagccgagacgacaaggacaagatgagcagcaaacaccagctcctcagcttcgtgtccctgctggagaccaacaagccgtacctggtgaactgcgtccgcatccctgccctccagtccctcctgctttttagccggtctttggacaccaatggtgactgctcccgcctggtggccgatggctggctggagctgcagctagcagacagtgaaagtgccatccgactcctggcggcttccctgcggctccgtgcccgctgggaaagtgccctggaccggcagctggcgcaccaggcccagcagcagctggaggaggaggaggaggatacgccagtcagccccaaggaggtggccaccctgagcaaggaactcctgcaattcacggcatccaagattccttacagcctccggcggctcacagggctagaagtccagaacatgtatgtgggaccccagaccatcccagccaccccccatcttcctggcctctttggcagctccaccctgtccccccaccccacaaaggggggctacgcagtcactgacttcctcacctacaactgcctcacgaatgacacagacctgtacagcgactgtctccgaaccttctggacctgcccccactgtggcctgcatgcgcccctcacgcccctggagcgcatcgcccatgagaacacctgcccccaggccccacaggatgggcccccaggggctgaggaagctgccctcgaaaccctccagaagacatctgtcctgcagaggccctaccactgcgaggcctgcgggaaggacttcctctttacacccacagaggtgctgcgccaccggaagcagcacgtgtgagctgggccaggagccctgcccacctccgtgcagctgacctgccctccagcccaggactaggggcaggactcttgcctgaacccccagcctgggcttagccctgtggtcctgtcccagtgcagagggcctggagcacggattgtgaataaagcctcacatgctgatacacactgttaggcctgcacctgcccatccagaaagcagcagctgccttgttagtcctccccagggtctagctttccttcttcctgctgcagggtgctgcctgaggggtcctgggtaggaggggcgttagagccagcagggacctcccatgtctccagattccaggtgcaggttcttagcacctccgcagccgctctctcttgagtccatcctcagtctctcctaccccttgaagtagggggaccctgaatttgcccatccacctgggtcactttgagagttgtgcaggggggctgggagcactggtgttcacgtgggaccacaggctgcaccataagacccactcacaataaaaaaataaaaggccgagccgggcatggttgctcactcccgtaataaaaaaataaaagaacatgctgggattacaggcgtgagccactgcacccggccgtgaccaacattcttaatctgtcctctagtgctggccactctaaaacttcacaagaatgtgctgtctgtgtctagcttcttttacccaacatgaggttgcatgggcttggttcattcattctgttccatgaattcatcacaatatatccattcttttgtccaggggcatttggcttccagaaacctacccctaacaccagcccttccctccctctgcagaacaaaggccccatcagaggggacgtgctgggtgtcagcgtcagcttctgggaggaggaaggtcagagctaaggcctgaaggatgatgaggtatcaggtgggtggaggggagacgctcaggaggtgggaaaggcggaggtgcacaggcttggttccaggtacaaataacgttactaggagcacacagtacctggattttgatgaatacattgtacatttctgtcctgtatgtatccagggttataggacgtgattataggacacgcatatatgtttggttttagtggactcttaaaaattgttttccaggggccgggcacagtggcttacgcctgtaatcccagcactttgggaggcctaggcgggcagatcacctgaggtcaggagttcaagatcagcctgaccaacatggagaaaccccgtctctattgggaggccgaggcgggaggatcacaaagtcaggagatcgagaccatcctggctaacacggtgaaaccccgtctctactaaaaatgcaaaaaaattggctgggcgtggtggcgggcgcctgtggtcccagctactcgggaggctgaggcaggagaatggagtgagcccgggaggcagagcttgcagtgagccaagatcgtgccactgcactccagcctggttgacagagcaagactccgtctcaaaaaag

SEQ ID NO: 145209 - DNA, 9234 bp, Homo sapiens
atgggtgccccgacgttgccccctgcctggcagccctttctcaaggaccaccgcatctctacattcaagaactggcccttcttggagggctgcgcctgcaccccggagcgggtgagactgcccggcctcctggggtcccccacgcccgccttgccctgtccctagcgaggccactgtgactgggcctcgggggtacaagccgccctcccctccccgtcctgtccccagcgaggccactgtggctgggccccttgggtccaggccggcctcccctccctgctttgtccccatcgaggcctttgtggctgggcctcggggttccgggctgccacgtccactcacgagctgtgctgtcccttgcagatggccgaggctggcttcatccactgccccactgagaacgagccagacttggcccagtgtttcttctgcttcaaggagctggaaggctgggagccagatgacgaccccatgtaagtcttctctggccagcctcgatgggctttgttttgaactgagttgtcaaaagatttgagttgcaaagacacttagtatgggagggttgctttccaccctcattgcttcttaaacagctgttgtgaacggatacctctctatatgctggtgccttggtgatgcttacaacctaattaaatctcatttgaccaaaatgccttggggtggacgtaagatgcctgatgcctttcatgttcaacagaatacatcagcagaccctgttgttgtgaactcccaggaatgtccaagtgctttttttgagattttttaaaaaacagtttaattgaaatataacctacacagcacaaaaattaccctttgaaagtgtgcacttcacactttcggaggctgaggcgggcggatcacctgaggtcaggagttcaagacctgcctggccaacttggcgaaaccccgtctctactaaaaatacaaaaattagccgggcatggtagcgcacgcccgtaatcccagctactcgggaggctaaggcaggagaatcgcttgaacctgggaggcggaggttgcagtgagccgagattgtgccaatgcactccagcctcggcgacagagcgagactccgtcataaaaataaaaaattgaaaaaaaaaaaagaaagaaagcatatacttcagtgttgttctggatttttttcttcaagatgcctagttaatgacaatgaaattctgtactcggatggtatctgtctttccacactgtaatgccatattcttttctcacctttttttctgtcggattcagttgcttccacagctttaatttttttcccctggagaatcaccccagttgtttttctttttggccagaagagagtagctgttttttttcttagtatgtttgctatggtggttatactgcatccccgtaatcactgggaaaagatcagtggtattcttcttgaaaatgaataagtgttatgatattttcagattagagttacaactggctgtctttttggactttgtgtggccatgttttcattgtaatgcagttctggtaacggtgatagtcagttatacagggagactcccctagcagaaaatgagagtgtgagctagggggtcccttggggaacccggggcaataatgcccttctctgcccttaatccttacagtgggccgggcacggtggcttacgcctgtaataccagcactttgggaggccgaggcgggcggatcacgaggtcaggagatcgagaccatcttggctaatacggtgaaaccccgtctccactaaaaatacaaaaaattagccgggcgtggtggtgggcgcctgtagtcccagctactcgggaggctgaggcaggagaatggcgtgaacccaggaggcggagcttgcagtgagccgagattgcaccactgcactccagcctgggcgacagaatgagactccgtctcaaaaaaaaaaaaaaaagaaaaaaatctttacagtggattacataacaattccagtgaaatgaaattacttcaaacagttccttgagaatgttggagggatttgacatgtaattcctttggacatataccatgtaacacttttccaactaattgctaaggaagtccagataaaatagatacattagccacacagatgtggggggagatgtccacagggagagagaaggtgctaagaggtgccatatgggaatgtggcttgggcaaagcactgatgccatcaacttcagacttgacgtcttactcctgaggcagagcagggtgtgcctgtggagggcgtggggaggtggcccgtggggagtggactgccgctttaatcccttcagctgcctttccgctgttgttttgatttttctagagaggaacataaaaagcattcgtccggttgcgctttcctttctgtcaagaagcagtttgaagaattaacccttggtgaatttttgaaactggacagagaaagagccaagaacaaaattgtatgtattgggaataagaactgctcaaaccctgttcaatgtctttagcactaaactacctagtccctcaaagggactctgtgttttcctcaggaagcattttttttttttttctgagatagagtttcactcttgttgcccaggctggagtgcaatggtgcaatcttggctcactgcaacctctgcctctcgggttcaagtgattctcctgcctcagcctcccaagtaactgggattacagggaagtgccaccacacccagctaatttttgtatttttagtagagatggggtttcaccacattgcccaggctggtcttgaactcctgacctcgtgattcgcccaccttggcctcccaaagtgctgggattacaggcgtgaaccaccacgcctggcttttttttttttgttctgagacacagtttcactctgttacccaggctggagtagggtggcctgatctcggatcactgcaacctccgcctcctgggctcaagtgatttgcctgcttcagcctcccaagtagccgagattacaggcatgtgccaccacacccaggtaatttttgtatttttggtagagacgaggtttcaccatgttggccaggctggttttgaactcctgacctcaggtgatccacccgcctcagcctcccaaagtgctgagattataggtgtgagccaccacacctggcctcaggaagtatttttatttttaaatttatttatttatttgagatggagtcttgctctgtcgcccaggctagagtgcagcgacgggatctcggctcactgcaagctccgccccccaggttcaagccattctcctgcctcagcctcccgagtagctgggactacaggcgcccgccaccacacccggctaatttttttgtatttttagtagagacgggttttcaccgtgttagccaggagggtcttgatctcctgacctcgtgatctgcctgcctcggcctcccaaagtgctgggattacaggtgtgagccaccacacccggctatttttatttttttgagacagggactcactctgtcacctgggctgcagtgcagtggtacaccatagctcactgcagcctcgaactcctgagctcaagtgatcctcccacctcatcctcacaagtaattgggactacaggtgcaccccaccatgcccacctaatttatttatttatttatttatttattttcatagagatgagggttccctgtgttgtccaggctggtcttgaactcctgagctcacgggatccttttgcctgggcctcccaaagtgctgagattacaggcatgagccaccgtgcccagctaggaatcatttttaaagcccctaggatgtctgtgtgattttaaagctcctggagtgtggccggtataagtatataccggtataagtaaatcccacattttgtgtcagtatttactagaaacttagtcatttatctgaagttgaaatgtaactgggctttatttatttatttatttatttatttatttttaatttttttttttgagacgagtctcactttgtcacccaggctggagtgcagtggcacgatctcggctcactgcaacctctgcctcccggggtcaagcgattctcctgccttagcctcccgagtagctgggactacaggcacgcaccaccatgcctggctaatttttgtatttttagtagacggggtttcaccatgctggccaagctggtctcaaactcctgaccttgtgatctgcccgctttagcctcccagagtgctgggattacaggcatgagccaccatgcgtggtctttttaaaattttttgattttttttttttttgagacagagccttgctctgtcgcccaggctggagtgcagtggcacgatctcagctcactacaagctccgcctcccgggttcacgccattcttctgcctcagcctcctgagtagctgggactacaggtgcccaccaccacgcctggctaattttttttggtatttttattagagacaaggtttcatcatgttggccaggctggtctcaaactcctgacctcaagtgatctgcctgcctcggcctcccaaagcgctgagattacaggtgtgatctactgcgccaggcctgggcgtcatatattcttatttgctaagtctggcagccccacacagaataagtactgggggattccatatccttgtagcaaagccctgggtggagagtcaggagatgttgtagttctgtctctgccacttgcagactttgagtttaagccagtcgtgctcatgctttccttgctaaatagaggttagaccccctatcccatggtttctcaggttgcttttcagcttgaaaattgtattcctttgtagagatcagcgtaaaataattctgtccttatatgtggctttattttaatttgagacagagtgtcactcagtcgcccaggctggagtgtggtggtgcgatcttggctcactgcgacctccacctcccaggttcaagcgattctcgtgcctcaggctcccaagtagctgagattataggtgtgtgccaccaggcccagctaacttttgtatttttagtagagacagggttttgccatgttggctaagctggtctcgaactcctggcctcaagtgatctgcccgccttggcatcccaaagtgctgggattacaggtgtgaaccaccacacctggcctcaatatagtggcttttaagtgctaaggactgagattgtgttttgtcaggaagaggccagttgtgggtgaagcatgctgtgagagagcttgtcacctggttgaggttgtgggagctgcagcgtgggaactggaaagtgggctggggatcatctttttccaggtcaggggtcagccagcttttctgcagcgtgccatagaccatctcttagccctcgtgggtcagagtctctgttgcatattgtcttttgttgtttttcacaaccttttagaaacataaaaagcattcttagcccgtgggctggacaaaaaaaggccatgacgggctgtatggatttggcccagcaggcccttgcttgccaagccctgttttagacaaggagcagcttgtgtgcctggaaccatcatgggcacaggggaggagcagagtggatgtggaggtgtgagctggaaaccaggtcccagagcgctgagaaagacagagggtttttgcccttgcaagtagagcaactgaaatctgacaccatccagttccagaaagccctgaagtgctggtggacgctgcggggtgctccgctctagggttacagggatgaagatgcagtctggtagggggagtccactcacctgttggaagatgtgattaagaaaagtagactttcagggccgggcatggtggctcacgcctgtaatcccagcactttgggaggccgaggcgggtggatcacgaggtcaggagatcgagaccatcctggctaacatggtgaaaccccgtctttactaaaaatacaaaaaattagctgggcgtggtggcgggcgcctgtagtcccagctactcgggaggctgaggcaggagaatggcgtgaacctgggaggtggagcttgctgtgagccgagatcgcgccactgcactccagcctgggcgacagagcgagactccgtctcaaaaaaaaaaaaaaaagtaggctttcatgatgtgtgagctgaaggcgcagtaggcagaagtagaggcctcagtccctgcaggagacccctcggtctctatctcctgatagtcagacccagccacactggaaagaggggagacattacagcctgcgagaaaagtagggagatttaaaaactgcttggcttttattttgaactgttttttttgtttgtttgttttccccaattcagaatacagaatacttttatggatttgtttttattactttaattttgaaacaatataatcttttttttgttgtttttttgagacagggtcttactctgtcacccaggctgagtgcagtggtgtgatcttggctcacctcagcctcgaccccctgggctcaaatgattctcccacctcagcttcccaagtagctgggaccacaggtgcgtgtgttgcgctatacaaatcctgaagacaaggatgctgttgctggtgatgctggggattcccaagatcccagatttgatggcaggatgcccctgtctgctgccttgccagggtgccaggagggcgctgctgtggaagctgaggcccggccatccagggcgatgcattgggcgctgattcttgttcctgctgctgcctcggtgcttagcttttgaaacaatgaaataaattagaaccagtgtgaaaatcgatcagggaataaatttaatgtggaaataaactgaacaacttagttcttcataagagtttacttggtaaatacttgtgatgaggacaaaacgaagcactagaaggagaggcgagttgtagacctgggtggcaggagtgttttgtttgttttctttggcagggtcttgctctgttgctcaggctggagtacagtggcacaatcacagctcactatagcctcgacctcctggactcaagcaatcctcctgcctcagcctcccagtagctgggactacaggcgcatgccaccatgcctggctaattttaaatttttttttttctcttttttgagatggaatctcactctgtcgcccaggctggagtgcagtggcgtgatctcggctgacggcaagctccgcctcccaggttcactccattcgcctgcctcagcctcccaagtagctgggactacaggcgctgggattacaaacccaaacccaaagtgctgggattacaggcgtgagccactgcacccggcctgttttgtctttcaatagcaagagttgtgtttgcttcgcccctacctttagtggaaaaatgtataaaatggagatattgacctccacattggggtggttaaattatagcatgtatgcaaaggagcttcgctaatttaaggcttttttgaaagagaagaaactgaataatccatgtgtgtatatatattttaaaagccatggtcatctttccatatcagtaaagctgaggctccctgggactgcagagttgtccatcacagtccattataagtgcgctgctgggccaggtgcagtggcttgtgcctgaatcccagcactttgggaggccaaggcaggaggattcattgagcccaggagttttgaggcgagcctgggcaatgtggccagacctcatctcttcaaaaaatacacaaaaaattagccaggcatggtggcacgtgcctgtagtctcagctactcaggaggctgaggtgggaggatcactttgagccttgcaggtcaaagctgcagtaagccatgatcttgccactgcattccagcctggatgacagagcgagaccctgtctctaaaaaaaaaaaaaaccaaacggtgcactgttttcttttttcttatcaatttattatttttaaattaaattttcttttaataatttataaattataaatttatattaaaaaatgacaaatttttattacttatacatgaggtaaaacttaggatatataaagtacatattgaaaagtaattttttggctggcacagtggctcacacctgtaatcccagcactttgggaggccgtggcgggcagatcacatgagatcatgagttcgagaccaacctgaccaacatggagagaccccatctctactaaaaatacaaaattagccggggtggtggcgcatgcctgtaatcccagctactcgggaggctgaggcaggagaatctcttgaacccgggaggcagaggttgcggtgagccaagatcgtgcctttgcacaccagcctaggcaacaagagcgaaagtccgtctcaaaaaaaaagtaattttttttaagttaacctctgtcagcaaacaaatttaacccaataaaggtctttgttttttaatgtagtagaggagttagggtttataaaaaatatggtagggaagggggtccctggatttgctaatgtgattgtcatttgccccttaggagagagctctgttagcagaatgaaaaaattggaagccagattcagggagggactggaagcaaaagaatttctgttcgaggaagagcctgatgtttgccagggtctgtttaactggacatgaagaggaaggctctggactttcctccaggagtttcaggagaaaggtagggcagtggttaagagcagagctctgcctagactagctggggtgcctagactagctggggtgcccagactagctggggtgcctagactagctgggtactttgagtggctccttcagcctggacctcggtttcctcacctgtatagtagagatatgggagcacccagcgcaggatcactgtgaacataaatcagttaatggaggaagcaggtagagtggtgctgggtgcataccaagcactccgtcagtgtttcctgttattcgatgattaggaggcagcttaaactagagggagttgagctgaatcaggatgtttgtcccaggtagctgggaatctgcctagcccagtgcccagtttatttaggtgctctctcagtgttccctgattgttttttcctttgtcatcttatctacaggatgtgactgggaagctctggtttcagtgtcatgtgtctattctttatttccaggcaaaggaaaccaacaataagaagaaagaatttgaggaaactgcgaagaaagtgcgccgtgccatcgagcagctggctgccatggattga

SEQ ID NO: 145210 - DNA, 3943 bp, Homo sapiens
tgcagatgtgaagtcaggctttattgaagtatttacacagctcattcccgccacgtggaggagtctgcgacattccacacacaatgacagttaaagacacctgttgaccactgggtcctgcttcccctgctcaccaggcatctgtcaggatacagccggccctctaccaggagaaaccagtcagctccgctgaacagtggcacatgtgcggttgaggggagattgtcccctgagcacacctgatgactgatgactgcccacacccaaccaccgaccatcaacaaccagtgcctggtaaccacctgacatgtccactcacgcccacttcctcagcgtcccctctgggtcacagctcagtgtcggcacctggccactgacccaacaccttcagttaccacaaatctttgtttcctcaaaaacctgagagtaggtgggggatgctcccttttgtcctttgaaagctgggcaaggctgggggtgggtctgtccaaaccctacaggggaggaacagccgaggggccgcactgaacctggggtctgcagcgtccacctgcctccctctcgctccacatgctcagccgtcctttcctgggcacctggcctgggccgtttactccccagtatccgtctgtgatggatcctctgcggcccccagaaatggtgggttgttctgtagatccaaccgcctcacctgtctccccaaaccaacctcgggttcattctcccagaagtccagggatgagcttgttgcagcagaggggtgtggccggcgtggcccagggtgtgcaggacagggtgcggacctttggggattgaggggtctctggacactgctgctttgctgtcctaacagcccctctgtccggcctcattttaccggggatatgggttttgcaaaccaaggtgacactgacaggatgtgtgagcttccctgtggctgcctcccggcacagctgtcccgacctttgacatcgcgccccagctggggtctgtgatgccaccaatgcacaggaacaagacattcatttttaaaggaaaagtggagtcaaatgtgctcagaacaactgagtcccacagtcggggcacctgggccagggctgggcagcttgctgaggtccatcgagcgctgtgggggccagggcttggcacacacatggagactgtgccctgatatccccacccttctgcagccagctcagcaacgtccccagacaccctccccacatctgcaaaccacccttcgcctgaaggagcagccgctagggctgctgagcgccagctctggggaggagggcttgaaacagttttatatgttgttaaaataattcttatcctaagattatttttgttaaaaagagaataggtttccggttcccactcagctgtatcccgcaccccacgtaaccccatcaccaggggcccgcaggcctggccgcagctggcctggggctgagcgtcaggctctgcggctcccacagggcggcaggtgacctcctgaggcagagccagagctgctgagggtcccacggaacacctgtgtggagaggtcccctccttcatgaccttgctctcctgatctggttgtctcctcagcccgccttccgtggggaggcaaaacagccctgtggagttgggtggggcagggctcagccgggccgggtgggcgccccaagagagaggacgggctgccctcctgttgatttctcctggtcctaacgtccgggggggccctgactggcttccctctgtcctgcagatgagggggctacccttatgggacctgggaggccgccctgatgtgggacggatgtcacccggtggtcgcccaggctcgtgctgggccacacaactgcgtttccacatttcctccttggctcccctattctcttgggccgggcgcagtggctcacgccttaatcccagcactttgggaggccgaggcgggcccatcacgaggtcaggagatcgagaccatcctggctaacatggtgaaaccctgtctctactaaaaatacaaaaaattagccaggcgtgttggcgggcgcctgtagtcccagctatgggaggctgaggcaggagaatggcgtgaacccgggaggcggagcttgcagggagcagagatcaggccactgcactccagcctgggcgacagagcaagactccgtctcaaaaaaaaaaaaaaaaaaaagtggatccactatacggctgaaacacattttgcacaagattatctaaatgctggagtttaaatcgagtcaatgacaacacgactccaattccaggtatggggtttagtggacaaccagcttgacggagtcaggaccgcgctgacctgcccgacacggtgctcgggcatctggaaggaggaagccggcgtctcagccccgcagaagccccgaaccgtgggcctcccgccgcgtccgacaggcaggggtggggctagatgaccgaggtctccgtttgcaggaaggactgggcgcgggagccgcggtggaactgcagggcgccctccgagccgttgcgggagaaggaggaaccgcagaccctgtaatcccggctcgcggacggggtcgggcaccggcttcgccattttcgcttcagctcgcactgcacctcactgttcaggaaacagtagaggacggccaccaccaggccctggaacgacccgaggcacagctcaaacagtatctggtatttggaggagatgctgatgggaaacacggcaaacaccatgtagtggacgccgaacagcgggataagcaggagcgtggacttggccagcctcttgtactgagactggtcgttgccgccgacatctggggatgttaacttctgcagcaaaattcgtataatactaatgaaaaggacaaaattgacgatgatggaaattaaaatcggtattcgtatgacccaccagggcacactgtggtcgtttgtatcccagcaaccggtgtcttctaagtagagcctggccgcagtccatgcaccgatgcagacggtggggaggccccatccgatcaggaggtaggccaggaagcaccttctaggggggagcatggccaccaggagggtgtggaggtagagcccctccaccagcagccagaagaagttggccatgatgcagtactgcaggaagaccaggctcagcttgcagcccacccaggaggatggctggtcagggcagtgcaacgtgccagagctggagtagagaacgtcgtccttgaccagcactgagatggctctcaggatgaaggacaggaacaggttcaggtggatgtaattcctggtgcagtgcagcttcctgaagaggcacagaattatgcttcctgttgcaagagacatcagagagacactgtagcccagggtataaatggccttcaccagaatataaaacgtgatcttgctctcatcctccgggtcgctgtagccacaggcatcgacgaaatctgggaacgtctctgaccatccgtcactcgtacagtttttgcttatgtttcctgctttgctgtaaaaattgctgaagacttttgggcagggcaccgtgacggtctctcccacattggcaggccgccagcacgtgatgttgtcccagacgccactgcaggctttgtgtttttctgtttgagacctcagaagctctgcacattttgtttcttcctcctgtatttccagatgaaatcggcattctgggtgaatgctgttcacgggggcgagcagccagcaggtcagcagcgcgggaggcagcagcgtccgcatcccgagctcagcgtgccgggggccgcccagcgcccgccgcctccgtcctaggtccccgcggttccgccgcctccagcatgggccgggagcgagtgcgcggagacctcgggccccgcagctgtagccgagcgccccgagcgcgggggccgccccctccgtcccggcagctggagcgcgctcaatgcac

SEQ ID NO: 145211 - DNA, 454 bp, Homo sapiens
ttcacacatataattgccgccttcttccctcctcttttttcccccctagttgaatcagcttgtctaacaagcccattttcatgccccagctgtgctgtgggttttccaagcctcatatttgaatattcaatgagtttaagatggatatgatttcaaaaaatagggccgggcgcggtggctcacgcctgtaatcccagcactttgggaggccgaagcaggcggatcacgaggtcaggaggtcgagatcatcctggctaacacagtgaaaccccatctctactaaaaatacaaaacattagccgggcgtggtggtgggtgcctgtagtcccagctactctggaggctgaggcaggagaatggcgtgaacccgggaggcggagcttgcagtgagccgagatcgcgccactgcactccagcctgggtgacagagcgagactccgtctcaaaaaaaaaa

SEQ ID NO: 145212 - DNA, 1647 bp, Homo sapiens
gtagtagcatgcttacgcctttcctggcacgaggtccaacattcatccagaatctgttaccccttgggtagtttgatggaactgagttaagcagaagaccccagctgttttctgggtaagccaggctttgctgtatctggcagtcaggagagaggtcagcccatggtggaggtcttcagtgccgagggctcggatgagaacgtgtagttctttgacttggacctgggcagcgtcttctatggatgcctgccttgtgagcacccacaccttccctccccactgtcgggttgagtagccccagcgtggctgtgttgggagtcctttgcccaacattgtgctgcactggagcctggccctggcactgtcctcaggaccctgcccaagggcccaccgcagagcacacctatgctatggggagccctgctggcagccccgagagccatgccatggcctgcaggagccaggctcctgtgtggatgaagtccctcttcctctgtgccttgatcccttgggggtgcctttggtcatctctttctgtcctttcctgtctctgaaatagtcatcactccccttgactctctctgttcacgtcttctcagtctgcagagttaacttctgtaaggagtttaatctggggttccaagaaaacaagttccttgttaacatagcactgactttgcaacaatagaaaactaacaaatgagcaacaattttaaagagtagaggtaggttctcattgggtgtaacttcaacccattctgcttgtggttagaatttataattttgctaacgatgtaatttactaaggtttgaaatggtattctaacagtgagtccattgtcttgaggaataatctgatttataagtaatactgatagacatattttcgtacatctgagcagaaataaatgcatgtttctagcatatgtaatataaaaactccagaggataagtttacacttaacaagatgttgttttctatttttgaatttcttattatttccccctttttggtagtggagttgagagggggagcatactatttgtataaagaactgtcaccccagagtgacatttattttccaagatgaccctgaactcatgctgttggtttcatatggtgtttgtgtgctttgcctagattcaaggcctgaggatttgaggaaaatcgggattttttttttcctatttggttttcatgtaaaagttctaaatgtcacttattttgctaaataagaccctttcacaggatagtgtgcgcaatacctgtccgtgtttccaagcagagttcaagttcatgtcttcacaagtagatgagagtcacttccagtcgggggaagcccgcctgagcagtgttttgagagtgcgtacattggaggactgccccacgtccgtttgcactctgccttgcaaaacttactgtggagacgtgccccagactggtctcagaccagagtttgtggcacaggaaaacctggccccctaaaaagaagttttggaattggaagcctgataatttcgggaggctgaggcaggagaacggcgtgaacccgggaggcggagcttgcagtgagccgagatcgcaccactgcaccccagcctgggtgacagagcaagactccgtctccaaaaaaaaaaaaaaaaaaa

SEQ ID NO: 145213 - DNA, 17889 bp, Homo sapiens
  misc_feature (1)...(17889): n = a,t,c or g
cagcccgttaaatttcaaaaaattaaattgaaccagagtcccctggccccgttgaaggaaaaataaataaaaatgtgttagtgccaagtagtaatttttggcattaggggattgatacaattttgcccttaaatcagaattgaagtttaaaaaccaggccatagtttcccttaataaattttttttttttttttttttaagatggagtcttgctctgtcgcccaggctggagtgcagtggtgcaatctcggctcactgcaagctctgcctcccaggttcatgccattctcctgcctcagcctcccgagtagctgggactccaggcacccaccaccatgcctggctaatttttttctgtatttttagtagagatggggtttcaccatgttagccaggatggtcttgatctcctgacctcatgatccgcccgcctcggcctcccaaagtgctgggattacaggcgtgagccaccacacccagcctcttccctcctatcattttcgtgttctggagacagtagcatacttggccctgggtttgacataaaactagttctacatatagaaagctagggacaaaaatgagttctggacaaaactaaaggactgaataatcatgtgaacagccaactctcctacatatgctaagcactgatgaagtgtttcatatattcactcacctaaatttcacaacaatcctatgaaatgctaactagcatgatccccagtttaaaggtgaggaaattgagtcacaggcagaataacttgctctgggtcaccaagctaataaatagatctgggttcaaacccaggcagcctggctccggaatcaactcttaaccacttagagcatcatcactgagatcgggagagggacaggctgctgtaaagagggtgaagcgaaaatgggaggagagcagcggttaagcaatgatgtgatggggctaaataaaaatggatacaaaaacgagtaaaagaccagagtaaaaggaaaagactggagaaggggcctaacattaaaagagaatgaggagaagggagagttgacaagcaaaggtgaaagcagaaagtcagttgtccatatggcttggggagataaagaaggcccaggaaggcctccaggaaaaggctgccatgtcaggcaggacacagaggacaattgaggaaaagtgattcttacaagatggtgaaggtgccattgtgggtgttgggctctggcacaggcacttggcggagcctctgctctgggttgagatcaatacatgacaacatctcatctccgcaggtacagagctcacatatgttggtgcttgtggaggccttgtgttcctctggtgcagttaaagccttattttgggtgtaactttcagactgcaccagtgaatcctgagcaggttctagttcagtaggtggacctgtgacttcagtcaggcttcgatgcagagtctgaacccggtctggacgaggagctgtagtcttctccagggctgtagaatgtccagtctctgtagtgggttctggaatgatggcaagtcccaggtctggaggctgagttgaggtctcctccgtggttggagacggtttaacctctgtagtaggttttgtagttatggtaagctccaggtccagaggttgaacggtggcttgagtcaggtgtgaatgctgagcctgacccttgtctgaaggtggaagtgtcacctcagggtgtcctggaggaggagctgtagtcatcagggctgtagaaggttcaacctctgtcatggattttggagtgatggtaaaccccaggtccaaaggttgaactgtggctcgagtcaggtgtgaatgctgagtctgaacctggtctggatgtggaagtgtcacctcaggatgctttggagaaactatagtcctcttcggggctgtagaatgtccaacctccgtagtgggttctggagtgatggtaagtcccaggtccaaaagttgaactgtaacgctgggtgacactggatgctgagcttgatcctgacctggtgttggatttgttaccccttgatatactcgaagttggggtacaactttcttaggaggctgagttggggtctccttcatggttggagaaagttcaacctctgtcatggattctggagtgatggtaaaccccagatccaaaggttgaactgtggcttgagtcaggtgtgaatgctctggaggttgagctacaactacattagggaactctggagtctgagctggggcctcctgatgggttagggaagactcaccctcctcagcggtctgtggatgctcagctgcagcctcctgctgggttggagaggggttctcattattaataggttccggagattgaaatgaagtctcctgttgaactgctaaaggtccagcttcttctgatgactctgaaagcagaggtgggcccccgtgctggatggcgggaggttctatatcattacctgaccctgagagccgagttgtagcctcctgctggactagagaagttcccacctctgcactaggctctgctgctatggtgagctgcacgtctggaggcttcacagagacactgggtgaatctaaatgatgagtttgatggtgacctggaggtgaaactgtgacttcatgatgttctggaggctgacctggggtctcctgctgggtcggagaagattcgacctccctagaagtctcagaaggctgaactggctgctgctgctcactgatggaaagttcatgctccataggaggaactggaggctcaattggggcctcctgttgggttgcagaaggttccacctcctctggaaactgaattggggtctcctgctgagcttgggaagattctgtctcattggtagcctctgaagttatggtaacctccacatctgcaggtttaactgtaatgttgggcaagtgataataagcttgatcctcacctggaggttgaactgacacctcatgattcggtagagttagactctccatagaggactctggaggcagagctggggcctcctgctgcattgaagaaggttcttcctcaaggagctgtggaagctgtgctggggcttcttgctggagtgaagaggactggatgtcttcaagggtctctggattttgagtttcgggctctagatggaattgagaaggtccaacttgctcagagggccctggaggctcatctgacttcacccggagttctggaggcaggctaccgggatacggtgtatctgtactggaatattcattctgcaaagtctgtttctgactctgaggtgtggataattggcgtataattccaataatctcagcaaggctccaacgctgagctggatctttcttcagcttcttgggcgaaacagggagcctttcctgtggactcagcttgtcctttaaatcctgctgtgaagccaagaactgctctggctccaggggcagctctccagctgaatcccaggtgtccaggaatggaaccaaattttcagtcgattcctggggtggggctggcatctctgaggaagcagagggccccaggtgatcaaagtcccacgggtctgctgggagagtaggcgcatggggagattcccgtgggaaatgggaggagtgggaagaccagggctcaggcggccccagggggttagaggtcagctggagcgggtccttgacccactccagaggctgagcctccttgactagtagccacaatagttgccacataaggaggggccatgggccccagaaacgcagcggggacatgacacacgctagtgccgggcactgagcggaagtcattctggcagctccgagacgctcgtgccccttgtaagcatgagtcccgccctgtctttatgacacctttatttatgccacagaactgctccatgtcaccagggcactcatgtcacaatcccgcccaagcacgccttcccatcctgccctgccggagcacccctctcctccccttagtgaggaaggatttgggcctcagatcctggtggtcccaggactccagcgcctgctgtggtggggtagggtggggtagggtgggatgggggcgcggcagagcttcccaaggaagtcaccggacctcgcctcaggatattcagaagtgctagttcagttctggcagccttcctcctttaaggtgaaatccgagaacactcttccttccagggagagcaactgacctgcaaaatgggcgccaggatgtacattacagtcatttattccaaagtgttgccattttcgctaaactgtcgcatgtttgataattaattcaccaccctattaggtaggggctgccagggaataagcgaggactccaaattttctgtaggaggggtgttgggagttggcaattcggtctgggagagaaggttttaatccgagtgaagagccctttgcactagcctgggaggaggctgaactgtcatcctgccttgactcaacacagccattcccctagaagttacagcacttctagggtcacctgtgttcagagatctaccctgtgtgcacacatggagaagaggcttaggttgttaaagtcagcatgttaaatcatttcctgaaatgcgactgtaactagaacccagctgacttcccccacagccgttcttacctattttattactgtctggcataattaccagcatgtaaactccaagaaggtgcttcatcttattttagtgcctggcatagacatagggtgcatagtgatggctttaaaattgaaggggggccgggtgcggtggctcacgcctgtaatcccagcactttgggaggccgaggcgggtggatcacctgaggtcaggagatcgagaccatcagatcgagacccgaaaccatccctggctaacacgggtgaaacccctgtctctactaaaaaaatacaaaaaaaaaattagccgggtgtgtggtggcaggcgccctgtaatcccagctactcgggaggctgaggcaggagaatggcgtgaacccgggaggcggacgttgcatgtgagccgagatcacaacactgcacttcagcctgggcaacaagagagaaactccatctcaaaaaaaaaaaaaaaaaaaaaatcccctacaggtgttttaagacataaatgtgggaggaaaacagtagggaaagatttctgaaataagatttttttaaaaagcataaaccatcttctggccacatagtatgtattagcctcagggggcaggaaggcaccagctgctgtgtgggtaggaggccaaggccaaggcttagctagagggaagacctgggccctctgcacctatatcaggggaactggtgtgatccttgtgctctcatcaaagacaaaatataaaagtacataacaagacactaaaatagattaaagaacttagcaatttagcctatgacttccaacactatattttacaggtagttagcaatgtttcattggcaagccacaattatggaatcgaataatagcccatgttaaggtggtgtattcttttcagcaattcattttcctacagactaccccttcagaaccctaaggttgcatccacaagaacttattatctactactcagcaggctgaggcaggaggattgtttgtgcccaggagtttgagcctttagtgtactgtgatcatgctgtgaatagccactctactccagcctgtgcaagatagtgagataccctctaaaaaaatacattatctaacattatctaaatattaacagcaatagcagcatttgatatgccattttaagattacagtggtctactgccttgatatttttcaagatgcctttgtttctgccatgtgctccaaatccctgatgcctcctggtgccaaaaattacacagaattacaagtgaaacagaatatcttggaaattgactcaaaaagatattatgtgatgatactttaaagtcagaataacctggcattatgctgggaacaaacttataataccatcccctttaaaatgtttatctggccgccctatcagatctcttccttttttatctttttatttttttgaaacagagtctctgttacccaggctggagtgcagtggcgcgatctcggctcactgcaagctccgcctcccgggttcacgccattctcctgcctcagcctcccgagtagctgggactacaggcgcccgctaccacgcccggctaattttttgtatttttagtagagatggggtttcaccatgttatcccagctggtctcaaactcctgacctcaagtgatctgcctgcctcagcctcccaaactactgggattataggtgtgagccaccgtacctggccacatctcttcttttttaaattttattttttcttacctttctccattcataaacgaataaaacacattacaaaaattgcaaagggaaaattaatccttttactaattttactatattaaaattaactttttttttttttgaaacgcagtcttgctcagttgcccaggctggagtgcagtggtgcaatctcggctcactgcaagctccacctcccgggttcacgccattctcctgcctcagcctcccgagtagctggaactacaggcacctgccaccacgcccagctaatttttttgtatttttagtagaaacagggtttcacccatgttagccaggatggtcttcatctcctgaccttgtgatccacccatctcagcctcccaaagtgctgggattacaagcgtgagccaccgcgccaggcctattaaaattaacttttctagattgaaagacatcgtgagaagaatggaaagacagacctcaacttttaaatacatagtattgtatccaaatattctctttaaacttttaagaatcgctaagaaagagaaaaaacaatccaattaaaaatgagtaaggggtggggcatggtggctcacacttttaatcccagcattttgggaggccgaggcgggcggaccacctgaggtcaggagatcgagaccatcctgactaacacggtgaaaccccgtctctactaaaaatacaaaaaaattagccgggcgtggttgcgggtgcctataatcccagctattcaggaggctgaggcaggagaattgcttgaatccaggaggtggaggttgcagtgagccaagatcgcgccactgcactcaagcctaggtgacaaaagcaaaacttccatttcaaaaaaaaaaaaaaagggtaggccaggcatggtggcttacatctataatcccagcactttgggaggtgggaggattgcttgagcccaggagtttgagactagccttggcaacatagcgagacaatgtctctaccaaaaaaaacggttgttgtttttggggacagggtctcactctgtcacccaggctagagagcagtgacatgatcacagttcacagcagccttgaactcccaggctcaagttgtcctcccaaccagcttccggagtagctagaactatgcacgccatcatacctggctacttttaaaaattttttctgtagagatgaggtcttgctatgttgtatcaggccgacctccaattcctgggctcaagcgatcctdunangruccccacctcagcctcccaaagtgctgggattacaggcatgagccaccatgcctagcttttacaaaaaaaaaatttcaaaggttttttgaaattggtgggcatgatggcatgcacctatatcctagctatttgggaggctgaggcgagaggattgcttgagcccggaagtggaggctgcagtgagctatgactgtatcaccacactccagccttgggcaacagagtaagaccctatttcaaaaaaataaaaagaaaaacaaatgagcaagagataaaaacagttaattcactgaagaagaaatgcaaatggccagataaacatactgataaaaaggtgattgaaggggatttcttacacattgcaggtataaatttttccaaatattttggcaaacaatttgacattgtgtagtaaagttgaagacagacataccctaagacccagacaattcagttccaaggcattatatcctagtaagaaattcttgcacatgtgcatgggagatatacctaggaatgtttgcagaagataaacatccctggtagatacatcttacattgttacatactagtggtatgaattatactgtcttatctccttaagtgtccatttcctcacctatacattcaagataagtctacctaacagagttgttatgagattaaatgaaaaaaagaaaaagaaaaaatgcactaaggacacggcttagaacacagtagccatcatttttattctcaaacttgctgtccctgtttcagaggtttctgttgtgaaggccctacattatattgtctatcagacccagccctatgtgtataaaaaacccctcaggttgcctccctttcagatatgatttccttcctatgactagaggatcatgcaggaggaactgagttaatcccttatctcttatatgaagcaacttgttttttctctcattttatagatgttagcatgtaaacttacataatttgctgaaatgttctgaaaactcacactgagatcatataaaataaagccacacaatttgtgaaaatagcatggtgggtttgtgggtttgttgtgggagtgaggaattgagcagagggttatagaacccagctcggaagtctatggggtaggtagcctagcctctgttttctctccatggcagagatgcaaataggagctatagtagcttaagctccctaaattcccccagattgtggaaatcttcttggccttctgtgggaaattattccatcaagaaagcaggataggataacagaaaacagtatttctggaattgtttccagtacaaaacatcatgctggggaaggaggagccaacagagctgtataattgtgtggagcaatctcacctgtcccacatatgggtaggcatcttcagagtcaataccccggttcttctgcacatattggaaggcattggtcatgtagccccctccacagccatcattctcagacacacaatccactaggttctggggactcagatttaagagtttgccagttttcttcttgagttggccctccagggcacccacagagctaaaagcccaacaggaaccacactgaccctgaaagggatacagagaaactatgaatctttggtgtttacatttctatatcttctctctacccggctgaaggaaattccatgtgttcttaaaaatttcagcacaaatgttgtcattgttgtgagtcttcctcttccgcttaatatctgttgcactgttctactgctattgatttttgctaccatttttactattagctacagtaaagcagagcacagtaccagctgtggaggcatttgtcctgggagctaaccctgactttgccacccagtagctatgtgaccccgggtaagttactaaatttgcctgtgtctcagtttctctatgcataaaatattgttataagggattaaatatttaaactcatgtaaagagttaagaagttcctgacaaacaataaaatctcaaaaagtattagctattattgtttgtgcagctagattgtagatttttctttctttcctgttctatttttttagattgagatttcctgaggacacaggttgtgtcttagtcatcttgagtctctgctgcctaacactgcatctggtaggttctgggggtcaaaaagtgtttgttaaatgaacgttaaatcaattgtttatcttgctgatacaatcctgtgttgtttgggttgtgaaaaaactgacattctcatgctagtaagaatgtaagattgcaaaaacttttttgggctgggcatggtggctcatgtctgtaatcctagcactttgggaggccgaagcgggcagattgcttgagcccaggaatttgagaccagcttgggtagcatggcaaaaccctgtctctaacaaaaaattttttaaaattagctgggtgtggtggcatgtgcttctaattcccagctactagggaggctgaggttggagaatcacttgagcctgagacgttgaggctgcagtgagccatgattgcgccactggactccagcctgggtgacagagacgctgtctcaaaaaaaaaaaaaaaatttggggggggggaaaggattatttgtgacctaacaattccaattttaggacttattttgcataaatatttgtacatgtgcacaaaaacatatgcacaagggtgcttattgcaacactatttgtaataaagaaaaaccaggccgcgatggctcatgcctgtaatcccagcactttgggaagctgaggcaggaggatcacctgaggtcaggagttcgagagcagcctggccaacatggcaaaaccccttatttactaaaaatacaaaaattagccaggcgtagtggcgcgtgcctgtaatctcagctactcaggaggctgaggcaggagaatcgcttgaacccgggaggtgtaggttgcagtgagccaagattgcaccactgcactacagcctggaccttacagtgagaccctgtctcaaaaaaattaaaaaaaaaatacattgagagacagagataccaccaacatatgaaacacccatggagcactaagattcagtatgtatgtatggatggatgacacagatcagtagagaaacagataatacaaacattgtgtatgtttgtattcacacacacatattgaggccagctatgggggaggggtgagagagagagtggctcaaaaagaactagaacaagggatacacaaaaagatagaataaaaactcagtgtcataaatatgtcagtggcagaaccggagagagtaatcaagagaaaaagcatgtagcagaaaaagaaactgtacatcaaaaatgaaagcacccaagccaggagatccaggcggtagtgacttattgactacttacctccctggagaagcagcaagaccactactcctgcaatagatgggtggaaagagaaatctgttgagccaaacctggttctgctgtcccagataatggcagtgaaaatgtgggtgtgctcacatacaagatagagccacacttcatctgggctccccagccacagctgctgtggtttctttttttttttttttttttgagacggagtctcaactctgtcgcccaggctggagtgcagtgggcgctatctcggctcactgcaagctccgcctcccgggttcacgtcattttcctgcctcagcctctccgagtagctgggagtacagatgcatgccgccacgcctggctaatttttttttttttgtattttttagtagagacggggtttcaccgtgttagccaggatggtctcgatttcctgacctcgtgatccacccgcctcggccttcaaaagtgctaggattacaggtgtgagccaccgcgcctggcctatacgcttttttctgttaaaaaatatttttaagtttttaaacttttgttaaaaattgagacagaagcaaacacattacttactaggcctacacagagccaggattatcagtatcaatcccttccgcctccacatcatgtcccactggaaggtcttcggggcagtaacggacatggagctgttatctcctaacatgccttcttctggaatacctcctgaaagacctgcctgaggctatttaacagttaactttttttttatatgtaagtaggagtactctaaaataacaatataaaatgtagtacaataaaataaataagccagtaacgtagttgtttattatcaagtatgtactgtacataattgtatatgctagacttttatacagctggcagcacagtaggtttatttataccagcacctccacaaacatgtgagtaatgctttgcacttgaccttctgtcagctatgacatccctaggttgcaggatttttcagcttcattataatcttatgggaccatcttcatatgtgagtggtctcttgacccaaacattgttatgtagcacatgactgtaaattttggaatcaccttgtcagtatttacaaaatagctttctgagatttagtggcaggatctcagctcactcctacctgcacctcccaggttcacgccattctcctgcctcagcctcccgagtagctgggactacaggcgcccgccaatacacccagctaattttttgtatttttagtagagacagggttttgccacattggccaggctggtctcaaactcctggcctcatgtgatctgcccgcctcagcctcccccagagtgctgggattacaggtatgagccactgcgcctggccaaaattgcctaaatttttaaaatcctaaattggtgttgaattttgtcaaatgctttcctgcattgattttgatgatcacttgatttttctccattcttttgttaatgtgctaaattatgttgcttaatttttgaatgaaaaaataatcttacattcctgaaataatttcggtttggttgtgatgttttattcattctatttcgtgctgaattcagtttgctaatattttgtttaggaattttgcatctatgttcatgagacagatcggcctgtaattttacttttttgtaatgtccttgtcaggtttaggcctcaaagttatgttgactttataaaatgaactgtgaagtatttcctcttttttatgctttagtttgagtaagattgattttttttaaaacttatgtcgtccttaaatatttattagaattcactagggaagttatcttggcctgttactttctttcttgagtaaattttgttttcattctttttttatagttaagtatattgagttagaatgcatacacaaacaaatgcacacaacttaaagtccagttctatgaattttgactaatgtataaacctgtttaacttccactgtaagcaaaatatagtgaattttcgtcaactaaaaagtccccttgtacccatttaccttcagtacctatccctaccccagccacaggcaacaaatgattttcatgtgcttatttgccatctgtatacctctttggttagttttctgtttatatcttttgcccatttatttttttttttttttgagacagagtcttgctatgttgcccaggcaggtcttgagctcctgggcttaggggatcctcccgcctcagcctcccaagtagttgggactacaggcacacactactactcttggtttgcctatttttaaatcaggttgtttgttttcttattattgtgttctctacactgtaggatattctacctttcctagaatttcatgtaaatggactcagacatactgttgtgtctggcctcttttgttcagtgtaatgtttttgagcttcatccttgcatgttatgtgtatcagtgattgattcaatttttattgctgcatagtattggattgtatagctataccacaatttgtttattcattctcctgttgatggaatattggttgtttccagtatttagctattattattattattttttttttttgagacggagtcttgctctgtcaccaggctggagtgcagtggtgcaatctcggctcactgcaacctccgcttcccaggttcaaacgattctcctgcctcagcctcctgagtagctgggactacaggtttgtgccaccacgcccagctaatttttatatttttagtagagacagggtttcatcatgttggccagactggcctcgaattcctgacctcaggcaatccacccgcctcggcctcccaaagtgctgggattacaggcgtgagccaccgcgcctggtcttttttgtttgttttgttctttttttagacagagtctcactctgtagcccaggctggagtgcagtggcatgatctcggctcactacaagcctgcgcccctcaggttcaagagattcttgtgccccagcctcctgagtagctggggttacaggcgtgtgccaccatgcctggctaatttttgtacttgtagtagagactgggttttgccatgttggccaggctggtcttgaactcttgacctcaagtgatcttcctgccttggcctcccaaagtgttgggattacaagcgtgagccaccacacccggccagggatgtcattttttataactagccataaactttagctttgaagtaaaactatttctagcaagtgattcttacctgatattttttgttgttcttgcccatattttaattgggttgtgttattatggttctctatgtattctagatttaagtttttgtatatggtgtgaggcaagtgtcaagtttaattttttttctacaaacatcctgttgttccagtaccttttgatgataagactgtcttttcccccattgaattatcttaacgccctcatgaaaagcaattggccatatgtatgtggatctacttttggactctcaattctgttccagtgatttatatgtccacccttatgtcaataccacattattttgattattgctgctttatagtaagtgacatcatgttgcctgaaatcacgttttccacctttattcttctgttgatggttgctttggcaattaggggtcctttgcattttcgtagacattttagaatcaacttatctattgctactaaaaatgcttgattgggattgtggtaaatctagaaactaatttaggaagaatggtcatattaacagtttcaagtttcagatccatgagcatattttcactctccattaggtcttttaaaatttatcctagcagtgttttatggtttttactgtagaggtcttacacattttgttacatttgttgctatgtgtttgaccttttttgatactagtgtaaatggaaattttttcttttatgttctagttgttcattattacactaaatcatctttgggtgactactaaacattctattgaaaatttgtgaatggcgtgaacccgggaggcagagcttgcagtgagccgagatcgcaccactgcactccagcctgggggacagagggagattctgtctcaaaaaaaaaaaaaaattttgtttagccaatcttttatcagcaaacatgtaggttgtttgctatttcagaaaaatgttttgcacgtgaaagaaagaatagcccttatgaggcacacagggtccaggacagcagagcaaaagtccctgcaggcaacccttcctgaccccatcctacagggtctctgcccaggccttcctgggcccctccgggagcactgccaggggcctgggccaactggcctggaagccttgccttttccctgtggaggcgcagaggctctggtttgtctgtcctggccccgggatcattttccagcacacagcacagtctagtccatccactctccccactccccaaattcaaggtcatcagggttctggtggcctggagatgggtacaacattctcatactcaggttcctcctgcctttcctcttcagcctgcttctggggatcctgttctggggagccacagccagagactggctcctgggctctccttgaactctcggtgccagcccccagcccccggaccgcttcctctggtctgactgccataggccctgtggccccaggaagcccagcttttggggctgagttggggctctggccgacagagccagaggcaaggccagggctgccctttttccgattcagggcctggcgcggaggcttagggatggccctcttgaccttggcttccgcctggcctttctggaagctaccaaaatggcggaagacagagcggacagggccttcggatccgcggggcttccctgccagcatgtagatcgtggtcacagggcccgagctctcctggacgctgccctcaatggcttccacgtgctcagccactgtccggctaccaagtgggggccgccggtggccagtggctgaatccccgggactggcagccgccggaaaggactcgggggcttctgcttcgtctgggcctgtggactcttcggcttcccggccctcaggacccgactgcgccccccgggagagcctcttgggctttcggagcgggctggagagctcccctgagcttcggcgactctgtggtgcaaacttggtaccttccgcgaaggagaccgatggccgcttggcccgagctaggctggaggtgcgcgggatggcgaatggcgtggaggcgtcctcagggggcgggaaagcacctgcagccaggctggcctctgacgaccctgcctgggccacagggaccatcccttcttggggtggcacacagtaggcaggaacctcatctgcctctccagactcaggatcggatgagaaggagtcatcagtggcccagccggcagagggcggctcgatgaagctgtggttgaaggggacctccgggtcgtgatgtgagactgtcacccagggtagcttgtgggagctgagggaacggcagggcagcgtggagcccaagctggtcagtgtcccccagacctgcagcttcatcctggacacggtagctccatctctcgctggcctgtccttgaggtctgatcggggggcccagcagcagcaggcacagcaggcaagacccaggaagagcagcagcagaggcacaaggctgcccacgatgagggcagtgtcccgactgccagagcctggctggcaggacccagagacagggtggcagagtccctctgggcattcacaaggaactgagcagttgtttccatggaaaccggctgggcaggaggcgttgcagctgggcccccagtagccggcactgcagacacagtcccctgtcacagtatcacaggacccctgaacacaggtggggcaggtagagccacagtcttccccaaaggtaccagtggggcaggggtcttcacacctgggccccagccagccagggtcacagcgctgacagtggccagtatctggctcacaggcctccccatgtcggcagtgagggcactgctgttcgcagctctcgccaaaggtgccaggcaggcagggctgctggcactgggtcccgttccagcccggctcgcaggactcacagctgcctgtgtctggagagcacggctcattgtgtttgcagcggccacagctgtgtgcgcactgcaccccgtggctgcctgccgggcagggcagctcgcagcgcgctccgcggaagccgggcgggcaggtgcactcgccggaggcggcgctgcagcggccccgcacacactcgcactgctgctggcattcgggaccccaccagcccggccggcaggcgcagcggccggagtcctgctcgcacggggagccgtggcagttgcagcggaagctgcagcggcgcccccaccagcccggcttgcacacgcaggcgcccgtggcctgctcgcagcgcgccgccgcggtgttgcactggcacgggcggcggcacgtggacgaccaccagccgggttcgcagtggcacacgccggtcgcggggtcgcagcgcccgtgggggccgcaggcgcacgggaactcgcagcgggctccccagcggtcggcctggcactggcacgcgcccgtggctggctcgcactggccgtgcgggtggcaggggcagctctcacggcagtcggggccccagtactggcccgggcagcgggagctgcagtgggccccaaagaatccaggcttgcatcgacagaggcccggcttcacacacacctcgtctttctggcaggcgtccggcccctcacagatggggatggtgcattcttgatccttctgcctccagcctgcgcagcactgcagctcagcagaggggctgctggccacacagacgtgctgccctttggggtccagctcggacccctgagtcccccgagtccagagcagcagcagcgggagcagcagccccagccccatggcaggcagctcggtgggagcgctcg

SEQ ID NO: 145214 - DNA, 980 bp, Homo sapiens
cggacgcgtggggttgtctttcttgataatatcttttaatatataaaagttttaaatgttaatgaaatccaatttatttttaaataaattggatgtatattgttgctcatgctgttggtatcataaataagaatttattggcaaaatcaaggtcatgaagatttatcactttttcctttatccctaggttttatagggtttgctcttacatttaggactttaatatatttttgtatctagtatgaggtagagatctaaattcgctcttaagcatgtggatattcgcctgtctctgcactatttattgcgaagagtatccttttctcattacatggtcttgacacccttgttgaaaatcagttggccatagatacatggggttatttctgtgctctcagttctattccattgatctgtatattatacttttgctagtaccacactgttttggttactgtaattttgtagtaagttttgaaatcagaaagcatagagttcttcggttttttcttctttttcaagattcctttagctacagagtttcctgcaattgaatgtgaatttgaggattttcctttccatttctgcaaaaacagccaattaggttttgataaaaattgcattgaatctgtagatcaatttgggtagaagttgccattttaaaaatatttagccttccgggccaggtggggtggctcacgcctgtaatcccagcactctgggaggctgaggtgggcagatcacctgaggtcaggagttcaagaccagcctggccaacatggtgaaaccccctctctactaaaagtacgaaacttagccaggcatgatgggggtctgcctgtaatcccagctagtctacttgggaggctgaggcaggagaatcgcttaaacccaggaagtggaggttatagtgaacaagattcgcgccattgcaccccagcctgggcaacagagcgagactccgtctcaaaaaaaaaaaa

SEQ ID NO: 145215 - DNA, 451 bp, Homo sapiens
  misc_feature (1)...(451): n = a,t,c or g
ggctcgggtggttacgcaccctggaagggaataaacattaggaccatagaggacgctctaggactaatgctcatcagaaaatgactaggagtgctggcatccctatgttcttttttcagatgggaaacattccccccaaggcaaaaacgcccctaagatgtattctggagaattgggaccaatttgaccctcagatgctaagaaagaaactacttatattcttctgcagtactgcctggccacaatatcctcttcaagggggagaaacctggcctcctaagagaagtataaattataacagcatcttacagctagacctcttttgtagaaaagaaggcaaatggagtgaagtgccatatgtgcaaactttcttttcattaagagaacactggcaattatataanaagtgtgatttatgccctacaggaagccctcagagtctacctcccta

SEQ ID NO: 145216 - DNA, 381 bp, Homo sapiens; identical to SEQ ID NO: 143609

SEQ ID NO: 145217 - DNA, 1758 bp, Homo sapiens; identical to SEQ ID NO: 140588

SEQ ID NO: 145218 - DNA, 1321 bp, Homo sapiens
  misc_feature (1)...(1321): n = a,t,c or g
tttttttttttttttttgctcttgccaggatttccagcactatgttgaataaaggtggtaaaggtgagcatttctatcttgtttcagatcttagagaacataccttattgcgggatctggccagtagcctgcaatgcaacggggctctctctttgttcccaggcggatcggcaggttgagaaataatagacacacacaagatagtgaaagctgggtccggggcgggtcactgccttctggtcctggggtgccaacaatgcactgaatataccagcatttattattaagtttggtgagagggcaggggaaggttagtgagggatttagggtcatttgattatgaggtgagatggtcacatggggatgaagtaattctttaacataacatcagtatgcagaagtacagtatacagagataagaatttacaatatagtgtgtgcatcagcaatttctaacagagccttaaaacagaaacacagtctttccataacctatgattagcaagatattaatcagcagtaacagttgcagcaaaagctggttacaaacaatcccatagaaacaggacgtgaagccagacaaccggttagaccagaaattctcagaagggagtatgccttaaccctaaagaggcctagaaaagcagtggcaagatgagggtgtttatagccctatgttatacatatggacaggtgccccaccatgtgtccatttataggctctccacaagggttgcattccattcccagagctatgaacatctgcttttctgggataggaatcttggtgatgtgaaacctccctgactgcacgtccattcataggctctccgcagagganaagcacatcacgcgctgttggctcgttctggcggtccaacctggcattgtctttacacaatcctgcatgcaattttgtatttacaataatcaggagcatttcatcttttattccgtagcaatagtttcagggggtctgcctacaatgattattgtaaaaattcaaataaaacaaaatttttatcttagaaactgaaagttcccctgtcatctgaaccttaaagacaactattgttaatatattattatttcaaaaattgtgggccagcagtggctcacgcctgtgatcccagcactttgggaagctgaggtgggcggatcacttgaggtcgggagttcgagaccggcctggccagcatggtgaaaccccgtctctactaaaaaaacaaaaattggctgggtgtggtggtgcatgcctgtggtcccggctgctcgggaggctgaggcaggagaattgcttgaacttgggaggtggaggttg

SEQ ID NO: 145219 - DNA, 853 bp, Homo sapiens
gcaagcgacttcttagatcagaactcaccaaatggaagcctagcagctgctccataaacctagccccattcttcatatcaattttgtataaatatatagaaacacacacacagcctcagacttacaaactgattatactctaaaagtttgtatgtcagttagctaaaacttcagaatacatttctccctataaagagttataaatgatggtttagttctcaggcagctacaaatgcctatttattccctaatgtacctgaacactagtaccatagaactgaaccaccatctgtatcagcgcatggggagtgtgcattctgaggtctaacccggggtgccaggaacacacacatcctccatcccagcatagagaatggggactccctgagtaatgggagttctttcatggcctctgcttggggtgggggagtcagcagcacccatttgtacatataggtcattcatacatcacattttaaattggggactgtgtgtgctggtgtgtgtgtgagttctacgtttctaccatatgtgatccagtttaatagtaactttatttattttaaaaaaaaggaaacacaattagttactgttaaactgataaagggtgtttatttttacttttagaattggtcctatgaagaagtagaaagtgagtcatgcaatagacagtgggcctagctcatcagtggctaaagttgaaaaggggttggtttcctgtatatatatgtatgtatatacacacgtacatacattcatatatatacatatatacataatgtgcttaaccactgccttttaaaactttaaattaaataaaacattggggttgattcaaaaaaaaaaaaaaaaa

SEQ ID NO: 145220 - DNA, 475 bp, Homo sapiens
ggcacgaggtcttaatgactaacacacctctaacattgcacctctagctcagatgagagagagaatgggacttcttggtactgattgtttttcccatgcctcaattggtttcttttagggagctacaaatttacgggttcactggtgattgatcttttcatccagcacaatggacagaagtctaaggaacgtccttgtggctacctttccggtcctgcttctctttacagcctatggaggtctgcagagcctgcagagcacactgtacagcgaggagggcctgggtgtcacagcgctcagcaccctctatggaggcatgctcctgtcctccatgttcctcccaccgctcctcatcgagaggctgggctgcaaggggaccatcatcctctccatgtggggctacgtggccttctccgtgggcaacttcttcgccagctgggacactttgatccccaccctcatactgctgggactt

SEQ ID NO: 145221 - DNA, 801 bp, Homo sapiens
atggctacgtggaggcgggacggccgactgacaggcggccaaaggctgctgtgcgctgggctggcggggacgctcagcctcagcctcaccgcgcccctggagctcgccaccgtgctggcccaggttggcgtcgtgcgaggccacgcccggggaccgtgggccacagggcaccgggtgtggcgggcagaggggctccgggccctgtggaaggggaacgcggtggcgtgcctgcgcctcttcccctgcagcgccgtgcagctcgccgcctaccgcaaatttgttgtgctgttcacagatgacctgggccacatttcccagtggagctccatcatggctgggagtctcgcaggcatggtttccaccattgtaacatatcctacagacctcatcaaaacccggttgatcatgcagaacatactggaaccatcgtacagggggctcctccatgctttttctactatttaccaacaggaagggttccttgccctttatcgaggggtttccctcactgttgtaggtgctctcccgttctctgctggctcccttcttgtttacatgaacctggagaaaatctggaacggaccccgagatcagttctctctcccacagaactttgctaatgtctgtctggctgctgcagtgacccagaccctctcctttccctttgagaccgtgaagagaaagatgcagaatattcaactttttctattcattggtgtctccatttcatcaaatataaaaccaagtgtgagcctgttgctttataccccagtggactttgaccccatcacagctcacaag

SEQ ID NO: 145222 - DNA, 1386 bp, Homo sapiens
acaaccatcatgactttgcatctatttgaaacttcttcttatgctctatatatgcattatttggaaggctcccatacgaggaaaaagatgatcaggattacccccaaatacccacttctagtgtatcttaccccagtttatagtgggttgttgtggtaggggtatagaatgcagatggtgtagaatgcggtgttggctggattctcccagatgaggtcactgttctagctctcaggaagagaaagcaaaactaaggttatggggaagactgggacccttacccgtcccatttagatgtcattgaacttcatctgaaacctttttcttttcttttctcttttttttgagacaaaacaaaacaacagattgtattggaaagtctcaggtcaaactgagtgaaactaggctgacgttggtttgtgcaagctttgcattgactacaagtgacccagtggctgacctcacaacgtggtatccactcagccacttcaattacctgttgctttgagatgtcatggcaatgccctttctttggtgccatgtttctattcagagcgtaaattgtacattttatcactgctagactctggtaataaaatctcgtggaatgccatcatgatacactcttgttgggaaaccttctcatagtgcaggtgttcacagggacatcagtttggagatctgaggtggtgcatggccaaaccatctcatttcccagagcagcagatagcagtagcttctcatccctcctcaggtgcacagttatgaggctacatttatctgtgattgcaacatgctgtcagtcagtgcacttctagttccattccattttatagagttggttttttaggcttcggttttctcgttttgaagaacttctttaattctcgtaattcctggggctgcaaactctgatcgactcctggggtcaatttatagctcagtggagacagaatgtaaccattttgataaagacagattctcttgcagaactcaaaggtgctaaacataattccaaaatatggaactatcttcagtaaattggctgtcaatccattccagagccccaggaccccctgggccttcactatctgccggaagcagtccactgctcctgagaaatggacatctactcctccactgtgtgggaggtaggggctctgagcctgacaggaaacagaagctgggatgaggcgattgaaacattaggaaataaatgtcctagtggaaggagccagggtctcaagtctacattctggatgctgggttcctggccaagatgatggcaaagaatggctgctgtggggttgatcatgcagaacatactggaaccatcgtacagggggctcctccatgctttttctactatttaccaacaggaagggt

SEQ ID NO: 145223 - DNA, 4019 bp, Homo sapiens
taggaagaggcactgctgagggggcgcgaggggaacggaggccagagctgcgctgacagcagccatggcgagcggcagtggagacagcgtcacccgtcggagcgtggcatcacagtttttcactcaagaggaggggccgggcatcgatggcatgaccacctcagagagggtggtggatcttctgaaccaggcggcgctgatcaccaatgactcaaagatcacagtgctcaaacaggtccaggagctgatcatcaacaaagacccacactactggacaacttcctggatgagatcatcgcattccaagcagacaagtcaatcgaagtgcgaaaatttgtcatcggcttcatcgaggaggcatgcaagcgagacattgaggtgcttgctgaacctcattgcaaacctcaacatgctcttgagggacgagaatgtgaacgtggtgaagaaggctatcctcaccatgacccagctctacaaggtggccctgcagtggatggtaaagtcacgggtcattagcgagctacaggaggcctgctgggacgtggtatctgccatggcgggggacatcatcctgctattggactctgacaatgacggcatccgcacccacgccatcaagtttgtggagggcctcattgtcaccctgtcaccccgcatggctgactcagagataccccgacgccaggagcatgatatcagcctggaccgcatccctcgtgaccacccctacatccagtacaacgtgctatgggaagagggcaaggcagccttggagcagctgcttaagttcatggtgcaccctgccatctcctccatcaacctgaccacagcgctgggctcccttgccaatatcgcccgccagagacccatgttcatgtctgaggtgatccaggcctatgaaactctgcatgccaacctgcccccgacgctggccaaatcgcaggtgagcagtgtgcgtaagaatctgaagctgcacctgttgagtgtgctgaagcacccggcttccttggagttccaggcccagatcaccaccctgctggtggacctgggcacacctcaggccgagatcgcccgcaacatgccgagcagcaaggacacccgcaagcggccccgcgatgactcggactccacactcaagaagatgaagctggagcccaacctgggggaggacgatgaggacaaagacttggagccaggcccgtcggggacctcgaaggcctcagcgcagatctccggccagtcagacacggacatcacagctgagttcctgcagcctctgctgacgcctgataatgtggctaatctggtcctcatcagcatggtgtacctacccgaggccatgccagcctccttccaggccatctacacccccgtggagtcagcaggcacggaagcccagatcaagcacctggctcggctcatggccacacagatgacagctgccggactgggaccaggtgtagagcagaccaaacagtgcaaggaggagcccaaggaggagaaggtggtgaagacagagagcgtcctgatcaagcggcgcctgtcagcccagggccaagccatctcggtggtgggttccctgagctccatgtcccccctggaggaagaggcaccgcaggccaagaggaggccagagcccattatccctgtcactcagccccggctggcaggcgctggtgggcgcaagaaaattttccgtctcagcgacgtgctgaagccccttaccgatgcccaggtggaagccatgaagctgggcgctgtgaagcggatcctgcgggctgagaaggctgtggcctgcagcggggcagcccaggtccgcataaagatcctggccagcctggtgacacagttcaactcgggcctgaaggcggaggtcctgtccttcatcctggaggatgtgcgggcccgcctggacctggccttcgcctggctctaccaggagtacaacgcctacctggccgcaggtgcctcgggctccctggacaagtatgaggactgcctcatccgcctgttgtctggcctgcaggagaaaccagaccagaaggatgggatcttcaccaaggttgtgctggaggcgccactcatcacagagagtgccctggaggtggtccgcaagtactgcgaggatgagagtcgcacctatctgggcatgtccacacttcgagacctgatcttcaagcgcccgtcccgccagttccagtacctgcatgtcctcctcgacctcagctcccatgagaaggacaaggtgcgctcccaggccctgctgttcatcaaacgcatgtatgagaaggagcagctgcgggagtatgtggagaaatttgccctcaactacctgcagctcctggtgcaccccaacccaccgtctgtgctgtttggagctgacaaggacacagaggtggcagcaccctggacggaggagacagtgaagcagtgtctgtacctctacctggccctcctgcctcagaaccacaagctgatccacgaactggcggccgtgtacactgaagccatcgccgacatcaagcggacggtgctgagggtcattgagcagccgatccgaggaatgggcatgaactccccggagctgctcctgctggtggaaaattgtcccaagggagcagagacactggtcacgagatgtctgcacagcctcacagacaaagtcccaccctccccagagctggtgaagcgggtccgggatctctaccacaagcgactgccagacgtccgcttcctcatcccggtgctcaatgggctggagaagaaagaggtgatccaggccctgcctaaactcatcaaactcaaccccatcgtggtgaaggaagtcttcaaccgcctgctgggcacccagcatggtgagggaaactcagccttgtccccgctgaaccctggagagctcctgatcgcattacacaacattgactccgtgaagtgcgacatgaaatccatcatcaaagccaccaacctgtgctttgcggagcggaacgtgtacacgtcagaggtgctggccgtggtgatgcagcagctgatggagcagagccccctgcccatgctgctcatgaggaccgtcatccagtccctgaccatgtacccccgcctggggggcttcgtcatgaacatcctgtcccgcctcatcatgaagcaggtgtggaagtaccccaaggtgtgggagggcttcatcaagtgctgccagcgcacaaagccccagagcttccaggtcatcctgcagctgccgccccagcagctgggagccgtctttgacaagtgcccagagctccgggagcccctgctggcccatgtccgctccttcaccccccaccagcaagctcacatccctaactccatcatgaccatcttggaggccagcggcaagcaggagccagaggccaaggaggcgcctgcggggcccttggaggaggatgatctggagcccctgaccttggccccggccccagcaccccggccccctcaggacctcatcggcctgcgactggcccaggagaaggccttaaagcggcagctggaggaggaacagaagctgaagccgggaggagtgggagccccctcctcttcctccccctctccctctccgtcggcccggccaggcccgcccccgtctgaggaagccatggatttccgggaggaggggcctgagtgcgagaccccgggcatcttcatcagcatggatgacgactcggggctgaccgaggccgcgctgttggactctagtctcgagggccccctacccaaggagacggcagcgggcgggctgaccttgaaggaggagcggagcccccagaccctcgcacctgttggagaagatgctatgaagactcccagcccggctgccgaggacgccagggaacccgaggccaaggggaacagctgacggggctcgagggggaaagggggtgggacagggactcggggctgggggacggggcggggcttgacctgcgggtgctttgccttaaaaagaaataaaagatgtgaacttggaaaaaaaaaaaaaaaaaaag

SEQ ID NO: 145224 - DNA, 411 bp, Homo sapiens
ccctgaagatgtgtgccttcatcacattgagtggtcattttctgcattgccatgagggcagggcgaggcctggccattactcagtcctgtctccagcatcaccgagcactgggctggggcagagttggaactcagtaactgttaaccaaatgaatgtattcatcattcatggttctctgggtattggcagagggtgttggtgattgatgcgttgtcttcacctctttgtgtgtctcttccattccttcctggcctgctggcagtggatggtaaagtcacgggtcattagcgagctacaggaggcctgctgggacatggtatctgccatggcgggggacatcatcctgctattggactctgacaatgacggcatccgcacccacgccgagccctatgcagtctcctcgtgcc

SEQ ID NO: 145225 - DNA, 1468 bp, Homo sapiens
atggcgagcggcagtggagacagcgtcacccgtcggagcgtggcatcacagtttttcactcaagaggaggggccgggcatcgatggcatgaccacctcagagagggtggtggatcttctgaaccaggcggcgctgatcaccaatgactcaaagatcacagtgctcaaacaggtccaggagctgatcatcaacaaagaccccacactactggacaacttcctggatgagatcatcgcattccaagcagacaagtcaatcgaagtgcgaaaatttgtcatcggcttcatcgaggaggcatgcaagcgagacattgagttgctgctgaaactcattgcaaacctcaacatgctcttgagggacgagaatgtgaacgtggtgaagaaggctatcctcaccatgacccagctctacaaggtggccctgcagtggatggtaaagtcacgggtcattagcgagctacaggaggcctgctgggacatggtatctgccatggcgggggacatcatcctgctattggactctgacaatgacggcatccgcacccacgccatcaagtttgtggagggcctcattgtcaccctgtcaccccgcatggctgactcagagataccccgacgccaggagcatgatatcagcctggaccgcatccctcgtgaccacccctacatccagtacattaaagtgacttttatcaaaaagacaacaaatgctggcgaggatgtggagaaagggaaacacttgtacactgttgacgtgctatgggaagagggcaaggcagccttggagcagctgcttaagttcatggtgcaccctgccatctcctccatcaacctgaccacagcgctgggctcccttgccaatatcgcccgccagagacccatgttcatgtctgaggtgatccaggcctatgaaactctgcatgccaacctgcccccgacgctggccaaatcgcaggtgagcagtgtgcgtaagaatctgaagctgcacctgttgagtgtgctgaagcacccggcttccttggagttccaggcccagatcaccaccctgctggtggacctgggcacacctcaggccgagatcgcccgcaacatgccgagcagcaaggacacccgcaagcggccccgcgatgactcggactccacactcaagaagatgaagctggagcccaacctgggggaggacgatgaggacaaagacttggagccaggcccgtcggggacctcgaaggcctcagcgcagatctccggccagtcagacacggacatcacagctgagttcctgcagcctctgctgacgcctgataatgtggctaatctggtcctcatcagcatggtgtacctacccgaggccatgccagcctccttccaggccatctacacccccgtggagtcagcaggcacggaagcccagatcaagcacctggctcggctcatggccacacagatgacagctgccggactgggaccag

SEQ ID NO: 145226 - DNA, 542 bp, Homo sapiens
cagccaaaagctgttgcccttttgagtgagtttctcatgagtgttgagcctctctctctctcacgcaggtggtaaagactatcggcctccgggaagtgtggtactttggcctccactatgtggataataaaggatttcctacctggctgaagctggataagaaggcaagtcaggattaactatttacaggctgtggattgggtgttggtctgcttcatcgataaggaaactggagcaactcaccctgtcttttgttttctgttcctttttgtttgtgtaaaagtttttacagacaaaaaggttgcaggtttccagtaaatggagatatcgattggaaatcagatctggcatttctccatagtgctcactcattggagcatatgatggttaattgcatagcttttagttgaccttagttttttcaatgagattgttaatcttataaactgtgaatcatccaccatcttgtaagaacctgttattgctttgtttgaacctgtgacagattatcttccaactttaaagagtggataattccatta

SEQ ID NO: 145227 - DNA, 3052 bp, Homo sapiens
  misc_feature (1)...(3052): n = a,t,c or g
tcccgggtcgacccacgcgtacgggcgcggcaggaggacgaggcagggcgggcgggcgctctaagggttctgctctgactccaggttgggacagcgtcttcgctgctgctggatagtcgtgttttcggggatcgaggatactcaccagaaacccgaaaatgcccgaaaccaatcaatgtccgagttaccaccatggatgcagagctggagtttgcaatccagccaaatacaactggaaaacagctttttgatcaggtggtaaagactattcggccctcccggnaagtgtggtacttttggcctccactatgtggatgaataaaggatttcctacctgggctgaagctgggataagaaggtgtctgcccaggaggtcaggaagaagaatcccctccagttcaagttccggggccaaagttctacccttgaagatgtggcttgaggagctcattccagggacattcacccagaaacttttctttcctccaagttgaaggaagggaatccttaagcgatgaagatctactggcccccctggagactggccgtgctctttgggggtcctacgcttgtgcaagcccaaggttgggggactacaacaaaagaagttgcacaagtctggggtaccctcagcttctgagcggctgatccctcaaagagtgatggaccagcacaaacttaccagggaccagtgggaggaccggatccaggtgtggcatgcggaacaccgtgggatgctcaaagataatgctatgttggaatacctgaagattgctcaggacctggaaatgtatggaatcaactatttcgagataaaaaacaagaaaggaacagacctttggcttggagttgatgcccttggactgaatatttatgagaaagatgataagttaaccccaaagattggctttccttggagtgaaatcaggaacatctctttcaatgacaaaaagtttgtcattaaacccatcgacaagaaggcacctgactttgtgttttatgccccacgtctgagaatcaacaagcggatcctgcagctctgcatgggcaaccatgagttgtatatgcgccgcaggaagcctgacaccatcgaggtgcagcagatgaaggcccaggcccgggaggagaagcatcagaagcagctggagcggcaacagctggaaacagagaagaaaaggagagaaaccgtggagagagagaaagagcagatgatgcgcgagaaggaggagttgatgctgcggctgcaggactatgaggagaagacaaagaaggcagagagagagctctcggagcagattcagagggccctgcagctggaggaggagaggaagcgggcacaggaggaggccgagcgcctagaggctgaccgtatggctgcactgcgggctaaggaggagctggagagacaggcggtggatcagataaagagccaggagcagctggctgcggagcttgcagaatacacagccaagattgccctcctggaagaggcgcggaggcgcaaggaggatgaagttgaagagtggcagcacagggccaaagaagcccaggatgacctggtgaagaccaaggaggagctgcacctggtgatgacagcacccccgcccccaccaccccccgtgtacgagccggtgagctaccatgtccaggagagcttgcaggatgagggcgcagagcccacgggctacagcgcggagctgtctagtgagggcatccgggatgaccgcaatgaggagaagcgcatcactgaggcagagaagaacgagcgtgtgcagcggcagctcgtgacgctgagcagcgagctgtcccaggcccgagatgagaataagaggacccacaatgacatcatccacaacgagaacatgaggcaaggccgggacaagtacaagacgctgcggcagatccggcagggcaacaccaagcagcgcatcgacgagttcgaggccctgtaacagccaggccaggaccaagggcagaggggtgctcatagcgggcgctgccagccccgccacgcttgtctttagtgctccaagtctaggaactccctcagatcccagttcctttagaaagcagttacccaacagaaacattctgggctgggaaccagggaggcgccctggtttgttttccccagttgtaatagtgccaagcaggcctgattctcgcgattattctcgaatcacctcctgtgttgtgctgggagcaggactgattgaattacggaaaatgcctgtaaagtctgagtaagaaacttcatgctggcctgtgtgatacaagagtcagcatcattaaaggaaacgtggcaggacttccatctgtgccatacttgttctgtattcgaaatgagctcaaattgatttttttaatttctatgaaggatccatctttgtatatttacatgcttagaggggtgaaaattattttggaaattgagtctgaagcactctcgcacacacagtgattccctcctcccgtcactccacgcagctggcagagagcacagtgatcaccagcgtgagtggtggaggaggacacttggatatttttttagttcttttttttttggcttaacagttttagaatacattgtacttatacaccttattaatgatcagctatatactatttatatacaagtgataatacagatttgtaacattagttttaaaaagggaaagttttgttctgtatattttgttaccttttacagaataaaagaattacatatgaaaaaccctctaaaccatggcacttgatgtgatgtggcaggagggcagtggtggagctggacctgcctgctgcagctgcagtcacgtgtaaacaggattattattagtgttttatgcatgtaatggactatgcacacttttaattttgtcagattcacacatgccactatgagctttcagactccagctgtgaagagactctgtctgcttgtgtttgtttgtttgcagtctctctctgccatggccttggcaggctgctggaaggcagcttgtggaggccgttggttccgcccactcattccttctcgtgcactgctttctcc

SEQ ID NO: 145228 - DNA, 361 bp, Homo sapiens
ccattctgggttaatgttctacaaaaaaatatggctgcctatatacacagaaagtaaatgaagaaaaaagttagccctgaaagtacaatgccatactctttaggtttttaaactctaccagtctaacagaaagcaccaagatacagatgccaaagtcagaaaaaatacaaagcagctcagaatcaatatcatatatcttattcaaggtaaattttatgttagattctttgtctggcatttgggaggctaaattaacttaggaggctagagatcccatctctactttttttttctttttgagatggagtcttgctctgttgcccaggctggagtgcagcggcacgatctcggctcaccgcaa

SEQ ID NO: 145229 - DNA, 411 bp, Homo sapiens
  misc_feature (1)...(411): n = a,t,c or g
ctcatttaaaactgctttgcagggctcccctatgtattcggggggcccacggcacactcaggctggagatccttcctcactgcgctcaagatggcctcagccagacaccagttacccagctgaaagtcacaatccctcccagaagtcaaaccacaggccgatgcatctccagtttgacagtcaaatcactacttccattgctactttagatcagccaaagtggtgactgctgcagtgtgtggctatccctacaaggcccacccaagggatgcccaaagcccaaccttctccagggctgcagcccagagcaaccccaccagcctaagtccagcagaggacctcccacccaatgtcttgttctaattagaaggggaagttagccacagaaaatcaacttatctataattacan

SEQ ID NO: 145230 - DNA, 1935 bp, Homo sapiens
ttttttttttttttttgttttaccctttatacaatttattgggtttaatattccataacaataactttttctactgaaatagcagtttgtgtttacctgtcgaaccccaatatgagaaatgtgtacaaaagcaacagactgtgatagaaaaaggtatcgtgaaaaaattagcaaaccaaagcatgataaatgggatgaaggcactataaaattactttgactgtttaacgtaactgtatctttaaatctgtactgtggctaaacagccctataggccaaggttttaaaggggttacagggggccaactggctacacattcaaaggaacagggcattcactgccagccctccctgatttggacctgatggggaggggacagggaggaatggaggtcactctggcccaccactttttcctggccttggggatttgtaggagggattttgttttggctctaatttgttttcccctatatcctgcccctactaaggtaccctgccttataggcccatgaaaataaaacgccattcaactttttttttgtaaaagcctaaaataatccacatgataccttattctttggaggatttaaaatgtgcctaaagggaggaactaaagagttaccctaataggagaatccatggggaacagagaaactgcctttttgaaagatgaatgtgggaaaggtccaggggtggggttaacagggcaattcaaccctggaaagaagctggaataagctttaacattgaagaattactttgtatgttaaatccttcctggcccatcattatcccattattggatattttaacaattttatagttattcttaatttttctcatatgaaactgtaatggctgtactagaagctgccattactgttccaaaaagtaaaggggattttctctacaaaaggaaaggaaaatggcacattcacatgtaggtaagtagcttctggtaacatcctcactgcacagaaatggttctcagcatggggctcccaaactttccttaagagtgtccatttgtttttagtatccagaagttttccaaataggttttaaaagccagtaagatgtcaataggaactttaaggtgagtcaagagaattttgtaattatagataagttgattttctgtggctaacttccccttctaattagaacaagacattgggtgggaggtcctctgctggacttaggctggcggggttgctctgggctgcagccctggaagaaggttgggctttgggcatcccttgggtgggccttgtagggatagccacacactgcaaccagtcacccactttggctgatctaaagtagcaaatggaagtagtgatttgactgtcaaactggagatgcatcggcctgtggtttgacctgggaaaggggcttgtgtctgggtgatagggaaaggtaaacagatgtattagccactggctttgtgtgggcagctgtgttgaatcagcctgctgctgagtcacagggagtaactgcagctgcctagggctggcttctagcatggagaggagaggaaaaggggtcctgcaaatgtccccccagcagcctgtcaattgtgtgtgaaaactccctaagcctgaagagcccccacctctggtcagcactagtgttgggagacttctgggagggattgtgactttcagctgggtaactggtgtctggctgaggccatcttgagcgcagtgaggaaggatctccagcctgagtgtgccgtgggccccccgaatacataggggacgccctgcaaagcatgttttgaaatgagtagtacatctcacgaagaaagtctgcaagaggtcgaggtgcatgagaaagatctggccctgctgccctggcgccaccttgtgccctttctgctgctgggggtctcattggctcagagtgcttagtaaacatcagtggcgaggg

SEQ ID NO: 145231 - DNA, 326 bp, Homo sapiens
  misc_feature (1)...(326): n = a,t,c or g
nagattagggtatttgtattaatgaaaaaaatatcctggctcttcgcatttaccaacagcaggaggatgattctggagaaggagaggatgatgcggaggttcagcaagaatgcctgcataaattttccacccgggattatatcatggaaccctccatcttcaacactctgaagaggtatgtgagaaaggtgtctgtattgggacccccccttgaagcctttagttcagttcgcgttactcttgctttacatagcaccttctgggtgtattacaaaactttctctaaattacccccagcctcctcccaatacagacacctttctcta

SEQ ID NO: 145232 - DNA, 381 bp, Homo sapiens; identical to SEQ ID NO: 145177
  misc_feature (1)...(381): n = a,t,c or g

SEQ ID NO: 145233 - DNA, 533 bp, Homo sapiens
aggaaatattacgagtcttcttatagtatttaacctattagtgtaaaaaatatttaaaataatatatttacatatgtttaaaaccttggcctccaaagtgctgggattacaggtgtgagccactgcgcccgggccctaattagggtttttataaaaccaaaaagaacttggcaacacccctaggtaccctttagaagcctccaattggctacagcctgtgaaggattggcctgtgaccaatcagaggctgaagtggaagtcttagctcatgggtcaaggcagaggctgaaagtggaaacttcttgtccttttttatcacaaggcatgaaggatgtggcctgcattgctggcctggatcttggcctaggaaccggctggcacctgctggtctcttggtttatgcaaactggctgcacctgctattcctttgcttatgcccctacccctggctatcctaattccctgttctcctgcctcactattactgtattctctacttctaaataaaaataaaacaaaatacaaaccgttaa

SEQ ID NO: 145234 - DNA, 556 bp, Homo sapiens; identical to SEQ ID NO: 145179

SEQ ID NO: 145235 - DNA, 364 bp, Homo sapiens
ggctgctggctgctgcgtttgcggcgggaggtggtggccgcggtcccacgagagggggtatttttcgtcagccaagatgggttccaaaaggagaaatttgagctgtagtgaaaggcatcagaaattagtagatgaaaactactgcaaaaaattacatgtccaagctctaaaaaacgtcaacagtcaaatcaggaatcaaatggtgcagaatgaaaatgataaccgggttcagcgcaagcaatttctcagattattacaaaatgaacaatttgagttggatatggaagaggccattcaaaaggcagaagaaaacaagagattgaaagaactccagctcaaacaagaagaaaaactggctatggaa

SEQ ID NO: 145236 - DNA, 1787 bp, Homo sapiens
cggtggctcatgcctgtaatcccagcactttgggaggccgaggtgggcggatcacgaggtcaggagatcgagaccatcctggctaacacggtgaaaccctgtctctactaaaagtacaaaaaattagccaggtgtggtggcagatgactgtaggccaagctaattgggaggctgaggcaggagaatggtgcgaacccggggagggcagagcttgcagtgagccaagatcacccactgcactccagcctgggtaacagagcaagactcggtctcaaaaaaaataataagttacatttaaatgtcatatacatatttaagaaaaaaaaaaccaagtacttctcatttaagacagagtagaaattatttaaaattaggagttggtgtaaaggatgagctacatattcaagtcaaattatagtaagtattcactattccactaccaaagtaggtcaattatactaaagagaagaaatctatgtgaattgaggcattttctcactttgatatatgtgaataaatttcaggttgtctaaattcctagggttatatagttagaaatatataattctcttatagacaggtcaactaggggaaataagttagcacaatcatttgaattggttgtctacatactgggcagggcttattccttttctttagcttctttgcacatgtaaagcaggccataagatgtcctgttttgccatggacaatgcaaccatttttaggtcgaccttgacaaatcacacaaggttcaatggcattaaggggcaaactagattccacactctcttctttgtcttgggtttcttccctttcaaactctttcacatcttcttggctgctataaataatgctactagaagttgatggctgagaatagtcttcactttcttgtgattgtgaagcttgtgtaattttatcatcattttcctcaacacatgactctctggaatcattcactatagtttttttacaatcaggaacatcaaagccctcttcagcttgtgttgagttttccagtttggctttctcagagatttcccctttatctttccctttatcttcaggaagccaattctcacgaagggcccaacatctgttgcaatgtgatggaagggggggattcatttcattgcatgaagtgcatttccaatagtcagctaaggaaatttcaggatcttcttcaaatgaatctgtatcactctcccctgcctgatacacagtaacttgatatacctcatcatcttcatctgagagttcttgtccttcttcactaaggctataatcttctgagtcgagagattcaacttcaaattctacactaaactgatctgaaactgaatcctgatccaaccaatcacctgaatgttcacttacaccagcatcaagatccagggtctcttgttccgaagctggaatctgtgaggtggttacagcaccatcagtaggtacagacatgttggtattgcacatttgcctgctcctcaccatccggggttttcgcgcttggagtcgggggtccctcaagactccccagtttccttcacggggactgactactgcggaagcacgacgccctgggcctcggggatcattccactctccgggccagggcactgggcgctcgtacgcactaatccggggagggacggtgctcctggctgcgaaagcagcaggatctcggtcagaggggtcgcggccgcccctcgggctcggcttcttgctccatctttccgacacacagggccacacaggccccagaagcagccaagctcgcgcggtgc

SEQ ID NO: 145237 - DNA, 1553 bp, Homo sapiens
cggtggctcatgcctgtaatcccagcactttgggaggccgaggtgggcggatcacgaggtcaggagatcgagaccatcctggctaacacggtgaaaccctgtctctactaaaagtacaaaaaattagccaggtgtggtggcagatgactgtaggccaagctaattgggaggctgaggcaggagaatggtgcgaacccggggagggcagagcttgcagtgagccaagatcacccactgcactccagcctgggtaacagagcaagactcggtctcaaaaaaaataataagttacatttaaatgtcatatacatatttaagaaaaaaaaaaccaagtacttctcatttaagacagagtagaaattatttaaaattaggagttggtgtaaaggatgagctacatattcaagtcaaattatagtaagtattcactattccactaccaaagtaggtcaattatactaaagagaagaaatctatgtgaattgaggcattttctcactttgatatatgtgaataaatttcaggttgtctaaattcctagggttatatagttagaaatatataattctcttatagacaggtcaactaggggaaataagttagcacaatcatttgaattggttgtctacatactgggcagggcttattccttttctttagcttctttgcacatgtaaagcaggccataagatgtcctgttttgccatggacaatgcaaccatttttaggtcgaccttgacaaatcacacaaggttcaatggcattaaggggcaaactagattccacactctcttctttgtcttgggtttcttccctttcaaactctttcacatcttcttggctgctataaataatgctactagaagttgatggctgagaatagtcttcactttcttgtgattgtgaagcttgtgtaattttatcatcattttcctcaacacatgactctctggaatcattcactatagtttttttacaatcaggaacatcaaagccctcttcagcttgtgttgagttttccagtttggctttctcagagatttcccctttatctttccctttatcttcaggaagccaattctcacgaagggcccaacatctgttgcaatgtgatggaagggggggattcatttcattgcatgaagtgcatttccaatagtccagggtctcttgttccgaagctggaatctgtgaggtggttacagcaccatcagtaggtacagacatgttggtattgcacatttgcctgctcctcaccatccggggttttcgcgcttggagtcgggggtccctcaagactccccagtttccttcacggggactgactactgcggaagcacgacgccctgggcctcggggatcattccactctccgggccagggcactgggcgctcgtacgcactaatccggggagggacggtgctcctggctgcgaaagcagcaggatctcggtcagaggggtcgcggccgcccctcgggctcggcttcttgctccatctttccgacacacagggccacacaggccccagaagcagccaagctcgcgcggtgc

SEQ ID NO: 145238 - DNA, 1862 bp, Homo sapiens
cggtggctcatgcctgtaatcccagcactttgggaggccgaggtgggcggatcacgaggtcaggagatcgagaccatcctggctaacacggtgaaaccctgtctctactaaaagtacaaaaaattagccaggtgtggtggcagatgactgtaggccaagctaattgggaggctgaggcaggagaatggtgcgaacccggggagggcagagcttgcagtgagccaagatcacccactgcactccagcctgggtaacagagcaagactcggtctcaaaaaaaataataagttacatttaaatgtcatatacatatttaagaaaaaaaaaaccaagtacttctcatttaagacagagtagaaattatttaaaattaggagttggtgtaaaggatgagctacatattcaagtcaaattatagtaagtattcactattccactaccaaagtaggtcaattatactaaagagaagaaatctatgtgaattgaggcattttctcactttgatatatgtgaataaatttcaggttgtctaaattcctagggttatatagttagaaatatataattctcttatagacaggtcaactaggggaaataagttagcacaatcatttgaattggttgtctacatactgggcagggcttattccttttctttagcttctttgcacatgtaaagcaggccataagatgtcctgttttgccatggacaatgcaaccatttttaggtcgaccttgacaaatcacacaaggttcaatggcattaaggggcaaactagattccacactctcttctttgtcttgggtttcttccctttcaaactctttcacatcttcttggctgctataaataatgctactagaagttgatggctgagaatagtcttcactttcttgtgattgtgaagcttgtgtaattttatcatcattttcctcaacacatgactctctggaatcattcactatagtttttttacaatcaggaacatcaaagccctcttcagcttgtgttgagttttccagtttggctttctcagagatttcccctttatctttccctttatcttcaggaagccaattctcacgaagggcccaacatctgttgcaatgtgatggaagggggggattcatttcattgcatgaagtgcatttccaatagtcagctaaggaaatttcaggatcttcttcaaatgaatctgtatcactctcccctgcctgatacacagtaacttgatatacctcatcatcttcatctgagagttcttgtccttcttcactaaggctataatcttctgagtcgagagattcaacttcaaattctacactaaactgatctgaaactgaatcctgatccaaccaatcacctgaatgttcacttacaccagcatcaagaacctctttcatagtataagtgtctttttgtgcaccaacagactttaataacttcaaaagcaatggctttggtctaaccagggtctcttgttccgaagctggaatctgtgaggtggttacagcaccatcagtaggtacagacatgttggtattgcacatttgcctgctcctcaccatccggggttttcgcgcttggagtcgggggtccctcaagactccccagtttccttcacggggactgactactgcggaagcacgacgccctgggcctcggggatcattccactctccgggccagggcactgggcgctcgtacgcactaatccggggagggacggtgctcctggctgcgaaagcagcaggatctcggtcagaggggtcgcggccgcccctcgggctcggcttcttgctccatctttccgacacacagggccacacaggccccagaagcagccaagctcgcgcggtgc

SEQ ID NO: 145239 - DNA, 1295 bp, Homo sapiens; identical to SEQ ID NO: 144182

SEQ ID NO: 145240 - DNA, 1149 bp, Homo sapiens
cggtggctcatgcctgtaatcccagcactttgggaggccgaggtgggcggatcacgaggtcaggagatcgagaccatcctggctaacacggtgaaaccctgtctctactaaaagtacaaaaaattagccaggtgtggtggcagatgactgtaggccaagctaattgggaggctgaggcaggagaatggtgcgaacccggggagggcagagcttgcagtgagccaagatcacccactgcactccagcctgggtaacagagcaagactcggtctcaaaaaaaataataagttacatttaaatgtcatatacatatttaagaaaaaaaaaaccaagtacttctcatttaagacagagtagaaattatttaaaattaggagttggtgtaaaggatgagctacatattcaagtcaaattatagtaagtattcactattccactaccaaagtaggtcaattatactaaagagaagaaatctatgtgaattgaggcattttctcactttgatatatgtgaataaatttcaggttgtctaaattcctagggttatatagttagaaatatataattctcttatagacaggtcaactaggggaaataagttagcacaatcatttacaatatgttgttgcttctcatcatataatcgtttagtcataatatactggccaagataaaaaagaacctctttcatagtataagtgtctttttgtgcaccaacagactttaataacttcaaaagcaatggctttggtctaaccagggtctcttgttccgaagctggaatctgtgaggtggttacagcaccatcagtaggtacagacatgttggtattgcacatttgcctgctcctcaccatccggggttttcgcgcttggagtcgggggtccctcaagactccccagtttccttcacggggactgactactgcggaagcacgacgccctgggcctcggggatcattccactctccgggccagggcactgggcgctcgtacgcactaatccggggagggacggtgctcctggctgcgaaagcagcaggatctcggtcagaggggtcgcggccgcccctcgggctcggcttcttgctccatctttccgacacacagggccacacaggccccagaagcagccaagctcgcgcggtgc

SEQ ID NO: 145241 - DNA, 465 bp, Homo sapiens
  misc_feature (1)...(465): n = a,t,c or g
ctgaactccttcccatatgtccttcagagttaaaggtctcccatctccatgggaagacatgtctgtccatgggtagatgctcctagatgtgacatcacagacccattcttaatttgaaagtgtattttgcacatgtagccatcagaacagtcctttgatggtctccattcccaactatcacctatctgttgtgaatgtttaatgaattctgcacaataacgttggaatattttttctccaatgaactcatcttcttccatgttaaatgataactttaataactgtacnnnnnnnnnnnnnnnnnnnnnnnnnnnnnnnnnnnnnnnnnnnnnnnnnnnnnnnnnnnnnnnnnnnnnnnnnnnnnnnnnnnnnnnnnnnnnnnnnnnnnnnnnnnnnnnnnnnnnnnnnnnnntnnggtntttcnngacgcttcgagacagcatcgtttnngaatccgggcccgca

SEQ ID NO: 145242 - DNA, 452 bp, Homo sapiens
  misc_feature (1)...(452): n = a,t,c or g
atcgagacccctaggtagtgtggcgtaattcagcggagagnnnnnnnnnnnnnnnnnnnnnnnnnnnnnnnnnnnnnnnnnnnnnnnnnnnnnnnnnnnnnnnnnnnnnnnnnnnnnnnnnnnnnnnnnnnnnnnnnnnnnnnnnnnnnnnnnnnnnnnnnngtacagttattaaagttatcatttaacatggaagaagatgagttcattggagaaaaaatattccaacgttattgtgcagaattcattaaacattcacaacagataggtgatagttgggaatggagaccatcaaaggactgttctgatggctacatgtgcaaaatacactttcaaattaagaatgggtctgtgatgtcacatctaggagcatctacccatggacagacatgtcttcccatggagatgggagacctttaactctgaaggacatatgggaaggagttcatgag

SEQ ID NO: 145243 - DNA, 539 bp, Homo sapiens
tttgttttattttttattttattttattttattttgagacagagtctcgctctgtcgcccaggctggagtgcagtggcgccatctcgactcactgcaagctccgcctcccgggttcacgccattctcctgcctcagcctcccgagtagctgggactacaggcgcccgcaccacgtccggctaatttttttgtacttttagtacagacggggtttcaccgtgttagccaggatggtctcgatctcctgacctcgtgatccactcgcctcggcctcccaaagtgctgggattacaggcttgagccaccgcgcccggcctgcacaggtgtcttgaatatgtatatacgcgactccagtatggttggaaatgatttgatttgttgtctatggaattgcacaacctggagccttcctaacatcagcggcttcatactggcatttccattgtggtgcagcaacaatctgagtgagcctccgtctctaagccacatcatttgacaaccggtcccagaaggtaactggaagtcatgatgacaactcc

SEQ ID NO: 145244 - DNA, 1997 bp, Homo sapiens
ccgagtcttgctctgaagcccaggctggagtgcagggggcgcaatcttggctcactgcaacctcttccttccaggttcacgccattctcctgcctcagcctcccaagtagctgggactacaggtgccagccaccacgcctggctaattttttgtatttttagtagagacgggatttcactgtgttagccaggatggtctcaaactccagacctcgtgatccgcccacctcggcctcccaaagtgctgggattacaggcatgagccactgcgcccggccaaaaaacaactctttaaaaatgtaccttagagcaacatgcaaagcttccctgctcagcaatcccaggttggggccccctgtcttcctatcctcctacccgtcacaaccaccactgcaggcttctgatgctctgttttcctcctctgtctcagttcagttgctctgagttagagaggagctctctgggactggagctgactgcgccctggcccatttcctcactaccatcctcaagctcagatgctgacaggaaaatactgcctatgcctgaaggggcatcccttagcaggcggcccagttccttctcataacatttggctgcttgcagcagatctccattctgcttatgaattaatccttgaagataccaataatttggtgcattttgtggaagcagattttcggatacattctgtggttggtctttgatctcttccttgtcagttgattttttgcttatggacaaaccctctaaaccatgttgcacagcagtgtcttcagacttcccattatatttctgaaggttgcagtagcgctgatgggattgttgcttttcagcatcagggacttccttattgaatggtgtctgataacattccgtctccaggaactcagcgagatcggagtatgcattcagaggattcagtcccttctcaagagctttattcgaatagtccatagcatattgctttagtgcttcaatcatctctttatttccactagcttcagattctcctgtattctgcatttgtcttacttttgccttgtagcagcacccaatctggtgatagaggtagccattgtttggtgtggattccaacacccgttgaaacagttcaatagctttgtctaggtcaccttttcttctgtaaaatttggctgcactgcggaggacatctgtttggcaaggagacttttccaaggcttcttcaacaaactgctctccttcagcttctttattcatcttctgcagtttcaggcccaagagaaccttgacgtattggttatcaggactcagctcaatggcctgcttcaaaacatcagtagagaactgtttctctgggtgattatccagatggtacatcgcaattgccagtccagaggagaattctgggttgttgggcttttcttccagagccttctcaaaacacaccttcgccctttcatttcttccacacttcagttgtgtccacccttcctcacagtcaagttcagaatactcaatactgtatggatttgaaaatttcttgcaggtttgtttcaccttatctacataaatctgagcatctgagagtctgcccaagtgatagtagacccaggcgtagtttccccaagtgactagacttctgatttctgcttggtcagcatgttcttgctggattaactcttcagcttgccgtaagcattccagggctgcctcgttgttaccatctaggtgttttatgtaggccaacaagttgtacattgtagctttgaactcagtgtttaaaaattcaatctggttacacactctatcttctagatcccttgagacactgtcttccttgaataagttccaggtgaaatggcatttcagctgtggaaggattttctccagggaattcttggtgacctcactcatgactgccctctgtgtctctgctgttccgaaaagctggggtcccggttgattttgtttttagcttactgattccaagcaaatgctgaagaggtttccac

SEQ ID NO: 145245 - DNA, 527 bp, Homo sapiens
ctccaaagcagccctgacaggttctgggcccgggccctccctttgtgctttgtctctgcagttcttgcgccctttataaggccatcctagtccctgctggctggcagggggctggatggggggcaggactaatactgagtgattgcagagtgctttataaatatcaccttattttatcgaaacccatctgtgaaactttcactgaggaaaaggccttgcagcggtagaagaggttgagtcaaggccgggcgcggtggctcacgcctgtaatcccagcactttgggaggccgaggcgggtggatcacgagatcaggagatcgagaccaccctggctaacacggtgaaaccccgtctctactaaaaaaatacaaaaagttagccgggcgtggtggtgggtgcctgtagtcccagctactcgggaggctgaggcaggagaatggtgcgaacccgggaggcggagcttgcagtgagcccagatggcgccactgcactccagcctgagtgacagagcgagactctgtctcca

SEQ ID NO: 145246 - DNA, 825 bp, Homo sapiens
atgcttcaaagcaaccgaaccgccgccagccattcaccatccatccagccagccatccagccagccatccagccagccaaccaactatccatccacaatttgtggacacaattccggcattcaaccaaaattccagttgaatgggtgaatggtgaatggctgaatggacgaatgccaggggatcatcatgaatggcaatgcaactatcagccagccatccagccagccatccagccagccaaccaactatccatccacaatttgtggacacaattccggcattcaaccaaaattccagttgaatgggtgaatggtgaatggctgaatggacgaatgccaggggatcatcatgaatggcaatgcaactatcagtcagccatccagacagccatccagccagccatgcaactatccatccacaatttgtggacgcaattccggcattcaaccaaaattccagttgaatgggtgaatggtgaatggctgaatgatcgaatgccaggggatcatcatgtatggcaatgcaactatcaggtgttctattactcaacaggaatcttcaaggatgcaggtgttcaacagcccatctatgccaccatcagcgcgggtgtggattatactatcttcactttactttctccagccatccagccagccatccagccagccaaccaactatccatccacaatttgtggacacaattccggcattcaaccaaaattccagttgaatgggtgaatggtgaatggctgaatggacgaatgccaggggatcatcatgaatggcaatgcaactatcaggtagagatcccacctccgaactaa

SEQ ID NO: 145247 - DNA, 2684 bp, Homo sapiens
tcaaagtgtgagtatttctccagatcccttcactgtagcaggtgggcagcctcgcccactatacttctgcccctttcaaagcaggtgggcagagaggtgtttgtggtaagaaagacctagaggcttttgttcgctgattcttcttccttcatcagccatcaccagaccttagatgtgaatcccccattcttgctcttggtcttacctctgcagatcagttatggccgtgggggggagttcccaaatgtcaggtgagtatgggttggctgtacagtcctggggaatgtttaaaaagaccggctgggcgcagtggctcatgcctgtaatcccagcactttgggaggccgaggcgggcggatcacgaggtcaggagttcgagaccatcctggctaacacggtgaaaccccatctctacttaaaaaaaaaaaaaaaaaaaaaaatcgttagctgtgcacatgcctgtagtcccagctactcgggaggctgaggcaggagaatggtgcgaacccggggagggcagagcttgcagtgagccaagatcacccactgcactccagcctgggtaacagagcaagactcggtctcaaaaaaaataataagttacatttaaatgtcatatacatatttaagaaaaaaaaaaccaagtacttctcatttaagacagagtagaaattatttaaaattaggagttggtgtaaaggatgagctacatattcaagtcaaattatagtaagtattcactattccactaccaaagtaggtcaattatactaaagagaagaaatctatgtgaattgaggcattttctcactttgatatatgtgaataaatttcaggttgtctaaattcctagggttatatagttagaaatatataattctcttatagacaggtcaactaggggaaataagttagcacaatcatttgaattggttgtctacatactgggcagggcttattccttttctttagcttctttgcacatgtaaagcaggccataagatgtcctgttttgccatggacaatgcaaccatttttaggtcgaccttgacaaatcacacaaggttcaatggcattaaggggcaaactagattccacactctcttctttgtcttgggtttcttccctttcaaactctttcacatcttcttggctgctataaataatgctactagaagttgatggctgagaatagtcttcactttcttgtgattgtgaagcttgtgtaattttatcatcattttcctcaacacatgactctctggaatcattcactatagtttttttacaatcaggaacatcaaagccctcttcagcttgtgttgagttttccagtttggctttctcagagatttcccctttatctttccctttatcttcaggaagccaattctcacgaagggcccaacatctgttgcaatgtgatggaagggggggattcatttcattgcatgaagtgcatttccaatagtcagctaaggaaatttcaggatcttcttcaaatgaatctgtatcactctcccctgcctgatacacagtaacttgatatacctcatcatcttcatctgagagttcttgtccttcttcactaaggctataatcttctgagtcgagagattcaacttcaaattctacactaaactgatctgaaactgaatcctgatccaaccaatcacctgaatgttcacttacaccagcatcaagatccggattcgatggcgtccctgtagattcactgctactgcttctttcacaacatatctcccttattacacacagagccaggctttcatcaaaggaaagggaaatactatcagatttgtggcgttttctttgtcgttcaccagataattcatctgaattttcttctgtctcactaattgctctccttctagatgaggtagatggtctagaaaccaaatgtgaagatgaaggtttctcttcctgaagctcttgtacaaggtccttttgatcactcccaccttcaaggtgacacctgttctcactcacagatgtacctgagtccgatgattcctgctgattgactactaccaagttcctgtagatcatggtatatattttcctgtgctctttcacagagaagcttggcacgccaaacaaatctcctagaagatcatttgaacaatatacaatatgttgttgcttctcatcatataatcgtttagtcataatatactggccaagataaaaaagaacctctttcatagtataagtgtctttttgtgcaccaacagactttaataacttcaaaagcaatggctttggtctaaccagggtctcttgttccgaagctggaatctgtgaggtggttacagcaccatcagtaggtacagacatgttggtattgcacatttgcctgctcctcaccatccggggttttcgcgcttggagtcgggggtccctcaagactccccagtttccttcacggggactgactactgcggaagcacgacgccctgggcctcggggatcattccactctccgggccagggcactgggcgctcgtacgcactaatccggggagggacggtgctcctggctgcgaaagcagcaggatctcggtcagaggggtcgcggccgcccctcgggctcggcttcttgctccatctttccgacacacagggccacacaggccccagaagcagccaagctcgcgcggtgc

SEQ ID NO: 145248 - DNA, 460 bp, Homo sapiens
ttttttgagatggagtcttgctctgtcgcccaggctggagtgcagtggcatcatctctgctcactgcaagctccgcctcccgggttcacccccacacgcccattctccctgccctcagccctccctgaagtagctgggaagtaacaagccgccggccacccacgcccggctaattttttcctatttttagtagagaacggggtttcaccgtgttagccaagatggtctcgatctcctgacctcgtgatccgcccgcctcagcctcccaaagatctgggattacaggcgtgagccactgcacccggccagaagctttttcatttattcgtccagcagcatcttgtactagtcctgactggttagtatagaaacagcactcctcttctaaaaagatacacaggccgcctttctcggcagtgaggagatctaaacctcgatggttttgaagtgtcactgctgc

SEQ ID NO: 145249 - DNA, 1627 bp, Homo sapiens
tttttttttttttttttttgagacggagtctctttctgtcccccaggctggagtgcagtagcacgatctcagctcactgcaacctccgctcccgggttcacaccattctcctgcctcagcctcccaagtagctgggactacaggtgcccgccaccgcgcccggctaaattttttttgtatttttagtagagacggggtttcaccatgttagccaggatggtctcgatctcctgacctcgtgatccacccgcctcggcctcccaaagtgctgggattacaggcgtgagccaccgcgcccggccccctcctccccaatttttcatacagttgcccctatacaatatacacacccttgagggcaggtagaagtccagcccacctgcgccagggacgctgtggggagcatttttctctgagttgctaagagaaccctgatgggcggtgagcagaggaaccacagaacagccagggctcaaggctggcagcggataggccaggagagatcgctaggccccagaaagccccctactttcagtcagggtgggcaagagggtcttcgcagtgaagtgggaggcaggccctggaggagggagccagggagacccctgggagccctgaggttgggggccaggcagggagatggggatagcagctgcctcagtacttggggaccttgctgtagtcttcggaatgcacgtgccggcacaagcagatggacaggaccatccccaggagctcgaccatggccacacccacgcccacgccgaggatgatgcccaggttctcctgcagccacgcctgcaccttctccatgcagccctcctggtacacaggccagtcctcagggtggttgccactctgggtcctgttgccgggggcctcgcagaagcccttcctcacagaaaggctgttgtcctcttcccccttgacttcgcaggaacaggggtaggtgacctcagggcgattcatgagctcagcgttgtctgtccagttgtagaagctgacccagccgcagcacttcacctgagcctgcacgtagtcccaggcatcctgcaggctgtcctcgcgactgctgttgtagtctcgaatgagctcagtcacgatgccacccatctcctgcttcagcttgcccatgttgaagtagaagagggccccggccgtcacctgggcaatgaggatcaggagcaggaaagcaaagtacagccccagcaggcagcggacctcgttgacggcgccgatgcagcccaggaagcccatgagcatagtgactgcccccacgccgatgaagacataggcccccatcctaagcgagctggaggaggtttgcaggacagagatgaaactgctcttgtcggccaggatccacaccccgaagcccaggatcactgcgcccaggataaagaagatcaagttgaagaggaagagaaagtatttggtgactttgatacaggctgagcccatcccgccagtcctggagcttccttccacgaaaccagtgcagctggtcacagggcccacttctgcctgtgcccacgtgtcgtccacacagcagcagggaggactctgcgggttctgctttctgctccgcgctgcaggcccagcgtcacccgctcgtgcctcagtcggc

SEQ ID NO: 145250 - DNA, 957 bp, Homo sapiens
tttttttttttcctctggagaataattttccaaatatgctttttgctttatatgtaaatgttataaatttacttttagcttcagacatgttcttacctaaaaagcttgccctaaagtaaagtacaggcacttggtagctacaggaatataagacatgatactcatatttaatcacttcggacgctgctgcagtttcaatcacttcacaatcatccaagggtagctcgaaagcctcctccatgggaagacatgtctgtccatgggtaggtgctcctagatgtgacatcacagacccattcttaatttgaaagtgtattatgacaaggtagccgtcagaacagtcctatgatggtctcccttcacacatatctcccatccggcgagaatgtttaatgaattctgcccaataacgctggaatgttttttatccaatcgaaatcatcttcttccatgttaaatgataactttaataactgtacaacaggccgggcgcagtggctcacgcctgtaatcccagcactttgggaggccgaggcgggcagatcacgaggtcaggaaatcgagaccatcttggctaacaaggtgttctattactcaacaggaatcttcaaggatgcaggtgttcaacagcccatctatgccaccatcagcgcgggtgtggttaatactatcttcactttactttctaatcactataatgggatgagctttgtctgtattggggctatcttggtctttgtggcctgttttgaaattggaccaggccccattccctggtttattgtggccgaactcttcagccagggcccccgcccagctgcgatggcagtggccggctgctccaactggacctccaacttcctagtcggattgctcttcccctctgctgctgatcattgtgattacaccgggcccccttggacaatcctgacaatctcccagactcaagatctttaa

SEQ ID NO: 145251 - DNA, 2195 bp, Homo sapiens
atggggacacagaaggtcaccccagctctgatatttgccatcacagttgctacaatcggctctttccaatttggctacaacactggggtcatcaatgctcctgagaagatcataaaggaatttatcaataaaactttgacggacaagggaaatgccccaccctctgaggtgctgctcacgtctctctggtccttgtctgtggccatattttccgtcgggggtatgatcggctccttttccgtcggactcttcgtcaaccgctttggcaggcgcaattcaatgctgattgtcaacctgttggctgtcactggtggctgctttatgggactgtgtaaagtagctaagtcggttgaaatgctgatcctgggtcgcttggttattggcctcttctgcggactctgcacaggttttgtgcccatgtacattggagagatctcgcctactgccctgcggggtgcctttggcactctcaaccagctgggcatcgttgttggaattctggtggcccagatctttggtctggaattcatccttgggtctgaagagctatggccgctgctactgggttttaccatccttcctgctatcctacaaagtgcagcccttccattttgccctgaaagtcccagatttttgctcattaacagaaaagaagaggagaatgctaagcagatcctccagcggttgtggggcacccaggatgtatcccaagacatccaggagatgaaagatgagagtgcaaggatgtcacaagaaaagcaagtcaccgtgctagagctctttagagtgtccagctaccgacagcccatcatcatttccattgtgctccagctctctcagcagctctctgggatcaatgctgtgttctattactcaacaggaatcttcaaggatgcaggtgttcaagagcccatctatgccaccatcggcgcgggtgtggttaatactatcttcactgtagtttctgataactataatgggatgagctttgtctgtattggggctatcttggtctttgtagccttctttgaaattggaccaggccccattccctggtttattgtggccgaactcttcagccagggcccccgcccagctgcgatggcagtggccggctgctccaactggacctccaacttcctagtcggattgctcttcccctccgctgctcactatttaggagcctacgtttttattatcttcaccggcttcctcattaccttcttggcttttaccttcttcaaagtccctgagacccgtggcaggacttttgaggatatcacacgggcctttgaagggcaggcacacggtgcagatagatctggaaaggacggcgtcatggagatgaacagcatcgagcctgctaaggagaccaccaccaatgtctaagtcgtgcctccttccacctccctcccggcatgggaaagccacctctccctcaacaagggagagacctcatcaggatgaacccaggactgcttctgaatgctgctacttgatttctttctcatcccacgcactccatgagcaccccaaggctgcagtttgttggatcttcaatggctttttaaattttatttcctggacatcctcttctgcttaggagagaccgagtgaacctaccttcatttcaggagggattggccgcttggcacatgacaactttgccagcttttcctcccttgggttctgatattgccgcactagaggatataggagaggaaaagtaaggtgcagttgccccaacctcagacttaccaggaagcagatacatatgagtgtggaagccggagggtgtttatgtaagagcaccttcctcacttccatacagctctacgcggcaaattaacttgagttttatttatctaatcctctggtttaattacataaatatttattttttaagtgtaattttgccaaataataaaaacagaaggaaattgagattagagggaggtgtttaaagagaggttatagagtaaaagatttgatgctggagaggttaaggtgcaataagaattcagggagaaatgttgttcattattggagggtaaatgatgtggtgcctgaggtctgtacattacctcttaacaatttctgtccttcagatggaaacactttgatttctcagaaaagttgtatgcctatttaataaagctactcatttcctttggaaaaaaaaaaaaaaaaaaaac

SEQ ID NO: 145252 - DNA, 4739 bp, Homo sapiens
ttttttttttccattataaaaatttatcaagggaataatttgagtttttagaggcttggtttagcaaggtaaaaaagacaaccaaattattaaaacactttataaattattttaaaacctaccaactggggcctaaatgaaataaaccccctattaccttaggaaagagacagctttcctaaatcacagaagttggtttccaagctacactcttacttctaatgccttggaaccctaaggagaactaaagctcaccagcgatggctgctctggaagtcaaggtgggaagaacaggcaatatcctgacacaggctagatacagactctgagccaaaagcagactctgtgacatggaaagggaccacacaattttaatttttttttttttttgagacagagtctcgctctgtggccgtggcccaggctggagtgcagtggcacaatctcggctcactgcaagctccgcctcctgggttcacgccattctcctgcctcagcctcccaagtagctggaactacaggtgcccgccaaccacgcctggctaattttttgtatttttagtagagacggggtttcaccgtgttagccaggatggtctcgatctcctgacctcgtgatctgcccgcctcggcctcccaaagtgctgggattacaggcgtgagccaccacgcccggcagggaccacacaatttattaaccaaccaggttaataaattcttttttttttttttggagacggagtctcactcttgtcacccaggctggagtgcagtgacacgatctcggctcactgcaatctccgcctcctgggctcaagcgattctcctgcctcagcctcctgagtagctaggattacaggctcctgccaccacaccccacacattttttgtatttttagtagagaacgggaattcgccatgttggccaggctggtcttgaactcctgatctcaggtgatccgcccgcctcggcctccctaagtgttgggactacaggcgtgagccaccatgcctggccccaaccagaacacttctgagcgtggaagaggatgctgttaattactcaagaccaaaaggcataaaaggagacatatgtccacccaagtgataaggcagtttgggaaactacatttcccagtatgccctgccccttgaaagttaaaaatcttaactggcacagagcaccctgggacacctgtggttagcaccatttaagaagtaaaaggtatagggttgggttctgacgtgaaggctttccccttccatgggacacttaaccagacacaggacacaacacctgaggtgaaatttcaatgggtattaagtctggggtagagcttctctctccccaaatctagcttccaaagatgtggagctggtggagctgtccattggtccactgccctgtttctcctgggtgctgcctctgcctcctcatatcaccagcgtccccactgccactagtctgtagggggattccgggctaggtgctcttcccactcgacttcaaccaacttatatagctccatggtggcctgggcatcttccacagaggaatgtccgctcttcccaacctggatatcccggtttagcagcttcttggtgagatgcttcagagacatggtggcattctccgggcagtcagccttccggttgaggggggggatatgggaggtgtcacgggtgagggacttggggtgaaagtactgaagggctttgaagtcgttgtggatggcatgccccaccactatcttccctgtgagtatcttcaagatctctccatccttgaaatgctcactcccacaagttttctttcttctggaatccaccttcctcttccacaggtgatttccatggtataccctgtttggactcatactgccagtggctccttaccttcttattgatctccaccccatgacattaatttgccttcagtcctaaatgacactcatgtttgagatgtccatgtatttagttcagttctggcttgctacatgaagtcctttaactattaccattatgttggccttagacacatggctgggacccgggctccagggaggctaacaaaagcccaaaattacatgcaattagatgtgtatgggtactagaggaagagaatctgtggctttcatcaaattctcagagtctacaaaccgtaaaaaattaagaatcacatataaactaaagttgcagaagcaaccttattcacactagttttggaaccaagtaaaataaaaataacttctcaatatttcaggaaactgttttttttttttgagatggagtctcactcttgttgcccaggctggactgcggactgcagtggcacaatctcggctcactgcaagctctgcttcccgggttcacgccattcccctgcctcctgcctcagcctcctgagtagctgggactacaggagcctgccaccatgcctggctaatcttgtttttgtattttgtttagtagagacggggtttcaccgtgttagccaggatgggtctcgatatcctgacctcaggtgatccacccgccttggcctcccaaagtggtgctgggattacaggcgtgagccactgcacccggcctgcattttgtttttgtttggaggaacaaaaaagggaaagaaaaaacaaaaccacaggaaaataaagaggagaaaccctgaggcaaaaatggcttttccttttgagtcttcgtggagctgtgagctggatcacaaggtccctggggcattctgggcgggaaggccctcctccatccagagggcggcggccgagctgctccggggagtgcgcctgtggatgcgccgcagccgcagcaggtacagcaggatggccagcagcaccaccaggaagcagccagagaacaggtagtggttgtagacaaaggaaacgccccgccagtgggtgtgactggctcggaaggcctcctgctggatgtctcttaatggtagaaagcgggtcctgtagaggatggctccaagggtccactgaacctccttgtcgtaaacttgcaaggcagtctttaagcttttatagttgacaggaaacgaaaagcccctatgaaacacctcaaacatccaggccgatttgaagcactgatacttaagcctgtggaggtcagcatgagaggcgtacagtcctcggtcaaagcgttcccgcaaaatggaccactttgttgcacagtaatcctttgcagctttagtaaatttagcagcattgtagtctccccccattcgtaacacatcctcggtgcagtagtagaattcggagaagccatagaattcactgttctggaagtgaattgggggctggtagaccccattgagggaagtctgggtctcgtttgttttattcatgaaaggctggatagtctctcgacacaggtcaaagtctccagtccctcgtaggtatatggtttgtccattttgctggatttcatctttaatgtctaggggtaggcaggggtccaagtacggcatatcaggagtcagaccagtctgtttacccaggagcctgttcttttgaatggtgttggcaaatattctgtcttcgtatctctgtcgagcagcattgccaccaaacccaagaaacgtggccacatagactcgatacacatgctcagtttggtgaacatcacatcccaagttaaattcagctaacaagtttttagctacttcttcctgctgtgaggacgcaaagcttacagttttggggacttcgtacgctatctgagtcgacacgccgcccatgtcgagaatgcccgctgtccttttacggacaatggcttcgctgctttcacttccaggaatgttaacttccacaacggcctcatcatcatcttcaatatgctcaaatcgtccaaggacaaaattaatgccaatccaagcatacacaccttcctgtttcccagaaattacttctgcatgagagtcagaaaacagaaagtcaaagtgcacggggatatcggtcagaaggtcttccagaatagctttctgctggctttcggggaggattctcattccagccgtgcagagaatgtagagaggtgtctctttgtgttttgcccgtggcacatgctctgcagcaaagttcaaaagtggagaaatgtaatcactgactttctctggagaggtagcaaattctgaaatgcccggttttattttcatgaccactggctttcggtttttatccctcatttgcctgatatccaacagatcatgtggattgccattatgccttggccagcagtaaacaaatactcgagacccactgctaccacagtccaccacgatcccatagttcacattggggttattggtgtctgtagcttcaatgtcggtaactcgtgccaggtacctttgaaatttcttgtctctggttagtcgcccatacttatttcggattatgacaacagaaaaatataaaagtgaaacagcagcagccaggacactaatgaccataatttggcgtaaattggtattcagaattcgaggacaccctactggagatatgctaaaatgccaagaagcaggaaaaagacaggagatgccaatcctccccatactgaaaggtcagcaacaaggcaatgctctgggattcagtccttctcacaaacaattatagaaataatgctggggtcctcacggagttagagccctcctgcttggccggccggggaccccgggagcgggggaccaccagtgggcagcatcacggccagccggctcgtgc

SEQ ID NO: 145253 - DNA, 435 bp, Homo sapiens
cagcccagtgcggtggaattcgcgagcgcgagtgaggagacccccgccgggccactggcacttgcttctgcggcgagttccacccacgaccgcagcccagcaactggcagacgcaacctgaagcctgggctgcgcagtgtgggagggcttcgcgatcttgggggacccattccgaacttgcagaggaccgtagctctcctggcctggagagtgtgaacaggtgagtgtcacgcacgtgtccaggcagctctttcgggacgacttcctgcagacccattccgagccctgagcgcgctcggcctctgagtcggtcctcttggtcaccgggttctcctcccagggcggctttggggttcgctgcgagggagatgtgaacaccagcagcctatcttgacagggctctcctagctgagagggaaaatgcccttttgactt

SEQ ID NO: 145254 - DNA, 936 bp, Homo sapiens
tttcgtgtcggagcgagcgcgagtgaggagacccccgccgggccactggcacttgcttctgcggcgagtcccacccacgaccgcagcccagcaactcgcaaacgcaacctgaagcctgggctgcgcagtgtgggagggcttcgcgatcttgggggacccattccgaacttgcagaggaccgtagctctcctggcctggagagtgtgaacaggattgtggactcttccaagattcacaatgatatggtgaatccaaagactggaaccaaaaagatttactcagtgctttagttttaacaacagtaaattgtctaccaacacccatcatggctaaaagtgcggaggtcaaactggcaatatttgggagagcaggcgtgggcaagtcagctcttgtagtgagatttctgaccaaacggttcatctgggaatatgatcccaccctcgaatcaacctaccgacaccaaggcaaccattcgatgatggaagttgtttccatgggaggatactaggacactgctggtcaggaagataccattcagagggaggggcacatgcgatggggggaaggctttgtgcttggtctacgacattacttgaccgaggaagtttttgaaggaagtgcttgcacttaaggaacatcctagatgagatcaaaaagcccaagaatgtgactctcatcttggttggaaacaaagctgacttggaccactccaggcaggttagcacagaagaaggagagaagctggccacagaattggcttgtgctttttacgagtgctctgcctgcactggagaagggaatatcacagagatattctatgaattgtgtcgagaggtgcgtcgccggaggatggtgcagggcaagacgaggcgacgcagctccaccacgcatgtcaagcaaaccattaacgagatgctcaccaaaatcagtagttag

SEQ ID NO: 145255 - DNA, 709 bp, Homo sapiens
tttttttttctttttggaataatctaaagctattatttccaaaactttgttaccattttatagcatgatccacccatcatctgaaaaacaatactttttattctttgaatagcaagaatagtaattttaaaacagtacaaaatgtcttttgacatacactagaaaagtaaaacataacatttttggaaactctcatggctgttagggtaaaaatcatgggtcagggaggagggtggttaagagagttgaactccatgaattaccagtggagttcatggatatttcagacagccttcaaattgtgatggagtgataaacagtatgggactacacagtgatgaaacccggacatgaatccttttggacggttatcttttgacaaaaaacttctcaataagagaccattttccatctgtagaagttataattcctgcccactgcacagaaaatagtaacacacttaatctataaagtgctatatacatggttagatatttggttaaggcggaaattaagccgaaatcaaaatttttgggggttgatttggtttagtatgggggggatggatatgtatcgtactgaaaatataaattaatggccgggtgcggcggctcaagcctgcaatcgcagcaccttgggaggccgaggtgggcggaccacccgaggccaggaattcaagaccagcccggccaatggtaaaaccctatct

SEQ ID NO: 145256 - DNA, 1389 bp, Homo sapiens
tttttttttttgggtgtggtgatgtatttattcataatatattttcagaacacattaataatggagaataacacttattcatatactgaatataacttttcctggagcacctctaagagcttgtttggagttggagaatactgccagggcttttcctaatctctttggtctttggaagtgggccaggggtttctcaaaccaagtgtcttccatgggccattggcaaaggcttcccttcatccagcttggaggggcagaaagaccatggcttcagcacttccattttggaaagaagtaacaaaaaaagtgaattaatgagcaatcggaaagactcaaagcattttgtactccacagttcatttcttcacacaaacgtccattactgcagcgggcatgaaaaccaggcaggggtgttaggctcatggcctgaagagaagtcacatcaccagccgatgttttcatgcaaaaggcaatcgtgatgattcagaacctggttctgaaatttctccaggtgtgctcgtgagctgaaaggtccatgcccattctgtgcatcctgtgtctttctactggtaaacttggatgtccattttagagtatcttggcaaaatggtgagaggatctcactttcccaatatcactctgtaatgaagctgcttgggggatcctccatttgattgtggagagaccaaggcaccgtgggctgaagcaacgaatattaacaacactaacaacaataaggataaagtctaagtctcttccaaaaaaggcatatccaaaaataagggtaaagagctggtcttatttcatccaagtgattctgtgcactggaaattgtccttccgttcctccctttcagttaaaagtgtttatatttctgagtcggatgatccatttaaatacataccaatattagcaccaaggcagcatatttttttccccagagatcacatggaaactgaatacttatttaacatagttaatagttggtacaatctgtgatatcactaacatacttattggctgatacttgcctagaaatgccaaaaatatcttttatacaactcttatagcaccttgatgatggctagattgttttaaaaaaattcattttaaaaaagtaacaataaaacatttacagatgaaaagtaaacaatagtgtaccgtgataatgaaggatcactttgtcatattactacatgcaaaggcagtcataatagaatcattttacgtacaaaaatattacatcacaataaataatttcaaacataaatattaaactttacatcattaggatagtctacatatctacatacacacatatatgtgtatatatgtatgtgtagatatgtatatatgtatatgtacacacatttacacacacaagcataa

SEQ ID NO: 145257 - DNA, 367 bp, Homo sapiens
  misc_feature (1)...(367): n = a,t,c or g
ggaagcccagtacatttcaagttggtcgcggcttgggctccgctttggggaggggcagcaggtttattcactggatctctgaatacccaggccccctccaccatggccagccggggtgggggccggggtcgtggccggggccagttgaccttcaacgtggaggccgtgggcattgggaaaggggatgctttgcccccacccaccctgcagccttctccactcttccctcccttggagttccgcccagtacctttgccctcaggcgaggaaggggaatatgtcctggcactgaagcaagagctacgaggagccatgaggcagctcccctacttcatccggccagctgtccccaagagagatgtggacn

SEQ ID NO: 145258 - DNA, 419 bp, Homo sapiens
ggcacgaggattttgtattttatttcaagaggagaaggaagctattgaagtgttgtaggcagggaaatgacatccaaagtaatgacaacagtcatagtttaaatatgctgctatcacgttttcagtaaatatgattggttttttgtcttaactgggtttctgctgcatcatttctcaatcatttttactcccttcagaatttcttggctctttgtgccagtaattactacaatggctgtatatttcataggaatatcaagggtttcatggttcaaacaggagatccaacaggtaagttattccattaaccaagatctaaggaactgaatgtatagtatgaagaagtgggtaaaagaagaggaattaaatacgtggagcttttgctttgatttggtttggttaataagttctggtctacc

SEQ ID NO: 145259 - DNA, 372 bp, Homo sapiens
cccgcgcccaacttccgctggcccaaagaaactataattttgaaccaacagacctctgctggcatctgcgattgcatttttcctgttttaacaacggctgtgctagacgaagtggttgaagcccaaagacttatttttgagctcgctgtaagactgagaaatcacgtagtccttcctgaaaccactaagaggaaaaatgtctgtgacactgcatacagatgtaggtgatattaaaattgaagtcttctgtgagaggacacccaaaacatgtgagaatttcttggctctttgtgccagtaattactacaatggctgtatatttcataggaatatcaagggtttcatggttcaaacaggagatccaacaggaac

SEQ ID NO: 145260 - DNA, 320 bp, Homo sapiens
cggcacgaggagtgcctctacctctctgtgcccaggtttcctgtctgtgcgatggggatggaggtgatagtgtctaccctcctgaggtcgttggggggactaaatgggatagtaagtgtaaatgggacagcagtgccaggcacagagtgagcacttcaataagtcaacctcttcaccatcattcccgacaccacagcaacagaaatgataatgctatcaacccccaacggttcaacccttgccccctgcccgtgtgcccaaatcctttatgctcaaccccaagaaagctgagatcgttccttcaaaaaaaaaaaaaaaaa

SEQ ID NO: 145261 - DNA, 637 bp, Homo sapiens; identical to SEQ ID NO: 144817
  misc_feature (1)...(637): n = a,t,c or g

SEQ ID NO: 145262 - DNA, 744 bp, Homo sapiens
  misc_feature (1)...(744): n = a,t,c or g
gtcctagtggccaagaattcggcacgagggaacgtctgaggttatcaataagctcctagtccagacgccatgggtcagtttcacagaggaggacaaggctactatcacaagcctgtggggcaaggtgaatgtggaagatgctggaggagaaaccctgggaaggctcctggttgtctacccatggacccagaggttctttgacagctttggcaacctgtcctctgcctctgccatcatgggcaaccccaaagtcaaggcacatggcaagaaggtgctgacttccttgggagatgccatatgagcacctggatgatctcaagggcacctttgcccagctgagtgaactgcactgtgacaagctgcatgtggatcctgagaacttgaagctcctgggaaatgtgctggagaccgctttggcaatccaatttcggcgcaaaaattctcccctttaagggcaggcttcctggcagaagatggtgactggagtggccagtgccctgtcctccagataccactgagctcactggccatgatgcaaagctttcaaagataggctttattctgccagcaatcaaaatataaaatctattcttgctaggagatcaccaaannnnnatnntnnnnnnncccccggattttttatttagcgggccgcacctttttccccttttagggggggtaaatttatattgggccttgggccggggttttcaaaagcggggggannnnnnnnnnaaagagccc

SEQ ID NO: 145263 - DNA, 219 bp, Homo sapiens
tcttacggctttgcagaaccaaatacttctttctagccaaaaaaattcaaggtagaaaaagataattctcaaatttttgatgacatctagtttatattttacttctatgtaataagttataattattattattattattattattttttgagacagggtcttgctctgttgcccaggctggagtgcagtggcatgatcacggctcactgcagactcaac

SEQ ID NO: 145264 - DNA, 423 bp, Homo sapiens
acgcgtccgagaagatgttcctatgtcaactgaggaacagtataggatccgtcaggtgaacatttactattatctagaagatgacagcatgtctgtcatagagcctgttgtagaaaattctggaatccttcaaggcaagttaataaaacgccagcggctagccaagaatgaccggggtgaccattaccattggaaagacctaaatcgaggaataaacatcacaatttatggcaaaactttccgcgttggtgactgtgaccaattcacacaggtatttttagaaagccaaggaattgagttaaatccaccagagaagatggctcttgatccttacactgaactccgaaaacagcctcttcgtaagtatgtcaccccatcagactttgatcaactcaagcaatttctcacctttgacgaacaggg

SEQ ID NO: 145265 - DNA, 6984 bp, Homo sapiens
aattttctgccttttattgttatttcagaaaatatttgatcatttgttccaaaatgtacatttaaaaaatccatacaaaactgtaatttgttttaaaaccagacagaaacagtggaaaaatgattttgaaaaaaagttcaccaaaagcaaaaagacacccctccccccaacccttttttacatgaaagcataaatacggcaggtacaaattttccttgagttccttgttgaaatttggtccatatgaacaggctagagtagaaaacagacactttgtccacatttgcattatcagttgctcagggcaccagcagccttagttcatccttcagatgtttttttaaacagaggaaccgaaaaatgaggtttacagtctcatcacatgaacactcaaatctgtacccaaggaaacagcggtattatatttactgtcacagctagaccctatcaggtgaacagggctctccacctgcggctgttgcttcgcaaaatatccttcctctccacgtgaacaagtagctctagagtgcttttaggcagagtgacggtgatgtcatgggcaccacgccaatcttattcctggacaatgacttaagccccatcgtgagaatggttttttcctcttcaacacattttttaaaaatagacctctaagatgatgctacatgttctaaaagagtgccacagaaacccacccaggatcacaagaatgacaacaaaaggaaagtggctatttcttgtgtaagggatgatgactccccctcccatgggtcccatttctcccccagttgcaggtgttttaagggacagaaaggctgtggaaaggaccactggctgggagagttattgcacaacccggaagagtgagaaaaacgtgggcgggcaaggggtaggggagagggttgctgcgactaaaacaaggtaacactgaattaggagctcgaacagttctgcaacagtcagacatgtatgtgtttatgtgttagcacttggagactgggaagtaaaagtaaacacctttatcatataaactttgggctgaatgggaagcaaaatagaccaaaagaggttatggcaagtgggccttttaaaaaaaatctgggggtggggaaaataacggagaaggagtttgctatgtggggccagaggagagttttcgaagtgggggctggaagctctgggcttctcttaataggtatgcttgtggttgggccgcctcacagacttccacagcccaccccagttggcccagaaggagaactgaccaccagggggaacccaaaaaccaaaacagaacacaccacagacccttaatcctgggcagccggggttagaaaccaaatggggtgaaactgtcacaatccgtgtcccttttatatataactatactgaggtatggtgtccttggctgccgtcggagccctggcaactgggggctggccacggagtacaagttgaaaaccacacagcaaaagtaaggcacttattctcacacacaggcgcacgcacgcaatctgcttgggacaaaaagtctacaggggttgccaagcacgaaaggctacatggagactgcaaatcccaatgctcgtctttatagctctgccactccagggaactccataaaagaatgaggcagctttcactggggagaactggtcttcagcctttgcaaggtggagctaacactcatgtgagtagtggggtagagtgagaagttggtaaagtcttcctcactgggacaaccttgagctggagagagatcctatttaggttttccagtcatctgacaatgacctaatcctccaataatcctgaaaatcctctcctgagaaaaggaaccataagctcggaaggcagagtgagggaggaagagcactccattgtcttgactcaaaagctttcagcactccctctgttagaggagagagcttagaacatcaagaattgaagtttgtgcacttgtgccataggcccttaagcaaaagaattagttatgtgcagacttccctacctctcacaccaggcctagaaaaaccaactaggaaggctgaagcatacaaaggaaacccaagcaaaggccttttctaggcacaagggggtcggcaacccacttccaattaaagcatccatggaagataagaattttgttgtggaatcctgggaggagatgcactctttcacccaacctcttattagctgcttagaaaaaagaaggggtactgacaaaggaggtcccaaaagagaccccagaagcacacacccaccccaagcttcaggggttcttagggtcccagggtttccggtcaagagaaggatctgtgaacgtggccagggcagaggtgtctattggggtttcttaaatgttgggaagttatgccttgggacatgaacagacaagtttctcagcaaccatttcggtctggtggcccagacacacatgggattagaactgactcaaaagggaggacagcagatcccccgccggctcagcctgctcccctctcacccagaaccatcccctaccttcaaaaggaacacatgcaatttattaatagtgcagctatcagcgcccggatggtaaaaataactcccatcatcactgcacctccaaggaggggagcgggtagcacagatccttggtccaccagcgccacctccctctcctcctgctgtgtctgttggcttccccacaaatgtaagttagttagccagggctgtcgagaggccacagttgctggggtaggtttacgtcttttctcctgctcttggtgcatggtgctgagctctcaagcttggaggtgtctggcagagccttcacaaatggcttggcactttggggcaggagagaatgcataaaactgaagaaaacagccaaagtggccaaaattagaacaagctagcccaacacgctcataggatgaagtggaattatttcagctctggcaacacagtctgtgtcaacctgccacagacttggctctgctgtgaaataaacgtgccagggagggtggcagggggaggggggtgacaaagtaccctacaactaccctctaaccaccccccccaaacatccctgaagcccaggctggcaagatgccagccccactcatggtctcagggtttttttttgttttttttttttttttacataaaataaacccttagcacacccgtccactgggaagcagagcctaagctgaccccagccactgggctggtgggaccacatccaaggcatgaagtactggcagcacggggagcttgcaagagacagggacatgaagttgtggcgtctctggcacgcaagtgtcctgggacagagcaatggaaacctacaggcatgagaatgagggttgcttgatggcaagatttcagctgctctgctcacactacctctccagcaactggcacaacgcaggcacctggcacatcccagcatgccatacatatctgttgaagccacaactcaacagtttaacctggactcacctgagagaggcctcctgcatgtgaagccctgccaatgacacagcctggagagcacctaggatgggtgttctctaatgggggaggaaggtgggcttaggaggctgctggctgaacatgcgatttgcagttattaggcaaggtggggggcctgaactcaattatagactctgtcagggctgtttgactaaagtggctaagggatcccatatcaggtctgctgtgttgaaaccaaactgcccttttaccaacgtttctgctgtgcagcccagagaagtgtcagggaaggagagggagaaatgggagaaatacatattttcaaaaacactgtctcacttcctaagggtaatcaaaagcaaccacgggtagctcttcccatttctgcaaccttatcgtagagagggatgaaggcctccaatggcgttaggaaacaaatccctcagttactgggaagctaaaatttatctatgatgtaagtgacttggagaaggggagttgccttgatgaaaagacccatttccccccttttgaatctaaatccaaggtttggtttctactgtgatgtcagaaagatgaccagtattccaaatgacactactattcctgcacctaccaagaactactcccctttgcctcaaaacagagttcggaggttcttaattgggacttttgtttttttagacagaatttcgctcttgttgtccaggctggagtgccatggtacaatctccgctcactgcaacctccaccttctaggttcaagcgattctcctgcctcagcctcccgagtagctgggattacaggtgcctgccactacacctaattttttgtatttttagtagagatggggtttcaccatgttggccaggctggtcttgaactcctaacctcaggtgatctgcccacctcgacctcccaaagtgctgggataacaggcgtaagctactgcgtccggccgtaattaggaccggctttttaaagctgaacgccccttctaaaagtcctcacaaggcaccaaaaggacttggaggccttctcttcaggtggaggggaggggaaagaatctgtgagggaaggggccagaaaggcgcctatcatctacccagagagtgactctcagtcagtcatggtttcatgcagtctaaaatgctgtagttgtgctcaaaaaacgacaattccaaagaacactcaacaagggcggccagatgaacagcggtccaagtgaccctccctgaacaccaagggaccagcatggggctgaagcccttgagacttagtgtttctgcagctagagatgaagtcaaggtagtaagtttggcccctgacggggctggctggctctggaggtgaggaccagcctatctcaggcaggtatatgaactgctgtttggtttggttttgaatgcttgtgaatggctgaaaaagcaatggcgactgggactgctggagaaaggcctaggtcgactccactgtgggttctgccaccattacctttctggaggtgcctgctgcgcagtttgctctgctctcgctctaagcagtgggaagacatgtcctccccacagagcgacagcaggctggcttccaatccgcggccagccactggtaggagctcgagtcacgggacccaaccgagttcacaccatccttctggattgagttgtcacgtcccaaagccaaatgccttggcatttacaacgagcagtggctgctgtgcctcaagatggtacatgcagaactggaatcatatatctcgtcagttaatcagcaccaaggagattatgatccgagatggccgctctcttcttgcccatccacatgaggaccaccaagggcctaccagccccaggcttctgaccggcaggccctgggggaccgaaggacaggactgcaatcttagctcccctcccattgtaaaaatcagacagaaaaattgcaagataaggtgaaaataggaagtaaaaaggaaaagcagcagccataaggcaagaaacagagcaagcagaaaggtgccagccatgggcgcctggcgttccagaaaagccagcacaggacaggagtgaggacaggaggtggcctgagggggagaaagagaaagatttttggctttattgagaatggtttgtggaagaataagaggaagccaagaagaaggaaagcgaaacgccccctccccccattgcaagacaggtttcggctgtttgagacggagcatcacaggcaggaaggaggaggcagggagggggcctgggctccttgccccctgctcggcccccaccaagaggattcctgttcttagcactttggccttagggagacttgagtttcttagtccgtggggaggttccgttctctgccttcaccactccattttcatggtaaccagattccctcttgatgagcctggctggtagtctgggtgtggctgggactctccgctttgcactctgctcattccagtattcccgccagtgccgcagctgggagtggatgaagcgccacatgagccaggcctgggcggcacacaccagcagcagcacgcagagcctgcaaaacaaagtgttgaagttccctttctcgggatcaaatgcctggttttccatgcgagccagtccaaagccaatggccagcacggcaagggtgaggatgaagaggcgggtaaccccaaaaacagcagcccaggcactgaacagtttctcgttgttttcatctgcaaagtagaagagtctagccgtgtggaagaggaactcagttgagtactgcagcagcagcaagatcaggcccaggcggctcaggtttaagaggtatgctccagctatatgcaccaggtacaggcaaatatactggagctggcggggaatttcctccttccgtaccttctggaagtatagctcaggaagtgcgtgcagccagtaggccagctggcataggtagaaaaacttcacctggaaggggaggtgcacatgcgggtagtcttcccagaggcttcttgggtttgttaagtatccttccgtcaccaccacgtagaagcaccaaatcaccgaggtgaaatgaaagacgaccagctgtccagattcattgaacttgctgtgtttgactttggagagatgaagccgtttgctgattttatctaaaatgtactcctgaaccacagcatgcaagatgatggtgatgaagatgtagaacaagattgtgaccaggtccttagggccatagtggtagtgcacggtctcactgtctgctgtaggcacgctaatgttatactgaggtaaaataaatagaaaggcagtcttggctgtgacctcgaacataagcccgatgaggacgcagagcaccaggcagaagccgatgtccgcatggttgtggatgacgaactcctggctgaagagcgggtaacttttcgtcctcctgcggaaagccatggcagcgggcgcgcagcggccggcggggcccgcaccctgcgctcacgaaccgcagcgcaaacttctccagcaccg

SEQ ID NO: 145266 - DNA, 2530 bp, Homo sapiens
tttcgtgaagagttcggaggttttcgcgccggggtggtgtcattctgggaacctccacgcgactttggtggaggtagttctttggcagcgggcatggcgggtaccgtggtgctggacgatgtggagctgcgggaggctcaaagagattacctggacttcctgggacgacgaggaagaccagggaatttatcagagcaaagttcgggagctgatcagtgacaaccaataccggctgattgtcaatgtgaatgacctgcgcaggaaaaacgagaagagggcctaaccggcattcctgaacaatgcctttgaagggagctggttgccttccagcgggccttaaaggattttgtggcctccattgatgctacctatgccaagcagtatgaaggagttctacgtaggacttggaaggcagctttggctccaagcacgtctccccgcggactcttacctcctgcttcctcagctgtgtggtctgtgtggagggcattgtcactaaatgttctctagttcgtcccaaagtcgtccgcagtgtccactactgtcctgctactaagaagaccatagagcgacgttattctgatctcaccaccctggtggcctttccctccagctctgtctatcctaccaaggatgaggagaacaatccccttgagacagaatatggcctttctgtctacaaggatcaccagaccatcaccatccaggagatgccggagaaggccccagccggccagctcccccgctctgtggacgtcattctgggatgatgacttggtggataaagcgaagcctggtgaccgggttcaggtggtgggaacctaccgttgccttcctggaaagaagggaggctacaccctctgggaccttcaggactgtcctgattgcctgtaatgttaagcagatgagcaaggatgctcagccctctttctctgctgaggatatagccaagatcaagaagttcagtaaaacccgatccaaggatatctttgaccagctggccaagtcattggccccaagtatccatgggcatgactatgtcaagaaagcaatcctctgcttgctcttgggaggggtggaacgagacctagaaaatggcagccacatccgtggggacatcaatattcttctaataggagacccatccgttgccaagtctcagcttctgcggtatgtgctttgcactgcaccccgagctatccccaccactggccggggctcctctggagtgggtctgacggctgctgtcaccacagaccaggaaacaggagagcgccgtctggaagcaggggccatggtcctggctgaccgaggcgtggtttgcattgatgaatttgacaaaatgtctgacatggatcgcacagccatccatgaagtgatggagcagggtcgagtgaccattgccaaggctggcatccatgctcggctgaatgcccgctgcagtgttttggcagctgccaaccctgtctacggcaggtatgaccagtataagactccaatggagaacattgggctacaggactcactgctgtcacgatttgacttgctcttcatcatgctggatcagatggatcctgagcaggatcgggagatctcagaccatgtccttcggatgcaccgttacagagcacctggggagcaggatggcgatgctatgcccttgggtagtgctgtggatatcctggccacagatgatcccaactttagccaggaagatcagcaggacacccagatttatgagaagcatgacaaccttctacatgggaccaagaagaaaaaggagaagatggtgagtgcagcattcatgaagaagtacatccatgtggccaaaatcatcaagcctgtcctgacacaggagtcggccacctacattgcagaagagtattcacgcctgcgcagccaggatagcatgagctcagacaccgccaggacatctccagttacagcccgaacactggaaactctgattcgactggccacagcccatgcgaaggcccgcatgagcaagactgtggacctgcaggatgcagaggaagctgtggagttggtccagtatgcttactttaagaaggttctggagaaggagaagaaacgtaagaagcgaagtgaggatgaatcagagacagaagatgaagaggagaaaagccaagaggaccaggagcagaagaggaagagaaggaagactcgccagccagatgccaaagatggggattcatacgacccctatgacttcagtgacacagaggaggaaatgcctcaagtacacactccaaagacggcagactcacaggagaccaaggaatcccagaaagtggagttgagtgaatccaggttgaaggcattcaaggtggccctcttggatgtgttccgggaagctcatgcgcagtcaatcggcatgaatcgcctcacagaatccatcaaccgggacagcgaagagcccttctcttcagttgagatccaggctgctctgagcaagatgcaggatgacaatcaggtcatggtgtctgagggcatcatcttcctcatctga

SEQ ID NO: 145267 - DNA, 1137 bp, Homo sapiens
tcattcttttatggagttccctggagtggcagagctataaagacgagcattgggatttgcagtctccatgtagcctttcgtgcttggcaacccctgtaggctttttgtcccaagcagattgcgtgcgtgcgcctgtgtgaattggtcacagtcaacaacgcggaaagttttgccataaattgtgatgtttattcctcgatttaggtctttccaatggtaatggtcaccccggtcattcttggctagccgctggcgttttattaacttgccttgaaggattccagaattttctacaacaggctctatgacagacatgctgtcatcttctagataatagtaaatgttcacctgacggatcctatactgttcctcagttgacatagcaacatctcctggacaataggcattcaaattcagttcgttttttgtcaaaggccacatgcgcaggaataaaatccgcaggtggggcttgtttaaggttggcccataagttaagactggtgccttactggcccaactcatcccagctcagcctgggacagctggttgaactggagccggtctccgcctatcccaactgttggacgtcgaacaattgcatagccgttcctgtagctcagcgtctgacttctgtggaaggctgttttcgtagagtccttaaaggacgtgcccggaagaaagggcaagccatgcacgggattggacaccattgcagccggtaccaccgccgccacctaggtcctgcttcgtcctctccggttgcccaggcgacaagcagtgttcgcgggcacctccaggatccatggtaacgctaaacatccggaactcccacgagcggaaggcggggccaggaggcgcaggcatcacaggaggtttgcgcgtgcgccatccgcaggactccgcgttctcgcggaagaccagggaatttatcagagcaaagttcgggagctgatcagtgacaaccaataccggctgattgtcaatgtgaatgacctgcgcaggaaaaacgagaagagggctaaccggcttctgaacaatgcctttgaggagctggttgccttccagcgggccttaaaggattttggggcctccattgatgctacctatgccaagcagtatgaggagttctacgtaggg

SEQ ID NO: 145268 - DNA, 640 bp, Homo sapiens
ttttaaagctagctgcaagcagggaccagattagtggatatcctctttaagggtgaagtctttccaattgctgtcaactttggcaggagtcagagggactcttcttgggtcactaacaatagactgtctgcccagcaccagagagcactgatagtcccctgacggccattgtcccttgcccagctcacccactggcctcccaaggaagcactgttcattgtctgccagactacaatggtgactttctcctgagatagacctccttgaagggacatgatctggatgccagggttaataacactgaaaaattcaccatttctttgggtattataagatataattgatatatagaaataaatatatattttagggcacaaaggcatgtagggtatctaacacatatattaaataatacatgtatatgtctaatacacataccacatatatgtgtgtacgtatatccatatgtgtgtatatatttatgtgtgtatatgtatacatttgtattatacattttttccctctctttcaagatcaccatggatagtgaggacagccacacatttttgagtatttcctatgttagtgcttaagacagtacttcctatctctaaggatttgaaatttatttggagaggat

SEQ ID NO: 145269 - DNA, 368 bp, Homo sapiens
  misc_feature (1)...(368): n = a,t,c or g
ncctgcacatgtaccagggcgcccagcctttccggaggtgagcttgtgtttacccactgccatgggagtatttcccagtcagcctctcctccccacagtggagactggctgcaaccacccgacccccaacccaggcaaccaaatgtgacatccaaggagttcccggagtggccatctgtccctgccatgccaatgtttacgcgacatgggcaggagaaggacaggccagggaagcctccagggtatcttgcatcagacccaaggcatccacatcccaggccgtttgtgccacaaaacaaaaacagtgaaagaagagtcctctgtctaaccagagaggttcccggttcctaaagagaagcatccatctc

SEQ ID NO: 145270 - DNA, 1091 bp, Homo sapiens
aatcgaatcgcatttggaagcgttcggaaccgccggcggagacccacgcgtgcgcccagccgtccgcagaattaccgtactgaagacggggactggtatgggaaagcgaagttcatcactcacacatgcggggacgggccatgaattctctggatcttggaggagtactttcggacctatcacttgagctgcaggggcctctgccctccctctgaccagtatccaagagaagagatcaacagagagtaccgcaatgcaggtccaatagctaattacctacaacatgtaatgcaggaagcccgacaaaatcctccacctaacctcccccctgggtccctggtgatgctctatgaacctaaatgggctcaaggtgtcccaggcaacttagagattattgaagacttgaacttggaggagatactgatctatgtagcgaataaatgccgttatctcttgcggaatggttattctccgaaggatattgctgtgcttttcaccaaagcaagtgaagtggaaaaatataaagacaggcttctaacagcaatgaggaagagaaaactgtctcagctccatgaggagtctgatctgttactacagatcggtgatgcgtcggatgttctaaccgatcacattgtgttggacagtgtctgtcgattttcaggcctggaaagaaatatcgtgtttggaatcaatccaggagtagccccaccggctggggcctacaatcttctgctctgtttggcttctagggcaaaaagacatctgtatattctgaaggcttctgtgtgacaggaaacccaagcctaagaaacaattaagtggttctcatctctaattaactgtgaaaccatttaatccaaacatgtaagcacacactcacttattaagtcacatacttttctaggtgctggggattgagaacgaatcgatgtaagattcctcctttagggcagagacagaccactgacaaatacacagatagacaaggaatttcccatggtaaaaagggatatcagtaattacaggaccgtgagactcagagatgtgtgtgtgtgtgtgtgtgtgtgtgtgtgtgtgtgtgtgcgcgcgcg

SEQ ID NO: 145271 - DNA, 637 bp, Homo sapiens; identical to SEQ ID NO: 144817
  misc_feature (1)...(637): n = a,t,c or g

SEQ ID NO: 145272 - DNA, 767 bp, Homo sapiens
  misc_feature (1)...(767): n = a,t,c or g
gacactcgctttttggaacgtctgaggttatcaataagctcctagtccagacgcccatgggtcatttcacagaggaggacaaggctactatcacaaagcctgtggggcaaggtgaatgtggaaagatgctggaggagaaaccctgggaaggctcctggttgtctacccatggacccagaggttctttgacagctttggcaacctgtcctctgcctctgccatccatgggcaacccccaaagtcaaggcacatggcaagaaggtgctgacgatccttgggagatgccataaaagcacctggatgatctcaaagggcacctttgcccaagcctgaagtgaactgcacttgtgacaaagctgcaatgtggatccttgagaacttcaaagctcctggggaaatgttgctggtgacccgtttttggcaatcccattttcggcaaaagaattcacccctgaaggttgcagggcttcctgggcagaaagatgggtgacttgcagttggccagtggccctgttcctccaggataccactgaagctcaattgcccatgaatgcagagcttttcaaggataaggcttttattcttgcaagcaattacaaataataaatctatttctgctaagagatcaccaaannnnnatnntnnnnnnncccccggattttttatttagcgggccgcacctttttccccttttagggggggtaaatttatattgggccttgggccggggttttcaaaagcggggggannnnnnnnnnaaagagccc

SEQ ID NO: 145273 - DNA, 637 bp, Homo sapiens; identical to SEQ ID NO: 144817
  misc_feature (1)...(637): n = a,t,c or g

SEQ ID NO: 145274 - DNA, 772 bp, Homo sapiens
  misc_feature (1)...(772): n = a,t,c or g
gacactcgctttttggaacgtctgaggttatcaataagctcctagtccagacgcccatgggtcatttcacagaggaggacaaggctactatcgacaagcctctggtgcaaggtgaatgtggaaagatgctggaggagaaaccctgggaaggctcctggttgtctacccatggacccagaggttctttgacagctttggcaacctgtcctctgcctctgccatccatgggcaacccccaaagtcaaggcacatggcaagaaggtgctgactttccttgggagatgccataaagcacctgggatgatctcaaagggcacctttgcccaagcctgaagtgaacttgcactgttgacaagctggcatgtgggatcctggagaacttcaaagctcctgggggaaatgttgctggtgacccgttttgggcaatcccattttcggcaaaagaatttcacccctggaggttgcaaggctttcctgggcagaaagatgggtgacttggagttggccaagtgcccttgttccttccagataccactgaagctcaattgcccatgaatgcagagcttttcaaggataaggcttttattcttgcaagcaattacaaataataaatctatttctgctaagagatcaccaaannnnnatnntnnnnnnncccccggattttttatttagcgggccgcacctttttccccttttagggggggtaaatttatattgggccttgggccggggttttcaaaagcggggggannnnnnnnnnaaagagccc

SEQ ID NO: 145275 - DNA, 357 bp, Homo sapiens
  misc_feature (1)...(357): n = a,t,c or g
ctcttctactgtcaacatcccacaccacagtggcacatatgttacctgcatagacacatcgttgtcatccaaagtnnnnnnnnnnnnnnnnnnnnnnnnnnnnnnnnnnnnnnnnnnnnnnnnnnnnnnnnctgatttttctaaaatcctgtctgaaaaatcttcctttcattggagaatttaatctgtttttcaattcatgcaattacttattgaggcttatctttatgcttctgtttatcctacctagtctccccctttttctttttttctcaccttttattgcattgaccagtttttgtttattttattctttttctctattacagtatgagcatgcttctatacacagacaca

SEQ ID NO: 145276 - DNA, 380 bp, Homo sapiens
agcagaacgtgtagccgcgacccctccaatccgctccgggcagctgctgatgcatggaatcccctgggcttccatccactccactgctgaccaacccattcgcctgtgctgagtcttactgcaggcctttccttgcctctgagggaccctgtgggggtccatccggctggagaagaaaagactctcatgctaacgttgcagaccccaaagggtcctgcgtggatgtggagatggccaatgagaatcacggcaacccccgataggaagccgacctgctgaaggactccccacgtacctccgatcagagacagccctgttctcaaagccaaacacgcgtgttcaagacctccccaggagcttcagcatgcaggctgggacaa

SEQ ID NO: 145277 - DNA, 644 bp, Homo sapiens
caacgcatgtgccgctccccgctccagcacttctcccagcctgcatgcaccagctcctctgggaggtcctgaaccaggcggattggcttaggaaaagcagggctggcctctgattggagggtacctggggagtgactcaacagggtcgctttcctcccgggggctgccgtgattctcattggccatctccacacccacacaggaccctctggggtctgcaacgttagcatgagaggcttttcttctccagccggatggacccccacagggtcccacagaggcaaggaaaggcctgcaggaagactcatgcacaggcgaatgggctggtcagcagtggagtggacgggacgcccaggggattccttgcatcagcacctgcccggagcggactggaggggacgcggctacacgctcccctcgaccgcccgttttgccgcctccgcctcgccctccccagcgccgctgccgccatcttgtgtcccgggccgggactccgcgctgcgcatgcgctgggaccctaacctccaaaagaggtacccattggcgctcaaccgaattgctgctcaggaggtccccattgagatcaagccagtaaacccatcccccttgagccagctgcagagaatggagcccaaacagatgtt

SEQ ID NO: 145278 - DNA, 696 bp, Homo sapiens
  misc_feature (1)...(696): n = a,t,c or g
tttatcttttcatgctgaaattttatcaactcattgtggtcacactgattatctcatgctgatcagaagctctgattggttgttgatgacatcatacgaatcattgggacactgattttattgtacactccatcatagacgtcttccttaatttaggaagggaaaagtcaatggttactccatcagtacagtttggcagataaaaatgcagggggcaacaggacatatgtacaacaaaaagtgccttgataacaaaaaggttgagaaccactgaccaaggtaacgaaaaaaaatgaaagctgcccttgattctcctgggcaaggaaaaaattccctgaatgccttgggggctgaacaacacaggtttcaagactgaaatgaatccccctttctcctncaccctctggggtctgcaacgttagcatgagaggcttttcttctccagccggaatggacccccacagggtcccacagaggcaaggaaaggcctgcaggaagactcagcacaggcgaatgggctggtcagcagtggagtggacgggagcccaggggattccttgcatcagcagctgcccggagcggactggaggggacgcggctagacgttctgctcgaccgcccgttttgccgcctccgcctcgccctccccagcgccgctgccgccatcttgtgtcccgggccgggactccgcgctgc

SEQ ID NO: 145279 - DNA, 352 bp, Homo sapiens
gcactcaggcctgctacaccaccgaacagagccccacagccagagaggcacacggcctgcttcacacagccgacaaccccgccggaaacaaccagtgctgggagccaaggccaaactgatgcaaaggcgctactgagccagagcccttctgcaccgagactaccccaggcatgcaccgccctcccaaaggtccaaaacgatgcaaaggcgctactgagccagagtcgtgcactgagactaccccaggcatgcaccgccctcccgaaggtccaaaccaatgcaaaggcgctactgagccagagtcctgcattgagactaccccagacatgtactgccctcccgactcgtgccg

SEQ ID NO: 145280 - DNA, 401 bp, Homo sapiens
  misc_feature (1)...(401): n = a,t,c or g
cggacgcgtgggactagttctagatcgcgagcggcccccnnnnnnnnnnnnnaaaggggagggggtaaaagtgggggaggaaaagggccaaaatactgactggaccgttaattcgagcttttcatatgcaaaaagcggaataccagttccgaattctttttttaagtttctcctttaaataaccttctttttcaaaggctccgttttgcatgcttaattttgaaactaccccggggtttggcaaaatttgactgaattcaggggtgaaagtttgatccagcccaagggtatttgaatttgaccccccagttcaaccagggtttacaagggaatttctgaaaacttgggtccttaaaaaaaatgcatgcactggggtttgcttttggaaaagcaaagttgcg

SEQ ID NO: 145281 - DNA, 470 bp, Homo sapiens; identical to SEQ ID NO: 133589
  misc_feature (1)...(470): n = a,t,c or g

SEQ ID NO: 145282 - DNA, 1110 bp, Homo sapiens
ggaattccaggtaggtcatccttgcggccttgcggcatgggcagtatccgccgccatcctcttccgtgaggcgcgctgagacccggaccggccctcctgagaggatgccggtgcgggcgcccgcggagagggtagggagtggtgggcgcggcggcctcgggggcggggtcccggaaagccgggctggcgggggtacccgggccgcccggccgcgctaatcgtgagtcgcccccaggacccgtcgccatgggccgtgtgatccgtggacagaggaagggcgccggtgtctgtgttccgcgcgcacgtgaagcaccgtaaaggcgctgcgcgcctgcgcgccgtggatttcgctgagcggcacggctacatcaaagggcatcgtcaaggacatcatccacgacccgggccgcggcgcgcccctcgccaaggtgggtcttccgggattcgtatcggtttaagaagcggacggagcttgttcattgccgccgaggggcattcacacgggccagttttgtgtattgcggcaagaaggcccagctcaacattggcaatgtgctccctgtgggcaccaatgcctgagggtacaatcgtgtgcttgccttggaggagaagccttggagaccgtggcaagcctggcccgggcatcagggaactattgccaccgttatctcccacaacccttgagaccaagaagaccccgtgtgaagctgcccttccgggtccaaagaaggttatctccctcagccaacaagagcttgtggttggtgttggtggctggagggtggcccgaatgtgacaaacccatctttgaaggctggctcgggccgtcccccaaatataaaggcaaaagaggaactgctgggccacgagttacgggggtgtgggccatgaatccttttgaagcattctttttgaaggggggaaaccccccagcacatcggcaaagccctccacccatccgcagagatgcccctgctggccgcaaagtgggtctcattgctgcccgccggactggacgtctccggggaaccaagactgtgcaggagaaagagaactagtgctgagggcctcaataaagtttgtgtttatgccaaaaaaaaaaaaaaaaaa

SEQ ID NO: 145283 - DNA, 340 bp, Homo sapiens
cggcacgagggaacgtctgaggttatcagtacgctcctagtccagacgccatgggtcatttcacagaggaggacaaggctactatcacaagcctgtggggcaaggtgaatgaggaagatgctggaggagaaaccctgggaaggctcctggttgtctacccatggacccaaaggttctttgacagctttggcaacctgtcctctgcctctgccatcatgggcaaccccatagtcaatgcacatggcacgaaggtgctgacttccttgggagatgccatagagcacctggatgatctcaagggcacctttgcccagctgagtgaactgcactgtgacaagct

SEQ ID NO: 145284 - DNA, 637 bp, Homo sapiens; identical to SEQ ID NO: 144817
  misc_feature (1)...(637): n = a,t,c or g

SEQ ID NO: 145285 - DNA, 764 bp, Homo sapiens
  misc_feature (1)...(764): n = a,t,c or g
gacactcgctttttggaacgtctgaggttatcaataagctcctagtccagacgccatgggtcatttcacagaggaggacaaggctactatcacaagcctgtggggcaaggtgaatgtggaagatgctggaggagaaaccctgggaaggctcctggttgtctacccatggacccagaggttctttgacagctttggcaacctgtcctctgcctctgccatcatgggcaaccccaaagtcaaggcacatggcaagaaggtgctgacttccttgggagatgccataaaagcacctgggatgatctcaagggcacctttgcccaagctgacgtgaacttgcactgttgacaagcttgcatgttggatcctgaagaactttcaagcttcctggggaaatgtgcttggtgacccgtttttgggcaatcccattttcgggcaaagaatttcacccctgaaggtgccaggctttcctgggcagaaagatgggtgacttggagttggccagtgcccttgttccttccagataccactgaagcctctttgccccatgatgcagagcttttcaaggataaggcttttattcttgcaagcaattacaaataataaatctatttctgctaagagatcaccaaannnnnatnntnnnnnnncccccggattttttatttagcgggccgcacctttttccccttttagggggggtaaatttatattgggccttgggccggggttttcaaaagcggggggannnnnnnnnnaaagagccc

SEQ ID NO: 145286 - DNA, 637 bp, Homo sapiens; identical to SEQ ID NO: 144817
  misc_feature (1)...(637): n = a,t,c or g

SEQ ID NO: 145287 - DNA, 779 bp, Homo sapiens
  misc_feature (1)...(779): n = a,t,c or g
gacactcgctttttggaacgtctgaggttatcaataagctccgtagtccagacgcccatgggtcatttcacagaggaggacaaggctactatcacaagcctgtggggcaaggtgaatgtggaaagatgctggaggagaaaccctgggaaggctcctggttgtctacccatggacccagaaggttctttgacagctttggcaacctgtcctctgcctctgccatccatgggcaacccccaaagtcaaggcacatgggcaagaaggtgctgacttcctttgggagatgccataaagcacctggaatgatctcaaggggcaccttttgcccaagcctgaagtgaaactgcacttgtgacaaagctgcattgttggatcctgaggaactttcaagcttcctgggggaaatgttgctgggtgacccgtttttgggcaatcccattttcgggcaaaagaatttcacccctggaggttgcaaggctttcctgggcagaaagatgggtgacttggagttggccaagtgcccttgttccttccagataccactgaagctcaattgcccatgaatgcagagcttttcaaggatatggctttattcttgcaagcaattacaaataataaatctatttctgctaagagatcaccaaannnnnatnntnnnnnnncccccggattttttatttagcgggccgcacctttttccccttttagggggggtaaatttatattgggccttgggccggggttttcaaaagcggggggannnnnnnnnnaaagagccc

SEQ ID NO: 145288 - DNA, 432 bp, Homo sapiens
cccacgcgtccgcccacgcgttcgcggacgcgtgggctgacgcctagagcggtttgcctccgtctctggaggtgtaggcgagaggtgatcatgtccggtcgcgggaaacagggcggcaaagtgcgagcaaaggccaaatcccgctcctcccgcgcgggcctgcagttcccggtgggccgagtgcacagactgctgcgcaaagggaactacgccgagcgagtgggcgccggggcgccggtgtacctggcggcggggttggagtaccttacggcggagaacctggagctggctggcaacgccgcgcgggacaacaagaagaccaggataattccccgccacctggcggttggcattcgcaacgacgaggagttaaacaagctggtgggcaaaagggaccattcgcttaaggggggcggtcctggccaacaatca

SEQ ID NO: 145289 - DNA, 1036 bp, Homo sapiens
atggggccgggcgcggtggctcacgcctgtaatcccagcgctctgggaggccgaggagggcggattacgaggcccatagcctcaaagacaaaagatattttggctaggcgagcttgttcctcccgtcagcacaggaagcattcacgtctggtcatcactctagcttcagactcaaaagtgaacgattggctggctgtgagccgcaggaccctgcggggagaccagggtggtctctacactgttggagcgctagttgggagcggagcctgcctgtcattggtcaccagagccaatggaaaggggctgccgcgcggccgtaaagagtttgtataggcagttcgggtgcggtacgttgcattccggtaccgagcgccgagagcggtttgtctccgtctctggagttgtaggcgagaggtgattcatgttccggttcgcgggaaacagggcggcaaagtgccgggcaaaggccaaaatcccgctcctccccgcgcgggccttgcaggttcccggtggggccgagttgcacagaattgttgcgcaaaagggaactacgcggagcgaagtcgggcgccggggcgccggtgtaacttggcggccggtgtttgaagtaccttacggcggaaattcctgaagcttggctggcaaacgccgccgcgtgacaacaaagaagacccaggataattccccgccaccttgcaagctcgcccatccgcaacgacgaaggaagttaaacaaagctgctggggcaaaagttgaccatccgctcagggcggcgtcctgcccaacatccaaggccgtgctgctgcccaagaaggacggagagtcagaaggacgaaggagcaaatgacccctgacgcccgccctcagggagctggctccgcccagcaaaggccctttttcatggtcgtcccgcaatgcttttgaatgtgctggatgtcattgaagggccggtgacatctagcggggaggtgggcggcgagggtcccggcgggagccaataaagttggtgaaaatcgttaaaaaaaaaaaaaaaaaa

SEQ ID NO: 145290 - DNA, 493 bp, Homo sapiens
  misc_feature (1)...(493): n = a,t,c or g
caactaggaataaaaagtgaaaaactatgcataaggaggatatcaaaatataaaatgctactctacactaatacatataaaaaaggtaattaagataatatanctttgaaaaactgacttataatgaaatagaaatatttaatagcccagtaaccctggaagaacctgaannnnnnnnnnnnnnnnnnnnnnnnnnnnnnnnnnnnnnnnnnnnnnnnnnnnnnnnnnnnnnnnnnnnnnnnnnnnnnnnnnnnnnnnnnnnnnnnnnnnnnnnnnnnnnnnnnnnnnnnnnnnnnnnnnnnnnnnnnnnnnnnnnnnnnnnngttttcagaaccactgaagctcctaaaagaaggccagccccagctggtgttacaagaccctccgtgccatgcagcctgcagtgcagagggttgggaacttgtctagatatttcccatcataaagggacaggaaacagcagctccccttgctcacaagtacctgcacgata

SEQ ID NO: 145291 - DNA, 503 bp, Homo sapiens
gccactcagtagtgcatgactttggccaaatttcttaaattcatgaagcaagtttccgggtgaatgaaatggggataaaaatagtgttcaaacctatcggttggtttgtgtgaaactgaaatgaatagtatcgtgcaggtacttgtgagcaaggggagctgctgtttcctgtccctttatgatgggaaatatctagacaagttcccaaccctctgcactgcaggtggcatggcacggaggttcttgtaacaccagctggggctgcccttcttttaggagcttcagtggttctgaaaacttttatttgtttgtttgttttagtagatgtggggtctttctgtgttgcccggactggtctcgaacttctggactcaagtgatcctcccccgctcaacctcccaaagtgttgggattacaggtgtgagccactgtgcccagccttgaaaactttttcaggttcttcaagggtactggcttattaaatatttctattcatataaggt

SEQ ID NO: 145292 - DNA, 397 bp, Homo sapiens
tttttttttaacttgctggatttggagtgtgacttcttcttctgggagcaggagaagtatgtggagtaatcttgggggaatgaagaggggaagacccagcagacaacgacattcctggcgctaatccagcagtagcagggcttcccatggatgggtgagagaaaacttgagagaaggcagacatatttgactgggacacgttactcagcctggaggttgatcctcctttaggaataaactcgcttgcagtaggatttggtgtctgtggtcccagctattcaggagaactgcttgagcccaggaggtgaaggctgcagtgagccatctctacaccagtaccctccagcctggatgacagagcaagaccctgtaaattgttttctgtgactctgttcca

SEQ ID NO: 145293 - DNA, 374 bp, Homo sapiens
  misc_feature (1)...(374): n = a,t,c or g
nnnnnnnnnnnnnnnnnnnnnnnnnnnnnnnnnnnnnnnnnnnnnnnnnnnnnnnnnnnnnnnnnnnnnnnnnnnnnnnnnnnnnnnnnnnnnnnnnnnnnnnnnnnnnnnnnnnnnnnnnnnnnnnnnnnnnnnnnnnnnnnnnnnnnnnnnnnnnnnnnnnnnnnnnnnnnnnnnnnnnnnnnnnnnnnnnnnnnnnnnnnnnnnnnnnnnnnnnnnnnnnnnnnnnnnnnnnnnnnnnnnnnnnnnnnnnngcagtttcttaaaaagctagtcttaccacatgatccagtaactgtgctccgtgatatttatccaaatgagttgcaatcttacatctacacaaaagcgtgcacacaaatgtttatagaaag

SEQ ID NO: 145294 - DNA, 420 bp, Homo sapiens; identical to SEQ ID NO: 144752
  misc_feature (1)...(420): n = a,t,c or g

SEQ ID NO: 145295 - DNA, 422 bp, Homo sapiens
ggcttctatagggctcgagcggccgcccgggcaggtggaccgactgacccatgttcaactgctgttcacatggaacccttctccacttcggccttcaaagttctcgtttgaatatttgctactaccaccaagatctgcacctgcggcggctccacccgggcccgcgccctaggcttcaaggctcacggaaaagtgaacaagcctccagggctattcagatttgtccctgagcagggagtaggcactgatgagaattgcctcattgaaatactagcttcaagaacaaatggagaaattttccagatgcgagaagcctactgcttgcaatacagcaataacctccaagaggacatttattcagagacctcgggacacttcagagatactctcatgaacttggtccaggggaccagagagaagcc

SEQ ID NO: 145296 - DNA, 776 bp, Homo sapiens
acatgctagtggctgttcaccttggagacctgctgcggatatgggtacggcccggcgcgagatttacaccctctcccccggattttcaagggccagcgagagctccaccggacgccgccggaaccgcgacgcttttccaatggcaacgggcccctactctcgtggacgaaccacaattaccagggcagccctgccctatcacataagaaaagagaactcttccccggtcgtccccgccggcttctccgggatcggtccggttaccgacatctgggacctcgcggcgcccatctccgccactccggattcggggatctgaacccgactccctttcgatcggccgagggcaactggatgccatcagcccgtcccttcggaacggcgctcgcccatctctcaggaccgactgacccatgttcaactgctgttcacatggaacccttctccacttcaggccttcaaagttctcgtttgaatatttgctactacacaccaagatcatgcacctgcggcggctcccacccgggcccaaagccataggcttcaaggctcaccgcagcggccctcctactcgtcgcggcgtagcgtccgcggggctccggggggcggggagcggggcgtgggcgggaggaggggaggaggcgtgggggggggccttgaagccaatgcgggggcactgcagaactctctagaaatgtcatgattgagctccagagctaaaatgccttcacccttcccccaagttggaatatatcctcccccaaattaaggaaaaa

SEQ ID NO: 145297 - DNA, 624 bp, Homo sapiens; identical to SEQ ID NO: 144924

SEQ ID NO: 145298 - DNA, 783 bp, Homo sapiens
ccactgaagcgctcagatggctgtaacgacggccgacccacgcgtccgcccacgcgtccggacacaactgtgttcactagcaacctcaaacagacacgcatggtgcatcttatctcctgaggagaagtctgccgttactgccctgtggggcaaggtgaacgtggatgaaagttggtggtaaggccctgggcaggctgctgggtggtctacccttgggacccagaggttctttgaagtcctttggggatctgtccactccctgatgctgttaatgggcaaccctaaggtgaaggctcattcgcaagaaagttctccgcggtgcctttaagtgatggcctggctcacctgggacaacctcaagggcacctttgctcacactgaggtgagcttgcactgtgacaaagctgcaccgtggatccctgaagaactttcaggctcctggggcaacgtgcttggtctgttgttgctgggcccattcacttttggcaaaagaatttcaaccccaccagttgcaggcttgcctaatcaagaaaattggttggcttggtgttggctaaatgcccttggccccacaagtaatcacttaagcctcgctttccttgctggtccaatttccaattaaaaggttcctttggttccctaagtccaactactaaactggggggatattattgaaagggccttgagcatctggattctgcctaataaaaaacatttattttcatcgcatacaagaataaaacaagcgcggccgattaagaggatacttcaggggcgcaagat

SEQ ID NO: 145299 - DNA, 1247 bp, Homo sapiens
atgcagggtgactctaaattcagtagccaaggcacaggccctccctaccaggacctcagcacaaaaagcagaatagctctaaatagagcactactagtagccaaaggaaggacagttaacatctatactgattcaaagtatgcttttgctacattacatgcccatggagccatttacaaagaaaggggactcttaactgctggagggaaagaaattaaagaagaaatcttacaactcttagaagctgtgtgggccccagacaaggtggccgttattcactgtaaaggacatcagacaagaggcggcatagaagcaaaaggaaataggaaggcagacagagaagccagacaagcagctatgtccaactcaagtactaaaaagaaaaccccaaccctgctgcttctactagaaccttccttacctgaaaccccaagctactctcccaatgaaaaagcttggtttgaacaagagagcggaagttacatacaaggaggcaggtggaagttctcagatgggaggctagctattccggaagcaatagccccccaatttatgaagcagtttcatcagggaacacacatgggaaagactgcattagaaactcttgtaggatggcatttctatgtgccatgccttactgccatcactcgagccgtttgtgagcaatgtttaacctgcgcccagaacaatccatggcaagtgccaactcagcccccagggattcaagagaccggagctacaccctgtgaaaacttgcttgtggactttaccgaactgccccgagcacggggttatcagtacatgctagtgtttgtttgcactttctcagggtgggtcgaggcattccctaccaggatagagaaagcccaagaagtaaccagactgttgctaaaagacattattcctaggtttggactgcctctaactttaggatcagataatggcccagcattcatggctgaagtagttcagcagctgtcgcagctgctaaagataaagtggaaactgcacatagtctaccacccacagagctcaggaaaggaaaaggcctatattggatctgtggagcacaggcatatcagcaactgccagctaaatggacaagagcatgtgtattaggaacaatcaagccatccttctttttaattcctctaaagcaaggggaactcttaggataaccagtctataatgagaataaaagaactaaaaggagcatgatctcaaaaaaaaaaaaaaaaaaaaaaaaa

SEQ ID NO: 145300 - DNA, 1491 bp, Homo sapiens
tttccgggtcgacccacgcgtccggcttccgggttttgcggggcctttgtctctgcagccgtagctccaggtcttgtcttcactgctgtgtgtcctctgctcctagaggcccagcctctgtggccctgtgtcctgcaggtattgggagatccacagctaagacgcccgggagcccctggaagcctagaaatggccagaaaaactgggaaaaacaggctcttccacttactggatgtttgacaaaatatccttcttgggccaaaaacattgacatcattggggccattgcaatttagagacgtggccatagaattctctctggaggagtggcattgcctggacactgcacagcggaatttatataggaatgtgatgttagagaactacagaaacctgggctttcttggtattgttgtctctaagccagacctgatcacctgtctggagcaaggaagaaaacctttgaccatgaagagaaatgagatgattgccaaacccccagttatgagttctcattttgcccaagacctttgtccagagcagagcctaaaagattccttccaaaaagtgatagtgacaagatatgaaaaacgtgaatatggcaatttagagttaaaaaaaggttgtgaaagtgtggatgagggtaaagtacacaaaagaggttataatggacttaaccaatgtttgacagctacccagagcaaagtatttcaatgtgatacatatgtgaaagtctctcatatattttcaaattcaaacagacataagataagagatactggaaaaaaacctttcaaatgtatagaatgtggcaaagctttcaaccagtcctcaacccttgctacacataagaaaattcatactggagagaaaccttacagatgtgaagaatgtggcaaagcttttaaccaatctgcaaaccttactacacataagagaattcataccggagagaaaccttacaaatgtgaagaatgtggcaaagcttttaactggtcctcagaccttaataaacataagaaaattcatattgaacgaaaaccctacatagtgaagaatgtgacagatcttttaaatgttcctccacttttaattagcataagataattcatactggagagaaaccctatgaatgtgatgaatgtgggaaagcctttaaccagccctcgactcttagtaaatttgagagtttatatggaacacaaaccctacaaatataaagaaatgtgacaaagctttttaaggaagttctcaacccttattacacataattcataccaaacagaagccctacaagtgtgaagaatgtggcaaaacctataaacctataacaagttctcaattcctttttttttgagatggagtttcactcttgtcaccgaggctggagtgcaatgacatgatctccgttcactgcaatctctgcctcctgggtttaagccattcttctgcctcagcctcccaagtagctgggattacaggtgcccaaca

SEQ ID NO: 145301 - DNA, 462 bp, Homo sapiens
  misc_feature (1)...(462): n = a,t,c or g
tttcgttgtctctcgctgacgccagagatccagctatcgtcttcactgctctgtgccgtcagctcctagaggcccagcctctgtggccctgtgacctgcaggtattaggagggtcacagctaggacgccgggaccccctggaagcctagaaatgggaccattgcaatttagagatgtggccatagaattctctctggaggagtggcattgcctggacgctgcacagcggaatctatatagggatgtgatgttagagaactacagaaacctgatcttccttggtattgttgtctctaaaccaaacctgatcacctgtctggagcaaggaaaaaaacctttaactatgaagaggcatgagatgattgccaaacccccagttatgtattctcattttncccaagacctttngtcagagcagagcataaaagattctttccaaaaagtgatactaaggaagatatg

SEQ ID NO: 145302 - DNA, 624 bp, Homo sapiens; identical to SEQ ID NO: 144924

SEQ ID NO: 145303 - DNA, 782 bp, Homo sapiens
ccactgaagcgctcagatggctgtaacgacggccgacccacgcgtccgcccacgcgtccggacacaactgtgttcactagcatcgctcatacagacaccatggtgcacctgactcctgtggagagagtctgccgttactgccctgtggggcaaggtgaacgtggatgaaagttggtggtaaggccctgggcaggctgctgggtggtctacccttgggacccagaggttctttgaagtcctttggggatctgtccactccctgatgctgttaatgggcaaccctaaggtgaaggctcattcgcaagaaagttctccgcggtgcctttaagtgatggcctggctcacctgggacaacctcaagggcacctttgctcacactgaggtgagcttgcactgtgacaaagctgcaccgtggatccctgaagaacttcaggctccttgggcaacgtgcttggtctgttgttgctgggcccattcacttttggcaaaagaatttcaaccccaccagttgcaggcttgcctaatcaagaaaattggttggcttggtgttggctaaatgcccttggccccacaagtaatcacttaagcctcgctttccttgctggtccaatttccaattaaaaggttcctttggttccctaagtccaactactaaactggggggatattattgaaagggccttgagcatctggattctgcctaataaaaaacatttattttcatcgcatacaagaataaaacaagcgcggccgattaagaggatacttcaggggcgcaagat

SEQ ID NO: 145304 - DNA, 515 bp, Homo sapiens
gacatcaaaaaaaatttgaatatattttagtgaaagtgctaacagcttagactgaatgacacactatcaattgtatataatactgtccacacaaagaaaggtctcattgtcaaatcacattaacatttaataagatgcacatctcattcacaaatctgttgttgtcctcaatttggaacaatgtatgaaaccccacatgttaaggcaccaatccaacctccttttaaaacccctgtggcccctataactcccaaagataataaggaaagcaacttctaaaaagtctgcctttgtaatcaagcaaatattggaaataaatgtcagatgagatataccacattatagataggtatactactgtatttattaaaacaacatgcctggcagcaaagaaggatttcccaaatttgatacaacaagcacaaaccagccgggcgcagtggctcacgtctgtaatcccagcacttggggaggccgaagcaggtgaattacttgaggccaggcatttaagacca

SEQ ID NO: 145305 - DNA, 633 bp, Homo sapiens
aaaatgtatgtagtaattactacttttatattaaattatatgtaatttttaaaatatgccaatgcttaaataccatttgccagcaccttcttttaagttcagaaatagagtcagacataacctccaaaaagggaccaaataataggtcctgagtctgaaggagtggaagagctttacgattccaatggagacattcctgccgaaaacagaattcctagaattatcgaagctggttcacagggtcactctaggctttctaggcagatttccaggaggtacaactacgctccatcctgtattaccatcgtttcctcattcataaaatacaggtaataactgtacccacttcaaaggagagttatgaaatcatttaacatatacaaaacatttaaaatggtgcctggtaaatggaaagtactgtaaaagcttagctattttgtcgtcattcttttattactattatttttactactacaattattactatctttactactactactaccaccaccaccaatgctagcatcatttctaagactattgctactacagaaacaagcaggcaatagagtgtccctccctcatgtgaccattttccaaagagactatgtttgccaatttgacctcaaagaa

SEQ ID NO: 145306 - DNA, 761 bp, Homo sapiens
tttcgtgaaaatggcggccccggcaggcggcggaggctccgcggtgtcggtgctggccccgaacggccggcgccacacggtgaaggtgacgccgagcaccgtgctgcttcaggttctggaggacacgtgccggcggcaggacttcaacccctgtgaatatgatctgaagtttcagaggagcgtgctcgacctttctctccagtggagatttgccaacctgcccaacaatgccaagctggagatggtgcccgcttcccggagccgtgaggggcctgagaacatggttcgcatcgctttgcagctggacgatggctcgaggttgcaggactctttctgttcaggccagaccctctgggagcttctcagccattttccacagatcagggagtgcctgcagcaccccggcggggccaccccagtctgcgtgtacacgagggatgaggtgacgggtgaagctgccctgcggggcacgacgctgcagtcgctgggcctgaccgggggcagcgccaccagtcaggtttgtcatgaagtgctacgaccccgtgggcgaagaccccaggaagcctgggctcgtcagcgtcggctggccaggcagccgccagcgctccacttcccttggaatctggggagctcagccgcggcgacttgagccgtccggaggacgcggacacctcagggccctgctgcgagcacactcaggagaagcagagcacaagggcacccgcagctgccccctttgttcctttctcgggtgggggaca

SEQ ID NO: 145307 - DNA, 507 bp, Homo sapiens
tttcgtgctggaggttcgctagccgaagcggttgtatctggcgccgcgtctgccccgcgtgctcggagcggattctgcccgccgtccccggagccctcggcgccccgctgagcccgcgatcacttcctccctgtgaccaaccggcgctgcaggttacagcctggcaatgccgtttgggtgtgtgactctgggcgacaagaagaactataaccagccatcggaggtgactgacagatatgacttcgggacaggtcatcacgacgtgagtgccgggcctgtcagtgaggagttttgtgaaatcttccgggccaaggacaagacgacaggcaagctgcacacctgcaagaagttccagaagcgggacggccgcaaggtgcggaaagctgccaagaacgagataggcatcctcaagatggtgaagcatcccaacatcctacagctggtggatgtgtttgtgacccgcaaggagtactttatcttcctggagctggccacggggagggaggg

SEQ ID NO: 145308 - DNA, 375 bp, Homo sapiens
cgaagtctgaaaaaatttaaaattggaaattattggcatttccagtaagggaaactcaacctgtaatcattttggctcagttaaatttggtaaatagcagtagtcattttaccttgagttgcagttgtacaaattatatttttgcctgtttttatagctgaaaaatacaaggatttagtacctgataattcaaaaactgctgacaatgcaactaaaaatgcagaaccattgatcaatttggatgtaaataatcctgattttaaggctggtgtgatggctttggctaacctgcttcagattcagcgtcatgatgattacctggtaatgcttaagggcaattcggattttggttcaggagcgcctgacacaggatgc

SEQ ID NO: 145309 - DNA, 1114 bp, Homo sapiens
  misc_feature (1)...(1114): n = a,t,c or g
gcggccaccgttttaaccacgattggcgaagcgccgtcatttcggagcgactcagcgcctgcccgccctctcgccgcgtcgccggtgcctgcgcctcccgctccacctcgcttcttctctcccggccgaggcccggtggaccagagcgagaagcggtggaccatgttccgacgcaagttgacactctctcgactaccacaaccccgccggcttcaactgcaaagatgaaacagaatttagaaacttcatcgtttggcttgaagaccagaaaatcaggcactacaagattgaagacagaggtgaatttaagaaacatccacagcagcgactggcccaaggttctttgaaaagtatttcaagagatgttaaacctgtcctttcaagattcaagatcgacaagaaagctatttgactggcttctttggttttagctgttagacttgaatatggagataatgctgaaaaatacaaggatttagtacctgataattcaaaaactgcttgacaattgcaactaaaaattgcagaaccattgatcaattttggatgtaaataatccctgattttaaggctggtgttgttggctttggctaaacctggcttcagattcagcgtcatggatggattacctgggnaaatgcttaaggcaaattcgggattttgggttcaggagcgccttgaccaccagggatgccagtttgcttaagggcaaatcaaacaaaagaggggcttacctgttgcttttagacaaacatattcttggttttgacacaggagatgcagttcttaatgaagctgctcaaattctgcgattgctgcacatagaggagctcagagagctacagacaaaaatcaacgaagccatagtagctgttcaggcaattattgctgatccaaagacagaccacagactgggaaaaagtttggaagatgaacacttgaggacttcagcttctcacctactttagtacagttgggaaccatacacttctggcatgtttggaaatcaaaatgtcacattctcgggggaggaagcccagaaaattgggtatgttctagagatttaccaccattgcttattgcttttttctttaataaagtttaggaaagtaga

SEQ ID NO: 145310 - DNA, 1592 bp, Homo sapiens
tcttgtgctccagctggagctttggtcccgtattctcggctatttatccccagctgcgggaggccctggtgactctgctgctgcagtgtctggtttccctgtgacctgcaggtactgggagttacatagctaagatgccaggacaccccgaaagccggaaaacgggactactggcattcagtgatgtggtcatagaattctctccagaggagtgggcatgcctggaccctgcccagcgaaatttgtatagggatgtgatgttcgagaactacagaaacctggtctccctggctattttatcttattccattcaagaccttttgccagagcaggatatgaaagatttatgccaaaaagtgacactgacaagacatagaagctggggccttgacaatttgcacttagtgaaagactggagaactgtgaatgaaggtaaggggcagaaagaatattgcaatagacttactcaatgttcatcaactaaaagcaaaatctttcaatgtattgaatgtggcagaaattttagctggaggtcaatccttactgaacataagagaattcatactggagagaagccatacaaatgtgaagaatgtggcaaagttttcaatcgatgttcaaacctaacaaaacataaaagaattcatactggagagaaaccctacaaatgtgacgaatgtggcaaagtttttaattggtggtcacaactaactaaccataagaaaattcatactggagagaaaccctacaaatgtgatgaatgtgacaaagtttttaattggtggtcacaactaactagccataagaaaattcatagtggagagaaaccatacccatgtgaagaatgtggcaaagcctttacccagttctcaaaccttacacaacataagagaattcatactggagagaaaccctacaaatgcaaagaatgttgcaaagcctttaacaagttctcaaaccttactcaacataagagaattcatactggagagaaaccttacaagtgtgaagaatgtggcaacgtttttaatgagtgctcacacctaactagacataggagaattcatactggagagaaaccctacaaatgtgaagaatgtggcaaagcctttacacagtttgcaagccttactcgtcataaaagaattcatactggagaaaaaccctaccaatgtgaagaatgtggcaaaacttttaatcggtgttcacacctaagtagccataagagaattcatactggagagaaaccctacaaatgtgaagaatgtggcagaacctttactcaattctcaaacctcactcagcataaaagaattcatactggagagaaaccctacaaatgcaaagaatgtggcaaagcgtttaacaagttctcaagccttactcaacataggagaattcatactggagtgaaaccctacaaatgtgaagaatgtgggaaagtttttaaacagtgctctcacctaactagccataagagaattcatactggagagaaaccctacaaatgtaaagaatgtggcaaagctttttaccaatcctcaatccttagtaagcataagagaattcatactgaagagaaacctttctaa

SEQ ID NO: 145311 - DNA, 571 bp, Homo sapiens
ggggcgcattccaaccttccaagcctgcgacctgcggagaaaaaaaattacttattttcttgccccatacatacctgagggcgagcaaaaaaattatattttaccatgaaggaaactcgtgcacatcagggctggtcagtgtggcaaccagatcggtgccaagttctgggaggtgatcagtgatgaacatggcatcgaccccaccggcacctaccacggggacagcgacctgcagctggaccgcatctctgtgtactacaatgaagccacaggtggcaaatatgttcctcgtgccatcttggtggatctagaacctgggaccatggactctgttcgctcaggtccttttggccagatctttagacaagacaactttgtatttggtcagtctggggcagagcccccatcacctcaggcttgtcagttcccttagccgtcttactcaactgcccctttcctctccctcagaatttgtgtttgctgcctctatcttgttttttgttttttcttctgggggggtttagaacagtgcctggcacatagtaggcgctcaataaatacttgtttgttg

SEQ ID NO: 145312 - DNA, 1759 bp, Homo sapiens
agttgaattcgagacgaggtcaaggttgtacctcgctgctccagccatctggggcgcaattccaaccattccagccatgcgaccatgcggagaaaaaaaaagtacttattttcttgccccatcatcttaccttgaggggcgagcaaaaaaaattaaattttaacccatgagggggaaatcgtgccacaattcaggctggtcagtgtggcaaccagatcggtgccaagttctggggaaggtgatcagtgaatgaacatggcatcagaccccaccggcaccctacccacggggacagcgaccctgcagcctggacccgcaatcctcctgtgtactacaatgaaagccacaaggttggaaaaatatgttcctcgttgccatccttggtgggatctaggaacctggggaaccatgggactctgttcgcctcagggtcctttttgggcccccccaaaggggaaaaaatttttcccccttttagaccagacaactttgtatttggtcagtctggggcaggtaacaacttgggccaaaaggccactagcacaagagggcgccgagctgggttgattcttgtcctggatgtgggtacggaaggaaggcagagaagctgtgactggcctgcagggctttccagcttgacccacttcacttgggcgggggggcacaggctctggaatgggcactctcctttatcagcaaggattcgagaaagaataccctgattcgcatcatgaataaccttcagtgtggtgcccttcccccaaatgtctggacaccgtggtccaaccgtacaaggccaccctctccgtccatcagttggtagagaatactgatgagacctattgcattgacaacgaggccctctatgataatctgcttccgcactctgaagctgaccacaccaacctacggggatctgaaccaccttgtctcagccaccatgagtggtgtcaccacctgcctccgtttccctggccagctcaatgctgacctccgcaagttggcagtcaacatggtccccttcccacgtctccatttctttatgcctggctttgcccctctcaccagccgtggaagccagcagtatcgagctctcacagtgccggaactcacccagcaggtcttcgatgccaagaacatgatggctgcctgtgacccccgccacggccgatacctcaccgtggctgctgtcttccgtggtcggatgtccatgaaggaggtcgatgagcagatgcttaacgtgcagaacaagaacagcagctactttgtggaatggatccccaacaatgtcaagacagccgtctgtgacatcccacctcgtggcctcaagatggcagtcaccttcattggcaatagcacagccatccaggagctcttcaagcgcatctcggagcagttcactgccatgttccgccggaaggccttcctccactggtacacaggcgagggcatggacgagatggagttcaccgaggctgagagcaacatgaacgacctcgtctctgagtatcagcagtaccaggatgccaccgcagaagaggaggaggatttcggtgaggaggccgaagaggaggcctaaggcagagcccccatcacctcaggcttctcagttcccttagccgtcttactcaactgccccctttcctctccctcagaatttgtgtttgctgcctctatcttgttttttgttttttcttctggggggggtctagaacagtgcctggcacatagtaggcgctcaataaatacttgtttgttg

SEQ ID NO: 145313 - DNA, 558 bp, Homo sapiens
caagttccggagaggattgttgtagcaggaaataatgaagatgtttcattttcaagaccagcagatcttgaccttattcagtcaactccctttaaacccctggcactgaaaacaccacctcgtgtacttacgctgagtgaaagaccactagattttctggatttagaaagacctcctacaacccctcaaaatgaagaaatccgagcagttggcagactaaaaagagagcggtctatgagtgaaaatgctgttcgccaaaatggacagctggtcagaaatgattctctacctgtgttgcgtggtgggtctgctgccgccacttctaatcctcatcatgacaacgtcaggtatggcatttcaaatatagatacaaccattgaaggaacgtcagatgacctgactgttgtagatgcagcttcactaagacgacagataatcaaactaaatagacgtctacaacttctggaagaggagaacaaagaacgtgctaaaagagaaatggtcatgtattcaattactgtagctttctggctgcttaatagctggctctggtttcgc

SEQ ID NO: 145314 - DNA, 1459 bp, Homo sapiens
gaagtttgcaaatcttttatatttccagctgttgagacagtatttttgagggctgatgttacctctagcggcgaaaccagagccagctattaagcagccagaaagctacagtaattgaatacatgaccatttctcttttagcacgttctttgttctcctcttccagaagttgtagacgtctatttagtttgattatctgtcgtcttagtgaagctgcatcctacaacaagtcaggtcatctgacggtcccttcaatggttgtatctatatttgaaatgccatacctgacgttgtcatgatgaggattagaagtggcggcagcagacccaccacgcaacacaggtctgcgattttcatccagcacatccaagatctgctggtatgccctacgagtagaagactggataagcgacaaaatgccacgagcagaggaaagattagctccatcttcaggtaacatatggggaggacagacccgagcctgttgtggcgatggtgtcacagtgtactccggtgcagaaatcggtgcctggaaccttgaaattttatttcttggggcagaatctgatctgtgccacagagaatcatttctgaccagctgtccattttggcgaacagcattttcactcatagaccgctctctttttagtctgccaactgctcggatttcttcattttgaggggttgtaggaggtctttctaaatccagaaaatctagtggtctttcactcagcgtaagtacacgaggtggtgttttcagtgccaggggtttaaagggagttgactgaataaggtcaagatctgctggtcttgaaaatgaaacatcttcattatttcctgctacaacaatcctctccggaacttgcattatcacactagcatttggaactccttcttggaatccttgttccaggtcagcgtttggcggtgctacttttaacttttctgggaccctcattcgctgactaatgccttcagtatattccatttcgtactgaattcgactaatttctgccatctcagcagcagtgggagaaggaaatgctgccctgctcacccttcctagtgatgtgtcactggttgttcctttactcatttaaatacagtaaatccaggtctataatagctattaaaatactgctaccctgcagttcagtttactttacacaacaattcccctacacatttgaacttttttttggaggtgtacataacaacacggacactgcttttccagaaatgtgtaacaactactgcttgctatttggcactatctgcttctgtgcttcatattaaatcctttaacttgcttcaatgtgcatgtgctggattgagagccacttttgtccccctgggcccacaggagggtcccggcgaggacccccgccctctggctcccggggcgctcgagtgggcgctctcagaggcggttggctgagagcacggaggcgcccaggga

SEQ ID NO: 145315 - DNA, 1324 bp, Homo sapiens
  misc_feature (1)...(1324): n = a,t,c or g
aattttttttttttttttttttnaagtttgcaaaanctttttaatatttcccancctggtgaagacnagtattttngagggctgaatgtttacntcctangcggngaaaccaanagccaagntntttaagcnagccagaaaagctaccggnaatgnaaaacatgccccnttttctcttttaagcacggttntttgttctcctnttccagaagttgtagacgtctatttagtttgattatctgtcgtcttagtgaaagctgcatctacaacagtcaggtcatctgacgttccttcaatggttgtatctatatttgaaatgccatacctgcgattttcatccagcacatccaagatctgctggtatgccctacgagtagaagactggataagcgacaaaatgccacgagcagaggaaagattagctccatcttcaggtaacatatggggaggacagacccgagcctgttgtggcgatggtgtcacaagagaatcatttcctgaccagctgtcccatttttggcgaacagcattttcacctcatagaccgctctctttttagtctgccaaactgcctcggatttccttcattttgaggggttgtaggaggtctttcctaaatcccaggaaaatcctagtggtctttcactcagccgtaagtacacgaggtggtgttttcagtgcccaggggtttaaagggagttgaactgaaataaggtcaaagatctgctggtcttggaaaatgaaacatcttccattatttcctgcctacaacaatcctctccggaacttgcattatcacactagcatttggaactccttcttggaatccttgttcccaggtcagcggtttggcggtgcctaacttttaaacttttcctggggacccctcaatcgcctgaactaaagcccttcaagtatattcccatttccgtaactgaaattcgaactaaattctgcccatctcagcagcaagtgggagcaaggaaatgctgccctgctcaccaaatgtgtaacaactactgcttactatctggcactatctgcttctgtgcattcatattaaatcctttaacttgcttcaatgtgcatgtgctggattgagagccacttttgtccccctgggcccacaggagggtcccggcgaggaccgcgcgccctctggctcccggggcgctcgagtgggcgctctcagaggcggttggctgagagcacggaggcgcccagggacagcaccggcggagcggcccgcagagggccacggcagaagagcgcggacgcgtgggtcgttccggaggttctcagcggttctcaggcttcagtgtct

SEQ ID NO: 145316 - DNA, 827 bp, Homo sapiens
cttcagaggaactaccgccctgggaggaagcgtctgtttagtttcaacacagacgactgggcttgggagcctacgaggttgcagtctggagggcgccaacagcagctaccagggctgcttttcctgaacacgctgcaagcacgtcaaggtagtcggagtcccctaacaatggataaattcgtcattcgaacgcctagaatccagaatagccctcagaagaaagattctggaggaaaggtttacaagcaggccacgattgaatctctgaagagagttgtggttgtagaagacataaaaagatggaaaactatgcttggagctttccctgatcaaaccaaagagaatcttgttgaagccttacaagaattaaagaagaaaataccctccagggaagtgttaaaatcaacaaggataggtcacactgtgaacaagatgcgtaaacactcagattcagaagtggcttctcttgccagagaagtttacactgagtggaaaactttcactgaaaaacattcaaatagaccttctattgaagttagaagtgatcccaaaaccgagtcgttgaggaaaaatgctcagaaattactctcagaagccttggaattaaagatggatcacctactggttgaaaatattgaacgggaaacgtttcatctctgctcccgcctcattaatgggccgtaccggcggacggtgagagccctggtcttcacattaaagcaccgagctgaaatccgggctcaggtgaagagcggctcgctgccagtcggcacgtttgtacagacccacaaaaagtgacctgaggacggttccagccctgggccagg

SEQ ID NO: 145317 - DNA, 3213 bp, Homo sapiens; identical to SEQ ID NO: 116408

SEQ ID NO: 145318 - DNA, 3291 bp, Homo sapiens; identical to SEQ ID NO: 116410

SEQ ID NO: 145319 - DNA, 4374 bp, Homo sapiens; identical to SEQ ID NO: 116411

SEQ ID NO: 145320 - DNA, 4110 bp, Homo sapiens; identical to SEQ ID NO: 116412

SEQ ID NO: 145321 - DNA, 3534 bp, Homo sapiens; identical to SEQ ID NO: 116413

SEQ ID NO: 145322 - DNA, 3555 bp, Homo sapiens; identical to SEQ ID NO: 116415

SEQ ID NO: 145323 - DNA, 3786 bp, Homo sapiens; identical to SEQ ID NO: 116416

SEQ ID NO: 145324 - DNA, 3155 bp, Homo sapiens
agacacacataggctcaaaataaaaggatggaggaagatctaccaagccaatggaaaacaaaaaaaggcaggggttgcaatcctagtctctgataaaacagactttaaaccaacaaagatcaaaagagacaaagaaggccattacttaatggtaaagggatcaattcaacaagaagagctaactatcctaaatatatatgcacccaatacaggagcaccaagattcataaagcaagtcctgaccgacctacaaagagacttagactcccacacattaataatgggagactttaacaccccactgtcaacattagacagatcaacgagacagaaagtcaacaaggatacccaggaattgaactcagctctgcaccaagcggacctaatagacatctacagaactctccaccccaaatcaacagaatatacatttttttcagcaccacaccacacctattccaaaattgaccacatactgggaagtaaagctctcctcagcaaatgtcaaagaacagaaattataacaaactatctctcagaccacagtgcaatcaaactagaactcaggattaagaatctcactcaaaaccactcaactacatggaaactgaacaacctgctcctgaatgactactgggtacataacgaaatgaaggcagaaataaagatgttctttgaaaccaatgagaacaaagacacaacataccagaatctctgggacgcattcaaagcagtgtgtagagggaaatttgtagcactaaatgcccacaagagaaagcaggaaagatccaaaattgacaccctaacatcacaattaaaagaactagaaaagcaagagcaaacacattcaaaagctagcagaaggcaacaaataactaaaatcggagcagaactgaaggaaatagagacacaaaaaacccttcaaaaaattaatgaatccaggagctggttttttgaaaggatcaacaaaattgatagaccactagcaagactaataaagaaaaaaagagagaagaatcaaatagatgcaataaaaaatgataaaggggatatcaccaccgatcccacagaaatacaaactaccatcagagaatactacaaacacctctatgcaaataaactagaaaatctagaagaaatggataaattcctcaacacatacactctcccaagactaaaccaggaagaagttgaatctctgaatagaccaataacaggatctgaaattgtggcaataatcaatagcttacgaaccaaaaagagtccaggaccagatggattcacagccgaattctaccagaggtacaaggaggaactggtaccattccttctgaaacaattccaatcaatagaaaaagagggaatcctccctaactcattttatgaggccagcatcatcctgataccaaagcctggcagagacacaaccaaaaaagagaattttagaccaatgtccttgatgaacattgatgcaaaaatcctcaataaaatactggcaaacggaatccagcagcacatcaaaaagcttatccaccatgatcaagtgggcttcatccctgggatgcaaggctggttcaatatacgcaaatcaataaatgtaatccagcatataaacagagccaaagacaaaaaccacatgattatctcaatagatgcagaaaaagcctttgacaaaattcaacaacccttcatgctaaaaactctcaataaattagcccaaaatctccttaagctgataagcaacttcagcaaagtctcaggatacaaaatcaatgtgcaaaaatcacaggtattcttatacaccaataacagacaaacagagagccaaatcatgagtgatctcccattcacaattgcttcaaagagagtaaaatacctaggaatccaacttacaatggatgtgaaggacctctccaaggagaactacaaaccactgctcaaggaaataaaagaggatacaaacaaatggaagaacattccatgctcatgggtaggaagaatcagtatcgtgaaaatggccatactgcccaaggtaatttacagattcaatgccatccccatcaagctaccaatgactttcttcacagaattggaaaaaactactttaaagttcatatggaaccaaaaaagagcctgcatcgccaagtcaatcctaagccaaaagaacaaagctggaggcatcacactacctgacttcaaactatactacaaggctacagtaaccaaaacagcatggtactggtaccaaaacagagatatagatcaatggaacagaacagagccctcagaaataatgccacatatctgcaactatctgatctttgacaaacctgagaaaaacaagcaatggggaaaggattccctatttaataaatggtgctgggaaaactggctagccatatgtagaaagctgaaactggatcccttccttacaccttatacaaaaatcagttcaagatggattaaagacttaaacgttagacctaaaaccataaaaaccctagaagaaaacctaggcattaccattcaggacataggcatgggcaaggacttcatgtctaaaacaccaaaagcaatggcaacaaaagccaaaattgacaaatgggatctaattaaactaaagagcttctgcacaacaaaagaaactaccatcagagtgaacaggcaacctacaaaatgggagaaaattttcgcaacctactcatctgacaaagggctaatatccagaatctacaatgaactcaaacaaatttacaagaaaaaaacaaacaatcccatcaaaaagtgggcaaaggacatgaagagacacttctcaaaagaagacatttatgcagccaaaaaacacatgaaaaaatgctcatcatcactggccatcagagaaatgcaaatcaaaaccacaatgagataccatctcacaccagttagaatggcaatcattaaaaagtcaggaaacaacaggtgctggagaggatgtggagaaataggaacccttttacactgttggtgggactgtaaactagttcaaccattgtggaagtcagtgtggcgattcctccgggatctagaactggaaataccatttgacccagccatcccattactgggtatatacccaaaggactataaatcatgctgctataaagacacatgcacac

SEQ ID NO: 145325 - DNA, 3414 bp, Homo sapiens; identical to SEQ ID NO: 116417

SEQ ID NO: 145326 - DNA, 5130 bp, Homo sapiens; identical to SEQ ID NO: 116418

SEQ ID NO: 145327 - DNA, 9277 bp, Homo sapiens
atggggaaaaaacagaacagaaaaactggaaactctaaaacgcagagtgcctctcctcctccaaaggaacgcagttcctcaccagcaacggaaaaaagctggatggagaatgactttgacgagctgagagaagaaggtttcagacgatcaaattactctgagctacgggaggacattcaaaccaaaggcaaagaagttgaaaactttgaaaaaaatttagaagaatgtataactagaataaccaatacagagaagtgcttaaaggagctgatggagctgaaaaccaaggctcgagaactacgtgaagaatgcagaagcctcaggagccgatgtgatcaactggaagaaagggtatcagcaatggaagatgaaatgaatgaaatgaagcgagaagggaagtttagagaaaaaagaataaaaagaaatgagcaaagcctccaagaaatatgggactatgtgaaaagaccaaatctacgtctgactggtgtacctgaaagtgacggggagaatggaaccaagttggaaaacactctgcaggatattatccaggagaacttccccaatctagcaaggcaggtcaatgttcagattcaggaaatacagagaacgccacaaagatactcctcgagaagagcaactccaagacacataattgtcagattcaccaaagttgaagtgaaggaaaaaatgttaagggcagccagagagaaaggtcgggttaccctcaaagggaagcccatcagactaacagcggatctctcggcagaaaccctacaagccagaagagagtgggggccaatattcaacattcttaaagaaaagaattttcaacccagaatttcatatccagccaaactaagcttcataagtgaaggagaaataaaacactttacagacaagcaaatgctgagagattttgtcaccaccaggcctgccctaaaagagctcctgaaggaagtgctaaacatggaaaggaacaaccagtaccagccgctgcaaaatcatgccaaaatacagatcaacgagacagaaagtcaacaaggatacccaggaattgaactcagctctgcaccaagcggacctaatagacatctacagaactctccacaccaaatcaacagaatatacatttttttcagcaccacaccacacctattccaaaattgaccacatagttggaagtaaagctctcctcagcaaatgtaaaagaacagaaattataacaaactatctctcagaccacagtgcaatcaaactagaactcaggattaagaatctcactcaaagccgctcaactacatggaaactgaacaacctgctcctgaatgactactgggtacataacgaaatgaaggcagaaataaagatgttctttgaaaccaacgagaacaaagacaccacataccagaatctctgggacgcattcaaagcagtgtgtagagggaaatttatagcactaaatgcctacaagagaaagcaggaaagatccaaaattgacaccctaacatcacaattaaaagaactagaaaagcaagagcaaacacattcaaaagctagcagaaggcaagaaataactaaaatcagagcagaactgaaggaaatagagacacaaaaaacccttcaaaaaatcaatgaatccaggagctggttttttgaaaggatcaacaaaattgatagaccgctagcaagactaataaagaaaaaaagagagatgaatcaaatagacacaataaaaaatgataaaggggatatcaccaccgatcccacagaaatacaaactaccatcagagaatactacaaacacctctacgcaaataaactagaaaatctagaagaaatggatacattcctcgacacatacactctcccaagactaaaccaggaagaagttgaatctctgaatagaccaataacaggctctgaaattgtggcaataatcaatagtttaccaaccaaaaagagtccaggaccagatggattcacagccgaattctaccagaggtacaaggaggaactggtaccattccttctgaaactattccaatcaatagaaaaagagggaatcctccctaactcattttatgaggccagcatcattctgataccaaagccgggcagagacacaaccaaaaaagagaattttagaccaatatccttgatgaacattgatgcaaaaatcctcaataaaatactggcaaaccgaatccagcagcacatcaaaaagcttatccaccatgatcaagtgggcttcatccctgggatgcaaggctggttcaatatacgcaaatcaataaatgtaatccagcatataaacagagccaaagacaaaaaccacatgattatctcaatagatgcagaaaaagcctttgacaaaattcaacaacgcttcatgctaaaaactctcaataaattaggtattgatgggacgtatttcaaaataataagagctatctatgacaaacccacagccaatatcatactgaatgggcaaaaactggaagcattccctttgaaaactggcacaagacagggatgccctctctcaccgctcctattcaacatagtgttggaagttctggccagggcaatcaggcaggagaaggaaataaagggtattcaattaggaaaagaggaagtcaaattgtccctgtttgcagacgacatgattgtttatctagaaaaccccatcgtctcagcccaaaatctccttaagctgataagcaacttcagcaaagtctcaggatacaaaatcaatgtacaaaaatcacaagcattcttatacaccaacaacagacaaacagagagccaaatcatgagtgaactcccattcacaattgcttcaaagagaataaaatacctaggaatccaacttacaagggatgtgaaggacctcttcaaggagaactacaaaccactgctcaaggaaataaaagaggacacaaacaaatggaagaacattccatgctcatgggtaggaagaatcaatatcgtgaaaatggccatactgcccaaggtaatttacagattcaatgccatccccatcaagctaccaatgactttcttcacagaattggaaaaaactactttaaagttcatatggaaccaaaaaagagcccgcatcgccaagtcaatcctaagccaaaagaacaaagctggaggcatcacactacctgacttcaaactatactacaaggctacagtaaccaaaacagcatggtactggtaccaaaacagagatatagatcaatggaacagaacagagccctcagaaataatgccacatatctacaactatctgatctttgacaaacctgagaaaaacaagcaatggggaaaggattccctatttaataaatggtgctgggaaaactggctagccatatgtagaaagctgaaactggatcccttccttacaccttatacaaaaatcaattcaagatggattaaagatttaaacgttagacctaaaacaataaaaaccctagaagaaaacctaggcattaccattcaggacataggcgtgggcaaggacttcatgtccaaaacaccaaaagcaatggcaacaaaagccaaaattgacaaatgggatctaattaaactaaagagcttctgcacagcaaaagaaactaccatcagagtgaacaggcaacctacaacatgggagaaaattttcgcaacctactcatctgacaaagggctaatatccagaatctacaatgaactcaaacaaatttacaagaaaaaaacaaacaaccccatcaaaaagtgggcgaaggacatgaacagacacttctcaaaagaagacatttatgcagccaaaagacccatgaaaaaattctcatcatcactggccatcagagaaatgcaaatcaaaaccactatgagatatcatctcacaccagttagaatggcaatcattaaaaagtcaggaaacaacagacatggtaggccaactgtgagcaaaaccttgagcaaagtgctgtggcccggtgcttcccaaacatcacattggccacctaaaatcccccagaagccttccaaacacagctctctgggtcccattcccagaagttttgacaagagaatctgtatgtttaacaagccacccagtaagaggcagttatctgggggatttctaccagatgtacagggttacgtgagactatttgtaccttatcaaccaaaacaagacagaatcaagaagttccacatccacgttgtgtgtcaggggagagttgggggtgggaggagaaccaagaaccttaacgcacccacaaggagaataaataaggaaaaagcagcacctaaacaaatcacagccaaactgctgaaaagcagcgctttgaagagagtagtggctctcccagaacggagtgtgagatctgagaacggacagactgcttccttaagtgggcccctgccccctgagtatcctaactgggagacacctcccagacaccatcatcaaagaccaaaggtagataaaaccacaaaggtggggagaatccagagcagaaaagctgaaaattctaaaaatcagagcgcctcttctcctccaaaggatcacagctcctcaccagcaatggaacaaacctggacggagaatgactttgacgagttgacagaagtaggcttcagaagatcggtaataacgaacttctccgagctaaagaaggatgttcgaacccattgcaaagaagctaaaaaccttgaaaaaagattacacgaatggctgactagaataaagagcgtagagaagaccttaaaggacctgatggagctgaaaaccatggcacaaaaactatgtgacgcatgcacaagcttcaggagccaatccgatcaagtggaagaaagggtatcagtgattaaagatcaaatgaatgaaataaagcaagaagagaagtttagagaaaaaagaataaaaagaaacgaacaaagcctccaagaaatatgggactatatgaaaagaccaaatctacgtctgattggtgtacctgaaagtgacggggagaatggaaccaagttggaaaacactctgcaggatattatccaggagaacttccccaatctagcaaggcaggccaacattcaaattcaggaaatacagagaacgccacaaagatactccttgagaagagcaaccccaagacacataattgtcagattcaccaaagttgaaatgaaggaaaaaatgttaagggtagccagagagaagggtcgggttacccacaaagggaagcctgtcagactaacagctgatctcttggcagaaactctacaagccagaagacaagacacacataggctcaaaataaagggatggaggaagatttaccaagcaaatggaaaacagaaaaaggcaggggttgcaatcctagtctcagataaaacagaatttaaaccaacaaagatcaaaagagacaaagaaggccattacataatggtaaagggatcaattcaacaagaagagctaactatcctaaatatatatgcacccaatacaggagcacccagattcacaaagcaagtccttagagacctacaaagagacttagactccaacacaataataacgggagactttaacaccccactgtcaacattagacagatcaatgagacagaaagttaacaaggatatccaggaattgaactcagctctgcaccaagcagacctaatagacatctacagaactctccaccccaaatcaacagaaaatacattcttttcggcaccacaccacacctattccaaaattgaccacatagtgggaagtaaagcactcctcagcaaatgtaaaagaaaagaaattataacaaactgtctctcagaccacagtgcaatcaaactagaactcaggattaagaaactccctcaaaactgctcaactatatggaaactgaacaacctgctcctgaatgactactgggtacataacgaaatgaaggcagaaataaagatgttgtttgaaaccaatgagaacaaagacacaacataccagaatctctgggacacattgaaagcagtgtgtagagggaaatttatagcactaaatgcccacgggagaaaacaggaaagatctaaaattgacaccctaacatcacaattaaaagaactagcaaagcaagagcaaacacattcaaaagctagcagaaggcaagaaataactaagatcagagcagaactgaaggaaatagagacacaaaaaacccttcaaaaaattaatgaatccaggagctggttttttgaaaggatcaacaaaattgatagaccgctagcaagactaataaagaaaaaaagagagaagagtcaaatagacacaataaaaaatgataaaggggatatcaccaccgatcccacagaaatacaaactaccatcagagaatactacaaacacctctatgcaaataaactagaaaatctagaagaaatggatacattcctcgacacatacactctcctaagactaaaccaggaagaagttgactctctgaatagaccaataacaggctctgaaattgtggcaataatcaatagtttaccaaccaaaaagagtccaggaccagatggattcacagccgaattctaccagaggtacaaggaggaactggtaccattccttctgaaactattccaatcaatagaaaaagagggaatcctccctaactcattttatgaggccagcatcattctgataccaaagccgggcagagacacaaccaaaaaagagaattttagaccaatatccttgatgaacattgatgcaaaaatcctcaataaaatactggcaaaacaaatccagcagcacatcaaaaagcttatccaccatgatcaagtgggcttcatccctgggatgcaaggctggttcaatatacgcaaatcaataaatgtaatccagcatataaacagagccaaagacaaaaaccacatgattatctcaatagatgcagaaaaggcctttgacaaaattcaacaacccttcatgctaaaaactctcaataaattaggtattgatgggatgtatttcaaaataataagagctatctatgacaaacccacagccaatatcatactgaatgggcaaaaactggaagcattccctttgaaaactggcacaagacagggatgccctctctcaccactcctattcaacatagtgttggaagttctggccagggcaatcaggcaggagaaggaaataaagggtattcaattaggaaaagaggaagtcaaattgtccctgtttgcagacgacatgattgtttatctagaaaaccccattgtctcagcccaaaatctccttaagctgataagcaacttcagcaaagtctcaggatacaaaatcaatgtacaaaaatcacaagcattcttatacaccaacaacagacaaacagagagccaaatcatgagtgaactcccattcacaattgcttcaaagagaataaaatacctaggaatccaacttacaagggatgtgaaggacctcttcaaggagaactacaaaccactgctcaaggaaataaaagaggacacaaacaaatggaagaacattccatgctcatgggtaggaagaatcaatatcgtgaaaatggccatactgcccaaggtaatttacagattcaatgccatccccatcaagctaccaatgactttcttcacagaattggaaaaaactactttaaagttcatatggaaccaaaaaagagcccgcatcgccaagtcaatcctaagccaaaagaacaaagctggaggcatcacactacctgacttcaaactatactacaaggctacagtaaccaaaacagcatggtactggtaccaaaacagagatatagatcaatggaacagaacagagccctcagaaataatgccgcatatctacaactatctgatctttgacaaacctgagaaaaacaagcaatggggaaaggattccctatttaacaaatggtgctgggaaaactggctagccatatgtagaaagctgaaactggatcccttccttacaccttatacaaaaatcaattcaagatggattaaagatttaaacgttagacctaaaaccataaaaaccctagaagaaaacctaggcattaccattcaggacataggcgtgggcaaggacttcatgtccaaaacaccaaaagcaatggcaacaaaagccaaaattgacaaatgggatctaattaaactaaagagcttctgcacagcaaaagaaactaccatcagagtgaacaggcaacctacaacatgggagaaaattttcgcaacctactcatctgacaaagggctaatatccagaatctacaatgaactcaaacaaatttacaagaaaaaaacaaacaaccccatcaaaaagtgggcgaaggacatgaacagacacttctcaaaagaagacatttatgcagccaaaaaacacatgaagaaatgctcaccatcactggccatcagagaaatgcaaatcaaaaccactatgagatatcatctcacaccagttagaatggcaatcattaaaaagtcaggaaacaacaggaacacagtgctaggtgttcaaatgattataaaggaatgtgggaagatgttttttccctatgttatccgtgctattgacctcctgagttctcagatgacctctataaggcagagctctcctgacaatgcacatatgggcacatctgtggatcccataaatggttctcaggccttcagcattagactggaagttaatcatagccacctctggttttcaggccttcagacttggactgaaagtcagaagggtgtatggctacagagatctgagctggctctcaaactacccattaagcagcagccaaggctaaagccacagtgtcttcgggaaacctttaagaagcagggtaaagtaatgggacaagtacagggaaagcaggggttcaagacttcagtgggggaagtaacttcagatgtggtagaaataacaaaagaactggaattagaagtggagcctgaatatgtgactgaattgcaacaacctcatgatgaaactttaatggatgaagaattgattctcatgaatgagcagagggagtggtctcttgagatggaaactattcctggtgaagatgctctgaacattgttgaagtgacagcaaatgttgattctgaagaacaatttccccccaaaattcccttcatgccaatctccatctcagaatctgctttcttggaaacccaaccagcaagccaagaagatgttgaactactgccatggagtttcattgtgaagaaaccatga

SEQ ID NO: 145328 - DNA, 376 bp, Homo sapiens
  misc_feature (1)...(376): n = a,t,c or g
gaaacgacgactccgggggcgaacttggcacacagggaggaagggaaaggatgcatggtcatggaggctatgattctgattttagtgatgatgaacactgtggagaatccagcaaaaggaaaaaaaggacagttgaagacgacttactgctccaaaaaccatttcagaaagaaaaacatggaaaggtggcccataaacaagttgcagcagaattgctggatagggaagaagcaagaaatagaaggtttcatctcatagctatggatgcttatcaaagacatagaaagttcgtaaatgactatattttatactatggtggcaaaaaagaagacttcaagcgttttggggaaaatgcccagacagacttggatgtttn

SEQ ID NO: 145329 - DNA, 380 bp, Homo sapiens
cggccagaagcgggcggcgcgggggagatgcataagcttaaatcgtctcagaaggacaagggccgccggtttatggcgtgcactcaggctggcgagagaactgctatctactgcttaacgcagaatgagtggagactacacgaggccacggacagcttcttccaaaacccagactcgctccacagggagtccatgcggaacgctgtggacaagaagaagctggagcggctgtacggcaggtacaaagatccacaagatgattacaaaattggagtcgatgggattcatcagttttgtgatgatctgagcctggatcctgccagtatcagtgtattggtcatagcgtggaagttcagggcagcaactcagtgtgaattaac

SEQ ID NO: 145330 - DNA, 462 bp, Homo sapiens
tctgatgttcgggtcgacccactcgtgcgcccacgcgtccggcgggccgactggtgtttatccgtcactcgccgaggttccttgggtcatggtgccagcctgactgagaagaggacgctcccgggagacgaatgaggaaccacctcctcctactgttcaagtacaggggcctggtccgcaaagggaagaaaagcaaaagacgaaaatggctaaattcgtgatccgcccagccactgccgccgactgcagtgacatactgcggctgatcaaggagctggctaaatatgaatacatggaagaacaagtaatcttaactgaaaaaggacacagcattgttggttttgccatgtactattttacctatgacccgtggattggcaagttattgtatcttgaggacttcttcgtgatgagtgattatagaggctttggcataggatcagaaattctgaagaatctaag

SEQ ID NO: 145331 - DNA, 903 bp, Homo sapiens
  misc_feature (1)...(903): n = a,t,c or g
ttttttttggctggtccctggggattggtcagaagacagctcagctaaaaaggggaagttgtactgggtggttgctttttttctgacgtctgttcctcaggctggaagaaatgagcagaaaacaagggatgagtactttttagagtaatgtgcatgttacgtaatacctgtttctggggcaatgctgcttcttctgactcaacaaatggggagagcaaattgaaaatgcgtaaattggaaggcaagttctgaaattaaaccgttgtactttggcctggatgttctgacctttaaggaagcaagaagtttgtaaacttccaaaattttaactttttctgaactgccggtgtaaacctgaccgtattcccaagtcaacatacccagtatacccaatagggatgtggaataatgtgtgtgttggagtttaaaaccataggcagttttgcttctgggccaaggtaatggaaagcgttctcgctttcctgaggtgtgaggctccagcaggacttgcaggagtgggcccagtgccacagttgtaggcctggactttcagtggagtttctngatgtgtggcttttttggcaaatacatgttcttcaggaacagtgagatcatccaggcagtgggcctgggactggcactcacattaaaaattcatggggacagcccatgggctacttgtttctgtaatacatggcatgtgtgtttttttaaaacctattataggcctctatttctggcagctgcaactttttatgggnaatgtttttccttcttcccacatctcatgtgatgctcttattacaggacacagcattgttggttctgccatgtactattttacctatgacccgtggattggcaagttattgtatcttgaggacttcttcgtgaatgagtgat

SEQ ID NO: 145332 - DNA, 1107 bp, Homo sapiens
gcgcagctcttagtcgcgggccgactggtgtttatccgtcactcgccgaggttccttgggtcatggtgccagcctgactgagaagaggacgctcccgggagacgaatgaggaaccacctcctcctactgttcaagtacaggggcctggtccgcaaagggaagaaaagcaaaagacgaaaatggctaaattcgtgatccgcccagccactgccgccgactgcagtgacatactgcggctgatcaaggagctggctgaatatgaatacatggaagaacaagtaatcttaactgaaaaagatctgcttagaagatggttttgggagagcaccccttttaccactgcctggttgcagaagtgccgaaagagcactggacttcggaaggagcacagcattgtttggttttgccatgttactattttacctatgaacccgtgggattggccaagttatttgtatcttggaggacttctttcgtgatgaagtgattatagaggctctggcataggatcagaaattctgaaggaatctaagccagggttgcaatgaggtgtcgctgcagcagcatgcactttcttgggtagccagaatgggaatgaaccatccatccaacttctattaaaagaagaggtgcttctggatctgtccagttgaaggaggggttgggagactgtttcaaggttccgacaagggagttatttggcttaaaaatgggccaacagagggagttgagggagttgcttgttgttaggatggacaacctccattctattttttaggattaaatttcccaactttctcttggctttcttatggctgttttgttaggtggaaataataggattgaggcacccctttcccaaggtttatttacccgtgggcttgttggcctgtttgaaatgaggtctgtttaaagtggcaatctcaagatgcagtttggagagtcagatctttctccttgaatatctttcgataaacaacaaggtggtgtgatcttaatatatttgaaaaaaacttcattctcgtgagtcatttaaatgtgtacaatgtacacactggtacttagagtttctgtttgattcttttttaataaactactctttgattt

SEQ ID NO: 145333 - DNA, 460 bp, Homo sapiens
gtctaggtttatttcctcttctgtgaaatgtctgtgtgtgtcccttggccgctactgaatcatttattatgtttaaaccagatcacatcttgggagaggcctcctggctgaaggccagaagctggttacttggacacagaggatataatggcttgggtccccagatctccctgcagagttcacccatcccctcttcagatggccttggagggatgatcctctcctatcagcaatgtgctcaccatgttttttccagggaatgtaccagaaggaatggccaggttttcataaccaacttggccacctttcaccgagaagttcctacttgcagttggatgaaggtggtcaccatttgaccgatgtccaggttgcaaggatggagccccccaaacagaaattatcaatgctcatacgaaggaaactcgctgggctctccctgaaggaagagagtgagaaaccc

SEQ ID NO: 145334 - DNA, 501 bp, Homo sapiens
gcggtggaattcgtcaccaggcctgactgcatgtgtgacacctttgaccagtgcgccgagaacattattttaaagatcctggagtatcagagccaggcgaataagtaccacaactcctgcctcatagaattacggatccagatcaggagatttgaggagctgctgccccaagtgtgttggctggtgatggagaatttcaaggaacaccactggaaaaagtttttcacctctgtgaaggagatccgaggacagttcgaggaacagcagaagcggctggagaaaagaaaggacaaaaatgcccagaagctccatctaaatcttggacaccccgtacatttccaagaaatggagtctctacacttaagtgaagaggaaaggcaggaagagctggacagcatgattaggatgaacaaggagaagctggaggaatgtaccagaaggaatggccaggttttcataaccaacttggccaccttcaccgagaagttcctactgctagtg

SEQ ID NO: 145335 - DNA, 391 bp, Homo sapiens
agccctttaaataaggtgcagctgatcaacgagctgaatgaacgagaggtccagcttggggtggccaataaggtgtcctggcactcagagtacaaggacagcgcatggatcttcctgggagggcttccttatgacctgacttaaaggggacatcatctgtgtgttctcacaaccagaggagcacaattgtggccgtcgacaattttaatgggatcaagatcaaaggaagaactatccgagtggatcatgtgtctaactatcgggctcctaaggactcagaagaaatagatgatgtgaccagacaactccaggagaagggctgtggggctcgtaccccctcaccaagtttgtctgagagctctgaagatgaaaaaccaacaaaaaagcccaa

SEQ ID NO: 145336 - DNA, 832 bp, Homo sapiens
atccttaattaaattaatccccccccccccctttcctgagtgctgagcgcgaacccgaggagatgaaccctttaactaaggtgaagctgatcaacgagctgaatgaacgagaggtccagcttggggtggccgataaggtgtcctggcactccgagtacaaggacagcgcctggatcttcctgggagggcttccttatgaactgactgaaggggacatcatctgtgtgttctcacagtaagtgtcctttcatttcctgcctcctgagtcgacagagtactttgtttctgtaatacattttgtggcatcacaaaaaccacttattttcactctaggctgaatggcatccctgcatggggagggctggagcttctgttctagatcagtcccaggacatggttctagaatgttctgtgggagatccaagaggtttgttaatttgggagggcatcttggggatcctagtctatttctgttgtttttcactgaggcttgttcagcctgggcctagactggaacagactggactccttgggctcttgcaaactaggggtaacccatggtcacagggcccttctggcccttacctgtgtggcgtcatacgattggggcaaagcacagaggaaattggggtaaaaaacagaaggtcgtagtttgctttctttgtttctcgatgagtgtaaggttagtgagcaaaggcaatctctgcctggaggctgagaatcacagcccgaagggaacaagaatgaataggagacctgtatattcttcattctgctgaggtgttagcagcagcatttcatgggagagggtgttggcagctcatactggtag

SEQ ID NO: 145337 - DNA, 1311 bp, Homo sapiens
tgattcctgagtgctgattgcgaaccctaggtgatgaagtttggcgtcagctttcttttgaggaaggagcagcgggccactgggggtggtccaccgggactggtgtggtacagcgtctgcggggccgacgggcggtagcggcgcggcgactggaacagctcgtcccctagttttgctcttcctcagctccggccggatcgcacttacttggctgcttttctgcctaccctgcccaccccccccgccaccgtgaagtcctttaactagggtgaagctgatcaacgagctgaatgaacgagaggtccagcttggggtggccgataaggtgttctggcactccgagtacaaggacagcgcctggatcttcctgggagggcttccttatggactgacttgaaggggacatcatctgtgtgttctcacaatatggggagattgttaacattaatctcgtgcgggaccaagaaaactgggaaatccaaaggattctgtttcctctgctatgaagaccagaggagcacaattctggccgtcgacaattttaatgggatcaagatcaaaggaagaactatccgagtggatcatgtgtctcaactatcgggctcctaaggactcagaagacatagatgatgtgacccgacaactccaggagaagggctctggggctcgtcccccctcaccaactttgtctgagagctctgaagatgaaaaacccacaaaaaagcacaaaaaagacaaaaaaggaaaaaaagaaaaaaaagaaagaaaaagagaaagccgaccgggaggtacaggcagagcaaccatcctcttcgtcacccagacgcaagacagtaaaggaaaaggatgacactggccctaagaagcacagcagcaagaactcagagagagctcagaagtcagagcccagggaggggcagaagctccccaaatccaggacggcctactctggtggagcagaggacctagagagggagctgaagaaggagaaacccaagcacgagcacaagtcctcaagcaggagggaggcaagagaagaaaagaccaggattagggacagagggcggagctcagatgcacattctagctggtataatgggcgttctgaagggcgtagttatagaagtagaagtaggagccgagataaatcccataggcataaaagggcccgacgctcccgggagcgggagtcttcgaatcccagtgaccgttggcgtcactgaagacttcagctgcacagtagatttggaaataattatgttttttaaatgcagtcaaattcagttgggtggttactatttttgtatctaa

SEQ ID NO: 145338 - DNA, 2346 bp, Homo sapiens
  misc_feature (1)...(2346): n = a,t,c or g
ttttttttttttttttaaaaatagttactaactttatttgtattcgttttaaaaacagaacttgttacaggtaatcacgaagcttccaaaaaaaaaattacattctgcttttgtcatcttgataggacaaggaatgtttagatgtccttaaaacacagggtaaagttgacaaataacaaactactacaaactatgggattgtcacttcaagcacactaaaatgtgggaatacatgtacataaattactgaccagtttttttgcaatacaaagagtatggcactacagcttatataccataaagggtaacatgccccaaaattatatcagaagattcacaaacaccgttccggagaaaataataactttgactccttgggttccaattaagattggaagtgaaatggattggggaaagttttcctgaaacctggaaggggcacgccacattataggcagaaccgtcaatcaacaatcacgtggggttgaaaagcagcaagaagaatatggcaccggtaacaggggtaaccacctttcttttttcctcagtccccaatttgagttaggaagattgaggactaaacagaaaacagtatttaaaaacatgtattatctgcatagatagaaatcttccattacgatgagagtgaacattcggtcaaagctatgcaggagtgccaaagagtctgcaggatatgattctgtttcaaaaggaaatatataggtttacatccagacagaccacataacgaatttagtgaaagatctttacgctgttatttaaagtgggtagagacgctgactcaagccccaggttagttccttgacccttggctaaaaactctactttgaacgtgatgatttttataatctttgtcagtgaacccagcagttgttgctttcagttgtcttatggattgtacatttggtaataagaaaacagtctccaaatgattaacattttcccctgattcacaatgaaccaacgggcattctgacgaagatgatccatacaccgaggggagtttaaaagacaaataagtattcagcgaattgtaggacaagggttccaaaaaaccttttaaaaaactttttaaaatagtgagtttcctgtaaacatggacttaacagctcccagctaggaagcaactattgcccccatcttttgttccctttatattgtcacccccaattataaataatttgtttcttttagtacaggaagatataaatgcaaatgtgcaaaaaaaggaagaaggaaagatggaccaagttcacctgtttggtacgtacagggtccacagctctgcagaaagcgggagaaacctggtagacagagggcctgacgcaccatagcattgagcacattttccactgcttaattatgtgtgagattttcccttttaaaataaatctatggtctgtgaaatagtctgtataaaaatatgaagccttgaataggccagtcatagcagttccgtcttgaatagaactcgattttacaagcgcggagtgagagtatcattccactgcaaactcttttatttccgcaacatattagatctcattgtgctttagtagagttacctattaagtcgacattttagtcactgcactaatatgaaaatccgggagaggaccacataaaataccaacataattgctggctaccaagataaaattatttaggcagattccagccccaatggttcaatgataacaaaactacaaaacatgggacatcaaattcattaataaaattattaagtcacctcctccatcgaatgatgagattttttttattcactgtttcccctcagggaaaaaagaatcctcccccctcatgccnnnnnnnnnnnctgatgccaggaattagtattcattgcctctttaagaggccaatgcaaaaaaaggtagaaaaagccctagcccagagagttgggattgccagttgtagtccctgggttgccttgctggggggtgcctaagtcagtgccataacctcagtttttctaatctgtgtaacatggggatagagtatatgatttccaaggtcactttcacctctgtgattgagcctctaagaaagccaaatcttttcactttgtaatcatgacatttttaaaagatggagttaatatgaatgggaaacttttttttttttgagccagggacttgctatgttgcccaggctggtcttgaactcctgaactcaagtgatcctctcacctcagcctctcaaatagctgagactacaggcacacaccactgcacctggctaaagactatattcttaaagaataaaagtactgcacttcacctctatctcctggtatctcttcaattc

SEQ ID NO: 145339 - DNA, 2246 bp, Homo sapiens
tcactaatattttttcagaagatgacgcctcatttagaggataaaatattttaagttattttgatattcaagaggagcattattgggactgtttcagattttatcaccgtgatgtgttaaccctattgccaaatattctctaacatgtacccagtgaattcacacatcttgctgagcttctgaaaacaataggttctttccaaaggggatcaagtggccctgggagacccggcaacaaaccaaaaagaagggctgttgctgtgtctgtttacaacttttccagatgctggcagtacctgtggacttaaaagtgttttttagaggatcgccatggttattgatcactactttatgaactaaacagcattttccagaaaaagggggtttaacttgttacagaattgggagaagtctttgcaaaggactgatttaagcccttctacccaacaccttcccctgtgtagatttgcatacagctaaatctaaaatattcctgctaaagactattggatgtatggttgatgggaatgaaacctttgattaaatttcccttttggtggagacatcctgtggtaaggtacagataatccaacaagagtcccccaatttcctttgagccttaaaaaggacactgtcgagtaggtaggagggaaacctggcagagccccttatttttggcctaaaaggactgagcaccaagatgtcttttgaagttttaagctaagaggtttccagtgcaatacaatatatacaagtgaagtttttacctcagttttgcaatggactgcaaactatacttattacaccactacaccttctctcaaggcctgccagggcctccatttatgtatgtggcttacagcttaaagtcagtagttggactactatatgaactgttactatcatgttttataccggtcgtaaatgcactccccaaactacaggaaaagcggatgtttattttttaaaccagcttttaattttcttagtattatttattgtagatgcaactgtttttattctgttggggggcttgggattattgcacttaactttgcagtttgagtgaactgtgttgaaaaagttaatgaaagcagttggtactcagacaaatagctgaaaactagtgaatgctaggttgttatcaagtttttatttgacattaaggttaaaaagatatatttattttctaaatattttggactttttttttgtttaactctttattagctgctaagtaaattgaagtgtatttaatgatgtgttaagttaacccgatttatggaagacagtaaagaacagccctctgtagtcagtaaagtttcaccttctaaagaatatattttgaattagttttatgaactctgttaaaattctgacccattacttgccaatttataaaagcctattttattacaaggcattgtctctggaaaaaaaaaattcccttaattcttaaatgtcattagatgtagaaagaaaaactaaactgttactaaggattattaagaaatagttttttaactattaagattttaaaaactttcctgtaaagttgcttttaataagtatcaaattttctgtatgatcatgtaaaattcataatttgtgcaaagcagaggaaaaataaattcttaattttgtttagacttaacctaaaatgacatttataagttttaaatatgcagattttagagttacatattgtacaatgttgataggtttttctagtttttatttttcatctgaatggagactttatttgggaaagtgttttaattgttaaaactgatatttagtttgagaatgactttgtttacttttgtttagactactaaaatgtgacttacatgttttgattggactagtctgcaattttctcatcatagcatgagttggcagagaatatctacttccagcagtacatttaaagtttggtttataggaattaatttgagaatcaaaatgtaggaattttaaaataatttgctcactaaaaaaattaagatggttaaataatgggttattctttgtacttatctctgtcagaaactcttgctttactctttgttctcccagcagtttttggtttaatttctaatgtgtctaatttgtgtaggcgtcgaccagaagattatgatattcataacagcagaaagaaaccaaggattgactatccccctgagtttcaccagagaccaggttaatattttataatcctgcagatatttgataacaaaatattg

SEQ ID NO: 145340 - DNA, 432 bp, Homo sapiens; identical to SEQ ID NO: 133897
  misc_feature (1)...(432): n = a,t,c or g

SEQ ID NO: 145341 - DNA, 488 bp, Homo sapiens
ccggaatgttaccggctgggcgtgcgcggctgcggtacggcgtgttggtcccagcggttcagctgaggtagggacgtgctgtaggccggaatgttaccggctgttggatctgcggatgaggaggaggatcctgcggaggaggattgtcctgaattggttcccattgagacgacgcaaagcgaggaggaggaaaagtctggcctcggcgccaagatcccagtcacaattatcaccgggtatttagttattcagaggctgctctgctgagaagatgaacaaatttcttgtccaaaacaatgtatttcaaacgtgccgctcgggcctttcccgtattgctcactggtgctgggaagacaacacttctgaactatattttgacagagcaacatagtaaaagagtagcggtcattttaaatgaatttggggaaggaagtgcgctggagaaatccttagctgtcagccaaggtggagagctctatgaagagtgg

SEQ ID NO: 145342 - DNA, 868 bp, Homo sapiens
tacgtgcggtggaattccaggccccggccaggccgggagtggcgtgctgggcgtgcgcggctgcggttctgcgtgttggtcccagctggttcagctgaggtagggacgtgctgtaagccggaatgttaccggctgttggatctgcggatgaggaagaggaatcctgcggaggaggattgtcctgaatttggttcccattgagacgacgcaaagcgaggcaggaggaaaagtctggcctcggcgccccaagatcccccagtcacaattatccacccgggtatttagggtgcctggggaagaccaacacctcctgaacctatattttggaccagagcaacataggtaaaagagtagcgggccattttaaattgaatcctggggggaaggaagttgcgcctggagaaatccttaagctgtcagcccaaggtggaggagctctatgaaagagtggcctggaaccttagaaaccgggttgcctcctgcttgtttcagtgaaagtgaggaatgtgtttgactggtgtacatgggtttactgagaaatgttttatttgattgatgattttccagctttaattttcttggagtaatttaactgaatttacacagtttgcttcattgtattttcaaacaaatagaaaataaacttattaggaagcattttcttaaagtgtttcttgctgtcttttctatctgctctaatgttttggtccttttattgagtttttattgcttttgatgtcagggcttatttaatctctagtgcatgaaagtctcatatgtaaaaaatgattattgtgaatttaatctgtcattggtcatatttctaagtgttcaaccttataaaaaaaataaatgactatcaaaaaag

SEQ ID NO: 145343 - DNA, 376 bp, Homo sapiens
  misc_feature (1)...(376): n = a,t,c or g
ctcagagagaacccaccatggtgctgtctcctgccgacaagaccaacgtcaaggccgcctggggtaaggtcggcgcgcacgctggcgagtatggtgcggaggccctggagaggatgttcctgtccttccccaccaccaagacctacttcccgcacttcgacctgagccacggctctgcccaggttaagggccacggcaagaaggtggccgacgcgctgaccaacgccgtggcgcacgtggacgacatgcccaacgcgctgtccgccctgagcgacctgcacgcgcacaagcttcgggtgtggcatgttttgcccttngctccccccagccctnctcccttctgaccgtacccgtgttttgaataagntgagtgggg

SEQ ID NO: 145344 - DNA, 367 bp, Homo sapiens
agagaacccaccatggtgctgtctcctgccgacaagaccaacgtcaaggccgcctggggtaaggtcggcgcgcacgctggcgagtatggtgcggaggccctggagaggatgttcctgtccttccccaccaccaagacgaccggtcaacttcaagctcctaagccactgcctgctggtgacctggccgcccacctccccgccgagttcacccctgcggtgcacgcctccctggacaagttcctgggttctgtgagcaccgtgctgacctccaaataccgttaagctggggcctcggtagccgttcctcctgcccgttgggcctcccaacgggccctcctccctccttgcaccggcccttcctggtttt

SEQ ID NO: 145345 - DNA, 409 bp, Homo sapiens
ttttgggccccacagactcagagagaacccaccatggtgctgtctcctgccgacaagaccaacgtctacttcccgcacttcgacctgagccacggctctgcccaggttaagggccacggcaagaaggtggccgacgcgctgaccaacgccgtgcgcactgtggacgacatgcccaacgcgctgtccgccctgagcgacctgcacgcgcacaagcttcgggtggacccggtcaacttcaagctcctaagcactgcctgctggtgaccctggccgtcaactcgccgccgagttcaccctgcggtcacgcctcactggacaagttctggcttttgtgaacaccgtgttgacttcgaataccgttaagctggagctccgtaagcgttcctcctgccggttggcttccaaacgg

SEQ ID NO: 145346 - DNA, 279 bp, Homo sapiens
  misc_feature (1)...(279): n = a,t,c or g
gagaacccaccatggtgctgtctcctgccgacaagaccaacgtcaaggccgcctggggtaaggtcggcgcgcacgtggcgagtatggtgcggaggccctggagaggatgttcctgtccttccccaccaccaagatccaaataccgttaagctggagcctcggtggccatgcttcttgccccttgggcctnccnccagnccctnctncccttcctgcacccgtacccccgtggtctttgaataaagtcttgagtgggcggcaaaaaaanatnnnaaaaaa

SEQ ID NO: 145347 - DNA, 450 bp, Homo sapiens
  misc_feature (1)...(450): n = a,t,c or g
gagaacccaccatggtgctgtctcctgccgacaagaccaacgtcaaggccgcctggggtaaggtcggcgcgcacgctggcgagtatggtgcggaggccctggagaggatgttcctgtccttccccaccaccaagacctacttcccgcacttcgacctgagccacggctctgccaggttaagggccacggcaagaaggtggccgacgcgctgaccaacgccgtggcgcacgtggacgacatgcccaacgcgctgtccgccctgagcgacctgcacgcgcacaagcttcgccttgcttgggtgaaccttgggccgcccaccttncccgccgagtttnaacccttggcggttnaaaggcttncttgggaaaaatttnctgggttttttttgaagaaacttgtttgaatttcaaaanaacctttaaagtttngaagtttngttgggaatttttt

SEQ ID NO: 145348 - DNA, 473 bp, Homo sapiens
acagactcagagagaacccaccatggtgctgtctcctgccgacaagaccaacgtcaaggccgcctggggtaaggtcggcgcgcacgtggcgagtatggtgcggaggccctggagaggatgttcctgtccttccccaccaccaagacctacttcccgcacttcgacctgagccacggctctgcccaggttaagggccacggcaagaaggtggccgacgcgctgaccaacgccgtggccacgtgggtggaccggtcaacttcaagctcctaagccactgcctgctggtgaccctggccgcccacctccccgccgagttcaccccttgcggtgaacgcctccctggacaagttcctggtttctgtgagcaccgtgctgacctccaaataccgttaagctggggcctcggttggccatgctttttgccccttgggcctcccccagccccttcctccctttcctgaaccggaccccgg

SEQ ID NO: 145349 - DNA, 1419 bp, Homo sapiens
  misc_feature (1)...(1419): n = a,t,c or g
tttttttttttttttttttgccgcccactcaaactttattcaaagaccacgggggtacgggtgcaggaaggggaggaggggctggggggaggcccaaggggcaagaagcatggccaccgaggctccagcttaacggtatttggaggtcagcacggtgctcacagaagccaggaacttgtccagggaggcgtgcaccgcaggggtgaactcggcggggaggtgggcgcaaggccgcctggggtaaggtcggcgcgcacgctggcgagtatggtgcggaggccctggagaggatgttcctgtccttccccaccaccaagacctacttcccgcacttcgacctgagccacggtttctgcccaggtttaagggccacgggcaagaaggtggccgacgcgctgaccaacgccgtggcgcacgtgggacgacatgcccaacgcgctgtccgccctgagcgacctgcacgcgcacaagctttcgggtgggacccggttcaactttcaagcttcctaaagccacttgccttgcttgggtgaaccttgggccgcccacctccccggccgagtttcaacccctggcggttgcaaggcttccctggggacaaatttcctggggtttttgttgaagcaaccttgttgaactttcaaatacgttaagctggagctcggggggtaaggtcggcgcgcacgctggcgagtatggtgcggaggccctggagaggatgttcctgtccttccccaccaccaagacctacttcccgcacttcgacctgagccacggctctgcccaggttaagggccacggcaagaaggtggccgacgcgctgaccaacgccgtggcgcacgtggacgacatgcccaacgcgctgtccgccctgagcgacctgcacgcgcacaagcttcgggtggacccggtcaactttcaagctcctaaagccactggcctgctggtggaccctgggccggcccacttccccgccgagtttcacccctgcggtgcacgcctccctggacaagtccaccaagacctacttcccgcacttcgacctgagccacggctctgcccaggttaagggccacggcaagaaggtggccgacgcgctgaccaacgccgtggcgcacgtggacgacatgcccaacgcgctgtccgccctgagcgacctgcacgcgcacaagctttcggtggacccgggcaacttcaagcttcctagccacttgcctgctggtgacccttgccgnccacctccccgccgagttcaccccctgggtgcacgcctnccttnacaagttcctgggctctgtgagcaccgtgctgacctccaaataccgttaagctggancctcngtagccgttcctcctgcccgcctggcctcccacnggcccctctncctccttgcacccgcccttcctggtcttgaataa

SEQ ID NO: 145350 - DNA, 422 bp, Homo sapiens; identical to SEQ ID NO: 132796
  misc_feature (1)...(422): n = a,t,c or g

SEQ ID NO: 145351 - DNA, 500 bp, Homo sapiens; identical to SEQ ID NO: 132797
  misc_feature (1)...(500): n = a,t,c or g

SEQ ID NO: 145352 - DNA, 1245 bp, Homo sapiens; identical to SEQ ID NO: 132799

SEQ ID NO: 145353 - DNA, 916 bp, Homo sapiens
ggaattctcagtccccacctgccctcctagaggagttgccttagtctgagctaagtccattctaccctatatgatggccctgggctttcctcaggcagaattgtaaaattaggaaacttctacttcggagctcatttgttcatacactcttcatcttttattcacaccccactagttatccactctcaacctcaacccttggcgtggggcatttcatcaagttacttattggtatttgcctttactccaaactgctaatcttttctaggtgcttagcatttcatgtttggcaactcacagtgggtagtaataagccttttcatcatatttaatctttcagtctgtgtaaactgtgcttctcctaaagcagaagtctaataggagctttggtcattaacttcctgatggcttctagaaatgtcatcaaagaaacatttcatatttatatccttttttgcttaaattttcttttgggtcaattcaaataatttattaatgtctatattaatataaaatagaaattgttaaatatttcaggaaaactttctgaaatataatttctccgtacaatgaaacagtttttttcatatatctataaatagatacaggagcctccagttatctaatgagggttacatatggtgcataattttaataccatattcgctgtcatcttactacagatgtgagagtacttttgctataagtttcctaaaagtatttaatacttttttttttcaatttagattaaatctcttgatgaacagtgtgtggttggcaaaatttccaagcactggactggaattttgagagaggcatttacagacgctgataactttggaatccaattccctttagaccttgatgttaaaatgaaagctgtaatgattggtcctgttccccatgctcatgtttt

SEQ ID NO: 145354 - DNA, 2104 bp, Homo sapiens
ccgagcgccagcgcggggaaccgggaaaaggaaaccgtgttgtgtacgtaagattcaggaaacgaaaccaggagccgcgggtgttggcgcaaaggttactcccagacccttttccggctgacttctgagaaggttgcgcagcagctgtgcccgacagtctagaggcgcagaagaggaagccatcgcctggccccggctctctggaccttgtctcgctcgggagcggaaacagcggcagccagagaactgttttaatcatggacaaacaaaactcacagatgaatgcttctcacccggaaacaaacttgccagttgggtatcctcctcagtatccaccgacagcattccaaggacctccaggatatagtggctaccctgggccccaggtcagctacccacccccaccagccggccattcaggtcctggcccagctggctttcctgtcccaaatcagccagtgtataatcagccagtatataatcagccagttggagctgcaggggtaccatggatgccagcgccacagcctccattaaactgtccacctggattagaatatttaagtcagatagatcagatactgattcatcagcaaattgaacttctggaagttttaacaggttttgaaactaataacaaatatgaaattaagaacagctttggacagagggtttactttgcagcggaagatactgattgctgtacccgaaattgctgtgggccatctagaccttttaccttgaggattattgataatatgggtcaagaagtcataactctggagagaccactaagatgtagcagctgttgttggtccctgctgccttcaggagatagaaatccaagctcctcctggtgtaccaataggttatgttattcagacttggcacccatgtctaccaaagtttacaattcaaaatgagaaaagagaggatgtactaaaaataagtggtccatgtgttgtgtgcagctgttgtggagatgttgattttgagattaaatctcttgatgaacagtgtgtggttggcaaaatttcccaagcactggactggaattttgagagaggcatttacagacgctgataactttggaatccagttccctttagaccttgatgttaaaatgaaagctgtaatgattgggtgcctgtttcctcattggacttcatgttttttggaaagcactgggcagccagggaacaaaaattcaggagtgtgggtagtgggatttagttgaaagtctccttcagggaaatctggaagtctgtaatattgattgagactatctaaactcataccctgtatgaattaagctgtaaaggcctgtagctcctgggtttgtatactttttgctttttccaaatttatagtttatcttctgtataactgatttataaaggtttttgtacatttttttaatactcattgtcaatttgagaaaaaggacatatgagtttttgcatttattaatgaaacttcctttgaaaaactgctttgaattatgatctctgattcattgtccattttactaccaaatattaactaaggccttattaatttttatataaattatatcttgtcctattaaatctagttacaatttatttcatgcataagagctaatgttattttgcaaatgccatatattcaaaaaagctcaaagataattttctttactattatgttcaaataatattcaatatgcatattatctttaaaaagttaaatgtttttttaatcttcaagaaatcatgctacacttaacttctcctagaagctaatctataccataatattttcatattcacaagatattaaattaccaattttcaaattattgttagtaaagaacaaaatgattctctcccaaagaaagacacattttaaatactccttcactctaaaactctggtattataacttttgaaagttaatatttctacatgaaatgtttagctcttacactctatccttcctagaaaatggtaattgagattactcagatattaattaaatacaatatcatatatatattcacagagtataaacctaaataatgatctattagattcaaatatttgaaataaaaacttgatttttttgt

SEQ ID NO: 145355 - DNA, 797 bp, Homo sapiens
  misc_feature (1)...(797): n = a,t,c or g
caatatactgattcaacgcaatcgctatcataatctcatcgacattctgcactgaaatagataatataaacccaaaattcggacgacggagaagcacctgctccacagtggcacacagcactgtccggggccacacacagcctgttaggacatgtgggccacagaacttacgcacctaaagtactgtagaggcccaggagacatgaaccagggccattttaactgtcagtaatggccacaaagacccctaaatagnnnnnnnnnnnnnnnnnnnnnnnnnnnnnnnnnnnnnnnnnnnnnnnnnnnnnnnnnnnnnnnnnnnnnnnnnnnnnnnnnnnnnnnnnnnnnnnnnnnnnnnnnnnnnnnnnnnnnnnnnnnnnnnnnnnnnnnnagcccggaagtgaatccatgcatttacggtcaactgatttttgacagaaatgccaagaaacacaatgtggaaacgacagtctgttcaataaatgatgttggggccaggtgcagtggctcatgcttataatcctagcactttgggatgccgaggtggaaggaccacttgaggcctccctccaggctccggaagagacctcctccatgatcccttgtctaaggggaaggttcctcaggaccttaccgtgggggctgaaggtggccacccctccaggaacttatgccccaggcgctgaatttgggctgcctaagtctgtgtgcgtgcgtctgtgtttgtgtgcatgtctgcatgtctgtgtgtttgcatgcatgtctgtgtgtctgtgtggtctatgtgtctgtgtgta

SEQ ID NO: 145356 - DNA, 534 bp, Homo sapiens; identical to SEQ ID NO: 144862

SEQ ID NO: 145357 - DNA, 489 bp, Homo sapiens
ggcacgagcacatactcacagagaacccaccatggtgctgtctcctgccgacaagaccaacgtcaaggccgcctggggtaaggtcggcgcgcacgctggcgagtatggcgcggaggccctggagaggatgctcctgtccttccccaccacgccgacctacttcccgcacttcgacctgaaccacggctctgcccatgttaagggccacggcaagaacgtggacgacgcgctgaccaacgccgtgacgcacgtgtactacatgcccaactcgctgtacgccctcagcgacctgcacccgcacaatcttcggatggaccctgtcaacttcatgctcctaagccactgtctgctgtagaccctggtcgtccatcttcccgccgagctcactcctgctgtgcacgcctccctgaacaatgtcctcgaatctgagaggactgagctgacctctagcacctcatgactaggctcttcggagtcaagcctctgccg

SEQ ID NO: 145358 - DNA, 611 bp, Homo sapiens
cggccgcgtcgacctcaaagagaacccaccatggtgctgtctcctgccgacaagaccaacgtcaaggccgcctggggtaaggtcggcgcgcacgctggcgagtatggtgcggaggccctggaaagatgtttctgcctttcccaccaccaagacctactttccgcactttgacctgagccacgggtcttcccaggttaagggccacggcaagaaggtggccgacgcgcttaccaacgccgtggggcacgtggacgacatgcccaacgcgctgtccgccctgagcgacctgcacgcgcacaagcttcgggtggacccggtcaactttaagctcctaagccactgcctgctggtgaccctggccgcccacctccccgccgagttcacccctgcggtgcacgccttcctggacaagttcctggcttctgtgagcaccgtgctgacctccaaataccgttaagctggagcctcgggggccatgcttcttggcccttgggcctccccccagacccttctccctttctgacccgtaccccggggggtttgaataaaagatggcgacccggcgcaatttggaactcgaaagaatctttttttttgggttggggggggca

SEQ ID NO: 145359 - DNA, 660 bp, Homo sapiens
  misc_feature (1)...(660): n = a,t,c or g
ccccgactcttctggtccccacagactcagagagaacccaccatggtgctgtctcctgccgacaagaccaacgtcaaggccgcctggggtaaggtcggcgcgcacgctggcgagtatggtgcggaggccctggagaggatgttcctgtccttccccaccaccaagacctacttcccgcacttcgacctgagccacgggttttgcccaggttaaaggggccacgggaaagaaggtggacgacagcgctgaccaaacgccgtggcgcaccgttggacgacatgcccaacgcgcttgttcggcccttgaagcgaccttgcacggcncacaaagctttcggggtggaacccggttcaacttcaaagctcctaaagccacttgccttgcttgggtgaaccttgggccgcccaccttccccggccgagtttcaacccctggcggttgcaacgtcttccctggggacaaagtttccttgggtttcttgttgaagaaccgttgcttgaaccttccaaaatacccgttaaagcttggaagccttcggttggccattgtttttttgccccttggggcttccccccagccccttcctccctttcctgaaccgtaacccccgtggtctttgaaataaagtcttgagtgggcggcaaaaaaaaaaaaaaaaaa

SEQ ID NO: 145360 - DNA, 386 bp, Homo sapiens
  misc_feature (1)...(386): n = a,t,c or g
aaccatggaagccccagcgcagcttctcttcctcctgctactctggctcccagataccactggagaaatagtnnnnnnnnnnnnnnnnnnnnnnnnnnnnnnnnnnnnnnnnnnnnnnnnnnnnnnnnnnnnnnnnnnnnnnnnnnnnnnnnnnnnnnnnnnnnnnnnnnnnnnnnnnnnnnnnnnnnnnnnnnnnnnnnnnnnnnnnnnnnnnnnnnnnnnnnnnnnnnnnnnnnnnnnnnnnnnnnnnnnnnnnnnnnnnnnnnnnnnnnnnnnnnnnnnnnnnnnnnnnnnnnnnnnnnnnnnnnnnnnnnnnnnnnnnnnnnnnnnnnnnnnnnnnaactggcctccggtcactttcggcggaggaaccaacctggagatcn

SEQ ID NO: 145361 - DNA, 476 bp, Homo sapiens; identical to SEQ ID NO: 128686
  misc_feature (1)...(476): n = a,t,c or g

SEQ ID NO: 145362 - DNA, 417 bp, Homo sapiens
  misc_feature (1)...(417): n = a,t,c or g
ataggacccagagggaaccatggaagccccagctcagcttctcttcctcctgctactctggctcccagagtccaccggagaaattgtgttgacacagtctccagccaccctgtctttgtctccaggggaaagagccaccctctcctgcagggccactcagagtattaacaactacttagcctggtaccaacagaaacctggccaggctcccaggctcctcatctatgatgcatccaacagggccactggcannnnnnnnnnnnnnnnnnnnnnnnnnnnnnnnnnnnnnnnnnnnnnnnnnnnnnnnnnnnnnnnnnnnnnnnnnnnnnnnnnnnnnnnnnnnnagcaccgtagccactggctgttcacttttggccaggggaccaagctggagatcaaacgaactgtggctgcacc

SEQ ID NO: 145363 - DNA, 412 bp, Homo sapiens
  misc_feature (1)...(412): n = a,t,c or g
ggaaccatggaaaccccagcgcagcttctcttcctcctgctactctggctcccagataccaccggagaagttgtgttgacgcagtctccaggcaccctgtctttgtctccaggggaaagagccaccctctcctgcagggccagtcagagtgttagcagcagctccttagcctggatccagcacaaacctggccaggctcccaggctcctcatacatggtgcatccaacagggccactggcatcccagacnnnnnnnnnnnnnnnnnnnnnnnnnnnnnnnnnnnnnnnnnnnnnnnnnnnnnnnnnnnnnnnnnntttgcagtggatttctgtcagcaggatgggagctcactcggtagcactttcggacctgggaccgaactggatgtcatacgaactgtggtttgccctg

SEQ ID NO: 145364 - DNA, 446 bp, Homo sapiens
gtgggtttttgccatggaacccccagcgcagcttctcttcctcctgctactctggctcccagatattaccggagaaattgtgttgacgcagtctccaggcaccctgtctttgtctccaggggaaagagccaccctctcctgcagggccagtgagagtgttagaagcagctccttagcctggtaccagcagaaatttggccagcctcccaggctcctcatctatggtgcatccaccagggccactggcatcccagacagggtcaatggcagtgggtctgggacagacttcactctcagcatcagcagactggagcctgaagattttgcagtgtattactgtcaccagtatggtaggtcacctcagacgttcggccaagggaccaaggtggaaatcaaacgaactgtggctgcaccatctgtcttcatcttcccgccatctgatgagc

SEQ ID NO: 145365 - DNA, 792 bp, Homo sapiens
cggccgcgtcgacctcagttaggacccagaagggaaccatggaaaccccagcgcagcttctcttcctcctgctactctggctcccagataccaccggagaaattgtgttgacgcagtctccaggcaccctgtctttgtctccaggggaaagagccaccctctcctgcagggccagtcagagtgttagctacaacaacaacttaggctggtaccagcagaaacccggccaggctcccaggctcctcatctacgatgcatccaacagggccactggcatcccagacaggttcagtggcagtgggtctgggacagacttcactctcaccatcagcagactggagcctcaagattttgcagtgtattactgtcagcactatggtggctcgcctcgggagtacacttttggccaggggaccaagctggagatcaaacgaactgtggctgcaccatctgtcttcatcttcccgccatctgatgagcagttgaaatctggaactgcctctgttgtgtgcctgctgaataacttctatcccagagaggccaaagtacaggggaaggtggataacgccctccaatcgggtaactcccacgagagcggcacagagcaggcacggcaggacagcacctacagcctcagcaccaccctgacgctgagcaaagcacactaccagaagcacccggctacgcctgcgaactcacccatcagggcctgactcggccgcaccaagagctctgaccagggcaaagcttacacgcgcgacggcgcgcccctgattctgagttgcgagccca

SEQ ID NO: 145366 - DNA, 236 bp, Homo sapiens
gcgccagtcatagctttcaacatcgcgtccgtgtccagatgcagcagccgcgcctggttctgtcagccccaaatagcattgtttgaccagtccagcttccgattcatccggtccacgttcgtctcgaccgtgccccccatggggacctccccagcctccggcaaggtgatcgactcgtcatcggagctgtggtcgctgctgtgatgtgtaggaggaagagttccggtggaaaagga

SEQ ID NO: 145367 - DNA, 322 bp, Homo sapiens
  misc_feature (1)...(322): n = a,t,c or g
gtgagtgatttcagccaacaaggacagaggagaggtggacaccgtggtccaggggcccgggcgtggaaacgtcaggccaaacactctgtcagttcggagtcagcctcgcaggtcccaggtgtccggggtcttcggtcctccaggaagcagtgccttcntcttgggcttntgtgnnntnnttccatcagcctaggtgacagagatcctgtcagaaagaagggaagagaagagaaaaagagaagaggaagggaaggagggagagaagaaaaaagagaagaagaaagaaggaaaacagaagaaaaacaatgtgcaagggttctga

SEQ ID NO: 145368 - DNA, 427 bp, Homo sapiens
  misc_feature (1)...(427): n = a,t,c or g
gccgaagtggagaagggttccatgtgaacagcagttgaacatgggtcagtcggtcctgagagatgggcgagcgccgttccgaagggacgggcgnnnnnnnnnnnnnnnnnnnnnnnnnnnnnnnnnnnnnnnnnnnnnnnnnnnnnnnnnnnnnnnnnnnnnnnnnnnnnnnnnnnnnnnnnnctcgggactgagtgcaagaatcagcatgattcttcagaggctcttcaggttctcctctgtcattcggtcagccgtctcagtccatttgcggaggaacattggtgttacagcagtggcatttaataaggaacttgatcctatacagaaactctttgtggacaagattagagaatacaaatctaagcgacagacatctggaggacctgttgatgctagttcagagtcgacgcggccgcgaattccn

SEQ ID NO: 145369 - DNA, 422 bp, Homo sapiens
  misc_feature (1)...(422): n = a,t,c or g
tcttaatggtagaaggggaccatgtgaacagcagttgaacatgggtcagtcggtcctgagagatgggcgagcgccgttccgaagggacgggcgnnnnnnnnnnnnnnnnnnnnnnnnnnnnnnnnnnnnnnnnnnnnnnnnnnnnnnnnnnnnnnnnnnnnnnnnnnnnnnnnnnnnnnnnnnctcgggactgagtgcaagaatcagcatgattcttcagaggctcttcaggttctcctctgtcattcggtcagccgtctcagtccatttgcggaggaacattggtgttacagcagtggcatttaataaggaacttgatcctatacagaagctctttgtggacaagattagagaatacaaatctaagcgacagacatctggaggacctgttgatgctagttcagagtcgacgcggccgcgaa

SEQ ID NO: 145370 - DNA, 735 bp, Homo sapiens
atgtgggaaagtttggaacttcctagaggtttgctgaatggctttgacaaaaatgcggatagtgatacgaacaataaggtccaggctgagatggtctcagatggagatgaggaacttgttgggaactggagcaaagtgcagagaagaaatgtgtggtcaaaacccccacacaaagtccctactggggtgtcacctaatggagctctgagaagagggccaccatcctccagactccagaatggtagatccaccgacagcttgtatcgtgcacctggaaaagcagcagacactcaatgccagcccactaaagcagggcagggtgccctggaatgggttcgccccgagagaggggcccgtgccttggaaagcgtcgctgttctggcggcgtccagtgaaacagcagttgaacacgggtcagtcggtcctgagagatgggcgagcgccgttccgaagggacaggcaatggcctcccttgccctcagcggatcgaaagggagtcgggttcagatccccgaatccggagtggcggagatgggcgtagtggagttgatggcatacgaagacgccaatcctgagtgtcaatcagccgttaagtcattaaaaggaaaggttcccgcaggctcagatgtaatctcagagtatttaaaagcctgtgatggaattggaggggcaacccaccccttcagagggcttgctaggtggcaggagacctggcctcatccccagagattctga

SEQ ID NO: 145371 - DNA, 1245 bp, Homo sapiens
  misc_feature (1)...(1245): n = a,t,c or g
tgaacatatttacatttgatttaacagtgaaccttaattctttctggcttcacagtgaaacaagtttatgcaatcgatcaaatattttcatccctgaggttaacaattaccatcaaaatgttttgtggagactatgtgcaaggaaccatcttcccagctcccaatttcaatcccataatggatgcccaaatgctaggaggagcactccaaggatttgactgtgacaaagacatgctgatcaacattctgactcagcgctgcaatgcacaaaggatgatgattgcagaggcataccagagcatgtatggccgggacctgattggggatatgaagggagcagctttcggatcacttccaagatgtgatggctggcctcatgtacccaccaccactgtatgatgctcatgagctctggcatgccatgaagggagtaggcactgatgagaattgcctcattgaaatactagcttcaagaacaaatggagaaattttccagatgcgagaagcctactgcttgcaatacagcaataacctccaagaggacatttattcagagacctcgggacacttcagagatactctcatgaacttggtccaggggaccagagaggaaggatattcagaccctgcgatggctgctcaggatgcaatggtcctatgggaagcctgtcagcagaagacggggggacacaaaaccatgctgcaaatgatcctctgcaacaagagctaccagcagctgcggctggttttccaggaatttcaaaatatttctgggcaggatatggtagatgccattaatgaatgttatgatggatactttcaggagctgctggttgcaattgttctctgtgttcgagacaaaccagcctattttgcttatagattatatagtgcaattcatgactttggtttccataataaaactgtaatcaggattctcattgccagaagtgaaatagacctgctgaccataaggaaacgatacaaagagcgatatgggaaaatccctatttcatgatatcagaaatttttgcttcagggcattataagaaaagcactggcttgcccatctgtnggctgggatgcctgaggactactaaaattgaagaggaacctgaggactggggcactcctcctttcagaacactttccaaatagaggattttttaacaaatttggactggtcattggccttattaaccaaaaccttttcaanccaaantttctcctttcaatcttttgaaa

SEQ ID NO: 145372 - DNA, 926 bp, Homo sapiens
gcttacgtccagccgcggcgcgcgcccagccccgcttcgcgccccagcccgaccgacccagcccttagagccaatccgttatcccgaagttacggatccggcttgccgactttcccttacctacattgttccaacatgccaaaggcctgttcaccttggagacctgctgcggatatgggtacggcccggcgcgagatttacaccctctcccccggattttcaagggccagcgagagctccaccggacgccgccggaaccgcgacgcttttccaatggcaacgggcccctactctcgtggacgaaccacaattaccagggcagccctgccctatcacataagaaaagagaactcttccccggtcgtccccgccggcttctccgggatcggtccggttaccgacatctgggacctcgcggcgcgccatctccgccactccggattcggggatctgaacccgactccctttcgatcggccgagggcaactggatgccatcagcccgtcccttcggaacggcgctcgcccatctctcaggaccgactgacccatgttcaactgctgttgcacatggacacccttctccacttcggcccccaccagttctcgtttgaatatttgctactaccaccaagatcatgcacctgcggcggctccaccccgggcccggcgccctaggcttcaaggctcacggaaaagtgaacaagcctccagggctattcagatttgtccctgagcagggagtaggcactgatgagaattgcctcattgaaatactagcttcaagaacaaatggagaaattttccagatgcgagaagcctactgcttgcaatacagcaataacctccaagaggacatttattcagagacctcgggacacttcagagatactctcatgaacttggtccaggggaccagagagaagcc

SEQ ID NO: 145373 - DNA, 422 bp, Homo sapiens
acacgtccaagagccagttctccctgaaactgagctctgtgaccgccgcagacacggccgtatattactgtgcgagagatgataggcgggacccctcagatgtttttcatatctggggccaagggacaatggtcaccgtctcttcagcctccaccaagggcccatcggtcttccccctgggcaccctcctccaagagcacctctgggggcacagcagccctgggctccttggggtcaaaggactactttccccgaaccggtgacggtgtcgtggaactcaggcgctctgaccagcggcgtgcacaccttcccggctgtcctacagtcctcaggactctactccctcagcagcgtggtgaccgtgacctccagcaacttcggcaccatgaattgcgctcgctataaagcatgcaagcagaacg

SEQ ID NO: 145374 - DNA, 321 bp, Homo sapiens
atggacctcctgtgcaagaacatgaagcacctgtggttcttcctcctgctggtggcggctcccagatgggtcctgtcccaggtgcagctgcaggagtcgggcccaggactggtgaagccttcggagaccctgtccctcacatgcactgtctctgatgtctccatcaccagtggcaattacttctgggcctggatacgccagccccccgggaagggcctggagtggattgggagtaaatttcatactgggaccaatttgtacaacgagtccctcaagagtcgagtcaccttttcgatagacacgtccgggtcgacgcggccg

SEQ ID NO: 145375 - DNA, 571 bp, Homo sapiens; identical to SEQ ID NO: 145311

SEQ ID NO: 145376 - DNA, 1727 bp, Homo sapiens
  misc_feature (1)...(1727): n = a,t,c or g
tttttttttttttttttttttttttttcaacaaacaagtatttattcgagcgcctactatgtgccaggcactcgttctagacccccccccagaagaaaaaacaaaaaacaagatagaggcagcaaacacaaattctgagggagaggaaagggggcagttgagtaagacggctaagggaactgagaagcctgaggtgatgggggctctgccttaggcctcctcttcggcctcctcaccgaaatacatcctcctcttctgcggtggcatcctggtaatggtgataatcacagaagaaggggtgtttatgttggccccaacctcggtgaaacccatctcgtccaagccctctgctgtgtaacagtggaggaaaggcttccgggcggaaacatgggcagtgaaactggctccgaagatgcgctttgaagagctcctgggatgggctgtgctattggccaatggaanggtgactgccatcttgagggccacgaggtgggaatgtcacagacggctgtctttgacattggttgggggatcccattcccacaaagtagctgctgtttcttgttcttgcacgttaagcatctgctcaatggacctccttcatgggacatcccgaccacgggaagacagcaagccacggtgaggttatcggcgcgtgggcggggtcacaggcagcccatcatgttctttggatcgaaagaccttgctgggtgagttccggcactgtgagagctcgatactgctggctttccacggctggggagaagggcaaagccaggcattaaaaaaatggagacgtgggaaggggaccatgttgactgccaacttgcggaggtcagcattgagctggccagggaaacggaggcaggtggtgacaccactccatggtgcctgagacaaggtggttcagatccccgtaggttggtgtggtcagcctcagagtgcggaagcagattatcatagagggcctcgttgtcaatgcaataggtctcatcagtattctctaccaactgatggacggagagggtggcattgtagggctcgaccacggtgtccagacatttgggggaagggcaccacactgaaggttattcatgatgcgaatcagggtattctttctcgaatccttgctgataaaggagagtgcccattccagagcctgtgcccccgccccagtgagtgggtcagctggaagccctgcaggcagtcacagctctctgcctccttccgtaccacatccaggacagaatcaaccagctcggcgccctctgtgtagtggccttttggcccagttgttacctgccccagacttgaccaaatacaaagttgtctggtctaaagatctggcccaaaaggacctgagcgaacagagtccatggtcccaggttctagatcccaccaggatggcacgaggaacatatttgccaccttgtggcttcattgtagtacacagagatgcggtccagcttgcaggtcgcttgtccccgtggtaggtgccggtggggtcgatgccatgttcatcactggatcacctcccagaacttggcaccgatctggttgccacactgaccagcctggatgtgcacgatttccctcatggttaaaatttaattttttttgctcgcctccaaggtatgtatggggcaagaaaataagtaattttttttctccgcagggtcgcaggctggaaggttggaatgcgccccagaggctggagcagcgaggtg

SEQ ID NO: 145377 - DNA, 453 bp, Homo sapiens; identical to SEQ ID NO: 108702
  misc_feature (1)...(453): n = a,t,c or g

SEQ ID NO: 145378 - DNA, 1017 bp, Homo sapiens
aaagtggaacggatagtgaaagccaatgaccgtgaatataatgaaaagttccagtatgcgcatagctgtactgcccacatgatgcagatcctcacctatggggctgatgaccagatgcaccaactaaagagtacagatgatgacaagcagtgtgacacgttggaattagtcatggaaagcaccagtaacttgcatttgttatgggtttctggttcagcgttcgtagaagagcactgtcgtctttccattgcccctatcctggaaagctgtggactctgcaccaggcaacagtcagctgatactgaggaactaccaggggttcttcctggtatcagtgagaaagtggcagcaggcttgaaatgcagactggaagagagagcaagggcagattactctgaaagcagaagagataactgctttgcaatgaattggggcagcacagtggtgaagagggtgggctctggagcagaatgtctattgctagatccaaatcctggctcttacaatcaccacttacaagctgtgtcaactcgtgataatcgtatccacacatcgaaatataatattctcaccttcttgccaattaatttatttgaacagttccaaagagtggcaaatgcctattttctttgccttctgattttacagctaattccagaaatttcctccttgacctggtttaccaccattgtgcctttggtcctggtgataactatgacagctgtcaaagatgccacagatgactatttaatgcttgaatgtgctttcaccttttgtgatgttatgtgccagttcattaactggacaccttcaccagtcagggtcttggcaaaacacagaggttatcctgaaattgggtggattggagagtttaataatgatgggatcattcacaaagggtgtgggcaaggaaaagcagctatggcagcaacatggttggcaatactactagacctgaagaggcaaaggaatgaaggagtgaccagacctggagacgtagttgaggcctgtttgtag

SEQ ID NO: 145379 - DNA, 3024 bp, Homo sapiens
gaagctggactgcagctggtttcaggaacttctcttgacgagaagagagaccaaggaggccaagcaggggctgggccagaggtgccaacatggggaaactgaggctcggctcggaaaggtgaagtaacttgtccaagatcacaaagctggtgaacatcaagttggtgctatggcaaggctgggaaactgcagcctgacttgggctgccctgatcatcctgctgctccccggaagtctggaggagtgcgggcacatcagtgtctcagcccccatcgtccacctgggggatcccatcacagcctcctgcatcatcaagcagaactgcagccatctggacccggagccacagattctgtggagactgggagcagagcttcagcccgggggcaggcagcagcgtctgtctgatgggacccaggaatctatcatcaccctgccccacctcaaccacactcaggcctttctctcctgctgcctgaactggggcaacagcctgcagatcctggaccaggttgagctgcgcgcaggctaccctccagccataccccacaacctctcctgcctcatgaacctcacaaccagcagcctcatctgccagtgggagccaggacctgagacccacctacccaccagcttcactctgaagagtttcaagagccggggcaactgtcagacccaaggggactccatcctggactgcgtgcccaaggacgggcagagccactgctgcatcccacgcaaacacctgctgttgtaccagaatatgggcatctgggtgcaggcagagaatgcgctggggaccagcatgtccccacaactgtgtcttgatcccatggatgttgtgaaactggagccccccatgctgcggaccatggaccccagccctgaagcggcccctccccaggcaggctgcctacagctgtgctgggagccatggcagccaggcctgcacataaatcagaagtgtgagctgcgccacaagccgcagcgtggagaagccagctgggcactggtgggccccctccccttggaggcccttcagtatgagctctgcgggctcctcccagccacggcctacaccctgcagatacgctgcatccgctggcccctgcctggccactggagcgactggagccccagcctggagctgagaactaccgaacgggcccccactgtcagactggacacatggtggcggcagaggcagctggaccccaggacagtgcagctgttctggaagccagtgcccctggaggaagacagcggacggatccaaggttatgtggtttcttggagaccctcaggccaggctggggccatcctgcccctctgcaacaccacagagctcagctgcaccttccacctgccttcagaagcccaggaggtggcccttgtggcctataactcagccgggacctctcgccccaccccggtggtcttctcagaaagcagaggcccagctctgaccagactccatgccatggcccgagaccctcacagcctctgggtaggctgggagccccccaatccatggcctcagggctatgtgattgagtggggcctgggcccccccagcgcgagcaatagcaacaagacctggaggatggaacagaatgggagagccacggggtttctgctgaaggagaacatcaggccctttcagctctatgagatcatcgtgactcccttgtaccaggacaccatgggaccctcccagcatgtctatgcctactctcaagaaatggctccctcccatgccccagagctgcatctaaagcacattggcaagacctgggcacagctggagtgggtgcctgagccccctgagctggggaagagcccccttacccactacaccatcttctggaccaacgctcagaaccagtccttctccgccatcctgaatgcctcctcccgtggctttgtcctccatggcctggagcccgccagtctgtatcacatccacctcatggctgccagccaggctggggccaccaacagtacagtcctcaccctgatgaccttgaccccagaggggtcggagctacacatcatcctgggcctgttcggcctcctgctgttgctcacctgcctctgtggaactgcctggctctgttgcagccccaacaggaagaatcccctctggccaagtgtcccagacccagctcacagcagcctgggctcctgggtgcccacaatcatggaggagctgcccggacccagacagggacagtggctggggcagacatctgaaatgagccgtgctctcaccccacatccttgtgtgcaggatgccttccagctgcccggccttggcacgccacccatcaccaagctcacagtgctggaggaggatgaaaagaagccggtgccctgggagtcccataacagctcagagacctgtggcctccccactctggtccagacctatgtgctccagggggacccaagagcagtttccacccagccccaatcccagtctggcaccagcgatcaggtcctttatgggcagctgctgggcagccccacaagcccagggccagggcactatctccgctgtgactccactcagcccctcttggcgggcctcacccccagccccaagtcctatgagaacctctggttccaggccagccccttggggaccctggtaaccccagccccaagccaggaggacgactgtgtctttgggccactgctcaacttccccctcctgcaggggatccgggtccatgggatggaggcgctggggagcttctagggcttcctggggttcccttcttgggcctgcctcttaaaggcctgagctagctggagaagaggggagggtccataagcccatgactaaaaactaccccagcccaggctctcaccatctccagtcaccagcatctccctctcctcccaatctccataggctgggcctcccaggcgatctgcatactttaaggaccagatcatgctccatccagccccacccaatggccttttgtgcttgtttcctataacttcagtattgtaaac

SEQ ID NO: 145380 - DNA, 2856 bp, Homo sapiens
gaagctggactgcagctggtttcaggaacttctcttgacgagaagagagaccaaggaggccaagcaggggctgggccagaggtgccaacatggggaaactgaggctcggctcggaaaggtgaagtaacttgtccaagatcacaatagctggtgaacatcaagttggtgctatggcaaggctgggaaactgcagcctgacttgggctgccctgatcatcctgctgctccccggaagtctggaggagtgcgggcacatcagtgtctcagcccccatcgtccacctgggggatcccatcacagcctcctgcatcatcaagcagaactgcagccatctggacccggagccacagattctgtggagactgggagcagagcttcagcccgggggcaggcagcagcgtctgtctgatgggacccaggaatctatcatcaccctggcccacctcaaccacactcaggcctttctctcctgctgcctgaactggggcaacagcctgcagatcctggaccaggttgagctgcgcgcaggctaccctccagccataccccacaacctctcctgcctcatgaacctcacaaccagcagcctcatctgccagtgggagccaggacctgagacccacctacccaccagcttcactctgaagagtttcaagagccggggcaactgtcagacccaaggggactccatcctggactgcgtgcccaaggacgggcagagccactgctgcatcccacgcaaacacctgctgttgtaccagaatatgggcatctgggtgcaggcagagaatgcgctggggaccagcatgtccccacaactgtgtcttgatcccatggatgttgtgaaactggagccccccatgctgcggaccatggaccccagccctgaagcggcccctccccaggcaggctgcctacagctgtgctgggagccatggcagccaggcctgcacataaatcagaagtgtgagctgcgccacaagccgcagcgtggagaagccagctgggcactggtgggccccctccccttggaggcccttcagtatgagctctgcgggctcctcccagccacggcctacaccctgcagatacgctgcatccgctggcccctgcctggccactggagcgactggagccccagcctggagctgagaactaccgaacgggcccccactgtcagactggacacatggtggcggcagaggcagctggaccccaggacagtgcagctgttctggaagccagtgcccctggaggaagacagcggacggatccaaggttatgtggtttcttggagaccctcaggccaggctggggccatcctgcccctctgcaacaccacagagctcagctgcaccttccacctgccttcagaagcccaggaggtggcccttgtggcctataactcagccgggacctctcgccccaccccggtggtcttctcagaaagcagaggcccagctctgaccagactccatgccatggcccgagaccctcacagcctctgggtaggctgggagccccccaatccatggcctcagggctatgtgattgagtggggcctgggcccccccagcgcgagcaatagcaacaagacctggaggatggaacagaatgggagagccacggggtttctgctgaaggagaacatcaggccctttcagctctatgagatcatcgtgactcccttgtaccaggacaccatgggaccctcccagcatgtctatgcctactctcaagaaatggctccctcccatgccccagagctgcatctaaagcacattggcaagacctgggcacagctggagtgggtgcctgagccccctgagctggggaagagcccccttacccactacaccatcttctggaccaacgctcagaaccagtccttctccgccatcctgaatgcctcctcccgtggctttgtcctccatggcctggagcccgccagtctgtatcacatccacctcatggctgccagccaggctggggccaccaacagtacagtcctcaccctgatgaccttgaccccagccccaacaggaagaatcccctctggccaagtgtcccagacccagctcacagcagcctgggctcctgggtgcccacaatcatggaggaggatgccttccagctgcccggccttggcacgccacccatcaccaagctcacagtgctggaggaggatgaaaagaagccggtgccctgggagtcccataacagctcagagacctgtggcctccccactctggtccagacctatgtgctccagggggacccaagagcagtttccacccagccccaatcccagtctggcaccagcgatcaggtcctttatgggcagctgctgggcagccccacaagcccagggccagggcactatctccgctgtgactccactcagcccctcttggcgggcctcacccccagccccaagtcctatgagaacctctggttccaggccagccccttggggaccctggtaaccccagccccaagccaggaggacgactgtgtctttgggccactgctcaacttccccctcctgcaggggatccgggtccatgggatggaggcgctggggagcttctagggcttcctggggttcccttcttgggcctgcctcttaaaggcctgagctagctggagaagaggggagggtccataagcccatgactaaaaactaccccagcccaggctctcaccatctccagtcaccagcatctccctctcctcccaatctccataggctgggcctcccaggcgatctgcatactttaaggaccagatcatgctccatccagccccacccaatggccttttgtgcttgtttcctataacttcagtattgtaaac

SEQ ID NO: 145381 - DNA, 2943 bp, Homo sapiens
gaagctggactgcagctggtttcaggaacttctcttgacgagaagagagaccaaggaggccaagcaggggctgggccagaggtgccaacatggggaaactgaggctcggctcggaaaggtgaagtaacttgtccaagatcacaaagctggtgaacatcaagttggtgctatggcaaggctgggaaactgcagcctgacttgggctgccctgatcatcctgctgctccccggaagtctggaggagtgcgggcacatcagtgtctcagcccccatcgtccacctgggggatcccatcacagcctcctgcatcatcaagcagaactgcagccatctggacccggagccacagattctgtggagactgggagcagagcttcagcccgggggcaggcagcagcgtctgtctgatgggacccaggaatctatcatcaccctgccccacctcaaccacactcaggcctttctctcctgctgcctgaactggggcaacagcctgcagatcctggaccaggttgagctgcgcgcaggctaccctccagccataccccacaacctctcctgcctcatgaacctcacaaccagcagcctcatctgccagtgggagccaggacctgagacccacctacccaccagcttcactctgaagagtttcaagagccggggcaactgtcagacccaaggggactccatcctggactgcgtgcccaaggacgggcagagccactgctgcatcccacgcaaacacctgctgttgtaccagaatatgggcatctgggtgcaggcagagaatgcgctggggaccagcatgtccccacaactgtgtcttgatcccatggatgttgtgaaactggagccccccatgctgcggaccatggaccccagccctgaagcggcccctccccaggcaggctgcctacagctgtgctgggagccatggcagccaggcctgcacataaatcagaagtgtgagctgcgccacaagccgcagcgtggagaagccagctgggcactggtgggccccctccccttggaggcccttcagtatgagctctgcgggctcctcccagccacggcctacaccctgcagatacgctgcatccgctggcccctgcctggccactggagcgactggagccccagcctggagctgagaactaccgaacgggcccccactgtcagactggacacatggtggcggcagaggcagctggaccccaggacagtgcagctgttctggaagccagtgcccctggaggaagacagcggacggatccaaggttatgtggtttcttggagaccctcaggccaggctggggccatcctgcccctctgcaacaccacagagctcagctgcaccttccacctgccttcagaagcccaggaggtggcccttgtggcctataactcagccgggacctctcgccccaccccggtggtcttctcagaaagcagaggcccagctctgaccagactccatgccatggcccgagaccctcacagcctctgggtaggctgggagccccccaatccatggcctcagggctatgtgattgagtggggcctgggcccccccagcgcgagcaatagcaacaagacctggaggatggaacagaatgggagagccacggggtttctgctgaaggagaacatcaggccctttcagctctatgagatcatcgtgactcccttgtaccaggacaccatgggaccctcccagcatgtctatgcctactctcaagaaatggctccctcccatgccccagagctgcatctaaagcacattggcaagacctgggcacagctggagtgggtgcctgagccccctgagctggggaagagcccccttacccactacaccatcttctggaccaacgctcagaaccagtccttctccgccatcctgaatgcctcctcccgtggctttgtcctccatggcctggagcccgccagtctgtatcacatccacctcatggctgccagccaggctggggccaccaacagtacagtcctcaccctgatgaccttgaccccagaggggtcggagctacacatcatcctgggcctgttcggcctcctgctgttgctcacctgcctctgtggaactgcctggctctgttgcagccccaacaggaagaatcccctctggccaagtgtcccagacccagctcacagcagcctgggctcctgggtgcccacaatcatggaggaggatgccttccagctgcccggccttggcacgccacccatcaccaagctcacagtgctggaggaggatgaaaagaagccggtgccctgggagtcccataacagctcagagacctgtggcctccccactctggtccagacctatgtgctccagggggacccaagagcagtttccacccagccccaatcccagtctggcaccagcgatcaggtcctttatgggcagctgctgggcagccccacaagcccagggccagggcactatctccgctgtgactccactcagcccctcttggcgggcctcacccccagccccaagtcctatgagaacctctggttccaggccagccccttggggaccctggtaaccccagccccaagccaggaggacgactgtgtctttgggccactgctcaacttccccctcctgcaggggatccgggtccatgggatggaggcgctggggagcttctagggcttcctggggttcccttcttgggcctgcctcttaaaggcctgagctagctggagaagaggggagggtccataagcccatgactaaaaactaccccagcccaggctctcaccatctccagtcaccagcatctccctctcctcccaatctccataggctgggcctcccaggcgatctgcatactttaaggaccagatcatgctccatccagccccacccaatggccttttgtgcttgtttcctataacttcagtattgtaaac

SEQ ID NO: 145382 - DNA, 891 bp, Homo sapiens
ggcacgagcatagctcggggagagaagctggactgcagctggtttcaggaacttctcttgacgagaagagagaccaaggaggccaagcaggggctgggccagaggtgccaacatggggaaactgaggctcggctcggaaaggtgaagtaatttgtccaagatcacaaagctggtgaacatcaagttggtgctatggcaaggctgggaaactgcagcctgacttgggctgccctgatcatcctgctgctccccggaagtgagtatggccaaggatgagggtgcagtggggaggggaagctacaaggagagatattgggaatttccttgcactgccacatggctcctgggattcccagagaatcccacaagattcaagtctgagccacagatgtggggtagctggtctcccacccacagacttccacaggcaaaccaccacccaagaggaatggtgagacgacccgggctggtcatcctggaaaaggccagtgaggcgcagatcttgtccgcaaatctctaccaagctgtcagaagcaacccatgggtcctatgcagccttggtgggcagcaaagggatcaggatggaagctacaaggggacaggtttcatcctgaaataaagaagcccaggcagagcttggtttccaaccatggaaactctgtcttgagaggtagagaacttcccatccccaggggtatgcaagctaaagccaggattgataaagatgctgtgcagcaggggttggcaaacctttttctgacagtaatgtttaggctttgcaggccacatactgtctctgttccttgtttgtttgtttgtttgtttgttcgttcgtttgtgagacggggtctcccactccagcctgagtgacagagcaagaacttgaagaaa

SEQ ID NO: 145383 - DNA, 920 bp, Homo sapiens
aagtttctataatttcattttattgtaatgaactccaaaaaaagctaaaagcaaaaaggtttctcagccatacttcatttccactctgatgttttccagtcataattactgcttaaatattcttttataccatgctagatttttccaattggtatggcagcctattgctgaaagccaccttagaacacttctaactcaacatcctcttttacaaaggagcaaattgatgttatgatttcatctaatactataacaataaaaaaggaaataagtaccaaatgaatattaaaataaccaaaaaattgttatgtaattaaaatcaggaagtttggtaagttagatagtaggaaataaaaaattatttcagagtaactcatctatattatattttgccatttattcaactttggttggtataggctcttcaactttatcttcaattttctgataattaatagttttaattagctttttctcatttatgccagatataaaaacaagttcctcagaaatacatgtttttctttttgtttttctccagttttttttagcacaaaaatttgcatcccaagatgaagtgtcgcacattccatgttctgttgtgtaaccgtttaattagtgtaatattccatgttttggcttttcatagtaggttgaatctatgcagctgtcatatctgtttgggaggctgaggtaggaggaccacttgatcactggagtttgataccagcctgggcaacacagtaagacctcatttcaggctgtgcaggtgagctcatcatgagaatcagagggactgctaagactaggatgcagattcacagcctttgtcgttcaactgctgacaatggtccaggaggggttggcagaggagaaacctccgcccgctcctgctgaggctatcgcgccctccttcgctc

SEQ ID NO: 145384 - DNA, 473 bp, Homo sapiens
gtttttcttctcatcttgggaaactagccatttccagacatctcttcgtccatataattgaagaaactaatgtctaataggtaaaaccctgtttctgtaatctcaggtgtaaattcaagccaagcagcctagggtatatataatttctcaaaatgtggttcttgaccaccaatcacctagattcccggtccccaccttatccatttgggaaataaagtccagcagtcagcattcttccaagcttcacttctaatcattcttttaaggcagttcttatgcaaactgaaatttgagaagaactagtacctccagtaaagctctttttacttaatttggaaaatattcctctatcagaaggattcaaggctgggtgcactggcgcacgactgtaatcccggcactctgggaggctgaagtgggtgaatcacctaaagtcaggagttcgagaccagcctgccaacgtggcaaaaccc

SEQ ID NO: 145385 - DNA, 387 bp, Homo sapiens
  misc_feature (1)...(387): n = a,t,c or g
nnnnnnnnnnnnnnnnnnnnnnnnnnnnnnnnnnnnnnnnnnnnnnnnnnnnnnnnnnnnnnnnnnnnnnnnnnnnnnnnnnnnnnnnnnnnnnnnnnnnnnnnnnnnnnnnnnnnnnnnnnnnnnnnnnnnnnnnnnnnnnnnnnnnnnnnnnnnnnnnnnnnnnnnnnnnnnnnnnnnnnnnnnnnnnnnnnnnnnnnnngatgaacacatgaatgaagttgccagtctgagaccttaattttagcctctcagacaggtaaagtgataccacatatatatatacacacgtatacatacacacgtatatatacacacgtatatatatacacgtgtatatgtatacatacgtgtatatatgtatgtatatatacgtgtgtatatata

SEQ ID NO: 145386 - DNA, 354 bp, Homo sapiens
tttttttttttttagcttgcagaatcctaggacgttttattaattcatgatgcccactatccttgtgggagcaagaatatgcggcgtttcaagctccattcaaagaactacatttgacaaagttttatatcagtccaagagcccccgccccatctccccacacagccttggaagtcaagagccttaatcagaaaacacatgagaaggccaggcatggtagctcatgccctgtattcccaacactttgggaggctgaggtctcgcggatcacctgaggtcaggagttcgggaccagcctggccaacatggaaaaaccccatctctactaaaaatacaaaaattagccaggcctag

SEQ ID NO: 145387 - DNA, 433 bp, Homo sapiens
attaacccagtctagaatttctgggaagcggaatgagtggccgcctcagtctctctgacaaaaaatagtaccacgtttttgatctgaaacttcctcttaatttagctctgaacacatcaatcaagcttgtgaaatgcatcctcctccttgcccctcatattttaagccatctgttgttcacagtacagtttgcacgacatctttgttcaaacatagctcagtttttctggcaccaaagcaaatttgggttaggttcgtgtatgcagagacaacctatgaggagggcccataaggcaccctccacttttgcgtgaggagatccgaaagcagaagtaatgggaggaaatggaagactagggttggagatgggatgggtggggcaagggatggaaaggtaaaggcagacaactaatgcgttccacttataacaagt

SEQ ID NO: 145388 - DNA, 495 bp, Homo sapiens
gaagaggacgaaaaaaataaccgtccgcgacgccgagacaaaccggacccgcaaccaccatgaacagcaaaggtcaatatccaacacagccaacctaccctgtgcagcctcctgggaatccagtataccctcagaccttgcatcttcctcaggctccaccctataccgatgctccacctgcctactcagaggtgcttccagtttgccagatttgaactagctgggaatactcttagggtggtcctttagtccttagctaaatctgacttcacatatttactcttcacaaatgctaacatgaataatctaaaacactatataatttggcaatttttgtcggagttgaaagtgcattatttgatgattttgtgttatttggcacaggctaaggtgcagaagatgaatttgcgttctgtgagcccaacattagctatagcagaaagtgatccaggagaatattgaaggccagtggaaaggcaacttgtataatcttac

SEQ ID NO: 145389 - DNA, 2297 bp, Homo sapiens
  misc_feature (1)...(2297): n = a,t,c or g
gttttaatgntcttaaccgtctatgccgagaaatcnttggggagggcccataaggcaccctccactnttgnctgaggagatacgaaagcagaagtaatgggatctgtacttggggcacagagagggtttcagaggatccttgtgaaacactagttaaaagatgacgagtagctccgaacaggaagaggacgaaaaaaataaccagtccgcgacgccgagacaaaccggacccgcaaccaccatgaacagcaaaggtcaatatccaacacagccaacctaccctgtgcagcctcctgggaatccagtataccctcagaccttgcatcttcctcaggctccaccctataccgatgctccacctgcctactcagagctctatcgtccgagctttgtgcacccaggggctgccacagtccccaccatgtcagccgcatttcctggaagcctctctgtatcttcccatggcccaagtctgtggctgttgggcctttaaggttccacaatccccatggcttattatccagtcggtcccatctatccaccttggctccacaagtgcttggtgggaaaggagggtatgatgcaggtgccagatttggagctggggctactgctggcaacattcctcctccacctcctgggatgccctcccaatgctgctcagcttgcagtcatgcagggagccaacgtcctcgtaactcagcaggaaggggaacttcttcatgggtggttcagatggtggctacacccatctggtgaggaaccaaggccacctttgtgcccgggaaaagacatcacatacccttcagcacttctcacaatgtaactgctttagtcatattaacctgaagttgcagtttagacacatgttgttggggtgtctttctggtgcccaaactttcaggcacttttcaaatttaataaggaaccatgtaatggtagcagtacctccctaaagcattttgaggtaggggaggtatccattcataaaatgaatgtgggtgaagccgccctaaggattttcctttaatttctctggagtaatactgtaccatactggtctttgcttttagtaataaaacatcaaattaggtttggagggaactttgatcttcctaagaattaaagttgccaaattattctgattggtctttaatctcctttaagtctttgatatatattacttgttataaatggaacgcattagttgtctgcccttttcctttccatcccttgccccacccatcccatctccaaccctagtcttccatttcctcccgccagtctccaattgaaatcaatgggtgcaggacagaaagccaggncaggactaatttccttctttcctcgcacttctccccactcgtcatcttttaactagtgtttcacaaggatcctctgaaaccctctctgtgccccaagtcacagatgcccattaacttctgctttcgtatctcctcagggcaaaagtgggaggggtgccttatggggccctcctcataggttgtctctgcatacacgaacctaacccaaatttgctttggtgccagaaaaactgggcctatgtttggaaccaaggatgtcgtccaacctgtactgtgaaccaaccagtggggtttaaaaatatgaggggccaaggaggaggatgccattccaaaaagctggatggatgtgttcagagcctaaattaagaggagttttcagatccaaaaactgggttacccattttttgtccagagtgtctggatgccggcccactcaattcgggctcccccagaattccttagacttgggttaatagggtccatattggtgaatgtctcactaccaaaatgacctggagtccagtgaaatctccattaggggtttaagaatatttcagggatcccttaatgttttgaatttttgttttctgaaattgggattttattttattttaatcttataatttcagttcatctaaattgtgtgttctgtaccatgtgatgtttgactgtaccatttgactggtaatggaagttcagcgttggtatgtctcttctctacactggtggtgcaccttaacttggtggaatttttatactaaaaaatgtagaataaagactattttgaagatttgaataaagtgatgaagttgcattacacctcactgcaaggattctttacttagcttgtttttagatttcttctatatatattttatttatatcccatctagaattcagctaggtgctgctgctgctctgtttcctttgatgacgctttgaaataaaggcaggagtacaagcctaaaaaaa

SEQ ID NO: 145390 - DNA, 374 bp, Homo sapiens
gggggaactttgaatcacccccctgggggaaaattcaacaaaaacccacctgatacaaagcatctgcactgatgggctgctgcagggggacatctgaactggcctccttgtccctcggatgctcggttgcccaaaagtttctggatcaacttgttgaaaaccatgagaaatcttcatttttacttcgcaggcagctttaaacctggggcatctccagccaggggctgcaggaggcttttcacatgctttgggatatcttcagggaaataccctcttattaaaaactgaaaatttaaaaaagtctgcctgggggaggacacctgcacttgttaccctgagttgattcctgaaacttcggacccctgggtattaag

SEQ ID NO: 145391 - DNA, 525 bp, Homo sapiens
gtaattgaaacttggttctaagtttccctcttgtcccttcctgtttaatgcagtcagctgtcctcgaatttattttttggtggtactttgaatcagccccctgtgtgagaattcaacaaaaacgcaactgatacaaagcatctgcactgagtgctgcaggaggcttctcacatgctttgggatatcttcagggaaatacgctcttaatagaaactgagaatttaagaaagtctgcctgggcggaggacacctgcacttgttaccctgagttgattcctggaaacttcgggacccctgggtatttaacagagggacttcagtggggagctcctggtcagaggacttggatgttgtcattacattctaagtgagactgtccacatcatctaggaaaatggtggccctgtccttaaagatttgtgtgcgccactgcaacgtggtgaagaccatgcagtttgaaccatctacagctgtgtacgatgcgtgtcgagtcattcgggaacgggtgcctgaggcacaaacggg

SEQ ID NO: 145392 - DNA, 487 bp, Homo sapiens
tttcgtcgccgcgggcagctgggaggaggtgtgcgcgctgcgcccgcgagctcccgggctcggcgaccgtggcatgcttaggattggccatatttaaaagcttggaaggacaacctgcgccttgtctctgcttctccctgctcctcagtactttatttcgagcttccaggccagggccacggaggaagggaaagcaagaaattagatgcctgtgtggtaactcctcgcggagctaaggaggactctcttgcagtcaacttaccatcagatcaccctgctggacttgcagaccggaatggggctcgcctaaggagccgagcgctgcggaggctgctgcgtgttggatgggagtgggagggggctggagcgagatttccagggcgcagtcctccggggcgttacgctgggcataatggaattgcagaggacgtctagtatctccgggccgctgtcgccggcgtacacggggcaggtgccttacaactac

SEQ ID NO: 145393 - DNA, 298 bp, Homo sapiens
  misc_feature (1)...(298): n = a,t,c or g
ntgagccctnnnnnnnnnnnnnnnnnnnnnnnnnnnnnnnnnnnnnnnnnnnnnnnnnnnnnnnnngttttggattagagatacccaacctgtatttgtgacttgatagaatcatcaaggctggaggtgtctgtgactggatattaggttagaggtcttaagggctgtatgtttttcaggttgtggcatcagctgacacttcaggtgcttgattttgtgcaggatccgtgctttgcccaaggagatggtctcattaaggtaaataatttgctataccagattagattatatgaatgtg

SEQ ID NO: 145394 - DNA, 314 bp, Homo sapiens
  misc_feature (1)...(314): n = a,t,c or g
ccagtggtnnnnnnnnnnnnnnnnnnnnnnnnnnnnnnnnnnnnnnnnnnnnnnnnnnnnnnnnnnnnnnnnnnnnnnnnnngttttggattagagatacccaacctgtatttgtgacttgatagaatcatcaaggctggaggtgtctgtgactggatattaggttagaggtcttaagggctgtatgtttttcaggttgtggcatcagctgacacttcaggtgcttgattttgtgcaggatccgtgctttgcccaaggagatggtctcattaaggtaaataatttgctataccagattagattatatgaatgtg

SEQ ID NO: 145395 - DNA, 382 bp, Homo sapiens
  misc_feature (1)...(382): n = a,t,c or g
tgannnnnnnnnnnnnnnnnnnnnnnnnnnnnnnnnnnnnnnnnnnnnnnnnnnnnnnnnnnnnnnnnnnnnnnnnnnnnnnnnnnnnnnnnnnnnnnnnnnnnnnnnnnnnnnnnnnnnnnnnnnnnnnnnnnnnnnnnnnnnnnnnnngttttggattagagatacccaacctgtatttgtgacttgatagaatcatcaaggctggaggtgtctgtgactggatattaggttagaggtcttaagggctgtatgtttttcaggttgtggcatcagctgacacttcaggtgcttgattttgtgcaggatccgtgctttgcccaaggagatggtctcattaaggtaaataatttgctataccagattagattatatgaatgtg

SEQ ID NO: 145396 - DNA, 390 bp, Homo sapiens
agcactcaggacaatctccagcatggcctggtctcctctcctcctcactctcctcgctcactgcacagggtcctgggcccagtctgtgctgacgcagccgccctcagtgtctggggccccagggcagaaggtcaccatctcctgcactgggagcagctccaacatcggggcaggttatgaggtacactggtaccggcagcttccaggaacagcccccaaactcctcatctataatgaccgattctctgactccaagtctggcacctcagcctccctggccatcactgggctccagggtgaggatgaggctgattactattgccagtcctatgacagcagcctgagtggttatgcggtgttcggcggagggaccaaactgaccgtcctaag

SEQ ID NO: 145397 - DNA, 440 bp, Homo sapiens
gagcgcagaaggcaggactcgggacaatcttcatcatgacctgctcccctctcctcctcacccttctcattcactgcacagggtcctgggcccagcctgtgttgacgcagccgccctcagtgtctgcggccccgggacagaaagtcaccatctcctgctctggaagcggctccaacattgggaataattatgtatcctggtaccagcagctcccagatccgctattccatgctcataagtgacttctacccgggagccgtgacagtggcctggaagcgagatagcagccccgtcaaggcgggagtggagaccaccacaccctccaaacaaagcaacaacaagtacgcggccagcagctacctgagcctgacgcctgagcagtggaagtcccacaaaagctacagctgccaggtcacgcatgaagggtcgacgcggccgca

SEQ ID NO: 145398 - DNA, 355 bp, Homo sapiens
  misc_feature (1)...(355): n = a,t,c or g
gcagaaggcaggactcgggacaatcctcatcatgaccggctcccctctcctcctcacccttctcattcactgcacagggtcctgggcccagtctatgttgacgcagccgccctcggtgtctgcggccccaggacaggaaatcaccatctcctgctctggaagcggctccaacattggggcgcgggtagtatcctgtaaccagcaggctccagggactgtccccacactcctcatctatgacgataataagcgaccctgggggattcctgaccgattctctgcctccaagtctggcacgtcagccaccatgggcatcaccggactccaaactgcggacgaggccgaatatttctgn

SEQ ID NO: 145399 - DNA, 382 bp, Homo sapiens
tttcgtgtctcctctcctcctcactcttctcgctcactgcacagggtcctgggcccaatctgtgctgacgcagccgccctcagtgtctggggccccagggcagacggtcgccatttcctgcgctgggaacacttccaacatcggggcaggttatgatgttcactggtaccaggtccttccagggacagcccccaaactcctcaagtctcaaaaggacacttggcccacagatttctctgaccgcttttctggctccaggtctggcacctccgcctccctggtcatcactggcctcccaagtgatgatgaggcacaatatttttgccaatccgttgacgggaccatgagtgcttgggtggtcggcggcgggacccaagtgact

SEQ ID NO: 145400 - DNA, 739 bp, Homo sapiens
gcgtggaattcctcgggacaatcttcatcatgacctgctcccctctcctcctcacccttctcattcactgcacagggtcctgggcccattctgtattgacgcagccgccctcagtgtctgcggccccaggacagcaaatcaccatctcctgctctggaagtagactcaacgttggaaattattttgtctcctggtaccaacaactcccaggcacagcccccaagattctcatttatgacaatgataagcgaccctcaggtgttcctgcccgattttctggctccaagtccggcacgtcagccaccctggccatcaccggactccagactggggacgaggccaactactactgcggagcatgggacacaagcctggataattgggtgttcggcggggggaccgaggtgaccgtcctaggtcagcccaaggctgccccctcggtcactctgttcccgccctcctctgaggagcttcaggccaacaaggccacactggtgtgtctcataagtgacttctacccgggagccgtgacagtggcctggaaggcagatagcagccccgtcaaggcgggagtggagaccaccacaccctccaaacaaagcaacaacaagtacgcggccagcagctatctgagcctgacgcctgagcagtgaagtcccacagaaactacagctgccaggtcacgcatgaagggagcaccgtggagaagacagtggcccctgcagaatgttcataggtt

SEQ ID NO: 145401 - DNA, 895 bp, Homo sapiens
  misc_feature (1)...(895): n = a,t,c or g
cgacgtgagcgcagcaggcaggactcgggacaatcttcatcatgacctgctcccctctcctcctctccctcctaattcactacacagtgtcctgggcccaatctattttgacacagccgccctcactgtctgcggcccccggacagaaggtcagcatttcctgctctgggagcgcctccaacattggcgtcaatcatgtctcctggtatcaacacatcccaggcgcagcccccaaacgcctcatctttcagggtgatcagcgcccctcaggaattcctgatcgattcgctggctccaagtctggcacgtcagccaccctgaccatcgccggcctccagactggggacgaggccgattactactgtgctacgtgggattctggcttttcttgggtgttcggcggagggaccaagttgaccgtcctaagtcagcccaaggctgccccttcggtcactctgttccctccctcctctgaggagcttcaagccaacaaggccacactggtgtgtcactgcacagggtcctgggcccagtctgtgttgacgcagccgccctcagtgtctgcggccccaggacagaggatcaccatctcctgctctggaagcaactccaacattgggagtaattatgttgcctggtatcaactgctcccgggaacagcccccaaagtcctcatttatgacagtaataagcgacgttcagggattccagaccgattctctgcctccaagtctgccacatcagccaccctggacatcaccaatgtccagactgaggacgaggccgtttattactgcggaacatgggataccagcctgagtggtggcggtgtgttcggcggagggaccaaagtgaccgtcctaggtcagcccaaggctgcccnctcggtcactct

SEQ ID NO: 145402 - DNA, 412 bp, Homo sapiens
caagaggcagcactcaggacaatctccagcatggcctggtctcctctcctcctcactctcctcgctcactgcacagggtcctgggcccagtctgtgctgacgcagccgccctcagtgtctggggccccaggacagacggtcaccatctcttgcattgggagcgactctaacatcggggcacattatagtgtgcactggttccggcagcttccagggacagcccccaaactcctcatctatggagaccacagtcgaccctcaggggtctctgaccgattctctggctccaagtctgccacctccgcctccctggtcatcactggcctccaggctgtggatgaggctgattattactgccagtcgtatgacagcagcctgagtggttatgtcttcggaactgggaccaaggtca

SEQ ID NO: 145403 - DNA, 616 bp, Homo sapiens
ctggcccatcgagatcgatatccagtgtggaggaattcctcgggacaatcttcatcatgacctgctcccctctcctcctcacccttctcattgtccgcccacgcgtccggctgtgagcgcagaaggcaggactcgggaccaatcttcatcgatgacctgctcccctctcctcctcacccttctcattcactgcacagggccctgggcccagtctgtattgacgcagccgccctcagtctctgcgaccccaggacagagggtcaccatctcctgctctggaagcaggtccaacattggagataattatgtatcgtggtacaagcaactcccaggaacagccccccaactcctcatatatgacaataataagcgaacttcagggattcctgaccgattctctggctccaagtcctggcacgtcagccaccctgggcatcaccggactccagactggggacgaggccgattattactgcggaacatgggataccatcctgagtgctggggtgttcgggggatggaccaagctgaccgtcctaggtcagcccaaggctgccccctcggtcactctgttcccgccctcctctgaggagcttcaagccaacaaggccacacg

SEQ ID NO: 145404 - DNA, 715 bp, Homo sapiens
ctgcactccagcatggggaacagagcgataatctgtctgaaaaaaaaaaaatggaataatacaaaattatactaagattcattcatgttattttttggggctgcagggcattcatttccactatatagtatttcattgtctgatgtaccagaatttatccactctctttttgatgcatgtttggatttgcagtcttttgctttatgaaaagtgctgctgtaaaaattattattatctgtctcctgatgcatatgtgaaagggtttttctaggagtgaaattgctggataatatgtaaataataaacataagaaaatgtcaaattcttttccaaagtagttaatcaagttatactccaccagcagtgtataaggagttctcattgatccatatcttctccaacatttaggtttctcacagttttacatttttttgccagtgaaatgtacataaaatgtatcttatggtttaatctttgtttttttttaactcagtctttctgcttttattctttattctctattgaaaataatttggtttagatttagacttagattgataaaattaaaaaaaaaaagaatttgggctgggtgtgttggctcactcctgtcatctcagcactgggggagactcagatgggtgcatcacttgagctcaggagttcaagaccagcctgggcaacatggtgaaaacccatctttattaaaaaatacaaa

SEQ ID NO: 145405 - DNA, 391 bp, Homo sapiens
ggcacgagggaacgtctgaggttatcagtactctcctattccagacgccctgggggatttcacagaggacgacaaggctactatcacacgcctgtggggcaaggtgaatgtggaagactctggacgagaaaccctgggaaggctcctggctgactacccatggacccagaagttctttgacagcttcggcctcctgtcctatgcctatggcatcctgggcctcccgaaagtccaggtacatgtccagaatgcgctgactttcttgggagatgacatacagcacctggatgatctcaagggcacctttgcccagctgagtgaactgcactgtgacatgctgcatgtggttcctgagaacttccagctcctgtgattgcgctggtgaccgtct

SEQ ID NO: 145406 - DNA, 430 bp, Homo sapiens
  misc_feature (1)...(430): n = a,t,c or g
ctcttttggcttacagaatccagagaatattaacaagacaggggcagacatgcagaggaacaatttgaaccagggacttgaatgactgcaggattcttactccacctcatctcattgtttctgtacatcagtttcattctcgcctgtaggggggctgtctccacatgataggaatcataaccacaaacagcacacaaaatgtgcattccaccagagggagacagcctgatatatttaaatctgtttagaaacacacacacacacaaactgaaaataaagggatacaaaaagatattccatgcagatggaaaccataaaagagcaaaaatagctatacttatatcagacaaaatggaattcaagacaaaaactttaaagagannnnnnnnnnnnnnnnnnnnnnnnnnnnnnnnnnnnnnnnnctcgtgcc

SEQ ID NO: 145407 - DNA, 479 bp, Homo sapiens
aaaggaggtgtcttaagaaaaatcaacaccaaaagggttttcttccttcgggagaaagaatttttataaaaagaatcttgaattgctaattgttatgaacctcataagaaaaaagtatttttatttacaaaaatgaaatgagttctattagatagatgtcgttttgatattctaggaactacaaaatgccttctgtgatatttaaagatacactaaaaataaaaagaaacagaaataatgagagattctaaataaaagtcaagtgggcaaggaagcaagacaatttgagagaaaaaaaataaatcttactttgaaattttaggatccattagtgctcagatttagtttttagaagagagagaaaaaaggatacatatctagtattttgaaattagtgtctttaatagttatctttttccacagagcccacctgaatgaccttgaaaatattattccatttcttggaattggcctcctgt

SEQ ID NO: 145408 - DNA, 368 bp, Homo sapiens
ggcacgaggctgcttcctcctcctcggcctcaccattccagaccaaaattgaaaaaatggttgacctcacccaggtaatggatgatgaagtattcatggcttttgcatcctatgcaacaattattctttcaaaaatgatgcttatgagtactgcaactgcattctatatattgacaagaaaggtttttgccaatccacaacactgtgtaacatttggcaaaggagaaaatgccaagaagtatcttcgaacagatgacagagtataacgtgtacgcagagcccacctgaatgaccttgaaaatattattccatttcttggaattggcctcctgtattccttgagtggtgccgacccctctacagccatc

SEQ ID NO: 145409 - DNA, 363 bp, Homo sapiens
  misc_feature (1)...(363): n = a,t,c or g
ggcacgagactttctcctcataactgtcatgaaccaccaatcaccttctaaggaccttgatcaactgattatcccccacatctttnnnnnnnnnnnnnnnnnnnnnnnnnnnnnnnnnnnnnnnnnnnnnnnnnnnnnnnnnnnnnnnnnnnnnnnnnnnnnnnnnnnnnnnnnnnnnnnnnnnnnnnnnnnnnnnnnnnnnnnnnnnnnnnnnnnnnnnnnnnnnnnnnnnnnnnnnnnnnnnatccttgctgcatgatgtacatacctccttcatgttctcaaactgtattccgactcccttcatcaaggaggaaagccatcagaaatccactctacagctggtccgaatctccctgctcg

SEQ ID NO: 145410 - DNA, 790 bp, Homo sapiens
ctgaagacctgctacagttctctgccaatattcctgctctttacaatagtaaacagcttgaagactttttcaagggtggaataattaatgatagttctgaattaattggtcctgctgaagctcactcagattccctcattgatacctttcctgagtgtagtacggaaggcttctccagtgacagtgatctggtatctcttactgttgatgtggattctcttgctgagttagatgatggaatggcttccaatcaaaattctcccattagaacttttggtctcaatctttcttcggattcttcagcactaggggctgttgcttctgacagtgaacagagcaaaacagaagaagaacgggaaagtcgtagcctctttcctggcagtttaaagccgaagcttggcaagagagattatttggagaaagcaggagaattaataaagctggctttaaaaaaggaagaagaagacgactatgaagctgcttctgatttttataggaagggagttgatttactcctagaaggtgttcaaggagagtcaagccctacccgtcgagaagctgtgaagagaagaacagccgagtacctcatgcgggcagaaagtatctctagtctttatgggaaacctcagcttgatgatgtatcttatgtgtgtctccaacttctgatggcactcctactcatctgactcggccccccccactcgtgccggctccctgagccccaatcgctagacacccgctcctgttcttcctgcaactcacccgtctgctctgtgcgtccgccgtctcg

SEQ ID NO: 145411 - DNA, 422 bp, Homo sapiens
gacactcgcttctggaacgtctgaggttatcaataagctcctagtccagacgccatgggtcatttcacagaggaggacaaggctactatcacaagcctgtggggcaaggtaaatgtggaagatgctggaggagaaaccctgggaaggctcctggttgtctacccatggacccagaggttctttgacagctttggcaacctgtcctctgcctctgccatcatgggcaaccccaaagtcaaggcacatggcaagaaggtgctgacttccttgggagatgccataaagcacctggatgatctcaagggcacctttgcccagttgccccacaggcttgtgatagtagccttgtcctcctctgtgaaatgacccatggcgtctggactaggagcttattgataacctcagacgttccagaaagcgag

SEQ ID NO: 145412 - DNA, 409 bp, Homo sapiens
aggagtcttgctctgttgcccaagctggaatgcagtggtgcaaccttgtctcactgcagcctccgcctccagggttcaagtgattctcccgcctcagtttcttctggaacgtctgaggttatcaataagctcctagtccagacgccatgggtcatttcacagaggaggacaaggctactatcacaagcctgtggggcaaggtgaatgtggaagatgctggaggagaaaccctgggaaggctcctggttgtctacccatggacccagaggttctttgacagctttggcaacctgtcctctgcctctgccatcatgggcaaccccaaagtcaaggcacatggcaagaaggtgctgacttccttgggagatgccataaagcacctggatgatctcaagggcacctttgccca

SEQ ID NO: 145413 - DNA, 362 bp, Homo sapiens
  misc_feature (1)...(362): n = a,t,c or g
ggaacgtctgaggttatcaataagctcctagtccagacgccatgggtcatttcacagaggaggacaaggctactatcacaagcctgtggggcaaggtgaatgtggaagatgctggaggagaaaccctgggaaggctcctggttgtctacccatggacccagaggttctttgacagctttggcaacctgtcctctgcctctgccatcatgggcaaccccaaagtcaaggcagccctgtcctccagataccactgagctcactgcccatgatgcagagctttcaaggataggctttattctgcaagcaatcaaataataaatctattctgctaaganatcccnnnaaaaaaaaaaaaaaaaaaa

SEQ ID NO: 145414 - DNA, 534 bp, Homo sapiens
ggaacgtctgaggttatcaataagctcctagtccagacgccatgggtctgtggaagatgctggaggagaaaccctgggaaggctcctggttgtctacccatggacccagaggttctttgacagctttggcaacctgtcctctgcctctgccatcatgggcaaccccaaagtcaaggcacatggcaagaaggtgctgacttccttgggagatgccataaagcacctggatgatctcaagggcacctttgcccagctgagtgaactgcactgtgacaagctgcatgtggatcctgagaacttcaagctcctgggaaatgtgctggtgaccgttttggcaatccatttcggcaaagaattcacccctgaggtgcaggcttcctggcagaagatggtgactggagtggccagtgccctgtcctccagataccactgagctcactgcccatgatgcagagctttcaaggataggctttattctgcaagcaatcaaataataaatctattctgctaagagatcacaaaaaaaaaaaaaaa

SEQ ID NO: 145415 - DNA, 517 bp, Homo sapiens
  misc_feature (1)...(517): n = a,t,c or g
gaggttatcaataagctcctagtccagacgccatgggtcatttcacagaggaggacaaggctactatcacaagcctgtggggcaaggtgaatgtggaagatgctggaggagaaaccctgggaaggctcctggttgtctacccatggacccagaggttctttgacagctttggcaacctgtcctctgcctctgccatcatgggcaaccccaaagtcaaggcacatggcaagaaggtgctgacttccttgggagatgccataaagcacctggatgatctcaagggcacctctgcccagctgagtgaactgcactgtgacaagctgcatgtggatcctgagaacttcaagctcctgggaaatgtgctggtgaccgttttggcaatccatttcggcaaagaattcacccctgaggtgcaggcttcctggcagaagatctcactgcccatgatgcagagctttcaaggataggctttattctgcaagcaatcaaataataaatctattctgctaanagatcc

SEQ ID NO: 145416 - DNA, 1768 bp, Homo sapiens
  misc_feature (1)...(1768): n = a,t,c or g
gggaacgtctgaggttatcaataagctcctagtccagacgccatgggtcatttcacagaggaggacaaggctactatcacaagcctgtggggcagccatgggtcatttcacagaggaggacaaggctactatcacaagcctgtggggcaaggtgaatgtggaagatgctggaggagaaaccctgggaaggctcctggttgtctacccatggacccagaggtttctttgacagctttggcaacctgtcctctgcctctgccatcatgggcaaccccaaagtcaaggcacatggcaagaaggtgctgacttccttgggacgatgccataaaagcacctgggattgatcttcaagggcaccttttgccccagcttgagttgaacttgcacttgttgacaagcctgcattgtgggatcctggaggaactttcaagcttcctggggaaaatgttgctgggttgaccgtttttgggcaatcccattttcgggcaaagaatttcaccccttgaggtgccagggttttctgggcagaaagatgggtgacttggagttggccagtcctcctgagtgactacaggcgcatgtaaccacacctggctaatttttgtatttttagtagagctggggtttcgccatgttggccaggctggtctccaattcctgaccttaggtgatccacccatcttggcctcccaaagtgctgagattacaggtgtgagccactacgcctggcctaaaaataaaacactttaagagaccaggtctcactatcaaaatgcagtggctccatcatagcttcctgcagccctgagctccttcctgggctcaacacattctcctgcctctgcctcctgagtagatgtaactacaactacaaacacaccccccaacacactcgcttctggaacgtctgaggttatcaataagctcctagtccagacgccatgggtcatttcacagaggaggacaaggctactatcacaagcctgtggggcaaggtgaatgtggaagatgctggaggagaaaccctgggaaggctcctggttgtctacccatggacccagaggttctttgacagctttggcaacctgtcctctgccttctgccatcatgggcaaccccaaagtcaaggcacatggcaagaaggtgctgacttccttgggagatgccataaagcacctggaatgatctcaagggcacctttgtcccagcttgagtgaacttgcacttgtgacaagcttgcattgtggatcctgagaacttcaagctcctggggaaatgtgctggtgaccgttttgggcaatccattttcggcaaagaattcacccctgaaggtgcagagcttcctgggcagaaaaatggtgactggagtggccagtgccctgtccttcccagattaccactgagctcactgccccatgatgcagagcttttcaaggatatggctttattctgcaagcaacnagctgggcaaaggtgcccttgagatcatcccaggtgctttatggcatctcccaaggaagtcagcaccttcttgccatgtgccttgactttggggttgcccatgatggcagaggcagaggacaggttgccaaagctgtcaaagaacctctgggtccatgggtagacaaccaggagccttcccagggtttctcctccagcatcttccacattcaccttgccccacaggcttgtgatagtagccttgtcctcctctgtgaaatgacccatggcgtctggactaggagcttattgataacctcagacgttc

SEQ ID NO: 145417 - DNA, 387 bp, Homo sapiens
tggggacggcatcagccaagctggaagccattaatgaactaattcgttttgaccacatatataccaagcccctagtcttagagataccctctgagacagagagccaagctaatgtggtagtgaaaatcgaggaagctctccgccacccattggaatggccaacaggggacctgcatatggcctgagccgggaggtgcagcagaagattgagaaacaatatgatgcagatctggagcagatcctgatccagtggatcaccacccagtgccgaaaggatgtgggccggccccagcctggacgcgagaacttccaaaactggctcaaggatggcacggtgctatgtgagctcattaatgcactgtaccccgaggtcgacgcggccgcgaa

SEQ ID NO: 145418 - DNA, 1863 bp, Homo sapiens
  misc_feature (1)...(1863): n = a,t,c or g
aaaaaaatttttttttttttttttttgcattgtaccttttaattgcatgggtagtttttaaataaatggagaaagcacctttcagaagctacactagcaggaaaaaattccatcaagcatttacatagtaaatttctataatttcacaaaagattcttgatcttacttgaagtatacatgagggaaagagccccctcagcaggtgttcccgttgcttacagaagcaaactaaaggacctaaaactggaggcaagccaggatgccaaaaagggggaagagaaatgataaagaaccattcataaattccatgtctacttcaagacatttgtctaatgacccttacataataagtattttagggaaaactaccacccttttaagataaaagtacaatcttaaaagtacaatcttaaaagctgtagttctcaattatagtaatatttcttacttccagtaatatgtctcaataccttggactgctggatgtcaaaaggcaatacctgggggtcatctatgagatctgaacaaatagagggattctctaggactgtatactctctattttggctttttgaatgaagtacagacaggcttctctgctatcctccaggcagtgtaatagtcaaggaaaagggcaacagtattggatcattccttagacactaatcagctggggaaagagttcattggcaaaaatgtcctccccaaaaatggtttacaccaagcaaagaggaacatgtcactgaatggggaaagggaacccccgtatccacagtcactgtaagcatccaagtaggcaggaagatggctttgggcagtggctggatgaaagcagatttgagataccccagctccggaacgaggtcatcttctacaggttcttccttcactgagacaatgaattcagggtgatcattcttctgaggggctgaagagggtgcttcctcgacttttcactaccacattagcttggcttctctgtctcaggagggtatctctaagacttaggggcttggtatatatgtggtcaaaacggaattagttcatttaatggcttccaagcttggcntgattgacgtccccacttgacagagaaagggaggcctggtaaggaactgggtccttcctgggtagaacctctgggagctcctcccaggctggcaggctctggggaagggcatttgaagaacatgactgggtccaagttgtccagaatgcccaacaggatatcagactctgaatctgaagagtcaataccgccagaatccatggggagatgttctggaggggtgacaactgggcctgcacctgctgcagaggtgcacgtagtctgagtgctgcggactcagcagacccggccactggcctcacttcattccccttggcttccgcctcctcttcagcaaccagggcatccatccccaagcgctgtcttaactcctggttctcaactacaaggccatgagttttctctcgtaaaagctgattttctagcaaaagtttttggttctcttcttctaaatctaccacttgctgttccagctcactcattcgagccttctttcgatctctggcagtctgagctgctactctgtttttcagtttcctcctcagcgccttctcctcggggctcaggtgcgtgaggcgctgtcgcttgcgcgcctggggcagccccccgctcgctgcctccgggctggcccctctctgggctggcaccatgagcggcagggcctggccggccggggctccggcggcggaggcgggctgccccgacagaagcagaactttaggggtcccgtcggccgggttcggcgcggctgccaccaccaccatagctccagactacgcaccgcgcaccgcgcg

SEQ ID NO: 145419 - DNA, 1040 bp, Homo sapiens
tgcgtagtctggagctatggtggtggtggcagccgcgccgaacccggccgacgggacccctaaagttctgcttctgtcggggcagcccgcctccgccgccggagccccggccggccaggccctgccgctcatggtgccagcccagagaggggccagcccggaggcagcgagcggggggctgccccaggcgcgcaagcgacagcgcctcacgcacctgagccccgaggttccttctcttcctaggaaactgaaaaacagagtagcagctcagactgccagagatcgaaagaaggctcgaatgagtgagctggaacagcaagtggtatgaactttcttccagaaccaaaaacttttgctagaaaatcagcttttacgagagaaaactcatggccttgtagttgagaaccaggagttaagacagcgcttggggatggatgccctggttgctgaagatttttgcctcttacagtctgatatcctgttgggcattctggacaacttggacccagtcatgttcttcaaatgcccttccccagagcctgccagcctggaggagctcccagaggtctacccagaaggacccagttccttaccagcctccctttctctgtcagtggggacgtcatcagccaagctggaagccattaatgaactaattcgttttgaccacatatataccaagcccctagtcttagagataccctctgatacaggatagccaagctaatgtggtagtgaaaatccgaggaatcacctctcagcccctcagagaatgatcacccctgaattcattgtctcaagtgaaggaagaacctgtagaagatgacctcgttccggagctgggtatctcaaatctgctttcatccagccactggcccaaagccatcttcctgcctactgggatgcttaacagtggactgtgggataagggggggttcccttttccccatttcagtgacatgtcctctctgcttggtgtaaaccattcttgggaggacacttttgccaatgaactctttccccagctgattagtgtctaa

SEQ ID NO: 145420 - DNA, 714 bp, Homo sapiens
gagagagagtcagcggccctgatgttagcgatgcagactccaggagaagggggcatgctcgcagtttagaggaagtgagcccctcttccacgttccactcccaccatcctcctgggaccccagcctgcatgccccccaaaagatgcttttgcactgattcaacaaagcctaaagatgcaaaggcctaattgaagacctgtgaatggcatgtacggtcctcagttcccagctgaggggccactcgggcttccccatattcccctcagcctctccatcttccaacaggggtgtgggagtgcatccatggccatgagtattgatctgtcccagcctgtgcattgctccgaggcagttctgagtgggatggatgttacagatggggattccttcagctcattttgcgtggtttgacgttatggctgctggttttactgccacaactcccaggcccaacctggcttaatgtctaagttttaagccaaaaaagatggggagcagagctttgtggcagggctgggggttggggtccactttagttttgtggcaggatgaaggctgcagtggttttattaatcatgattggcctggccgtagctccaggctgagagggacaggtttgtcaagtggtggtcccccagatgtccctgtgcccaagccctggcctgtctgccctcaggcccagcaagaggcgctaccacaaggctctgactggcg

SEQ ID NO: 145421 - DNA, 626 bp, Homo sapiens
  misc_feature (1)...(626): n = a,t,c or g
aaattttctaattaccacattaaaatagtaaaaaccaggtgaaattaattttaagaaaatactgtattttatatatatatctccaaaatattatttcagcatataaccagtgtaaaaactataaatgagatcattgacattttttttcataccacatttttagaaccctgtgtgtgtttacactgtacagcacattccacttgagaccagtgctgcgggactggggagtgcaagcgtcagggtcccagccgaagcccctttagcttggggacttcacagccacagcctgagtcccagctcacaactccagaccaaattcccctcccaggcttcatgtggctggcgnttcaagacagatgccacacatggcctggatccccacccccctggcctgctgtgttggctgggcttttccttggagcatggcccctggtgcttctgccactcctacctccctgcccacccccgaaaccccatccctcagagggaccgggtatttttcaacatcctcatccagatcaaggccccattgacattggagagaattcaagcccaacagggaattccattacttatcattgagcactgactaagatttttttttttaactagactttttctgaaac

SEQ ID NO: 145422 - DNA, 513 bp, Homo sapiens
ggagatctctatcagcaccctggagaagattgtcgagggcgacctggacgaggacctgcctaacgacctgcgcgcgctttttgtcgataaagatacgattgttaatgctgtcggggcatcgcacgacatccacctcctgaagattgacaatcgagaagatgagctggtgaccagaatcaactcttggtgtacacgtttaatagacaggattcacaaggatgagatcatgaggaaccgcaagcgcgtgaaggagatcaatcagtacatcgaccacatgcagagcgaactggacaacctggaatgtggcgacatcctagactagatgaatgtcagccacaggagcttcttcaaaacatagcaccagccccagccaggagaaggaagtgcacacgcctcacccgcacctctagagagttgctgggcatctctcaaccgcgatccccaacaccattcttcccccacccctggaaaaacttccaaaagtagagaaaataaagaaataatttcacaaaa

SEQ ID NO: 145423 - DNA, 493 bp, Homo sapiens
ggatttgttcagacatctgcgggaggttgagggctctgatgaggcgttgagttttttttgttcagcccgaccgtgcggctttggggatcccgtcgctctgtgtttcctgctccaggtttcccgtctcgcatcttcccagaccctcgggcgcgatgtggaggagctgcctccggctgcgggacgggggacgccgtctcctgaatcggccggcgggtggccccagcgcttctatgagtccggggccaaccatcccgtctccagcccgggcttacgccccgccgacaggtaagaccatgacatgttcttttgggttggggccgagctggggtaaggtgggcttcgggcttcggctgtgcaaagcgaagtaactgaggcaggggtcatgctcatgaggttatgccagccagtcaggtctttttacagatgagaaagtgaagcccagacaagggcagacgacccgagagggaacagcgagtcacgcacgaatggcgaa

SEQ ID NO: 145424 - DNA, 922 bp, Homo sapiens
atagtcatgggccactcaatgttgccccacttctgaatctggtactcctcctccagggcgtgcagcagcacggctggctccactgtcaggcgcaggtcattcaggcccaaggttagcaccatggacttgagctgggcagctacaaactcaatccctagtgagacacatgacccgaacttggcaaatcagagctttccgcacccagtctagtgattggttcatggatggacatgtgacccaagccagggcaatgagattgaactcaagacttctgctggcgaagtcggaggtggaaaggtgtgagcctagagcgtagagtgattggctagcatcagagccacccagcctccacactcagctagcccagaacactctgtgcctctccactcacaggaccttgtaaagcccatgtgttgtaagatgccaggtggctgacgagcacctcccgagttttggcagggatgctgggtcccattatgctggtggaggagctgatctccacgccgtatcttttctcagcccattcgatgattggatcccactcattcctttgaagttccactaatgtctcgggctcctccaccctgtagcagatggtgtcggtgtccagaaacttcacggctgcccggatcagctgatccttgtttctctgggttgggttgtccaatgatgtgttgcacaatgtggtctgaatcaaaggcaaaaaccaccctgtcactgcctgcggggctcaggcaaaagccctgctttcctgaggacaccacatctgacacatagcagacagcaccacagcacagccctccaccagaggcgtctgcattaccggagcagcagcacagctactgagagtgtgccacaaccaggctccatgccaaatgctttgtgttgacgctcacaggactcgagggaagcttcgaattcc

SEQ ID NO: 145425 - DNA, 1359 bp, Homo sapiens
  misc_feature (1)...(1359): n = a,t,c or g
tttgacttcgtagtccctagtccgtgtggtggaattcgcggaagatggcggcgtccaagggaggttgagggctctgaggaggcgttgagaggtttccgtacagcccgaccgtgcggctttggggatcccatcgctctgtgtttcctgctccaggtttcgcgtctcgcatcttcccagaccctcgggcgcgatgtggaggagctgcctccggctgcggngacgggggacgccgtctcctgaatcggccggcgggtggccccagcgcttctatgagtccggggccaaccatcccgtctccagcccgggcttacgccccgccgacagaaaggaagaggttttattcagaatgttcagcattcacacagggtgaaggtggcttttgagataaacctgggaccacaggaagctgaaaattccccaagccaagctctttaccgtccccagcgaggccctggccattgcagtggctactgagtgggattcccagcaggataccatcaagtactacaccatgcacctgaccacattgtgcaacacatcattggacaacccaacccagagaaacaaggatcagctgatccgggcagccgtgaagtttctggacaccgacaccatctgctacagggtggaggagcccgagacattagtggaacttcaaaggaatgagtgggatccaatcatcgaatgggctgagaaaagatacggcgtggagatcagctcctccaccagcataatgggacccagcatccctgccaaaactcgggaggtgctcgtcagccacctggcatcttacaacacatgggctttacaagggattgagtttgtagctgcccagcttcaagtccatggtgctaaccttgggcctgattgacctgcgcctgacagtgggagcaggccgtgctgctgttcacgcctggaggaggagtaccagattccagaagttgggggcaacattgagtgggcccatgactatgagctgcaggagctgcgggcccgcaccgccgccggcaccctcttcatccatctctgctccgagagcaccacagtcaagcacaagctcctgaaggagtgaggcctgggcagagcacactcagcaggataaagggcagtgcagccacagctcccccggccttcagggcttccccagcctgtggggctggcttccttggcttttggggactcggcctcagcgtcaccctgagattccccccgagacacagtgcgctagtacggctgtccggaggtcagcctgatttcaacccaggtgcccctggcctggccagcagtgaatgtaggagatgaattgtgcaagtgactttctctcgactctgattttattaaatatttctccaccctgga

SEQ ID NO: 145426 - DNA, 1891 bp, Homo sapiens
  misc_feature (1)...(1891): n = a,t,c or g
tttttttttttgacaaagacttaaagggtttattttccacaggactttgtagagccttcagaatactttgtgcccagcaaatctttaggaggggcctaggatgtgctggctttcccaaatgtatttgaccaaagaatactttttttggcagaaatattaacatcttaagattgcacagaacgttttagagaccattaagttaactgccactacagggaaaggaacaaaaaatgcacactccacttgcaaatcctccctggcaatacagagcattcaggtgctctgccttaccaaggcgcctctgcttcaaggtgggaaggcaactgcttactgagtgcttcagtgggccttgccctgctctggggaaatgactccattttcaaccatcccagggcaacaataggccacagtgttcaacacctagaaccagtgaggcctattagaaggtggttgtttctaacaactttttacaagacagcaaagtcaggaacaagagaaggcagaaggatactccaaatggaatccaaagtttggttttgttgacatgagtggcagtggagagacaactgtggggtgaacacccatgagtttgtagggcctgctgtcttcagagcagcctcgagaccctcagccagcctcatgcttccacccagcaggcagaggttttgggcaagttagacttgagagtaattgagagagaagcattgtgagaacagatgtcctgggtgaggtgccccctgggcagccatctgccttcaccctggaggaaacatgcttccagcggggactgcaaagtaacaccctggttggccctttccccacaacacttgccctgtgcagttggggaagcggctgtcacagatgaattcacagatgaatcggcagagtgcgctgatacaaaggtgggctctgctctgagtgtggcctgcacagccaggggacttccaaatgctcgttctctgttcagctccctttgtgttcacggtataatgacacacactttctcattggattcttttcactcgccagctttttgtcgataaagatacgattgttaatgctgtcggggcatcgcgcgacatccgcctcccaaagatttccaatcgagaagatgagctggtgaccagactcatctcatggtgtacacgtttaatagccagggtgagtcaatccctagccatcttagcaggctggtatgcacttttctagctgacatggaaatcctccctggtactcctcctccaggcgtgacagcagcacggcctgctccactgtcaggcgcaggtcaatcaggcccaaggttagcaccatggacttgagctgggcagctaaaaaactcaaatcccttttctcaaccccattcgaatgaattggatcccactcattcctttgaaattcccaactaaatgtcctcgggctccctcccaccctgtaagcaagatggtgtcggtgtcccagaaaacttccacggctgcgccggatcaagctgaatccttgtttctctgggttgggtgntcccaatgaatgtgttgcacaatgtggtcttcaccctgtgtgatgctgacattctgataaaacctcttcctttctgtcggcggggcgtaagcccgggctggagacgggatggttggccccggactcatagaagcgctggggccacccgccggccgattcaggagacggcgtcccccgtcccgcagccggaggcagctcctccacatcgcgcccgagggtctgggaagatgcgagacgcgaaacctggagcaggaaacacagagcgatgggatccccaaagccgcacggtcgggctgtacggaaacctctcaacgcctcctcagagccctcaacctcccttggacgccgccatcttccgcgaattccagcacatgga

SEQ ID NO: 145427 - DNA, 491 bp, Homo sapiens
cccacgcgtccggccacgcgtccgcccacgcgtcctttcactcgtccgaaaacatgaaattataacctgtgctctttggatacctaatgcgacatttaagttgtatttgacagtagatagtattttggatctattgaaatttgggttctacagatttcatttcacaatgaaagtttacgaattaatctttctaggttcctaatcatcactttttgattacaggtggttgtgtcaaaccgagtggtgacatctccatgctgtattgtcacaagcacatatggctggacagcaaacatggagagaatcatgaaagctcaagccctaagagacaactcaacaatgggttacatggcagcaaagaaacacctggagataaaccctgaccattccattattgagaccttaaggcaaaaggcagaggctgataagaacgaccagtctgtgaaggatctggtcatcttgctttatgaaactgcgctcctgtcttctgg

SEQ ID NO: 145428 - DNA, 2977 bp, Homo sapiens
cagttgcttcagcgtcccggtgtggctgtgccgttggtcctgtgcggtcacttagccaagatgcctgaggaaacccagacccaagaccaaccgatggaggaggaggaggttgagacgttcgcctttcaggcagaaattgcccagttgatgtcattgatcatcaatactttctactcgaacaaagagatctttctgagagagctcatttcaaattcatcagatgcattggacaaaatccggtatgaaactttgacagatcccagtaaattagactctgggaaagagctgcatattaaccttataccgaacaaacaagatcgaactctcactattgtggatactggaattggaatgaccaaggctgacttgatcaataaccttggtactatcgccaagtctgggaccaaagcgttcatggaagctttgcaggctggtgcagatatctctatgattggccagttcggtgttggtttttattctgcttatttggttgctgagaaagtaactgtgatcaccaaacataacgatgatgagcagtacgcttgggagtcctcagcagggggatcattcacagtgaggacagacacaggtgaacctatgggtcgtggaacaaaagttatcctacacctgaaagaagaccaaactgagtacttggaggaacgaagaataaaggagattgtgaagaaacattctcagtttattggatatcccattactctttttgtggagaaggaacgtgataaagaagtaagcgatgatgaggctgaagaaaaggaagacaaagaagaagaaaaagaaaaagaagagaaagagtcggaagacaaacctgaaattgaagatgttggttctgatgaggaagaagaaaagaaggatggtgacaagaagaagaagaagaagattaaggaaaagtacatcgatcaagaagagctcaacaaaacaaagcccatctggaccagaaatcccgacgatattactaatgaggagtacggagaattctataagagcttgaccaatgactgggaagatcacttggcagtgaagcatttttcagttgaaggacagttggaattcagagcccttctatttgtcccacgacgtgctccttttgatctgtttgaaaacagaaagaaaaagaacaatatcaaattgtatgtacgcagagttttcatcatggataactgtgaggagctaatccctgaatatctgaacttcattagaggggtggtagactcggaggatctccctctaaacatatcccgtgagatgttgcaacaaagcaaaattttgaaagttatcaggaagaatttggtcaaaaaatgcttagaactctttactgaactggcggaagataaagagaactacaagaaattctatgagcagttctctaaaaacataaagcttggaatacacgaagactctcaaaatcggaagaagctttcagagctgttaaggtactacacatctgcctctggtgatgagatggtttctctcaaggactactgcaccagaatgaaggagaaccagaaacatatctattatatcacaggtgagacgcaaggaccaggtagctaactcagcctttgtggaacgtcttcggaaacatggcttagaagtgatctatatgattgagcccattgatgagtactgtgtccaacagctgaaggaatttgaggggaagactttagtgtcagtcaccaaagaaggcctggaaacttccagaggatgaagaagagaaaaagaagcaggatgagaaaaaaacaaagcttgagaacctctgcccaatcatgaaagacatattggagaaaaaaagttgaaaaggtggttgtgtcaaaccgaattggtgacatctccatgcctgtattgtcacaagcacatatggctggacagcaaacatgggagagaatcattgaaagcttcaagcccttaaggagacaacttcaacaatggggtttacatggccagccaaaggaaacaccgggggattaaacccttgaccctttccattattgagtaccttaaggccaaaaggccagaaggcttgataagaacggacaagtcttgtgaaggatcttggtcatcttgctttatggaaactgcgctcctgtcttctggcttccagtcttggaagattcccagacaccatgcttaacaggtttcttacaggatgatcaaactttggtctgggtattgatgaagatggaccctacttgctggatgataccagtgcttgctgttaacttgaaggaattgccacccccttgaaggagatgacgacacattcacgcatgggaaggaagtaggacttattctcttgggcttgaggggatggactttacctgtttcagtactctacaattcctctgataatatatttttccaaggatgttttcctttatttttggttaatatttaaaaagtctgtatggcatgacaactactttaaggggaagataagatttctgtctactaagtgatgctgtgataccttaggcactaaagcagagctagtaatgctttttgagtttcatgttggtttattttcacagattggggtaacgtgcactgtaagacgtatgtaacatgatgttaactttgtgtggtctaaagtgtttagctgtcaagccggatgcctaagtagaccaaatcttgttattgaagtgttctgagctgtatcttgatgtttagaaaagtattcgttacatcttgtaggatctactttttgaacttttcattccctgtagttgacaattctgcatgtactagtcctctagaaataggttaaactgaagcaacttgatggaaggatctctccacagggcttgttttccaaagaaaagtattgtttggaggagcaaagttaaaagcctacctaagcatatcgtaaagctgttcaaaaataactcagacccagtcttgtggatggaaatgtagtgctcgagtcacattctgcttaaagttgtaacaaatacagatgagt

SEQ ID NO: 145429 - DNA, 2022 bp, Homo sapiens
aggaaactcatggaagcctctgctcatttgggtcactgggacacccctgagatgggtgtgtttatttgctcagggcgggcagcctatggtgaagaggagacagaggcgatgggcgtgcttcgtcctccgtaacactggctttatttaccgtggtggttcagagtcccaggccctgacctctaaagacttttcataacagacgttaagaccaagccgtggacctcaccccaggggaatgccacggccctttggggacctgcacacccacctctccgggggacttgacaaggggccctgaggccaagggaggtcactcctccctccaggcccctgacttttactttgtggttctctaaaaaccatgtacacactttcactctattgtaaccacacagggcaggcgcatccagcatgtcagtgtcctgccccgggcagctttcactaccgggcacgctccctctggcctggtggatcaccaagagggcggttctcattttgttattagtggaagagccttgagcataaaagctcttcattttctttgccggaaagtattatggttttgtgttttttgcagttttatttttttaaggatggacactaaatctctggtgtccatgttccgagcccggtggctgggatggtggctcgatgtgtctcctctttatcccgccctctgcctgtttggtgccctcccttctttcccccaggcagtgggtatcgggttctttcccaaagtgcttacttggaaagagtgtggctgctggactcttttcgaaatgcccctctgagtcaggagcctgggtggggacaagatggaggatgtccacagaggctgacctgtggggggaaaagaagtgctcaggtaaggttgtctcctctcctgttcctaaaaaaatccatgcttgcaggagagggttggtgcctgctcagtttctgtcgagggaatgggagtctcctcggctccctcctgggccctctgcttcttggaggccgaccgctggagactgcggctcctgtgcttggatctttgacatctgtcagtcactggaggctagagaagttgactttaccttggctttctgtgggttcccgatgggcttggaagtgccgtctacttcctaagcatcctgtctaaagctttgtgggcaacctcagtgcaacctcagaacagacaaatcatgaatgagctggaactttgcaagaatattcatattataaatgtctcatctgatggaggaacgtgtgcatttagagagagagagagttttcaaggtttatggcaactttgtggaggacctgggtaactcttacccttggccaaaggaagaggttttcctgtctggcttctgaggttggagggggcacttagcagtgaaccttaagtctgggtacatgtaaccctgctgaggggctgtgcaggccgctcctacggtcctttggcctgaggcagggcgggaggcatgcaagccagtgggggaaaacccctctgaagctgggcagccctctacctgggccccgggagccgtgcctccttggaaacgcaaaagggccgaggaagcacctggttttcatggcaaaagctcctactcccagagcccctttaacatctgcctaattaagtgcaataaattttttctagaaaatggcaaaagatgactccccaggtggaatattctcctctttacggtgttgggattcccagaacacccacttgggtttaatttttcctaagtgcatgtgatgtgattagagtgtgtggggctctgtgtccttccctgggagcttggcattccagcgggcccctctctttacctttgttgggggaaggaggcaagagagaaattccttcttcccagccagagagggcagaagcagaccgtagcccattggccttatgtgcgtgtgtgcgtgcgagtgtgtcacttgctggtgggccgggagtgatgtggtgggagggaagccggggaatgtatccttttcagacaaaattaaatattttgaaatgagaatgaaaaaaaa

SEQ ID NO: 145430 - DNA, 637 bp, Homo sapiens; identical to SEQ ID NO: 144817
  misc_feature (1)...(637): n = a,t,c or g

SEQ ID NO: 145431 - DNA, 768 bp, Homo sapiens
  misc_feature (1)...(768): n = a,t,c or g
gacactcgctttttggaacgtctgaggttatcaataagctcctagtccagacgcccatgggtcatttcacagaggaggacaaggctactatcacaaagcctgtggggcaaggtgaatgtggaaagatgctggaggagaaaccctgggaaggctcctggttgtctacccatggacccagaggttctttgaccagctttggcaacctgtcctctgcctctgccatccatgggcaacccccaaagtcaaggcacatggcaagaaggtgctgacttccttgggangatgccataaaagcacctgggatgatctcaaagggcacctttgcccaagcctgaagtgaactgcacttgtgacaaagctgcaatgtggatcctgagaacttcaaagctcctggggaaatgtgctggtgacccgttttgggcaatcccattttcggcaaaagaatttcacccctgaaggttgcagggcttcctgggcagaaagatgggtgacttgcagttggccagtgcccttgttccttccagataccactgaagctcaattgcccatgaatgcagagcttttcaaggataaggcttttattcttgcaagcaattacaaataataaatctatttctgctaagagatcaccaaannnnnatnntnnnnnnncccccggattttttatttagcgggccgcacctttttccccttttagggggggtaaatttatattgggccttgggccggggttttcaaaagcggggggannnnnnnnnnaaagagccc

SEQ ID NO: 145432 - DNA, 383 bp, Homo sapiens
cttgcgtcaggaggggtagcataccaagcaatacaagctcttaaaaacatgggtgaaattctgaaagctgcgggctgtgacttatctaacgtggggacaacaactgttcttttgggtgacataaatgacttcaatactgccaatgaaatctacagacagtatttgaagagtaattttcctgctagagctgcttaccaagatgctgctttaccccaaggcatccgaattgaaattgaagcagtagctatgcaaggaccactgacaacggcattactataatggggcccagtgctgagaaaactgcaattgataacattttaatttttacaattgacgtaacatcttaattaaccttttaattttcacaatcgacgacagggtgg

SEQ ID NO: 145433 - DNA, 1068 bp, Homo sapiens
ctgtggggcagaggcgctgctgtggttggtcagtccagtaagaagccagcagggctggtgctggggcttcttctcctgaaggggctgcaagagggaaggcttatccatgtcgtccttgatcagaagggtgatcagcaccgcgaaagccccaggggcccattggaccccctacagtccaagctgtattagtcgaacaggacccatttacatttccgggaccagataggccatggaccccttccaagttggaccagcttgtgtccaggaggggtagcaggaagaagcttaaacaagctccttaaaaacatgggtgaaattcctgaaagcctgccaggctgtgactttcactaacgtggtgaaaacaacttgttcttctgggcttgacataaatgaccttcaattactgttcaatgaaattctacaaacagtattttcaaggagtaattttcctgctagagctgcttacccaagttggctgcttttaccccaaaagggcagccgaatttgaaattgaagccagtagctatccaaggaccactgacaacggccttcattttaagtggggacccgtgctgtgtagtctgggattgttaacattttaattttttacaattgatgtaacatcttaattaaccttttaattttcacaattgatgacagtgtgagtttgatgaaaatatctgaagctattatggaaataccatgtaatagggggagttggaccatggaatattagagaaggaatccagttacttttttaaattacacctgtgtgcacctgtattactgaatataggaaagagatacccattacatagttactcagtaaacaaaagagaaataccaggtaggaaagaagagttactatttctgagaaataatcaagaacatatttaatttaaactaatgatgtgaactatttagttttgatgtccgttatgtgattctgcttttacttgagtaaaattaaagtgtttaaatttgagatcaaggagaagatagtggaacaaaatgttatatagataatatttttctaatggaaataaaataggcagatttcaaaaaaaa

SEQ ID NO: 145434 - DNA, 492 bp, Homo sapiens
cggcccgtaattcccggctcgacgatttcgtgggcgctgcgcggcgcagcgaaaatggcggcttccaggtgggcgcgcaaggccgtggtcctgctttgtgcctctgacctgctgctgctgctgctactgctaccaccgcctgggtcctgcgcggccgaaggctcgcccgggacgcccgacgagtctaccccacctccccggaagaagaagaaggatattcgcgattacaatgatgcagacatggcgcgtcttctggagcaatgggaggtccgcggcgcgcgcacaccctcccggctcttctctgtgcgggaccctgttgcctatgaccccttacctgttctgtcttgggacctttctgaccccctaacctcctctactcatgccttgaatccttactgacccactgaagccactgttgaccctccattccttctctgacccgcgcgccctgctgaccctcgctccagccctctgtcattccagtgccctgtt

SEQ ID NO: 145435 - DNA, 457 bp, Homo sapiens
tctacaccagcgtggtggaattcggcggcttccaggtgggcgcgcaaggccgtggtcctgctttgtgcctttgacttgctgctgctgctgctactgctaccagcggctgggtcctgcgcggccgaaggctcgcccgggacgcccgacgagtctaccccacctccccggaagaagaagaaggatattcgcgattacgatgatgcagacttggcgcgtcttctggagcaatgggagacccctgagcccctttcagtgctgcctgaggtgccctctacctgtgcctgcctctcgtatgtcagaatgatttggacctgtttttgccacctcagcccccatgctctaggctaaacgagttgggcctccagacaaacagggcctgggaggaaaagagagtcctgcttcctgcctggcttccccatctgcgaggtgagttgaagtgacagcctcctgacagctc

SEQ ID NO: 145436 - DNA, 4187 bp, Homo sapiens
gacgtggaattccggcttccaggtgggcgcgcaaggccgtggtcctgctttgtgcctctgacctgctgctgttgctgctactgctaccaccggctggggtctgggcgggccgaaggctcgcccgggacgcccggacgagtttacccccacctccccggaagaagaagaaggatattcgcgattccaatgatgcagacatggcgcgtcttctggagcacctgggagaaacacgatgacatttgaagaaggagatcttccagagcacaagagaccttcagcacctgtcgacttctcaaagatagacccgggcatagcctgaaagcatattgaaaatgacgaaaaaagggaagacttctcatgatgtttgtcactgtatcaggaagccctactgagaaggagacagaggaaattacgagcctctggcagggccagccttttcaatgccaactatgacgtccagaggttcattgtgggatcagaccgtgctatcttcatgcttcgcgatgggagctacgcctgggagatcaaggactttttggtcggtcaagacaggtgtgctgatgtaactctggagggccaggtgtaccccggcaaaggaggaggaagcaaagagaaaaataaaacaaagcaagacaagggcaaaaaaaagaaggaaggagatctgaaatctcggtcttccaaggaagaaaatcgagctgggaataaaagagaagacctgtgatggggcagcagtgacgcgctgtggggggacaggtggacgtggagagctctttgcccagctcctggggtgggagtggtctcaggcaactgcacaccggatgacattctagtgtcttctagaaagggtctgccacatgaccagtttgtggtcaaagaattactgcttaataggcttcaagtaagaagacagatgttttctaattaatactggacactgacaaattcatgtttactataaaatctccttacatggaaatgtgactgtgttgctttttcccatttacacttggtgagtcatcaactctactgagattccactcccctccaagcacctgctgtgattgggtggcctgctctgatcagatagcaaattctgatcagagaagactttaaaactcttgacttaattgagtaaactcttcatgccatatacatcattttcattatgttaaaggtaaaatatgctttgtgaactcagatgtctgtagccaggaagccagggtgtgtaaatccaaaatctatgcaggaaatgcggagaatagaaaatatgtcacttgaaatcctaagtagttttgaatttctttgacttgaatcttactcatcagtaagagaactcttggtgtctgtcaggttttatgtggtctgtaaagttaggggttctgttttgtttccttatttaggaaagagtactgctggtgtcgaggggttatatgttccatttaatgtgacagttttaaaggatttaagtagggaatcagagtcctttgcagagtgtgacagacgactcaataacctcatttgtttctaaacatttttctttgataaagtgcctaaatctgtgctttcgtatagagtaacatgatgtgctactgttgatgtctgattttgccgttcatgttagagcctactgtgaataagagttagaacatttatatacagatgtcatttctaagaactaaaattctttgggaaaaaccctcaattgtgattttaataaattaaaagtagcacattacatggttagaaaatgtcagtgttaaagaatggtacaaagtgaaaagtgtatccctctcttgccgccggtggtagcttgtcccagtggaagctgctgttaacaatttgtgcccccacatccccctccctgcccatccaccaaaaaaaagtacatttacttatgtaaatgtacttatggtgatgtatgtttgttttggcctcacagcatctgtttccccttaatttggtagctgctcacatttccctcgaaagaaccacaccctctgcattctcagttctttgctttggatgggacatttgccctgcagtccccccaccctccaggccatgccctctccagggtgaggcctgtgtgatctaccgtactagggtactaggccctgaaagaggcttttcttgttcctcctgcatcttgaacctggagcgggagctgttgtaggccccgcccttggagaagagaactgtctgacagtggggagagagcgccacaccctggtggcataaacgagtccctgaatcatgccgtggctgaaccaagccctgtctgtgggctttttctgttgtactcagggcagtttgatggggttactgtcctgcatagccataatggcccagtataaagcagctgttttgatgagataattgctttaattaagcaaaaggtagcaaagctttcactccgccctgtaccttctgtttccacttaggagccttcccatgtcagaatgtgcagatctgtctcattgtttcctgtgcagtgtgcccccacttcacccagtagtttctgtgtgtctgttatgtactaggtactacaaggtgccaggacggtgtagatacagcctctgctatcgtaaaactcaatgattcggtgggggaagacaaatgtcagtaatgtacaaagtaaaatggcagctgttagaagtatgaaaggggcagggtagggggaggtagaatcttccctgaccaggttaagaaaaccagaggccttctctgagggcaagaggaggagaggagaaatagagtaaggcaggcagaggaaacagtctgagctaagaccctgtggctagaagtggcagagggagaggcagcaggaaggccagcggggaggctggggcccagtgcaggcccaggttggaggagcgtagcacatggagtttggtaggagtttgggacgccctggtggatcttaattgtgatggggtgggtgtgaaaggcagtccaggttgcactggttgcacaggagaagtgatcagaagaggaccccagcaggtgtgagccgtgagctgggaggtgcttcagtagtgcaggccatagctgaaggtgtcctacatcagcagggtgatggtgaggtttgaaccactgtttcactgcatagtccctgctgatggacacttgagtgttcagattttttgctggtatattcagtgctgcagtggacattttcatacaaaatatttcggtacacttttgtttatatctgaaaggtaaattcctagcagtagaattattagagcaaacggaatttaacattttggtgtgtattgccaaattgccctcccaagtggtttagtcagcttacccttgccaacaatagatctatccttgccagccttgggcatcacatttaccagtttaatagattgtaaaaccatatcttaattggctaccctgaagccaccatactggagaggctgcgtacagtgtttcacgtagagagagggatacccaggaggcccacctgctccaaccccagctgcatgagtcttcccagcccaggcacagacatgtggataagatttaaacatttccagccccagccttcaagcaatcctagttgacactgaggggagccaacataagctgagctgagaaacagtctgcccagtctgcagattcatgagcaaaagaaatgttgggctgggtacagtggctcacgcctgtaatcccagtactttgggaggccgaggtgggtggatcagttgaggtcaggagtttgagaccagcctggccaacatggtgaagccctgtctctactaaaaattagccgagtgtggtggtgcgggcctgtaatcccagctactcaggtggctgaggcaggagaatggcttgaacccgggaggcggaggttgcagtgagccaagatcaggccactgcactccagcctggatgacgggatgagactctgtctcaaaaaaacgaaacaaaaattttttaagagaaatgtcatttgtttttgtttttgagacagggtctcactctgttgccctcactagagtgcagtagggatcacggctcactgaagtctctacctaccggctcaattgatcttcccaccacagcctcccaaatagctgggagaaatgtcctgtttttaatgaatttgtcttcctttttgtcttgtttgttttaatatctagtgatctaataaatttggatgatatcttttgactatc

SEQ ID NO: 145437 - DNA, 567 bp, Homo sapiens
tttcgtcccaggccgccgcgctgccgcccggcctccccgtcagcgcgccaccatgggcagtcccggttttcccctgtaaaagatggcggtgagggatcgctgcagcctttagaataatgactgtccgaaacatcgcctccatctgtaatatgggcaccaatgcctctgctctggaaaaagacattggtccagagcagtttccaatcaatgaacactatttcggattggtcaattttggaaacacatgctactgtaactccgtgcttcaggcattgtacttctgccgtccattccgggagaatgtgttggcatacaaggcccagcaaaagaagaaggaaaacttgctgacgtgcctggcggaaccttttccacagcattgccacacagaagaagaaggttggcgtcatcccaccaaagaagttcatttcaaggctgagaaaagagaatgatctctttgataactacatgcagcaggatgctcatgaatttttaaattatttgctaaacactattgcggacatccttcaggaggagaagaaacaggaaaaccaaaaaaaaaaaaaaaaa

SEQ ID NO: 145438 - DNA, 1691 bp, Homo sapiens
  misc_feature (1)...(1691): n = a,t,c or g
gactatgttaaaaaagttaaagttgtaacaacgtgctgaagggctggaaagatgtagtacctttggttaatccctgaataaggaacaaatgcccgtgcctgaactggcctaaaggggaggtttggcccagcccctgcaagcccattgaactgcccacatccagccaggattggaaaagataccttgaaaaagcttaagcagtgccggatacaggataaatacaactcacagggcccttacataagtgtcactgaaaataaacaacatagagttattttcctgaaacttggttttggtagaaaggtacgaaaataacttttcattgtccacaaaaacttcctcctcttgactttgtctgccctgagccttcttagcccctggaattgtaatggctaggtcagcacagcccagtgccaatgccagccaacaccagccgccacggacagcttctcttcaccctgtttcatgtcaaggatgattttaatatcgaggttactcacttttcaacattttcacttgcacaaacttaaagctatacttgcacccctaaaaggtgaatatctacccaattcttctgtccttgtatcagaagagaggcagagaagctgaaaatgggtagcaatgcttccagggacaagttaaaggaatgcattgtaagaagaccctggaagccatagaagtttagcaaacacctaaaacagaccgtagacattcataggaaatgtcattctaatacagccagacataatgaatggcattagcttttcaccccagtccttaaaaattaggcaactgttattcatattaaatcagacttacaaatctgattgcaggttaactctatgtcagactgaaataaaaccaagagtaatgctgcatgtaaaaacacaaaaggagagagtctaacacagccagaccattgagactcggagtgataccattagtgggccactggggaagaggaaagcctgcggagaagccgggtgacagtgctgtgaacattctccccacgtgaatcagtcccgcaggtctttcagttactctcttgactgatagaataaaatatatccagattctgaaatttttgatatatctgacgtcaggccatagaattcttcaatagcttgagcatctattttccaaaaactaaaagccactacctgaaagcactggaagatgaacaccagccagcccatggggaatccacactggggaggaggaaaaccgtacccaacgagttcatgttcattgtcagcaccctgcttacggtagagataaccttgacccttcctttcattgaccaatccgaaatagtgttcattgattggaaactgctctggaccaatgtctttttccagagcagaggcattggtgccctgatgctccgactggccattgaaactgttgctcatgactatgatgtcatagttattgacagcgcgcctaacctgggtatcggcacgattaatgtcgtatgtgctgctgatgtgctgattgttcccacgcctgctgagttgtttgactacacctccgcactgcagtttttcgatatgcttcgtgatctgctcaagaacgtggatcttaaagggttcgagcctgatgtacgtattttgcttaccaaatacagcaatagtaatggctctcagtccccgtggatggaggagcaaattcgggatgcctgggngaagcat

SEQ ID NO: 145439 - DNA, 441 bp, Homo sapiens
cccgtgccggaattcccgggtcgaaaatttcgtgagcatgtgggtctgcagtaccctgtggcgggtgcgaacccccgcccggcagtggcgggggctgctcccagcttctggctgtcacggacctgccgcctcctcctactccgcatccgccgagcctgcccgggtccgggcgcttgtctatgggcaccacggggatccagccaaggtcgtcgaaaccgtaattcctgggcacacatggcagctcagaaatgttgcctgacctactttgaggagatgatttgagcgaaacacccattctagcctggatgacatgaacatctccgtttggctttgtgcttagactcaagaacctggagctagctgctgtgagaggatcagatgtccgtgtgaagatgctggcggcccctatcaatccatctgacataaatatgatccaaggaa

SEQ ID NO: 145440 - DNA, 421 bp, Homo sapiens
gagcgagcatgtgggtctgcagtaccctgtggcgggtgcgaacccccgcccggcagtggcgggggctgctcccagcttctggctgtcacggacctgccgcctcctcctactccgcatccgccgagcctgcccgggtccgggcgcttgtctatgggcaccacggggatccagccaaggtcgtcgaaggtataaccagggaattgttccagaggtttccttggatattcctacaactgataacagctgtcatttcttcagcatctactgtactcaagaacctggagctagctgctgtgagaggatcagatgtccgtgtgaagatgctggcggcccctatcaatccatctgacataaatatgatccaaggaaactacggattccttcctgaactgcctgctgttggagggaacgaaggtgttgc

SEQ ID NO: 145441 - DNA, 611 bp, Homo sapiens
gatcctccaacttggccgagggcgagcagtgcgggtctgcagtaccctgtggcgggtgcgaacccccgcccgtgtagtggcggaggctgctcccagcttctggctgtcacggacctgccgcctcctcctactccgcatccgccgagcctgcccgggtccgggcgcttgtctatgggcaccacggggatccagccaaggtcgtcgaactcaagaacctggagctagctgctgtgagaggatcagatgtccgtgtgaagatgctggcggcccctatcaatccatctgacataaatatgatccaaggaaactacggactccttcctgaactgcctgctgttggagggaacgaaggtgttgcacaggtgggagcggagggcagcaatgtgaccgggctgaagccaggaaactgggtggttccagcaaaatgctggtttaagaacctggcggaaccgaggctgagttcatccgaaggaagcactgatccaagttccgagtgacatccctcttcagagcgctgccaccctgggtgtcaatccctgcacagcctacaggatgttgatggacttcgagcaactgcagccaggggattctgtcatccagaatgcatccaa

SEQ ID NO: 145442 - DNA, 409 bp, Homo sapiens
  misc_feature (1)...(409): n = a,t,c or g
ggcacgagataagaaccgtgagaaacatgttgcttccaggcttgatttcgatttttcgcnnnnnnnnnnnnnggaaacaaagtctaatttggccnnnnnnnnnnnnnnnnnnnnnnnnnnnnnnnnnnnnnnnnnnnnnnnnnnnnnnnnnnnnnncaattttcgggcctaacccccccaagaacctggaacaacgggccttgccacaaccccgggtaaattggggaattttaagaaaaaagggggtttccccatgtggcccagaagggcctgaacctttggaccccagaatcggcccccctgggccttgaaaagcccggaataacgggcttgacccattacccccagccgattttcccttttggataaaaaaggctttaccagggaaaaaatttttaacacaaaaggg

SEQ ID NO: 145443 - DNA, 974 bp, Homo sapiens
  misc_feature (1)...(974): n = a,t,c or g
ggcacgagtttcagtcaaactggttaggttaggtgacttactgagttctaaagtgacggattttaatttccaagttgtttctgacacggtgagagttgggttagaatttttatttcattccccaagtcannnnnnnnnnnnnnnnnnnnnnnnnnnnnnnnnnnnnnnnnnnnnnnnnnnnnnnnnnnnnnnnnnnnnnnnnnnnnnnnnnnnnnnnnnnnnnnnnnnnnnnnnnnnnnnnnnnnnnnnnnnnnnnnnnnnnnnnnnnnnnnnnnnnnnnnnnnnnnnnnnnnnnnnnnnnnnnnnnnnnnnnnnnnnnnnnnnnnnnnnnnnnnnnnnnnnnnnnnnnnnnnnnnnnnnnnnnnnnnnnnnnnnnnnnnnnnnnnnnnnnnnnnnnnnnnnnnnnnnnnnnnnnnnnnnnnnnnnnnnnnnnnnnnnnnnnnnnnnnncaatatggaataattgggttatccaactaatacctgctcatcttctaatattctatcctaccatctaaccttagagatattgatgtactctctcatcatgtgctatcatgatttctccttaaaatagaaagtaagccttcaaatggggaggggggtctctattgggtcctgaattaacggattttgatgccccttgatcttggtgctatcgattgggaggctcaatttcctttcttggaccctctgggcttgggtcaacactctttcttttaaaggtgaatgcttgttctcttgtttttggtttgtattttgtgtcaatggaatctatcctctcttttctcctctctccctccctcctctccttcctcctccctccccctctagtactcccccccctcctcttctttccccccccctccccccttcttccccccctccacttttctactcctcttcacctccctctcttcccttcttctctgataccgctctttttcctcctcatcccgccccccccagacatat

SEQ ID NO: 145444 - DNA, 419 bp, Homo sapiens
ctagatccagagctccctaattgtaaaagaggatttcatttactaaagtctccgatgctggtcatgatgacaaagctaagttctgactcatttagggaactggatacttgggtctacagaagggccaatgggagggccataattctgtttattttcaaattgtcttgttttcaccttgttagaatgaactctggaagcccagccagggacaatgcaccttcacagagattctgcactaatctgagcgaaggtctaaggtttggaatctccccctcatggagagaagctttgtatggctggcatgcttagacagtgattcctgcaacttgacctttaagctgggagaggtggagagccatgcctgttctccttccttgctatggaagttgctgacacaatatcttccgcctggggcttgg

SEQ ID NO: 145445 - DNA, 435 bp, Homo sapiens
cacaaagattctgcactaatctgagagaaggtctaaggttaggaatctccccctcatggagagaagctctgcatggctgccatgcttagacagtgatacctgcaacttgaccattaggctgggagagggggatagccatgcctgtactccttacttgctatggaatttgctgacacaatatcttgcgcctggtgctgggtgtagcctaagaacatacaactttcctgtactatcctgtgtgagcagctgtcaccttattgggggacaaatgcctgaaaattagggggcacttcaagtagatagctgctatttcctatatctggcttatatacatagattggcttttattaaaacaagtccaattatgcattttatcgtatcggacctaactgttagcataactatagtgctgccgactcgaaaactaccaccagg

SEQ ID NO: 145446 - DNA, 836 bp, Homo sapiens
  misc_feature (1)...(836): n = a,t,c or g
aggtgcncattgaaatgattcgcgctgcaggaattcggcacgaggcagtatgagagttgtaatggcccagactgttgagtgagggggagcaggggatcccaacggctttgcgctgcctttgcgcaccagcccggcgggcggccacgtcgcggcctggctggggtaggagagggcggtccccagtgcagttgggtgaactaccgttgcacacttggagtttctggtgtctttgcttggaacttgacctagctccgtggcagggggaactcggctagcggccccacagcccctgctgactcaaaacaactgagttgtaagacgttcatcgccgtgttatccttgaagtaaaagaatgaaactctggaaagcccaagccaagggacaactgcacctttcacaggagattctgccacttaatctggagttgaaggtcttaagggtttggaaatcttcccccttcatgggaagagaagctttggtatgggctgtccatgcttagacaggtgaattcctggcaactttgaaccttcaaggctggggagagggtgaaaaacccaggcctgttctccttccttgctatgggaattttggctgacacaatatcttcccgccctgggtgctggggcatatcctaaagaactttacaacttttcctgtaataatcctgtgtgagcaagttgtcaaccttatttggggggaaaatgcctgaaaattagggggcacttcaagtatgatagcttctatcttcctatatttgtcttatatacaagtatttgcttttatcaaaataattccgaataaagcgattttaaagtaaagaaaaaaaaaaaaaaaaa

SEQ ID NO: 145447 - DNA, 453 bp, Homo sapiens
ggcacgagggccgagcaggaggcgccatcatgggagtggacatccgccataacaaggaccgaatggttcggcgcaaggagcccaagagccaggatatctacctgaggctggtggtcaagttatacaggtttctggccagaagaaccaactccacattcaaccaggttgtgttgaagaggttgattatgagtcgcaccaaccggccgcctatgtcccttttccggatgatccggaagatgaagctttctggccgggaaaacaagacggtcgtggctgtggtgaccataactgatgatgtgcgtgttcaggaggtacccacactgatagtatgtgcactgcgcgtgaccattcgaggctactaaaactaaccctggatcctactctcttattaaaaagatttttggtgactatgatcatattgttgtgtgttctttaattagtgcgtcgcgagct

SEQ ID NO: 145448 - DNA, 525 bp, Homo sapiens
  misc_feature (1)...(525): n = a,t,c or g
gcagnaggcgccatcatgggagtggacatcgccattaacaaggaccgaagggttcggcgcaaggagcccaagagccaggatatctacctgaggctgttggtcaagttatacaggtttctggccagaagaaccaactccacattcaaccaggttgtgttgaagaggttgtttatgagtcgcaccaaccggccgcctctgtccctttcccggatgatccggaagatgaagcttcctggccgggaaaacaagacggccgtggttgtggggaccataactgatgatgtgcgggttcaggaggtacccaaactgaaggtatgtgcactgcgcgtgaccagccgggcccgcagccgcatcctcagggcagggggcaagatcctcactttcgaccagctggccctggactcccctacgtccgctccaagggccggaagttcgagcgtgccagaggccgacgggccagccgaggctacaaaaactaaccctggatcctactctcttattaaaaagatttttgctgacaaaaaa

SEQ ID NO: 145449 - DNA, 723 bp, Homo sapiens
gtgtgctgtgaattctgccgagcagagaggcgccatcatggtgagtggacatcttttcataacaaaggaccgaaaggttcgggcgcaaggagccccaagagccaggatatctacctgaggctgttggtcaagttatacaggtttctggccagaagaaccaactccacattcaaccaggttgtgttgaagagagttgtttatgagtccgcaccaacccggcccgcctctgtccctttccccggatgatcccggaagactgaagcttccctggcccgggaaaacaaagacgggccgtggttgtgggggaccataactgattgatgtgcgggttcaggaaggtacccaaaactgaaagggtatgttgcacttgcgccgttgaccaagccggggccccgcaagccgcaatcctcaagggcaggggggcaagattccttcacttttcgaccaagcttggcccttgggacttcccctaaagggcttgttggcacttgttcctggctcttccggttccctcggcaaaggggcccgagaaggtggtacccggcaattttcggcaaaggcccccagggaacccccgcacaagccacaccaaaaccctacgttccgctccaaggggccgaagttcgagcgtgccagaggcccgacgggccagcccgaggctacaaaaaactaaccctggatcctactctcttattaaaaaaatttttgcctgacaaaaaaaaa

SEQ ID NO: 145450 - DNA, 2563 bp, Homo sapiens
tttcgtgccggtacctcgggcaagatggctatcattagtatcgcttcccgcctccggggtccccgtcgttttctgagcggcttcgtggctggggctgtagtgggcgctgcgggagctgggctcgcggccctgcagttcttccggagacagggcgctgagggagcgttgacagggaagcagccggatggtaagtctgtgggcccggcctcccttcggtggcccagatttcgggctccgactcctacctggagtgtgaatggcagtccttgacggacagccttcaccgtttgctgggcccctagcctggcccttgggtgctgacctttattctcccggctcggcctcccttccccacctcgcgtctcgccagcttccctcatgtccttccttcccccgggcatcttcgttttctgcacagaaccacccccgccgcccgactttcttccccccagttactcatcgcgatatctatgttttaatgtctgtgttctctactaagattgttagctccataagacttgagactatgtctgttttggtctccatcatctaaccagcacagtacctggtacataattggcattcagtaagtatgaatgaaggaataaattaatacatgagttttagtagattagttaactgcccttctttcgtcattgttcagttgaagaatacctgctatccctccccacgtgtataaaaactcatgttgcaatgggtaccttatatttgacgaaaaaaaaaaaaaaaaattaacacgagctcatttcttgtactttgcggatgtgctaatttaacttgctcctttggatacttggcatctagcaagagaactacccccttggggggttgaggatttgagaaggcatcggggaggattatctcgaaactgactcactgctgaatgtgtgcttggtttctcccactaggaaaaacagtaccagttttactgtcatcttgcaacagcacacatatcagtgcttcagagatgatttggaaatttgatgtgaaagaataataagatcaagtctttattcaaaagttaatgcagtagctgcattttattcactgattataggcaaatcagtactttgcctactgtctgttttcttcatctcataagtaattgcaaaaatgagattttctggttgattagacttctgagccagtcctttgtaaatcacaccgctctccttttccttataatctttcattattaagagccactaattgtgtgtgtgtgttttttttgtctctgccccccccttttttttttttcatttttaggatctgcagaaaaggctgtcttggaacaatttggattccctttaactggaacagaggcaaggtgttacactaatcacgctttgtcttatgatcaggcaaagcgggtgcctaagatgggttctttgaacatattttccaaaaagcaagataaattgggtgatgcagacagaaagcattgtaaatttaagcctgatcccaatatccctacaaccttcagcgcctttaatgaaaattatgttggaagtgggtggtcacgaggacacatggctccagcaggaaataacaaattttcaagtaaagccatggctgaaaccttttacctttctaacattgtgcctcaggattttgataataattctggatattggaacagaatagaaatgtactgtcgagagctgacagaaaggtttgaagatgtttgggtggtatctgggcctttgaccttacctcagactagaggcgatggaaagaaaatagttagttaccaggtgattggcgaggacaacgtggcagtcccctcacacctttataaggtaatcctggcccgcagaagctcagtatctaccgaaccactggcgctaggggcctttgtggtacccaatgaagccatcggcttccagccccagttaactgaattccaagtgagcctccaggacctagagaagttgtcagtactggtgttttttcctcatttggatagaactagtgatatccggaatatctgctctgtggacacctgtaagctcctggatttccaggagttcaccttgtacttgagtacaagaaagattgaaggagcccgatcagtgctcagactggaaaagatcatggaaaacttgaagaatgcagagattgaaccagatgattactttatgagtcgctatgagaagaagctagaagaactcaaagctaaggagcagtcaggaacccagataagaaagccatcctagtttttatctcaagatgtgtcataccgtctgtaatgaagcaggcatgccctctttaggctaacatattttagtggctttgctttttgctttttaaaaagtttttctctttaagagatgtggtctcgccgtgtcatccaggctggagtgcggtggtggaatcatagctcactatagcctcaaacttctgggcttaagcaatcctcctgcctctgccccctgagcagctgggactacaggcacacaccatcaccctcagctactagtggctttgctttaaagaaacagtggaatcctaaatttatgactaaaaattcccccaaaagatg

SEQ ID NO: 145451 - DNA, 327 bp, Homo sapiens
ggcacgaggacaaagtcaaagaggagacatttcacagatacctcagccaggcaccatgaggcctatgaggtcaagaatggagagaagtttgagaaattaggaaaaaatattagcgtcagcacacaactcactacaaatcagacaaatcctagtggtcagatatcttatgaatgtggacaatgtggcagatatttcattcaaatggcagacttccaccgacatgagaaatgtcacactggtgaaaagacttttgaatgcatagagtgtggaaaatacttcgatataactcaggacttattaggcgtgtaaagttgagactcgtaaagg

SEQ ID NO: 145452 - DNA, 339 bp, Homo sapiens
  misc_feature (1)...(339): n = a,t,c or g
ggcacgagnnnnnnnnnnnnnnnnnnnnnnnnnnnnnnnnnnnnnnnnnnnnnnnnnnnnnnnnnnnnnnctcnnnnnnnnnncaaaaaaacaaaaaactatcaattgttgagttcaggaactttgcattttatattttccttcaccaaagtcattacaagnnnnnnnnnnnncccttccttcaagaaaaactaacttgggctaaaacttactaaaaatgttttaaggtgggtaaagtctataaacttaacagggaaaccttttatttggcacaaaatttctttgaccggaattgggcgacccagaaaatggttgtaaaaactcttttagagctaatcn

SEQ ID NO: 145453 - DNA, 553 bp, Homo sapiens
gagaacctatgaatgtgtgccatgcatggccagcctcctccgtgagctctgcatctgcagatttaaccaaccacgactgaacacgtacagattcctgtcatgattctctaaataatacagcatgaccaccatctacacaggatattgcagtaggtattacaagtcatccaggatgtgcatagcttatatgcagatactacaccattttctatcagggacttgcacatccatgggcaggaggttgagtcctggaaccaatcacccatggattgtaaggaataactgtactattttaactactgttcaagttcagatttttcacttcagcctgagaggtactgtttatttaattgaaggattttcgatcatcattatattccaataacttgggacacagtaggcctttaaggggttatcaaaataactagttctttgcagtcttttttttttttttgagatggaatcttgctctgtcacttgggctggagtgcagtggcacaatctcagcccactgcaatctctggcctgggtggcagagcgagactacatctca

SEQ ID NO: 145454 - DNA, 340 bp, Homo sapiens
  misc_feature (1)...(340): n = a,t,c or g
tggcacgagnnnnnnnnnnnnnnnnnnnnnnnnnnnnnnnnnnnnnnnnnnnnnnnnnnnnnnnnnnnnnnnnnnnnnnnnnnnnnnnnnnnnnnnnnnnnnnatatattttggatactagttcctaaccacagatatgatttgcaaaacattaaaataaattatatgctgtgtttctattcctactaggtcagctatcacattgaaatgagcttctttgaagtatataatgaaaaaattcacgaccttctggtttgtaaagatgaaaatgggcagagaaagcaaccagtaagattaaaacaatttattatttgttttgaatttctgttcttataaatgg

SEQ ID NO: 145455 - DNA, 435 bp, Homo sapiens
agcggctgctgttggttgggggccgtcccgctcctaaggcaggaagatggtggccgcaaagaagacggtgagtgaggcgggccaggcccggaagacgattcacgtggagagatgtcttggccagggcgggcagatgtgagcccacgggggtgacagcatgcctgctggcatttggagggccccagaaggaatcccagtggccctctcaatgacttggggtcctcgacttcggaagtttaaggggctcggcttcaaaaagctgggtccggttttgaggcggttgcaggcgaggcccttaggaaatctgaaatagagtactatgctatgttggctaaaactggtgtccatcactacagtggcaataatattgaactgggcacagcatgcggaaaatactacagagtgtgcacactggctatcattgatccaggtgac

SEQ ID NO: 145456 - DNA, 588 bp, Homo sapiens
gttccccggccatcttagcggatgctgttgggttgggggcccgtccccgctccctaaggcagggaagatgggtggcccgcaaaagaagacgaaaaaagtcgctggaagccgatcaacctcctagggctcccaactccgtttatgaaaaagtgggaaagtacgcccctgggggtacaagcgagactctgaagatgatcagacaaaggcaaagcgaaaattggtcattcctcgctaacaactgcccaagctttgaggaactctgaaatagagtactatgctatgttggaaaaaaactggtgtccatcactacaggtgccaataatattgaactgggcacagccatgcgggaaaatacttacagagtgttgcacactgggctattcattgatccagggtgacttctggacattcattaggaagcatgccagaacgagactggtgaaaaggtaaaccttttcvacctacaaaatgttcagcctgcaaagccttataccctgcaaaattttcctttaataaaaattgcgtgtgtttaaaccagcaaagaagaataagaagatttggcccccagtagggggtttataaagcgag

SEQ ID NO: 145457 - DNA, 301 bp, Homo sapiens
ggagatgaccttgacagtatagtcaacagccagttcatcagcacagtggtcacattgcacccacaggaagaagcagagcagggagaacagttctgtcttcatggaggtgaccttgagaccctgaacaagaataacttgatccctgatgacagagccaacttctacccattgcagcagaccaatgtgtacacgactacttactacccaagccccctgaacaaacacagcttccggcccgaggcctcacctggacaacggctttttgaagtgcatcacctgaccgggcagatagttcaccggg

SEQ ID NO: 145458 - DNA, 4257 bp, Homo sapiens
gttctgtaatgagaacacgccttgcccggtgcccatcttctgggcttcctggggctcctggagcaagtgcagcagcaactgtggagggggcatgcagtcgcggcgtcgggcctgcgagaacggcaactcctgcctgggctgcggcgtggagttcaagacgtgcaaccccgagggctgccccgaagtgcggcgcaacaccccctggacgccgtggctgcccgtgaacgtgacgcagggcggggcacggcaggagcagcggttccgcttcacctgccgcgcgccccttgcagacccgcacggcctgcagttcggcaggagaaggaccgagacgaggacctgtcccgcggacggctccggctcctgcgacaccgacggtaccccgcgcccggcgccccctccttcctctctcccagccccggagcgcgggagcacctccccgcacacggtgagcgggggctgggccgcctggggcccgtggtcgtcctgctcccgggactgcgagctgggcttccgcgtccgcaagagaacgtgcactaacccggagccccgcaacgggggcctgccctgcgtgggcgatgctgccgagtaccaggactgcaacccccaggcttgcccaggcctacccaggaaccccaatgcccagttcggggtgcttggtcctgctggacctcatggtctccatgctcagcttcctgtggtgggggtcactatcaacgcacccgttcctgcaccagccccgcaccctccccagggcccccctcctctcgtctccgcccctgacaccctgtccactggtcttcctgcagtcatcctgccagcctccagcatggaggaggccacagactgtgcagggttcaatctcatccacttggtggccacgggcatctcctgcttcttgggctctgggctcctgaccctagcagtgtacctgtcttgccagcactgccagcgtcagtcccaggagtccacactggtccatcctgccacccccaaccatttgcactacaagggcggaggcaccccgaagaatgaaaagtacacacccatggaattcaagagccaacttctacccattgcagcagaccaatgtgtacacgactacttactacccaagccccctgaacaaacacagcttccggcccgaggcctcacctggacaacggtgcttccccaacagctgataccgccgtcctggggacttgggcttcttgccttcataaggcacagagcagatggagatgggacagtggagccagtttggttttctccctctgcactaggccaagaacttgctgccttgcctgtggggggtcccatccggcttcagagagctctggctggcattgaccatgggggaaagggctggtttcaggctgacatatgcccgcaggattcccagcagaatctaattgtaggtcaggctgtaaaacctgccatcctagtggtagaggaggcggaagctcttggggagtggagggaggagtgcttgaagcttaaaggttcctggaagcaaggaggaggaaagaacatgcctgaaatctttcctgcttacctgggacaactggaatggcagtgtcatcagcacagtggagccccatccgagagctcaggaagtatacagaaagcagatggaggaaccaggcatccagtagaatggatgtgggccaaacttaagcatccaagtgatttcagaaagaaccggataccagagaaaccaggaatgagaaagaacttgtcttcagcggtttggcgatctttcacagtagttgggaaacaggagaaccccctcttcaatggaatcaaggctgacccctttggtgtgctcctctgctcagagactcgaggaccctttgctcatgcggtcctcgcagagccgcccaccgccacagagtgggcctccagtgaggacacgcgccgctcctgccaaagcaaagggaagactgaggaggagtgtcagaactacgtgcgagtcctgatcgtcgccggccggaaggtgttcatgtgtggaaccaatgccttttcccccatgtgcaccagcagacaggtggggaacctcagccggactattgagaagatcaatggtgtggcccgctgcccctatgacccacgccacaactccacagctgtcatctcctcccagggggagctctatgcagccacggtcatcgacttctcaggtcgggaccctgccatctaccgcagcctgggcagtgggccaccgcttcgcactgcccaatataactccaagtggcttaatgagccaaacttcgtggcagcctatgatattgggctgtttgcatacttcttcctgcgggagaacgcagtggagcacgactgtggacgcaccgtgtactctcgcgtggcccgcgtgtgcaagaatgacgtggggggccgattcctgctggaggacacatggaccacattcatgaaggcccggctcaactgctcccgcccgggcgaggtccccttctactataacgagctgcagagtgccttccacttgccggagcaggacctcatctatggagttttcacaaccaacgtaaacagcatcgcggcttctgctgtctgcgccttcaacctcagtgctatctcccaggctttcaatggcccatttcgctaccaggagaaccccagggctgcctggctccccatagccaaccccatccccaatttccagtgtggcaccctgcctgagaccggtcccaacgagaacctgacggagcgcagcctgcaggacgcgcagcgcctcttcctgatgagcgaggccgtgcagccggtgacacccgagccctgtgtcacccaggacagcgtgcgcttctcacacctcgtggtggacctggtgcaggctaaagacacgctctaccatgtactctacattggcaccgagtcgggcaccatcctgaaggcgctgtccacggcgagccgcagcctccacggctgctacctggaggagctgcacgtgctgccccccgggcgccgcgagcccctgcgcagcctgcgcatcctgcacagcgcccgcgcgctcttcgtggggctgagagacggcgtcctgcgggtcccactggagaggtgcgccgcctaccgcagccagggggcatgcctgggggcccgggacccgtactgtggctgggacgggaagcagcaacgttgcagcacactcgaggacagctccaacatgagcctctggacccagaacatcaccgcctgtcctgtgcggaatgtgacacgggatgggggcttcggcccatggtcaccatggcaaccatgtgagcacttggatggggacaactcaggctcttgcctgtgtcgagctcgatcctgtgattcccctcgaccccgctgtgggggccttgactgcctggggccagccatccacatcgccaactgctccaggtctccggataactgtgctcctgacatccttccttatggttttgggaactggtctaagatgcatacctatatcagacttaatccttaaaagaagattaattgatggaggacagatgttaaatggattggcaggtccaactgtaatgaatgcagcaccatttctctctacgacgtggttttctgcagatgaaagggccacagccacagctattgcatcaatgctcagttatcttgggggagcatgtgcactttttagttggaccacttgttgttccagctcccaatgggacatcacctcttcttgctgcagagggcagcagaggcgcatattaaagatcgcatagaggctgtgttatatgcagaatttggagttgtctgcttaatattttctgcaacactaggcttatttcccaccccgacctcctcttcctcccagtgttgctggcagctaggccagcggctgagttatcggagaagcgtttgtagattattaagcaattttcgatttttgatgattgctttagcatatgccataccacttggtgtatttgctggctggtctggagttctggacttaattttaacaccagcgcatgtcagccaagtagatgctggctggattggattttggtcccatagttggaggctgtgttgttggaatagctatggcaaggtttgcagattttatcaggggtatgctgaaactaattcttctcctccctgttttcgggagctacactgtcatccacgtggttcaccctgacctgtttgaacagcatcacacacctacctttaaccacagtgacattgtatgcctcctgtattctcctgggagtgttcttgaatagcagcgtgcctata

SEQ ID NO: 145459 - DNA, 376 bp, Homo sapiens
ggctgaggatttttggtccgcacgctcctgctcctgagtcaccgctgttcgctctcgccgaggaacaagtcggtcaggaagcccgcgcgcaacagccatggtgaggcggcagtcggcggcgggcggcgcaacgcagggctcgggcgccggggggaccccggtttcgagttcgtgctcctgagggcagatgccggggcgtgtaggggcggaaaggcgctcctgaaatggcttttaaggataccggaaaaacacccgtggagccggagggtgcaattcaccgaattcgaatcaccctaacaagccgcaaacgtaaatcctttgaaaaggtgtgtgctgacttgataagagggcgcaaagaaaagatctcaaagtgaag

SEQ ID NO: 145460 - DNA, 632 bp, Homo sapiens
cgtggacgcgtgggcgcggacgtaagggctgaagatttttggtccgcacgctcctggtgctgactcaccgctgttcgctctcgccgaggaacaagtcggtcatgaagcccgcgcgcaacagccatggtgaggcggcagtcggcggcgggcggcgcaacgcagggctcgggcgccggggggaccccggtttcaagatcgtgctcctgatggcagatgccggggcgtgtaggggcggaaaggcgctcctgaaatggtggggaaacgcgggaagcttccggaagctgcctttctccagaagtggcagaccatttttggcttattgttctttttcatgtatctaataataggcttttaaggataccggaaaaacacccgtggaagccggagttggcaattcaccgaatttcgaatcaccctaacaagccagcaacgtaaaatccttggaaaagggtcagtgcattcgttatgcgggggggagggggaattgggcgaaaagcgacgagctttactcgttaatgttagtgtagaaggtggactgcaagaactaaagtgacaagttacttaaaaaagtaaagcgtggcttaaaattgcttttactgtcatacagctggcgatgaggaggtacctattgg

SEQ ID NO: 145461 - DNA, 584 bp, Homo sapiens
ttgaggaagacgcggtcgtaagggcttgaggattttttbggtccgcacgctccttgctccatgactcaccgcatgttcgctctcgccgaggaacaaagtcggtcaggaagcccgcgcgcaacaggccattggcttttaaggatacccggaaaaacacccgtggagccggaggtgggcaattcacccgaattcgaatcacccctaacaaagccgcaaacgtaaaattccttggaaaaggttgtgtgcttgactttgataaggagggcgcaaaaggaaaagaattttcaaagttgaaagggaccagtttcgaattgccttacccaagatttttgaggattcacttccaaggaaaaactccttgtgggttgaaggtttttaaggacgtgggggttcgttttcccagatggagaattcacaagccgactcatttgacttgcacagtccttcttgagattgttaagcagattactttccatcagtatttgagcccaggagttgaggtggaagttcaccatttgcagatgctttaagtcaactatttttaataaatttgatgaccagttgttaaaaaaaaaaaaaaaaaa

SEQ ID NO: 145462 - DNA, 345 bp, Homo sapiens
ggcacgaggctgaccagttggcgacatggtgggacccgtgctggagacggctcacgtgttttgctgcccaaaccgggtgcggggagtcctgaactggagctctggccccagaggacttctggcctttggcacgtcctgctccgtggtgctctatgaccccctgaaaagggttgttgttaccaacttgaatggtcacaccgtccgagtcaattgcatacagtggatttgtaaacaggatggctccccttctactgaattagtttctggaggatctgataatcaagtgattcactgggaaatagaggataatcagcttttaaaagcagtgcatcttcaaggccatga

SEQ ID NO: 145463 - DNA, 492 bp, Homo sapiens; identical to SEQ ID NO: 145434

SEQ ID NO: 145464 - DNA, 719 bp, Homo sapiens
gacgtggaattccggcttccaggtgggcgcgcaaggccgtggtcctgctttgtgcctctgacctgctgctgttgctgctactgctaccaccggctggggtctgggcgggccgaaggctcgcccgggacgcccggacgagtttaccccacctccccggaagaagaagaaggatattcgcgattccaatgatgcagacatggcgcgtcttctggagcacctgggagaaacacgatgacatttgaagaaggagatcttccagagcacaagagaccttcagcacctgtcgacttctcaaagatagacccaagcaagcctgaaagcatattgaaaatgacgaaaaaagggaagacttctcatgatgtttgtcactgtatcaggaagccctactgagaaggagacagaggaaattacgagcctctggcagggccagccttttcaatgccaactatgacgtccagaggttcattgtgggatcagaccgtgctatcttcatgcttcgcgatgggagctacgcctgggagatcaaggactttttggtcggtcaagacaggtgtgctgatgtaactctggagggccaggtgtaccccggcaaaggaggaggaagcaaagagaaaaataaaacaaagcaagacaagggcaaaaaaaagaaggaaggagatctgaaatctcggtcttccaaggaagaaaatcgagctgggaataaaagagaagacctgtga

SEQ ID NO: 145465 - DNA, 349 bp, Homo sapiens
ggcacgagggaaaaaatacaaagtcccgttccaaagcaggagcctaggcaggcgaaagggtccccgaacctgagcctgatttgcggccacttcgggacctgaaaggaccacaatgaacctgcaagatccaaagatgactggagccctcctttcgaatgctgtgggctacaggcaaaaacgtgagggcttcctgcccagtcggggtcctgatcctggaagcaagccggcccagttcatggatttcgaggggaagacatcgttaggaatgccagtgttcaacctcagcaacgccatcatggccatggacatcctggggctggcctatgccatggcccacacgggggcaatt

SEQ ID NO: 145466 - DNA, 738 bp, Homo sapiens
actgtatttcaaccaagtcatatgtggccctacggaaaccatggaacacggggtatatagcaaagttatgtgaatataccgaaaagacgttcccatctgcctttccctcctttaagtccctgagtacactaggctcaaatctcattccatcagcagacagatgacacggatatcgaaggcccaggcacaagttaaagagtattttcaataactggtaacgcagtaagctactgctacctgtggcccaaactctaaacttatatattaaagtcctttatttagagcagaaaagccggccttgacctccactgtctcagaaccgcgagaaggagccccggacgccgcagcggaggcagcacgagcacccctcccgccgagcgcaagagcgggccctttcggcttccggggtcactggaaggcaaaatgtgtcacaaatacggccagtacaaaccaacgcaacaaactattccacaaaaaaactgaaaaccagcgcggggaggtaaggacacactcttcagaaaagcgaatccgggctcttcgcgcttcctgcagcgccagccgcccctgcagtgccggaatcccccgaaggcacgccagaagctaagccggccaccccgaccgcacccaaggcccgggaggaagcgccgaggtccccgagaatgcctagggaaaccagctacgcttacaagccagctacgcagcccccgagccccgggccgcactcgcccaggccagccc

SEQ ID NO: 145467 - DNA, 637 bp, Homo sapiens; identical to SEQ ID NO: 144817
  misc_feature (1)...(637): n = a,t,c or g

SEQ ID NO: 145468 - DNA, 773 bp, Homo sapiens
  misc_feature (1)...(773): n = a,t,c or g
gacactcgctttttggaacgtctgaggttatcaataagctcctagtccagacgcccatgggtcatttcacagaggaggacaaggctactatcacaagcctgtggggcaaaggtgaatgtggaaagatgctggaggagaaaccctgggaaggctcctggttgtctacccatggacccagaggttctttgaccagctttggcaacctgtcctctgcctctgccatccatgggcaacccccaaagtcaaggcacatggcaagaaggtgctgacttccttgggagatgccataaagcacctggatgatctcaaggggcacctttgcccagctgacgtgaactgcacttgtgacaaagctgcatgtggatcctgagaacttcaagctcctgggggaaatgttgctggtgaccgtttttggcaatcccatttcgggcaaaagaattcacccctgaaggttgcagggcttcctggcaaaagcagaagatggcagaagatggtgacttgcagtggccaagtggccctgttcctccagataccactgaagcctcttggcccatgaattcagaagctttcaaggataaggcttttattcttgcaagcaattacaaataataaatctatttctgctaagagatcaccaaannnnnatnntnnnnnnncccccggattttttatttagcgggccgcacctttttccccttttagggggggtaaatttatattgggccttgggccggggttttcaaaagcggggggannnnnnnnnnaaagagccc

SEQ ID NO: 145469 - DNA, 810 bp, Homo sapiens
cctgtctccaaactattataaagagacatccctgttggccgaggttccgaaaacagttcagttctctgagggaaggcagtgccagcagctacatgcttagcttggctctctcctgtatagttcttagtattagaggatggctttggcttatcagaaaggagttcagggaggggtttccagagaacaagctccatggaaggacggctcatagactcaatcattttctttgtaaaaacttcatcaaattccctcttcaaacctgttttcatggtatcagaaaggacaagactggggagatggttaacatttctgtcagcttcaacttcttcatcttcatcaattatcctgtcctcaatctcctgaagcttccttcgggcaacttcacactgtggttactccagttgtctgatccatttcttcacaaataacatctaatatcccaggtatggaaaggccactaacactgggatttactccatgcccctctacatcctgatgtgcacaaagaatccagtcattaggaccagcacagagctctgcttcagttatccttttctttcttactggacaatcatcatcctcctcctcctctcgcttgtgtttctttttacagtgaacagaaacacgtccgcgcgccgcactcccagcgggactgctagggactgcgcgaggtcccggccgcggggccaactcggcgccgtcagcccccggcgggaaggcccggccggggaaggccggctgcggcggctgcaggaagtccgagccgccgctcagagggaggccgctgaagggccggccgagcgcagccat

SEQ ID NO: 145470 - DNA, 1089 bp, Homo sapiens; identical to SEQ ID NO: 123102

SEQ ID NO: 145471 - DNA, 959 bp, Homo sapiens
cagtaacagagactgcgcagggggcctgagcgggagagtcctggcgagggcgctggccgagaggtgctcggcttgtagcaggtcccgcactccagcctctcgctgccagggtttgctctctgcttgtcctgggctgaggtgtccatgacggagtcatccaaggaggaaaaaatctgttccgggtgagcccaggccgccccggatatgcgatggctgaggagcagacaccagggaccacactgaggttgggtttcagaccaagacactggattctcctagttaagataaagagctttgggtgcctgacagtgaaaatggtgtaatctgcgttaacagttcacagcttgaaggcatgacaattaaagaacacacatggacttgtggcacatggaaatgtgcgcacagaaaaaggaaatctataattcttttaaagtaggaaggcattcttccttgccaaaatgggtacattctgttcggttatcaagtttgaaaatctacaagaattaaagagactgtgtcactggggtcccatcatagcccttggtgttatagcaatatgttctaccatggccatgattgactctgtgttgtggtattggcccttacatacaactggaggaagtgtgaatttcatcatgttgataaattggactgtcatgattctttataattacttcaatgccatgtttgtcggtccgggctttgtccctctggggtggaaaccggtaagaaagattctgtaagacaatgaactttaatgataatcgtatatttggtttttgccttatctactaaccaataataccaaacacagcctactgtttgtcctcacagagactaagtatattactctaatcactgatcatttaggctcggagactttatttcatatctgtttgaacacattgatccaaaatagcattttccaaagcaattttattgaatatttgctctgcatt

SEQ ID NO: 145472 - DNA, 352 bp, Homo sapiens
  misc_feature (1)...(352): n = a,t,c or g
nnnnnnnnnnnnnnnnnnnnnnnnnnnnnnnnnnnnnnnnnnnnnnnnnnnnnnnnnnnnnnnnnnnnnnnnnnnnnnnnnnnnnnnnnnnnnnnnnnnnnnnnnnnnnnnnnnnnnnnnnnngggagacggacttttgatttgtggccaaggctgaagggcaatggcccatttgtaggttaactgcaacatttggccattaggttaagggaatggtcccggctgatcctgaatggcaagaggatttcagggttcgtgcccaatgacgggtgcatgaactgtattgatgaaaatggtggagttctgaccgctggatccggtcgcataggtaatgctgtggctgatattcctg

SEQ ID NO: 145473 - DNA, 394 bp, Homo sapiens
ctttgctattgatgtagttaccccagctgaaaccttccatggagactgctaaaatgaaaacaaatttagatgtattataattctcaaatcttttatttataagaaggttatcattgttaaaatgtgtgaaaggacataaaattaatttatcccatttaaagaacgttttctttatgtaaagatcaaataacttctctaaatagcatgagctttggcttatatcatatttgcaaacaaacaggagtttctttatgtttttgagactgagtctccctctgacacctaggctggagtgcagtggcatgatcttggctcactggaacttctgcttcccaggttcaagtgattctcctgcctcagcctcccgagcatctgggactacaggtgcatgcca

SEQ ID NO: 145474 - DNA, 2289 bp, Homo sapiens
atggacttgctgggccgggtaggctctgactgggccttgcagagcagctgccttactgacccagagctctgggggtgggagggaacccctcgtttcctggcggcagctgcccaaggctttggtgggccggtattgaaagcccaggcctgcagcttgggggcaggcattgcacccaccgaactccctagacctgttcgctggtccttactcttcctggctgtcagatccaactaccaggctctgtggccacagtctcctgctgggctgcccctggtgccccagccagagacccccagaggagctaacattccttctgtacctgtagttcatgcgggagatgacaggggctggcacatgacagtggagcagaaatttggcctgttttctgctgagataaaggaagcagaccccctggctgcctcggaagcaagtcaacccaaaccctgtccccccgaagtgaccccccactacatctggatcgacgtacgtgcctgttcccccacgaaggctgtggggtgctccacctggggggccaggactgttcctggggtgggggtagccgagcccaaggccttcggcaagctcggccagtcagcccagaacccctcctcagctgtctctgccggccccaggttcctggtgcagcggtttgagatcgccaagtactgcagctctgaccaagtggagatcttctccagcctgctgcagcgctccatgtccctgaacatcggcagggccaaggggagcatgaaccggcacgtggcggccatcgggccccgcttcaagctgctgaccctggggctgtccctcctgcatgccgatgtggttccaaatgcaaccatccgcaatgtgcttcgcgagaagatctactccactgcctttgactacttcagctgtcccccaaagtttcctactcaaggagagaagcggctgcgtgaagacataagcatcatgattaaattttggaccgccatgttctcagataagaagtacctgaccgccagccagcttgttcccccagctgacatcggcgacctcctggagcagttagtagaggagaacacaggctccttgtcgggcccagcgaaggacttttaccagcgggagtttgatttctttaacaagatcaccaacgtgtcggctatcatcaagccctaccctaaaggcgacgagagaaagaaggcttgtctgtcggccctgtctgaagtgacggtgcagccaggctgctccctgcccagcaaccccgaagccattgtgctggacgtcgactacaagtctgggaccccgatgcagagtgctgcaaaagccccatatctggccaagttcaaggtgaagcgatgtggagttagtgaacttgaaaaagaaggtctgcggtgccgctcagactctgaggatgagtgcagcacgcaggaggccgacggccagaagatctcctggcaggcagccatcttcaaactgggagacgactgccggcaggacatgctggccctgcagatcatcgacctcttcaagaacatcttccagctggtcggcctggacctctttgtttttccctaccgcgtggtggccactgcccctgggtgcggggtgatcgagtgcatccccgactgcacctcccgggaccagctgggccgccagacagacttcggcatgtacgactacttcacacgccagtacggggatgagtccactctggccttccagcaggcccgctacaacttcatccgaagcatggccgcctacagcctcctgctgttcctgctgcagatcaaggacagacacaacggcaacattatgctggacaagaagggccatatcatccacattgactttggcttcatgtttgaaagctcgccgggcggcaatctcggctgggaacccgacatcaagctgacggatgagatggtgatgatcatggggggcaagatggaggccacacccttcaagtggttcatggagatgtgtgtccgaggctacctggctgtgcgcccttgcctgggcagtacgggtgaccgagtgcagcagatcgaaagttgcctcggggatgtgcaagatgtggcaggcgaggccctacatggatgtggtcgtctccctggtcactatcatgttggacacgggcctgccctgttttcgcggccaatcaagttcttgaagcacaggtttagccccaacatgactgagcgcgaggctgcaaatttcatcatgaaggtcatccagagctgcttcctcagcaacaggagccggacctacaacatgatccagtactatcagaatgacatcccctactga

SEQ ID NO: 145475 - DNA, 165 bp, Homo sapiens
cccttgcctgggcagtacgggtgaccgagtgcagcagatcgaaagttgcctcggggatgtgcaagatgtggcaggcgaggccctacatggatgtggtcgtctccctggtcactatcatgttggacacgggcctgccctgttttcgcggccaatcaagttcttgaa

SEQ ID NO: 145476 - DNA, 5343 bp, Homo sapiens
atgcttccagactccctggccgtgcagagcagcttcctagctgttttcccagtgccagtcccattccttgggtcttccccttataatactgttgaaatactcacccgacgactgccacccatcaaagaagctaagcctcggttacagaagctcttccgagacttctggctgtattccgttctgatgggattcgctgtggagggctcaggactctggccagaagaatggtacgagggggtctgtgaaatagccactaagtcccccttgctcacctttcccagcaaggagccactgcggtccgtcctccagtataactcagccatgaagaatgacacggtcacccccgctgagctgagtgagctccgcagcactatcatcaacctgctggacccccctcccgaggtgtccgcactcatcaacaagctggacttcgccatgtccacctacctcctctctgtgtaccggctggagtacatgagggtactgcgttcaacagatcctgatcgcttccaggtaatgttctgctactttgaggataaagctattcagaaagacaaatctgggatgatgcagtgtgtgattgcagtcgcggacaaagtattcgatgccttcctgaacatgatggcggataaagccaagaccaaggagaacgaggaggagctggagcggcacgctcagttcctgttggtgaacttcaaccacatccacaagaggataaggagggtggcagacaagtatctatctggtctggtggataagtttccccacttgctctggagcgggactgtgctgaagaccatgctggacatcctgcagaccctgtcactgtcactgagcgctgatattcacaaggatcagccttactatgacatccccgacgccccctaccggatcacggttcctgacacgtacgaagcccgtgagagcattgtgaaggacttcgctgcacgctgtgggatgatcctccaggaggccatgaagtgggcacctaccgtcaccaagtcccacctgcaggaatatctgaacaaacatcagaactgggtatcgggactgtcccagcacacggggctggccatggccactgagagcatccttcactttgctggctacaacaagcagaacacaactcttggggcaactcagctgagcgagcgcccggcctgtgtgaagaaagactactccaacttcatggcatccctgaatctgcgcaaccgctacgcgggcgaggtgtatggaatgattcggttctcaggcaccacaggccagatgtctgacctgaacaaaatgatggtccaggatctacattcagctttagaccgcagtcatcctcagcactacacgcaggccatgttcaagctgaccgcaatgctcattagcagtaaagattgtgacccgcagctccttcatcatctgtgctggggtcccctccggatgttcaatgagcatggcatggagacggccctggcctgctgggagtggctgctggctggcaaggatggagtggaagtgccgcctgaccagcctgctcccatcaaagatatgcagaagggcctgtggaagtcacgcttcagcctgcagggctctgattcctgggcggggctcctcacctgcatggtggacatcattacaagagcacctgcatcctactccagacaccgctacactggtcgcccatccgccatcactgttgatgccagggtggttcttcccttcactgtagatgccagtgtggcccctccctttactgtagctgccagtgtggcccctccctttactgtagatgtcagcgaggtccctctcatcactgtagatgccagtgaggtccctccctttactgtagatgccagtgtgacccttcccttcactgtagatgccagcgaggtccctccattcactgtagatgccagcgaggtccctccattcactgtagatgccagcgaggtccctccctttactgtagatgccagcaaggtccctcccttcactgtagatgccagcatggcccttcccttcactgtagatgccagcgaggtccttctgtctgctcagacgtctttgactccctcttatgcacatcccacagatgactctcagcacatcccatcaccttcacctttgaggtttatccaggatctgacaagtcccagcatcccagctgctgccctctggcctggcctcctgctccccaaccccaggcatcttccccttctccacatgcggttggcgcaagccaggggggaatcagagcccccctacagactcgaaggccgcgtcatgcattccctcttctcagatggccgtgccttgcgcctcactcctgcgtctcctccagggctcatctcagatatcccctccttgccagggctctccctggccacctgctcagcatcccacagaggggtcttcccgctcacagccacagagggttatcagggttatagagaagagtcacctacccagtgcctgtcagggcatcagttcatgcgggagatggcaggggcctggcacatgacggtggagcagaaatttggcctgttttctgctgagataaaggaagcagaccccctggctgcctcggaagcaagtcaacccaaaccctgtccccccgaagtgaccccccactacatctggatcgacgtacgtgcctgttcccccacgaaggctgtggggtgctccacctggggggccaggactgttcctggggtgggggtagccgagcccaaggccttcggcaagctcggccagtcagcccagaacccctcctcagctgtctctgccggccccaggttcctggtgcagcggtttgagatcgccaagtactgcagctctgaccaagtggagatcttctccagcctgctgcagcgctccatgtccctgaacatcggcggggccaaggggagcatgaaccggcacgtggcggccatcgggccccgcttcaagctgctgaccctggggctgtccctcctgcatgccgatgtggttccaaatgcaaccatccgcaatgtgcttcgcgagaagatctactccactgcctttgactacttcagctgtcccccaaagttccctactcaaggagagaagcggctgcgtgaagacataagcatcatgattaaattttggaccgccatgttctcagataagaagtacctgaccgccagccagcttgttcccccagataatcaggacacccggagcaacctggacataactgtcggctctcggcaacaagccacccaaggctggatcaacacataccccctgtccagcggcatgtccaccatctccaagaaatcaggcatgtctaagaaaaccaaccggggctcccagctgcacaaatactacatgaagcgcaggacgctgctgctgtccctgctggccactgagatcgagcgtctcatcacatggtacaacccgctgtcagccccggaactggaactagaccaggccggagagaacagcgtggccaactggagatctaagtacatcagcctgagtgagaagcagtggaaggacaacgtgaacctcgcctggagcatctctccctacctagccgtgcagctgcctgccaggtttaagaacacagaagccattgggaacgaagtgacccgtctcgttcggttggacccgggagccgttagtgatgtgcctgaagcaatcaagttcctggtcacctggcacaccatcgacgccgatgctccagagctcagccatgtgctgtgctgggcgcccacggacccacccacaggcctctcctacttctccagcatgtacccgccgcaccctctcacggcgcagtacggggtgaaagtcctgcggtccttccctccggacgccatcctcttctacatcccccagattgtgcaggccctcaggtacgacaagatgggctatgtgcgggagtatattctgtgggcagcgtctaaatcccagcttctggcacaccagttcatctggaacatgaagactaacatttatctagatgaagagggccaccagaaagacccacacaggggagcaggacccctccttcatgacacctttgctaacttgctgtccgatgccaccctgcactcccaagtgcgagtgagacccttctgctccagtggctgcttctgcagagtctccatggtcaacacaactgtgactgcatctgacatcggcgacctcctggatcagttggtagaggagatcacaggctccttgtccggcccagcgaaggacttttaccagcgggagtttgatttctttaacaagatcaccaacgtgtcggctatcatcaagccctaccctaaaggcgacgagagaaagaaggcttgtctgtcggccctgtctgaagtgaaggtgcagccgggctgctacctgcccagcaaccctgaggccattgtgctggacatcgactacaagtctgggaccccgatgcagagtgctgcaaaagccccatatctggccaagttcaaggtgaagcgatgtggagttagtgaacttgaaaaagaaggtctgcggtgccgctcagactccgaggatgagtgcagcacgcaggaggccgacggccagaagatctcctggcaggcagccatcttcaaggtgggagacgactgccggcaggacatgctggccctgcagatcatcgacctcttcaagaacatcttccagctggtcggcctggacctctttgtttttccctaccgcgtggtggccactgcccctgggtgcggggtgatcgagtgcatccccgactgcacctcccgggaccagctgggccgccagacagacttcggcatgtacgactacttcacacgccagtacggggatgagtccactctggccttccagcaggcccgctacaacttcatccgaagcatggccgcctacagcctcctgctgttcctgctgcagatcaaggacagacacaacggcaacattatgctggacaagaagggtcatatcatccacatcgactttggcttcatgtttgaaagctcgccgggcggcaatctcggctgggaacccgacatcaagctgacggatgagatggtgatgatcatggggggcaagatggaggccacacccttcaagtggttcatggagatgtgtgtccgaggctacctggctgtgcggccctacatggacgcggtcgtctccctggtcactctcatgttggacacgggcctgccctgttttcgcggccagacaatcaagctcttgaagcacaggtttagccccaacatgactgagcgcgaggctgcaaatttcatcatgaaggtcatccagagctgcttcctcagcaacaggagccggacctacgacatgatccagtactatcagaatgacatcccctactga

SEQ ID NO: 145477 - DNA, 1028 bp, Homo sapiens
cccgacatcaagctgacggatgagatggtgatgatcatggggggcaagatggaggccacacccttcaagtggttcatggagatgtgtgtccgaggctacctggctgtgcggtgagcctgggtgagggccagggtggagtcggaggagatcgtgttgttacgttctcgagatccccgggtagcaagaagggaatccgggtccagagagtgaggtaggtcctaacagccacctgctgacctacacctgtcctttggtcacctctgtctgcccacctgtgccagtaaattcttgctctgggcatctaattccaaccaccttccccacaatcctgcccacgccttcagccatgggctctccctttctgggcatcccatccaccctgtcaccaaagcctgagcacctgccaccccacaggctacgtgccaaagatgggcttttgcccagtttcatatacaggtcacttggccaaggccacagtccaacctgggttcatccccactgccctgcagagaaaggcaggtcagcgtgtctgcgatcccacccaggtgcagaagccatggccggcagccttatgtgggggacagggcaggacactcagcctgtccagagtgcgtatgggcagcccttgcctggggcacgtacgggtgaccgagtgcagcagatcgaaagttgcctcggggatgtgcaagatgtggcaggcgaggtgggtggcaggagcccacacctgaggctgttggcatcagccagtccacaggactacaggcagggccaccacctaggctggcctctgcccaccgctccctcctgtctctccccaggccctacatggatgtggtcgtctccctggtcactatcatgttggacacgggcctgccctgttttcgcggccagacaatcaagttcttgaagcacaggtttagccccaacatgactgagcgcgaggctgcaaatttcatcatgaaggtcatccagagctgcttcctcagcaacaggagccggacctacaacatgatccagtactatcagaa

SEQ ID NO: 145478 - DNA, 6537 bp, Homo sapiens
atgtgcccagtagattttcatgggatcttccagttagatgaaagacggagagatgcagtgattgcattgggcatttttctgattgaatctgatcttcagcacaaagattgtgtggttccttaccttcttcgacttctcaaaggtcttccaaaagtgtattgggtagaagaaagcacagctcggaaaggcagaggtgccctcccggttgcagagagcttcagcttctgcttggtaactctgctgtctgatgtggcctatagggatccttcacttagggatgagattttagaggtgcttttgcaggttttgcatgtcctcttggggatgtgccaggccttggagattcaagacaaagaatacctttgcaagtatgctatcccatgcctgataggaatctcgcgagcatttgggcgttacagcaacatggaagagtctctcctctcaaagctctttcccaaaatccctcctcattccctccgtgtcctggaagagcttgaaggtgttcgaaggcgttcctttaatgacttccgctccatcctccccagcaatctgctgactgtctgtcaggagggtaccctgaagaggaaaaccagcagtgtgtccagcatctctcaggtcagccctgaacgcggcatgccccctcccagttcccctggaggatctgcctttcactactttgaagcctcctgtttgcccgatgggactgccctagagcctgagtactacttttcaaccatcagctccagcttctcagtctctccccttttcaacggtgtcacatataaggagtttaacattccattggaaatgcttcgggaactcttaaacctggtgaagaagatcgttgaggaggctgttctcaaatctttggatgccattgtagccagtgtgatggaggccaaccccagtgctgatctttactacacttccttcagtgaccctctctacctgaccatgttcaagatgctgcgtgacactctgtactacatgaaggacctcccgacctcttttgtgaaggagatccatgattttgtgctggagcagttcaacacgagccagggggagctccagaagattctacatgacgcagaccggatccacaatgagctgagccccctcaaactgcgctgtcaggcgagtgctgcctgtgtggacctcatggtgtgggctgtgaaggacgagcagggtgcagaaaacctttgcatcaagctatctgagaagctgcagtccaagacgtccagcaaagtcattattgctcacttgcccctgctgatctgctgtctgcagggtttgggccgcctgtgcgagaggttcccggtggtggtgcactctgtgacaccgtccttgcgagacttcctggtcatcccgtccccagttctggtgaagctctacaagtaccacagtcagtaccacacagttgctggcaatgatataaaaatcagtgtgaccaatgagcattccgagtcaaccctgaacgtcatgtcgggtaagaagagccagccctccatgtacgagcagctccgagacatcgctattgacaacatctgcaggtgcctgaaggctggattgacggtggacccagtgattgtggaggcgttcttggccagcctgtccaaccggctctacatctctcaggagagcgacaaggacgctcacttgattcccgaccacacaatccgagccttgggacacattgcggtggccttgagggacaccccgaaggtcatggagcccattctgcagatcctacagcagaaattttgccagccaccctcccccctcgatgtgctgattattgaccagctgggctgcctggttatcaccggaaatcaatacatctatcaggaagtgtggaacctcttccagcagatcagtgtgaaggccagctccgttgtatactcagccaccaaagattacaaggaccacggctataggcattgctccctggcagtgattaatgccctggccaacatcgcggccaacatccaagacgagcacctggtggatgagctgctcatgaacctgttggagttgtttgtgcagctggggctggaggggaagcgagccagcgagagggcaagcgagaagggccctgccctaaaggcttctagcagtgcagggaacttgggagtactcattcctgtaatagctgtgctcacccgacgactgccacccatcaaagaagctaagcctcggttacagaagctcttccgagacttctggctgtattccgttctgatgggattcgctgtggagggctcaggactctggccagaagaatggtacgagggggtctgtgaaatagccactaagtcccccttgctcacctttcccagcaaggagccactgcggtccgtcctccagtataactcagccatgaagaatgacacggtcacccccgctgagctgagtgagctccgcagcactatcatcaacctgctggacccccctcccgaggtgtccgcactcatcaacaagctggacttcgccatgtccacctacctcctctctgtgtaccggctggagtacatgagggtactgcgttcaacagatcctgatcgcttccaggtaatgttctgctactttgaggataaagctattcagaaagacaaatctgggatgatgcagtgtgtgattgcagtcgcggacaaagtattcgatgccttcctgaacatgatggcggataaagccaagaccaaggagaacgaggaggagctggagcggcacgctcagttcctgttggtgaacttcaaccacatccacaagaggataaggagggtggcagacaagtatctatctggtctggtggataagtttccccacttgctctggagcgggactgtgctgaagaccatgctggacatcctgcagaccctgtcactgtcactgagcgctgatattcacaaggatcagccttactatgacatccccgacgccccctaccggatcacggttcctgacacgtacgaagcccgtgagagcattgtgaaggacttcgctgcacgctgtgggatgatcctccaggaggccatgaagtgggcacctaccgtcaccaagtcccacctgcaggaatatctgaacaaacatcagaactgggtatcgggactgtcccagcacacagggctggccatggccactgagagcatccttcactttgctggctacaacaagcagaacacaactcttggggcaactcagctgagcgagcgcccggcctgtgtgaagaaagactactccaacttcatggcatccctgaatctgcgcaaccgctacgcgggcgaggtgtatggaatgattcggttctcaggcaccacaggccagatgtctgacctgaacaaaatgatggtccaggatctacattcagctttagaccgcagtcatcctcagcactacacgcaggccatgttcaagctgaccgcaatgctcattagcagtaaagattgtgacccgcagctccttcatcatctgtgctggggtcccctccggatgttcaatgagcatggcatggagacggccctggcctgctgggagtggctgctggctggcaaggatggagtggaagtgccgttcatgcgggagatggcaggggcctggcacatgacggtggagcagaaatttggcctgttttctgctgagataaaggaagcagaccccctggctgcctcggaagcaagtcaacccaaaccctgtccccccgaagtgaccccccactacatctggatcgacttcctggtgcagcggtttgagatcgccaagtactgcagctctgaccaagtggagatcttctccagcctgctgcagcgctccatgtccctgaacatcggcggggccaaggggagcatgaaccggcacgtggcggccatcgggccccgcttcaagctgctgaccctggggctgtccctcctgcatgccgatgtggttccaaatgcaaccatccgcaatgtgcttcgcgagaagatctactccactgcctttgactacttcagctgtcccccaaagttccctactcaaggagagaagcggctgcgtgaagacataagcatcatgattaaattttggaccgccatgttctcagataagaagtacctgaccgccagccagcttgttcccccagataatcaggacacccggagcaacctggacataactgtcggctctcggcaacaagccacccaaggctggatcaacacataccccctgtccagcggcatgtccaccatctccaagaaatcaggcatgtctaagaaaaccaaccggggctcccagctgcacaaatactacatgaagcgcaggacgctgctgctgtccctgctggccactgagatcgagcgtctcatcacatggtacaacccgctgtcagccccggaactggaactagaccaggccggagagaacagcgtggccaactggagatctaagtacatcagcctgagtgagaagcagtggaaggacaacgtgaacctcgcctggagcatctctccctacctagccgtgcagctgcctgccaggtttaagaacacagaagccattgggaacgaagtgacccgtctcgttcggttggacccgggagccgttagtgatgtgcctgaagcaatcaagttcctggtcacctggcacaccatcgacgccgatgctccagagctcagccatgtgctgtgctgggcgcccacggacccacccacaggcctctcctacttctccagcatgtacccgccgcaccctctcacggcgcagtacggggtgaaagtcctgcggtccttccctccggacgccatcctcttctacatcccccagattgtgcaggccctcaggtacgacaagatgggctatgtgcgggagtatattctgtgggcagcgtctaaatcccagcttctggcacaccagttcatctggaacatgaagactaacatttatctagatgaagagggccaccagaaagaccctgacatcggcgacctcctggatcagttggtagaggagatcacaggctccttgtccggcccagcgaaggacttttaccagcgggagtttgatttctttaacaagatcaccaacgtgtcggctatcatcaagccctaccctaaaggcgacgagagaaagaaggcttgtctgtcggccctgtctgaagtgaaggtgcagccgggctgctacctgcccagcaaccctgaggccattgtgctggacatcgactacaagtctgggaccccgatgcagagtgctgcaaaagccccatatctggccaagttcaaggtgaagcgatgtggagttagtgaacttgaaaaagaaggtctgcggtgccgctcagactccgaggatgagtgcagcacgcaggaggccgacggccagaagatctcctggcaggcagccatcttcaaggtgggagacgactgccggcaggacatgctggccctgcagatcatcgacctcttcaagaacatcttccagctggtcggcctggacctctttgtttttccctaccgcgtggtggccactgcccctgggtgtggggcgatcgagtgcatccccgactgcacctcccgggaccagctgggccgccagacagacttcggcatgtacgactacttcacacgccagtacggggatgagtccaccctggccttccagcaggcccgctacaacttcatccgaagcatggccgcctacagcctcctgctgttcctgctgcagagcaaggacagacacaacggcaacattatgctggacaagaagggccatatcatccacatcgactttggcttcatgtttgaaagctcgccgggcggcaatctcggctgggaaccccgacatcaagctgacggatgagatggtgatgatcatggggggcaagatggaggccacacccttcaaaggtggttcatggagatgtgtgtccgaggctacctggctgtgcgggccctacatggacgcggttcgtctcccctggtcactatcatgtttggacacggggcctgccctggttttccgcgggccagacaatccaagttccttgaagcaacagggttttagcccccaacatggacttgagcgccaaggcttgcaaaatttcaatcatgaaggttcatccagagctgcttccttcagcaaacaggagccggacctacaacattgatccagtactatcagaatgacatccccctactgaggaggggacccttccgagggcctctgcccccatgtgcccttgaagctgcccccacaatcatggagccctgcgacctccctgccctgccgccacatgcagtggaggaaaggcctgtggcccaaaaaacctggtagcgcctcctggggcagcacgtgggggggcccaaccttggtaacgccgtggactgcagcgacgaatcagtggatggtgctgtctatgcacaggtgtgaagtcttttgtttgcactggacatattccctacctgtcttatttcataggtacatgaagtattgtgtataaaaaaagagataagatttaaccaacatcaacaaaataaaaacccaaaatagtaaaaacccaaaaaaaaaaaaaaa

SEQ ID NO: 145479 - DNA, 337 bp, Homo sapiens
ggcacgagcatgtgtgttcattatcaacctgaaacagactccatggtggagctgacttctgacgagaagtctgccgttactgccctgtggggcaaggtgaacgtggatgaaattggtggcgacgctctgggcaggctgttggtggtctacccttggacccaaaggttctttgaggcctttgcggatttggacagtcctgatgctgttatgggcaaccttaaggtgaaggcttatggcacgaaagtgctgggagcctttagtgatggtctggctcaactggtcaacctgaacggctgctttgccacactgaatgagctgccctgtgacaagctgcacg

SEQ ID NO: 145480 - DNA, 337 bp, Homo sapiens
ggcacgagggtcgacgctgagaagggagccgacgccatgtctgcacatgtgaaatggatggtcgtgcggaactgcttcagggaactgatcaagaggaataagcagacctacagtactgagcccaataacttgaatgcccgcaattgcttccgctacaacggactgattgaccggatgactgtgggcgtggagccggcagccgacggcacaggtgtggcggaggaccttaatgggatgatcgggcatcggaagcctgacaactcctatgtgctgaccaccatcaccaggaatgctcgcgccacgctcagcagcctcagacacatgattcgcatgaacc

SEQ ID NO: 145481 - DNA, 929 bp, Homo sapiens
ttttttttttttttaattgttgcaatttatttagaattaaacattaattaggctctgaagaaccttgctgattgttaactggatgattgtttcattacctattctttgattttatcaccactggcccgttatccaccccgctcggttgccaactcagaggtatgttttttgttgagtgcaaaacagttgaggaattaatcttagatctacactggtccaataaagtagccacttgtcacataggggctatttaaaattatactcagctaaacgtggtggctcacgcctgtaatcccagccaaaattcttaattcttcgtcacactagacacatttcaagtgctcaacagctacatgtggctagtggctacggtactagatagtacagctatagaacatttccattacaataggaagttcgattcggcagtttagaccttgaggagttcttccagtttagggtatttcaattttttaaatcacaccacagtaggaaggtacacttgggcactgtaacatgtctgtatatacacacaagtatgtgctaggatcatcgggaaggtaaggctggaacaagaggaatcctgcacacttttattgggtgtgaaataaaagcttctcaaaacaatacctacacttaataaagtgcaacaccctgatttttctatcttatccactttctttcttccatttaaagaaatttaaatgttgggcttgcccactaactcatgtactcagaaggatgaagctgcaatagctgaaagtaacaaatgtctgggtgtctggagactttgacaaatcttgctctggtttgcactcctgatttttataaatttagaaactgagacttggtcgggcgcagtggctcacacctgtaatcccagcactttgggaggctaaggcaggaggatcgcttgagaccaggagttt

SEQ ID NO: 145482 - DNA, 338 bp, Homo sapiens
ggcacgaggatacggtttaaccatattgcccagactccattgtaacgtgtacctcgatccatgtctgcttctctgcctaccaactggccaagctcacgacgtggatcctcctgctggagcagttctttctaccacactcccgaggaaacttccatggacaaagccggataatccgaaaggcgtacctggaagacttttacacccggatgatgcatgagtgctatcagatatgggcccagctggagcacgatgctgtaacccaattagccaggcagactggattactgatgctgggaatgaaagagactcatgaattaaagaccatccaggccattctg

SEQ ID NO: 145483 - DNA, 534 bp, Homo sapiens; identical to SEQ ID NO: 144862

SEQ ID NO: 145484 - DNA, 654 bp, Homo sapiens; identical to SEQ ID NO: 144884
  misc_feature (1)...(654): n = a,t,c or g

SEQ ID NO: 145485 - DNA, 645 bp, Homo sapiens
ccccgactcttctggtccccacagactcagagagaacccacccatggttgctgtctcctgccgacaaagaccaacgtcaaggccggcttggggtaaggtcggcgcgcacgctggcgagtatggtgcggaggccctggagaggatgttcctgtccttccccaccaccaagacctacttcccgcacttcgacctgagccacggtttctgcccaggtttaagggccacgggcaagaaggtggccgacgcgctgaccaacgccgtggcgcacgtgggacgacatgcccaacgtcgctgtccgccctgagcgacctgcacgcgcacaagctttcgggtgggacccggttcaactttcaagctcctaaagccacttgccttgctggtgaaccctgggccgcccacctccccggccgagtttcaacccctggcggttgcaacgtcttccctggggacaaagtttcctgggcttcttgttgaagcaccgttgctgaccttccaaatacccgttaaagctggaagcctcggttggccattgtttttttgccccttggggcttccccccagcccctcctcccctttcctgcacccgtacccccgtggtctttgaaataaagtcttgagtgggcggcaaaaaaaaaaaaaaaaaaa

SEQ ID NO: 145486 - DNA, 416 bp, Homo sapiens
ggaaggaaagcccaggacctccggagcagagcacaggagctgcagaggcaaggccagcatgtcgcccaacttcaaacttcagtgtcacttcattctcatcttcctgacggctctaagaggggaaagccggtacctagagctgagggaagcggcggactacgatcctttcctgctcttcagcgccaacctgaagcgggagctggctggggagcagccgtaccgccgcgctctgcggtgcctggacatgctgagcctccagggccagttcaccttcaccgacgaccggccccaactgcactgcgcaggctttttcatcagcgaaccccgaggagtcattacccttccactacgaaccagtgatccattgacggcaaggccgggaatttcctgaaggttttgatgggtcggatcctcag

SEQ ID NO: 145487 - DNA, 367 bp, Homo sapiens
cttagcaggaggagcatcagatcttcccagaatgtggccatgatcttcttccgagtccatgaaccaggaaatggattcacattaaccataaagacagaccccaacctctttcgtaagtgttctcagtcaaaaggcagaacttcggatatagacccgctttttgaaagtagtatcattgcacagacttaaagaaatttgaactgaggaatgatttgaatggaaatttttttgtaattagaaatgacctaaaggatagtttctattctttattatgaaaatcaaatcacagtttttaatttatttcccaggttaggtagtatactaatttatgaagagtacaattctatcttttctccaaagtcttgcg

SEQ ID NO: 145488 - DNA, 1717 bp, Homo sapiens
  misc_feature (1)...(1717): n = a,t,c or g
cccacgcgtccgcggacgcgtgggcgagggtgtaggaaggaaagcccaggacctccggagcagacagcacagcagctgcagaggcaaggccagcatgtcgcccaacttcaaacttcagtgtcacttcattctcatcttcctgacggctctaagaggggaaagccggtacctagagctgagggaagcggcggactacgatcctttcctgctcttcagcgccaacctgaagcgggacgtggctggggagcagccgtaccgccgcgctctgcggtgcctggacatgctgagcctccagggccagttcaccttcaccgccgaccggccgcagctgcactgcgcagccttcttcatcagcgagcccgaggagttcattaccatccactacgaccaggtctccatcggactgtnaaagggcggcgactttcctggaaggtatttgatggttggattctcaagggggagaagtttccccagttcccagggatcatcctctcccctcagctgagcggtacatagatttcttgtgagagtggtcttagcaggaggagcatcagatcttcccagaatgtgggccatgatcttcttccgagtccatgaaccagggaatgggatttcacatttaaccataaagacagaccccaaccttttttcctttgcaatgttcatttcttcagaattccaaatgggaaagtttaacctggggtagtttccacaccagcatcgaaactgcagcttctccataatttatcctgtgggtgatcaaaatatctgatctttacccggggggacacgtaaatgggtctttcagttaaaggaaatcctcaggcaggttgcgagggaataggagactttgtggagctgctgggaggaactggattggacccttccaagatgacgcctttagctgatctctgctacccctttcatggcccggcccagatgaaagttggctgtgacaacactgtggtgtcgcatggtctccagtggaaaacacgtaaatcgtgtggactttttaagaatcgttcagctggaagccgttacgagttgggaaaacccaaatgggaaacagtatcggggaattctgttttgtctggtctttgaataaccaacgccagtcattcacatgcttgatagcttaagtgagtttttaatgggccatttgtgtatggatttttgatggcacaactagttaaaacgcctttcaatccagtcaggtattcccagccttgagcgcacgcgcgcaacacacacacacacatacacacacgccattaatttttgtactttgcttctttttatgtttgtaatcctgtaaatgaacacatggcagaaaaataacccctgattgggtaggggtcccatagttccctaaatgggaaatggtttggtaattccctccgatgtgccctacaaaccctgaaacctggtaagaccaagccacaaagcaacgtgcaataaaaaaatccgtatcctcaagggaaaatactccaaagaaagaaaagtggcagcacttatattagttttataacaggataaagtcttgtgtatagccaaagtagttgcatctgtttattttctatttattattgttacaataggtaatagttatagcaattatttattgatttgtaacaacttgtttttaaccaaactttgtagcatggaaaaaattttccatccacaaatacaaacatgaataaatacattcagaatgttg

SEQ ID NO: 145489 - DNA, 833 bp, Homo sapiens
  misc_feature (1)...(833): n = a,t,c or g
acacggcatccaggcgcatggccagattccaagttacaagaccattgggggaagagatgactccttccacaccttcttcagtgaaacgggcgctggcaagcacgtgccccggctgttgttgtagaactggaaacccacagtcatggatgaagttcgcactggcacctaccgncagctcttccaccttgagcagttcatcacagcaaggaagattgctgccaataactatgcccgagggcactacaccattggcaaggagatcattgaccttgtgttggaccgaattcgcaagctggctgaccagtgcaccggtcttcagggcttcttggttttccacagctttggtgggggaactggttctgggttcacctccctgctcatggaacgtctctcagttgattatggcaagaaatccaagctggagttctccatttacccggcaccccaggtttccacagctgtagttgagccctacaactccatcctcaccacccacaccaccctggagcactctgattgtgccttcatggaggaaggcgagttttcagaggcccgtgaagatatggctgcccttgagaaggattatgaggaggttggtgtggattctgttgaaggagagggtgaggaagaaggagaggaatactaattatccattccttttggccctgcagcatgtcatgctcccagaatttcagcttcagcttaactgacagatgttaaagctttctggttagattgttttcacttggtgatcatgtcttttccatgtgtacctgtaatatttttccatcatatctcaaagtaaagccattaacatcaaaaaaaaaaaaaaa

SEQ ID NO: 145490 - DNA, 1773 bp, Homo sapiens
gctggagctcaaggatccttcattaaatttatccccccccccccccccccaggttctcttacatcgaccgcctaagagtcgcgctgtaagaagcaacaacctctcctcttcgtctccgccatcagctcggcagtcgcgaagcagcaaccatgcgtgagtgcatctccatccacgttggccaggctggtgtccagattggcaatgcctgctgggagctctactgcctggaacacggcatccagcccgatggccagatgcccaagtgaccaaaaccattgggggaaggagatgactccttcaacaccttcttcagtgagacgggcgctggcaagcacgtgccccgggctgtgtttgtagacttggaacccacagtcattgatgaagttcgcactgggcacctaccgccagctcttccaccctgagcagctcatcacaggcaaggaagatgctgccaataactatgcccgagggaacttacaccattggcaaggagatcattgaccttgtgttggaccgaattcgcaagctggcccgaccagtgcacggggtctccagggcttcttggttttccacagcctttggtgggggggactggttctgggttcacctcccctgctcatgggaacgtctctcagttgattattggcaagaaagtccaagcctggagttctccatttaccccgcggcccccaggtttccacagcctgtagttgagcccctacaacttccatcctaccaacccaacacccaccctgggagcactctgattgtgcccttcatgggtagacaatgaggccatctatgacatctgtcgtagaaacctcgatatcgagcgcccaacctacactaaccttaaccgccttattaggtcaaattgtgtcctccatcactgcttccctgagatttgatggagccctgaatgttgacctgaccagaattccaaacaaaccttggggccttatccccccattcactttcctttgggccacatatgccccttgtcatctctgctgaagaaagcctacccatgaacagcttttctgtagccagagatcacccaaatgctttgcttttgagccaaccaacccagatggttgaaatggtgaccctcgcccatgggtaaatacattggcttgcttgcctgttgctaccggtggtgacgtggttcccaaaagatgtcaaatgctgcccattgcccacccatcaaaacccaagcgcagccatccagtttgtggattggtgcccccactggcttcaaggtttggcatcaactaccagcctccccactgtggtgcctggtggagacctggcccaaggttaccagagaagctgtgtgcatgctgagcaaacaccacagcccatttgctgaggcctgggctcgccctggacccacaagttttgacctgatgttatgccaagcgtgcccttttgttcactggtacctgggtgcaggggatggaggaaggcgagttttcaaagggcccgtaaagatatggctgccctttagaaaggattatgaggaggttgggtgtggattctgttaaaggaagagggtgaggaagaaggaaaaggaatactaattatccattccctttttggcccctgcagcatgtcatgctcccagaatttcagcttcagcttaactgacagacgttaaagctttctggttagattgttttcacttggtgatcatgtcttttccatgtgtacctgtaatatttttccatcatatctccaaaggtaaagtcatttccatcaaaaaaaaaaaaaaaa

SEQ ID NO: 145491 - DNA, 491 bp, Homo sapiens
  misc_feature (1)...(491): n = a,t,c or g
ggggtgganantttgancccctgggnaatttcgaccccgctgcaggaattcggcacgagtctggctcccgctctcacagccattgcagtacattgagctccattggtgatgttgcgaagaaactgggagagatgtggaataacactgctgcagatgacaagcagccttatgaaaagaaggctgcgaagctgaaggaaaaatacgaaaaggatattgctgcatatcgagctaaaggaaagcctgatgcagcaaaaaagggagttgtcaaggctgaaaaaagcaagaaaaagaaggaagaggaggaagatgaggaagatgaagaggatgaggaggaggaggaagatngagaagatgacgatgaagaagaagatgatgatgatgaataagttggttctagcgcagnnnnnnnnnncttgtctataaagcatttaacccccctgtacacaactcactccttttaaagaaaaaaattgaaatgtnnnnnnnnnnnn

SEQ ID NO: 145492 - DNA, 576 bp, Homo sapiens; identical to SEQ ID NO: 134091

SEQ ID NO: 145493 - DNA, 1614 bp, Homo sapiens
agcggagagagtgaggaggctgcgtctggctcccgctctcacagccattgcagtacattgagctccatagagacagcgccggggcaacgtgagagccggacgggcacatgggcgactctgtgcctcgctgaggaaaaataactaaacatggggcaaaggagatcctaagaagccgcgaggcaaaatgtcatcatatgccttttttgtgcaaacttgtcggggaggagcataagaagaaacacccagatgcttcagtcaacttctcaagagtttttctaagaagtgctcagagaggtggaagaccatgtctgcttaaagaggaaaggaaaatttgaagatatggcaaaagcgggacaaggcccgttattgaaagagaaatgaaaacctatatccctccccaaaggggaagacaaaaaagaaagttcaaggattcccaattgcacccaagagggcctccttcgggccttctttcctcttcttgctctggagtatcgcccaaaaatcaaaaggagaacatccttggcctgttccattggtgatgttgcgaagaaactggggagagatgtgggaattaacactgctgcagatggacaagcagccttatgaaaagaagggctgcgaagctgaaggaaaaatacgaaaaggatattgctgcatatcgagctaaaggaaagcctgatgcagcaaaaaaagggagttgtcaaggctgaaaaaagcaagaaaaagaaggaagaggaggaagatgaggaagaaggaagatgaagaggatgaggaggaggaggaagatgaagaagatgaagaagatgaagaagaagatgagagatgagataagagaagatgtatgatgataagttcgttctagcgcagttttttttttttcttgtctataaagcatttaaacgcccctgtacacaaactcactcccttttaaaggaaaaaaatggaaatgtaaggctgtgtaaagatttgtttttaaactgtacagtgtctttttttgtataagttaacacactaccgaattgtgtctttaggatagccctgtcctggtggtattttcaatagccactaacctttgcctggtacagtatgggggttgtaaattggcatggaaatttaaaagccaggtttcttgttggtggcacagcccaaaatttagtttatatatgggggatggtagtttttttcatcttcagttgtctctgatgcagcttatacaaaattattaggtggtctggttaacagaacaccactctgtaattgcaaaaaaaaaaaaaaaaaagaaaagaaaaagttgcagcgtgttttgttgacattctgaatgcttctaagtaaatacaattttttttattagtattgttgtccttttcataggtctgaaatttttcttcttgaggggaagctagttttttgttttggccctttttgattcacaggatttattacggggttttccttttcttatagtgggcaaaaaaaaagcttttgtttaccccccctgcttataatacggggggaaaggtaatttggaaaaagttttcttccatatgggaacatcaaaaatttgagtgagtaaaaaaatttcacttggcccctttacttttacaaactgaaaag

SEQ ID NO: 145494 - DNA, 611 bp, Homo sapiens; identical to SEQ ID NO: 145358

SEQ ID NO: 145495 - DNA, 517 bp, Homo sapiens
acagactcagagagaacccaccatggtgctgtctcctgccgacaagaccaacgtcaaggccgcctggggtaaggtcggcgcgcacctggcgagtatggtgcggaggccctggagaggatgttcctgtccttccccaccaccaagacctacttcccgcacttcgacctgagccacggctctgcccaggttaagggccacggcaagaaggtggccgacgcgctgaccaacgccgtgggcacgtggacgacatgcccaacgcgctgtccgccctgagcgacctgcacgcgcacaagcttcgggtggacccggtcaactttcaagctcctaaagccactggcctgctggtggaccctgggccggcccacttccccggccgagtttcacccctgcggttgcaaggcttccttgggacaaagtttctgggtttctgttaagaaccgtgcttgaacttcaaaataacgttaaacttggaagcttcggttgggcaatgtttctttggccctttggggttccccca

SEQ ID NO: 145496 - DNA, 702 bp, Homo sapiens
  misc_feature (1)...(702): n = a,t,c or g
aggcctagaattcggcacgagccacagactcagagagaacccaccatggtgctcgtctcctgcccgacaagaccaacgtcaaggccggcttggggtaaggtcggcgcgcacgctggcgagtatggtgcggaggccctggagaggatgttcctgtccttccccaccaccaaagacttacttcccgcacttcgaccttgagccacggtttctgcccaaggttaaagggcccacggcaaagaaggtggccgaacgcgctgaccaaacgccgtggcgcaacgtggacgacatgcccaaacggcgttgtccgccctgaagcgacctgcacggcgcacaagctttcgggtggacccggttcaactttcaagctcctaaagccacttgccttgctggtgacccctggcccgcccaccttccccggccgagttcaacccctggcggttgcacgccttccctgggacaaagtttcctgggcttcttgttgaagcaccgttgcttgaaccttccaaataaccgtttaagcttggaagccttcgggttggccatgctttctttgcccctttggggcttccccccagggccctccttccctttcctggaacccgtaaccccgtgggtcttttgaataaaattttgaattgggggggcaaaaaaaaaaaaaaaaaaaagatctttnaatttaagggggcggaaagtttatttcaa

SEQ ID NO: 145497 - DNA, 413 bp, Homo sapiens
gtttgaaatgtcagactcattgaaagaagaatcagggactatttttggaagccagataaaggatgccccaggtgaggatgaggaggaagatggtgtcagtgaagcggccagcctagaggagcctaaggaagaggatcaaggagaaggctacttgtcagaaatggataatgaacctcctgtgagcgagagtgatgatggcttcagcatacacaatgctacactgcagtcacacacactggcagactccatccccagcagccctgcttcttcacagttgcctatggatttgtcaactattaagaaaaacatagaaaatggactgatccgaagcacagctgaatttcagcgtgacattatgctgatgtttcagaatgctgtaatgtacaatagctcagaccatgatgtctatcaca

SEQ ID NO: 145498 - DNA, 6283 bp, Homo sapiens
ggtatcagttagcagagcaatcaagccctttgcagaacctggccgccctccagactggttctctcaaaaacattgtgcttcccagtactcggagcttttagagaccactgagacaccaaaacggaaacgaggtgaaaagggagaagtggtggaaactgttgaagatgttattgttcggaaattgactgctgagcgagttgaagaactaaagaaagtgataaaggaaacccaggagagatatagacggctaaagagagatgcagaactaattcaagctggacacatggacagcagactggatgagctttgcaatgacattgcaacgaaaaagaaattggaagaagaggaggctgaagtaaagaggaaggctacagatgctgcataccaggctcgtcaagcagtaaaaacacccccccggaggttacccactgtgatggttcgctctcctatagattctgcctccccaggaggtgattatccacttggggacttgactccaaccactatggaagaggctacctctggggtcaatgagagtgaaatggctgtggcttctggccacctgaacagtacaggtgtcctcctggaggtaggcggggtccttcccatgatacatggtggggagatacagcaaacacccaatactgttgcagcctcccctgctgcatcaggtgctcccactctttcccggcttttagaagctggtcctacacagttcaccacacctcttgcttccttcactactgttgccagtgagcctccagttaaacttgtgccaccccctgtagagtctgtgtcccaagctaccattgtcatgatgcctgcgctgccagcaccatcctctgctccggctgtctccactactgaaagtgtagctccagtgagtcaacccgacaactgtgttcccatggaggctgtgggggatccacatactgtgactgtttccatggacagcagtgaaatatccatgatcatcaattctatcaaagaagagtgttttcgatcaggggtagcagaggctcctgttggatcaaaggctcccagcatagatgggaaggaagaattagatctggctgagaagatggatattgctgtgtcttacacaggtgaagagctggattttgagactgttggagacatcattgccatcattgaggacaaggtagatgatcatcctgaagtgctggatgtggcagcagtggaagcagcactgtcattttgtgaagaaaatgatgatcctcagtccctgcctggcccctgggagcatcctatccagcaggagcgggacaagccagtacctctccctgcaccagaaatgacggtcaagcaagagagactggactttgaggaaacggaaaacaagggaatacatgaactggtggacatcagggagcccagtgcagagatcaaggtggaacctgcagaaccagagccagtcatttcaggagccgaaatagtagctggagttgttccagccacaagtatggagccaccagaactcaggagtcaggacttagatgaggaactgggaagtactgcagctggagagattgttgaagcagatgttgccattgggaaaggcgatgagactccacttacaaatgtgaagacagaggcatcccctgaaagcatgttgtctccatcacatggctcaaatcccattgaagatcctttagaggcagagactcagcacaagtttgaaatgtcaggtgaggatgaggaggaagatggtgtcagtgaagcggccagcctagaggagcctaaggaagaggatcaaggagaaggctacttgtcagaaatggataatgaacctcctgtgagcgagagtgatgatggcttcagcatacacaatgctacactgcagtcacacacactggcagactccatccccagcagccctgcttcttcacagttgtatgccaatgtcttcctgcagcctgttacagatgacatagcacctggctaccacagcattgtgcagaggcctatggatttgtcaactattaagaaaaacatagaaaatggactgatccgaagcacagctgaatttcagcgtgacattatgctgatgtttcagaatgctgtaatgtacaatagctcagaccatgatgtctatcacatggcagtggagatgcagcgagatgtcttggaacagatccagcaattcttggccacgcagttgattatgcaaacatccgagtctgggatcagtgctaaaagtcttcgagggagagattctacccgcaaacaggatgcttcagagaagatgggacacgagtgggtttggctggattctgaacaagatcatcccaatgactctgagttgagcaatgactgcaggtccctcttcagctcatgggactccagtctggatcttgatgtgggcaactggagggaaactgaggatccagaggctgaggaactagaggaaagcagcccggagagagaacctagtgaactgcttgttggggatggaggcagtgaggaatctcaggaagcggcaaggaaagccagccaccagaacctcctccactttctctctgaggtagcttatttaatggagcccttgtgcatcagcagcaacgaatcaagtgaaggctgctgccctccatctggtaccagacaagaaggaagggaaattaaagctagcgaaggagaaagggagctctgcagagagactgaagagctttcagctaaaggagaccccttagtagctgaaaagccactgggagaaaatggaaagccagaggtggcttcagctccctcagttatttgtacagttcagggactactcacagagagtgaagagggggaggctcagcaagaatccaaaggggaggaccagggtgaagtatatgtgtcagagatggaagaccagcccccttcaggcgagtgtgatgatgcctttaacattaaggagactcccttggtggatacacttttcagccatgctacctcctcaaagctgactgatctaagccaggatgaccctgttcaggatcatttgctatttaagaagactctcctgccagtctggaagatgattgccagtcacaggttcagcagtccatttctgaagcctgtgtcagaaaggcaggccccagggtacaaggatgtggtgaaaagtgggttggtggtctcgctggcttcaggagtgaagctgcagaccttggcggtgagtgttacagctcttaaaggtggtacatccggagttgtttattcctcccgttgggttcgtggtcttgttgggttcgtggtcttgctggcttcaggagcgaagcggctgaccttcacggtgagtgttacagttcataaaggtagtgcggacccaaagagtgaggagcagcaagatttattgcggagtgaaagaacaaagcctccacaacccatggacttaactagcctgaagagaaatctctctaagggtcggattcgcaccatggcccaattcctgcgagacctgatgctgatgttccaaaatgctgtaatgtacaatgactctgatcatcatgtataccatatggctgtggagatgcggcgagaagtcctggagcagattcagatatatgtagaaaaaactctggccattatcaaaccagatattgttgacaaagaggaggagatacaagatattattcttagatccggattcaccattgttcaggctgcccctgccgtcatgtcgcaagggatcctttctccgccagcgggcttgctgtccgatgacgatgtcgtagtttctcccatgtttgagtccacagctgcagatttggggtctgtggtacgcaagaacctgctatcagactgctctgtcgtctctacctccctagaggacaagcagcaggttccatctgaggacagtatggagaaggtgaaagtatacttgagggttaggcccttgttaccttcagagttggaacgacaggaagatcagggttgtgtccgtattgagaatgtggagacccttgttctacaagcacccaaggactcttttgccctgaagagcaatgaacggggaattggccaagccacacacaggttcaccttttcccagatctttgggccagaagtgggacaggcatccttcttcaacctaactgtgaaggagatggtaaaggatgtactcaaagggcagaactggctcatctatacatatggagtcactaactcagggaaaacccacacgattcaaggtaccatcaaggatggagggattctcccccggtccctggcgctgatcttcaatagcctccaaggccaacttcatccaacacctgatctgaagcccttgctctccaatgaggtaatctggctagacagcaagcagatccgacaggaggaaatgaagaagctgtccctgctaaatggaggcctccaagaggaggagctgtccacttccttgaagaggagtgtctacatcgaaagtcggataggtaccagcaccagcttcgacagtggcattgctgggctctcttctatcagtcagtgtaccagcagtagccagctggatgaaacaagtcatcgatgggcacagccagacactgccccactacctgtcccggcaaacattcgcttctccatctggatctcattctttgagatctacaacgaactgctttatgacctattagaaccgcctagccaacagcgcaagaggcagactttgcggctatgcgaggatcaaaatggcaatccctatgtgaaagatctcaactggattcatgtgcaagatgctgaggaggcctggaagctcctaaaagtgggtcgtaagaaccagagctttgccagcacccacctcaaccagaactccagccgcaggctgtcactctgtgatctggctggctcagagcgctgcaaagatcagaagagtggtgaacggttgaaggaagcaggaaacattaacacctctctacacaccctgggccgctgtattgctgcccttcgtcaaaaccagcagaaccggtcaaagcagaacctggttcccttccgtgacagcaagttgactcgagtgttccaaggtttcttcacaggccgaggccgttcctgcatgattgtcaatgtgaatccctgtgcatctacctatgatgaaactcttcatgtggccaagttctcagccattgctagccagcttgtgcatgccccacctatgcaactgggattcccatccctgcactcgttcatcaaggaacatagtcttcaggtatcccccagcttagagaaaggggctaaggcagacacaggccttgatgatgatattgaaaatgaagctgacatctccatgtatggcaaagaggagctcctacaagttgtggaagccatgaagacactgcttttgaaggaacgacaggaaaagctacagctggagatgcatctccgagatgaaatttgcaatgagatggtagaacagatgcaacagcgggaacagtggtgcagtgaacatttggacacccaaaaggaactattggaggaaatgtatgaagaaaaactaaatatcctcaaggagtcactgacaagtttttaccaagaagagattcaggagcgggatgaaaagattgaagagctagaagctctcttgcaggaagccagacaacagtcagtggcccatcagcaatcagggtctgaattggccctacggcggtcacaaaggttggcagcttctgcctccacccagcagcttcaggaggttaaagctaaattacagcagtgcaaagcagagctaaactctaccactgaagagttgcataagtatcagaaaatgttagaaccaccaccctcagccaagcccttcaccattgatgtggacaagaagttagaagagggccagaagaatataaggctgttgcggacagagcttcagaaacttggtgagtctctccaatcagcagagagagcttgttgccacagcactggggcaggaaaacttcgtcaagccttgaccacttgtgatgacatcttaatcaaacaggaccagactctggctgaactgcagaacaacatggtgctagtgaaactggaccttcggaagaaggcagcatgtattgctgagcagtatcatactgtgttgaaactccaaggccaggtttctgccaaaaagcgccttggtaccaaccaggaaaatcagcaaccaaaccaacaaccaccagggaagaaaccattccttcgaaatttacttccccgaacaccaacctgccaaagctcaacagactgcagcccttatgcccggatcctacgctcacggcgttcccctttactcaaatctgggccttttggcaaaaagtactaa

SEQ ID NO: 145499 - DNA, 408 bp, Homo sapiens
  misc_feature (1)...(408): n = a,t,c or g
ctcgtcaagcagtaaaaacacccccccggaggttacccactgtgatggttcgctctcctatagattctgcctccccaggaggtgattatccacttggggacttgactccaaccactatggaagaggctacctctggggtcaatgagagtgaaatggctgtggcttctggccacctgaacagtacaggtgtcctcctggaggtaggcggggtccttcccatgatacatggtggggagatacagcaaacacccaatactgttgcagcctcccctgctgcatcaggtgctcccacttctttcccgcttttagaangctggcctacacagttcaccacacctcttgcttccttcactaactgtgcagngagccttncagtaaactgtgccacccctgtagagtctgtgtcca

SEQ ID NO: 145500 - DNA, 719 bp, Homo sapiens
  misc_feature (1)...(719): n = a,t,c or g
agaaagccatcatgcttgtatggagagctgcagctaatcataggtatgccaatgtcttcctgccagcctgttacagatgacatagcacctggctaccacagcattgtgcagaggcctatggatttgtcaactattaagaaaaacatagaaaatggactgatccgaagcacagctgaatttcagcgtgacattatgctgatgtttcagaatgctgttaatgtacaatagctcagaccatgatgtctatcacatggcagtggagatgcagcgagatgtcttggaacagatccagcaatttttggccacgcagttgattatgcaaacatccgagtctgggatcagtgctaaaagtcttcgagggagagattctacccgcaaacaggatgcttcagagaaggacagtgtcccaatgggctctcctgccttcttctctctctctttatgggacacgagtgggtttggctggattctgaacaagatcatcccaatgactctgagttgagcaatgactgcaggtccctcttcagctcatgggactccagtctggatcttgatgtgggcaactggagggaaactgaggatccagaggctgaggaactagaggaaagcagcccggagagagaacctagtgaactgcttgttggggatggaggcagtgaggaatctcaggaagcggcaaggaaagccagccaccagaacctnctncactttctctctga

SEQ ID NO: 145501 - DNA, 679 bp, Homo sapiens
ggtgggatgactaatagttattctgtgggaccctaggtgaattccaaggacctctgtagtgggcatgagcaagatattccatcctacatttcctctcacaaactaccaggtgttctttagccactctgtgggaagacagaaatatgcccctcatccctctggatttttctgctgattctcttccctctcccccaagaaaccaaatccccaacttttctgttgcaccgtctcttgtctcctgaccaactcatgctccctgttctttctctgcctgtcatctaggatggaggaaccaggggacgccgctgtgccattgaagcagatatgaagatgaaaaagtgaagcctcagagttaccctctttgagccgaacctaaaaataaaagtaaacaagataggagcttggggcttgcggggcccagtttccagaggtgggaagttacagaagaggaagctcctgggccacacgacatgagctggaaaatctctcttagagagttggagtagcacaattgcctgttttagggcagaaaccatgggctatgttaatgtcctaatgtgtagctagcagatcgtagctagtttgtattgtcttgtcaattgtacagactttttaaaaaaaacaaccaccagtgaaatgtgtgtgtatacaataaactgaaaaaaaaaacaaaaaaaaa

SEQ ID NO: 145502 - DNA, 3044 bp, Homo sapiens
tttttttttttagttttttttttcagtttattgtatacacacacatttcactggtggttgttttttttaaaaagtctgtacaattgacaagacaatacaaactagctacgatctgctagctacacattaggacattaacatagcccatgggtttctgccctaaaacaaggcaaattgtgctactccaactctctaagagaggattttccaggctcatgtcgtgtgggcccgggtacctcctcttctgtaacttccacctctgggaactggggcccgcaagcccaaggctctatcttggtttacttttattttagggttcgggctcaaagagggggtaactctgaggggctttcacttttttcatctttcatatctggcttcaaggggcacagcgggcgtccccggggggtcctccatccttctctgaagcatcctgtttgctgggtagaatctctccctcgaagaccttttagcactggatcccagactctggatgttttgcataatcaactgcgtggccaagaattgctggatctgttccaagacatctcggctgcatctccaatggcaatgtgatagaaataatggtctgagctatggtacattaacagattctgaaacatcagcataatgtcacgctgaaaatcagctggggcttcggatcagtccattttctatgtttttcttaatagttgacaaatccataggccctttgcccaatgctgggggagccagggcgctatgtcatcttgtaccaggctgcaggaagacattggcatacctatgattagctgcagctctccatacaagcatgatggctttcttccaaattttctgtgcctgaatagcttcctgatcctcactacagacagagaactgtgaagaagcagggctgctggggatggagtctgccagtgtgtgtgactgcagtgtagcattgtgtatgctgaagccatcatcactctcgctcacaggaggttcattatccatttctgacaagtagccttctccttgatcctcttccttaggctcctctaggctggccgcttcactgacaccatcttcctcctcatcctcacctggggcatcctttatctggcttccaaaaatagtccctgattcttctttcaatgagtctgacatttcaaacttgtgctgagtctctgcctctaaaggatcttcaatgggatttgagccatgtgatggagacaacatgctttcaggggatgcctctgtcttcacatttgtaagtggagtctcatcgcctttcccaatggcaacatctgcttcaagaatctctccagctgcagtacttcccagttcctcatctaagtcctgactcctgagttctggtggctccatacttgtggctggaacaactccagctactatttcggctcctgaaatgactggctctggttctgcaggttccaccttgatctctgcactgggctccctgatgtccaccagttcatgtattcccttgttttccgtttcctcaaagtccagtctctcttgcttgaccgtcatttctggtgcagggagaggtactggcttgtcccgctcctgctggataggatgctcccaggggccaggcagggactgaggatcatcattttcttcacaaaatgacagtgctgcttccactgctgccacatccagcacttcaggatgatcatctaccttgtcctcaaatgatggcaatgatgtctccaacagtctcaaaatccagctcttcacctgtgtaagacacagcaatatccatcttctcagccagatctaattcttccttcccatctatgctgggagcctttgatccaacaggagcctctgctacccctgatcgaaaacactcttctttgatagaattgatgatcatggatatttcactgctgtccatggaaacagtcacagtatgtggatcccccacagcctccatgggaacacagttgtcgggttgactcactggagctacactttcagtagtggagacagccggagcagaggatggtgctggcagcgcaggcatcatgacaatggtagcttgggacacagactctgatgcagcaggggaggctgcaacagtattgggtgtttgctgtatctccccaccatgtatcatgggaaggaccccgcctacctccaggaggacacctgtactgttcaggtggccagaagccacagccatttcactctcattgaccagtctggggctagtaggcaggaggctgcccttcttcaagagctctgacagcagaggggaggggggtggagttgctttctgtccaagcatctttttctggggtgaatcatctgttactggggtcatgggggcttctaagggtgcagagcctggaggaagggtgtcaggaatcccaggaaacgaggtgactggggtactcggcaaagtcccgggggttaccccagaggtagcctcttccatagtggttggagtcaagtccccaagtggataatcacctcctggggaggcagaatctataggagagcgaaccatcacagtgggtaacctccgggggggtgtttttactgcttgacgagcctggtatgcagcatctgtagccttcctctttacttcagcctcctcttcttccaatttctttttcaatgtcattgcaaagctcatccagtctgctgtccatgtgtccagcttgaattagttctgcatctctctttagccgtctatatctctcctgggtttcctttatcactttctttagttcttcaactcgctcagcagtcaatttccgaacaataacatcttcaacagtttccaccacttctcccttttcacctcgtttccgttttggtgtctcagtggtctctaaaagctccgagtactgggaagcacaatgtttttgagagaaccagtctggagggcggccaggttctgcaaagggcttgattgctctgctaactgatacccaattttgatcgccacttctcatgacagaagatgctaaacatagcttctctcggatggaccatggctctgtggggccagtgcttagcagcttgtgtttgcc

SEQ ID NO: 145503 - DNA, 3242 bp, Homo sapiens
ttcccgggtcgacgatttcgtcgggaacgggcaaacacaagctgctaagcactggccccacagagccatggtccatccgagagaagctatgtttagcatcttctgtcatgagaagtggcgatcaaaattgggtatcagttagcagagcaatcaagccctttgcagaacctggccgccctccagactggttctctcaaaaacattgtgcttcccagtactcggagcttttagagaccactgagacaccaaagtgagtacaaagccagacggaaacgaggtgaaaagggagaagtggtggaaactgttgaagatgttattgttcggaaattgactgctgagcgagttgaagaactaaagaaagtgataaaggaaacccaggagagatatagaccggctaaagagagatgcagaactaattcaagctggacacatggacagcagacctggatgagctttgcaattgacattgcaacgaaaaagaaattggaagaagaggaggctgaagtaaagaggaaggctacagatgctgcataccaggctcgtcaagcagtaaaaacacccccccggaggttacccactgtgatggttcgctctcctatagattctgcctccccaggaggtgattatccacttggggacttgactccaaccactatggaagaggctacctctggggtaacccccgggactttgccgagtaccccagtcacctcgtttcctgggattcctgacacccttcctccaggctctgcacccttagaagcccccatgaccccagtaacagatgattcaccccagaaaaagatgcttggacagaaagcaactccacccccctcccctctgctgtcagagctcttgaagaagggcagcctcctgcctactagccccagactggtcaatgagagtgaaatggctgtggcttctggccacctgaacagtacaggtgtcctcctggaggtaggcggggtccttcccatgatacatggtggggagatacagcaaacacccaatactgttgcagcctcccctgctgcatcaggtgctcccactctttcccggcttttagaagctggtcctacacagttcaccacacctcttgcttccttcactaattgttgccagttaagcctccagttaaacttgtgccaccccctgtagagtttttttcccaagctaccattgtcatgatgcctgcgctgccagcaccatcctctgctccggctgtctccactactgaaagtgtagctccagagagtcaacccgacaactgtgttcccatggaggctgtgggggatccacatactgtgactgtttccatggacagcagcgaaatatccatgatcatcaattctatcaaagaaaagtgttttcgatcaggggtaacagaggctcctgttggatcaaaggctcccagcatagatgggaaggaagaattatatctggctgagaagatggaaattgctgtgtcttacacaggtgaagagctggattttgagactgttggagacatcattgccatcattgaggacaaggtagatgatcatcctgaagtgctggatgtggcagcagtggaagcagcactgtcattttgtgaagaaaatgatgatcctcagtccctgcctggcccctgggagcatcctatccagcaggagcgggacaagccagtacctctccctgcaccagaaattgacggtcaagcaagagagactggactttgaggaaacggaaaacaagggaatacatgaactggtggacatcagggagcccagtgcagagatcaaggtggaacctgcagaaccagagccagtcatttcaggagccgaaatagtagctggagttgttccagccacaagtattggagccaccagaactcaggagtcaggacttagatgaggaactgggaagtactgcagctggagagattgttgaagcagatgttgccattgggaaaggcgatgagactccacttacaaatgtgaagacagaggcatcccctgaaagcatgttgtctccatcacatggctcaaatcccattgaagatcctttagaggcagagactcagcacaagtttgaaatgtcagactcattgaaagaagaatcagggactatttttggaagccagataaaggatgccccaggtgaggatgaggaggaagatggtgtcagtgaagcggccagcctataggagcctaaggaagaggatcaaggagaaggctacttgtcagaaatggataatgaacctcctgtgagcgagagtgatgatggcttcagcatacacaatgctacactgcagtcacacacactggcagactccatccccagcagccctgcttcttcacagttctctgtctgtagtgaggatcaggaagctattcaggcacagaaaatttggaagaaagccatcatgcttgtatggagagctgcagctaatcataggtatgccaatgtcttcctgcaagcctgttacagatgacatagcacctggctaccacagcattgtgcagaggcctatggatttgtcaactattaagaaaaacatagaaaatggactgatccgaagcacagctgaatttcagcgtgacattatgctgatgtttcagaatgctgtaatgtacaatagctcagaccatgatgtctatcacatgggcagtggagatgcagcgagatgtcttggaacagatccagcaatttcttggccacgcagttgattatgcaaacatcacgagtctgggatcaatgctaaaagtcttcgagggagagattcttacccgcaaacaggatgcttcagagaaggacagtgtccccaatgggctctcctgcctttccttctctctctctttgatggaggaacccaggggacgccgctgtgcccattgaagccagatatgaagatgaaaaaagtgaagcctcagagttaccctctttgagccgaacctaaaataaaagtaaacaagatagagcttgggcttgcggcgcccagttcccagaggtgtaagttacagaagaggaggtacctgggccacacgacatgagctggaaaatctctcttagagagttggagtagcacaattgcctgttttagggcagaaaccatgggctatgttaatgtcctaatgtgtagctagcagatcgtagctagtttgtattgtcttgtcaattgtacagactttttaaaaaaaaacaaccaccagtgaaatgtgtgtgtatacaataaactgaaaaaaaaaactaaaaaaaaaaaa

SEQ ID NO: 145504 - DNA, 1479 bp, Homo sapiens
  misc_feature (1)...(1479): n = a,t,c or g
gctggtgttctaaactatttatcttgtgtgtgtacatttgtgggtggagtttgtgcgcctggtttttttgtttggaaaacactgcgtggtcaatgtggttatgggggggagtgatgcatttttttctagtcttaaaactaaaaacttgagtctaccatttcttggttgcactgaaaataccgcccagcctgatggtgttcccgtgctgtccctcccccttcccttctccccgcgtctacctccccaccccgttctgttccccctccctccttctccctctccctcaaatccgtgagttttgggaagccccaggggcctctctcccccgcccctcctgggatgagggccaccatccccccaaaccggcttgtttttgcagtttccccagggatcctgggaagcttcggtgggcgcttcgagggtnggccggggacacgggggggtggggtgaaagttcgttaccttttctatttgcgttctatcatagttaaacggttggcacaattttttaaaaaaagtaaatgggattttgccacaatttaaatgttcattaacaatttatggacaggattattaaaatatttaaacatatttttaaggccaagttttaggtgtattttttgaatcttggttataaacccaattttaaagggcgatgtatccagcgttgtgaaggcaacagagtgtacccatatttatatttttataaaatacctataagactgtgaatctcttgtgctaatggctgagttaattgaaggatcgttttgcccctttttaggcctcccagagcttcgagggactcaatttcggaacccgaaatcctgccgtggggggaggggtgcgacgagacctgagcccggcgaggttctcctgcgtcactttctgtcctgaaaggccgcccttcctggtttctgtggctccaattttctatgcagccccacacccccttgttgttttgatcctgagaaataaaagggaggctgaattattcaaatttaaatgaggtttcccccttccatggaaaatgcctgctgaccccctccgtgccagaaaaggggagcccccttggggaccacaggtgggtggaggcccctttggtgcgtggctggtccgtaatccgggccagccccccccgtcgccttttttataaaacctttgtgtgagaagaatatattggataatgtccagtgaaacaagccagacattgaaatggaggccacagattaactcccacaaggagttcctcctgtatattttttcctagatgccaaatacctttttaattatgttaattaatgttaagactttctaggcttatagcgaagctgtgtgtgggtcacggggtgatcactgctaactggataaagtttgtgcagcacattcctgagtgtacgatattgacctgtagcccagcgtgaaaaatttataaataaatttttcattgatctttttatattaaaaaaaaaaaaaaaaaaa

SEQ ID NO: 145505 - DNA, 441 bp, Homo sapiens
tgtctgcggggggtgtcttccctgcctgtggcatttgtgtgttggctttgcagctgctgtctgagtagtggccactggggtgccttcactgggccagtcaacggggggctcctgcccaggccacagagaacctgagttcccgggagctgggccctgcctgcagccagactgtccagggaaacagcctctctcttttctacacactcagccacaaagccccccagctcccgcaccgcgtcccagctcccctcttttgtaagtatgtgaaaaggaaaaaatgcaaacgttggagtttgggctggagctcctccctccagctgcgacttttaactatgtaataatgtacagaggaagctgttggtgttctaagactctgtgtggctgtgcaatttctgtacatctgcaattagaaatattaaagatttatttaactattttaaa

SEQ ID NO: 145506 - DNA, 1847 bp, Homo sapiens
  misc_feature (1)...(1847): n = a,t,c or g
ttttttttttttttttttaaaatagctaaattaaatcttttaatattttcttaattgcaaaatgttacagaaattgcacagcccacacagagtcttagaacaccaacagcttcctctgtacatttattacatagttaaaagtcgcagactggtagggaggagctccagcccaaactccaacgtttgcattttttccttttcacatacttacaaaagaggggagctgggacgcggtgtggggagctggggggctttgtgggctgagtgtgtagaaaagagagagggctgtttccctgggacagtctgggctccccgcagttcgtgcggggccgcaggggggagggtgtacctggggggcagatgctctgggggggaccggggcgtgtggagcctgtagccttcggtcctccaccccccactttctggggcagtcggaaagagttcctcactgacagggaggttttnggcattttccatcacccagaacatggaagttaagcaaaaaaagtccagtcaggccatcntgtgcttagcaagggaagggcgtggcttttcttccagcagaggcttgagtctcgggtgaccaagggggccccggggctgttctttccccagcagggactgtccctttccctccccagggcctctggcaacccccagcccctggctgccaggcagggcccagctcccgggaactcaggttctctgtggccctggcaggagccccccgttgactggcccagtgaaggcaccccagtggccactactcagacagcagctgcaaagccaacccaaaaatgcaacaggcagggaaagacaccccccgcagacaccaagccttttccctcctgccccaatactgttctctagattccagaaataaaataaaacccttggggagagcagcagtcccggccagccctcggcagcacccaggaccaaaggatatgtaacaaccattaggtgagatagtttacatttacagtcaaacacccaagaacattttacaaaatcggcaagacttgccaattaagataaaaatctgtgaagagtctgtaagacttttaacagtttttgcaactaggtaaataaggctctcggccttgaaaactcacccaccctgcaaagggcaagctggcaaccggccacaacgggtagcctccgaaccccgcctgtccaggccgccgggagcctccctgtaattgcctaggggggctctgtccgaggtccactctacgaggcagcggtgggagggggctggggaaaagaagagcagggctcactgggcaatgggaggatgagactggagccagaccctgcctgtgtggccaccctggtctcaggcacgaaggacgcatgggtggggacaagacagaagcagtgagacaggaaggggtgggggcagggcctctgctttcaacctccccatcttcctgtgagtaatgtgatccctaggttgcccagcccttcctccaccagcatctgtctctagcctaactgaattgtaaggttacatctaaaagccccttcccagagcagccactgtcacctgtccccgagctcagggtgaacgcagaatggctttgggccacccctccagcacatccacccttcaggtggggcctctgtggcacattccagctgcaggggcagaggggtgattcctgcagctcgccctgccctggctctgatggcaaaggccccactccctccctttatacccagggcctttgctcagaatctgcaggggctgggaacagacaggggccgagagagacccaagctcctgctcatctgtcttgaaagtgggggaggggcagataagctacagaacagcctagagctga

SEQ ID NO: 145507 - DNA, 545 bp, Homo sapiens
aaacgcaaggtctcactctgtcacccaggctggagtgcaggggcgccatctcggcttactgcaacctcctcctccctggttcaagagattctcctgcctcagcttcccaagtagctgggactacaggtgtgcaccacacctggctaatttggtagaggtggggtttcaccatgttggcaaggctggtcttgaactcctgacctcaaatgatctaccagtctcggcctcctaaagtactgggattgcaggtgtgagccaccacacccagccagtggaacttatttcaaaattgaagtcaactctctcacaccctggcactgctttatcaaccaggtttctgtaattcctaaatcctttattggcattttaacaatgttcacagcaacttcaccagtagattccatctcgagaaaccactttctttgctcatccctaaaaagcaactcctcatccattcaaatttgatcatgagattgcagcaattcagtcacatcttcaatgctttacttccagttctatttctcttcctgtttcccctttgccga

SEQ ID NO: 145508 - DNA, 652 bp, Homo sapiens
gctgcaatctcatgatcaaatttgaatggatgaggagttgctttttagggatgagcaaagaaagtggtttctcgagatggaatctactggttgctccttgagggcaggacagttcttatggctttatccgttgcgtaagcacagagaggtctgcgaggtcaaaactattgtcatgatagcaagatgcctgtctttttcatttattctcacggtgtgcagaggctacatgatgtgtgatgacatcctcattgatgttaatgaatggtgctatacttgaattttctaaggtgtcattagcaattctcctgcctcagcctcctgcataactgggactacagggaagcaccattttccacaaaactctcaagaaggacttgttgcaactggaaaagcaattaaatgtgaatcgtgatccaggagaaagtaacaactcacataactcccaaattaaaagttttccaaagatatatcatttttttttttttggccttttaagaaactagccaacaaatactcttgacaggtttgtgtttggttttgaaaacacacaccttagtgtactgaacgaaaaacaatttcttttaatttggtttgttggtcccacaccccatctatcaatgtatgtgctatttaccaataagttctatacagt

SEQ ID NO: 145509 - DNA, 1911 bp, Homo sapiens
gccgccggggccgcctagagaagaggctgtgcttcggcgctccggctcctacagagagcctcggctagtgtgtggaaacaggaagagaactagaactaggaagtaaagacattgaagatgtgactgaattgctgcaatctcatgatcaaatttgaatggatgaggagttgctttatagggatgagcaaagaaagtggtttctcgagatggaatctactggttgctcctagagggcaggaccagttcttatggctttatccgttgcgtaagcaccagagaggtctgcgaggtcaaaactattgtcatgatagcaagatgcctgtctttttcatttattctcacggtgtgcagaggctacatgatgtgtgatgacatcctccattgatgttaatgaatggtgctatacttgaattttctaaggtgtcattaggtaggtttaggtatgcatacttgtttttagaaattatttttttcctttttcccatttttagaaatcaactcattttttaggttatgccttcagtaatctttgcaacctcaatattgtgtaatggttactttaaaatactgtagttttctttgtgcctaagtataaacataagtacattttgttgttttgtttgcaatagtggtttaaatattttcccaaaatacccaaatttaaaaattctacaactttagaatttaataaatttattctaaaatatttatatattttttcatttaagaatggatcggcttaaaaagactgcttctcatttacttactggctatacccatctgtatactaataaaaaacaagatttgatttggaaggactgacctcaaactaacgaaaatatgaaacctgtctttctgctttggagatatttacctaatcatgttctgcagtaggaataatttagttcttttgtctttttttgggagatgaggtcttgctgtgttgcccagggctattcacaggctgccatcataggtggaactacagcctgaaactcctgggttccaagagatccttctgcctcagcctcctgagtagctggaactataggcatgcgccaccaagcctgggcttttaaaaaaattttaaaaagaattttgagacaggatcttgccatgttgctcaggcttagtcttcaactcctagcccatgagtgatcttgctttgggcctcttcaaatggttgagttattgggcgtgagccacgcatacccagccaaaaatttttttagagatgggacatggaatgatcttgaatagtgttggtgccacctatgttgtggcaatcattttgaaaccaatcattcagagtgcttttttttggtaaaggcattagtttttaatgcaggtatgccactactgggaaaaaaaaaaaaaacaggttttaaagctaggaaatgaaaagctacttaactatctttaaaggataagttactttattattacacttggaaacatacacattaggctggaaaaactttaaaaaatcttcacactgctgaatgtctctgctggctgaagtgtaagtaaaagatcatagtagtgccgctgttgagtgatacagcaacttgtcattaaagatgtgtgtgcagacatggattctgagttaatatctcatctgtagaagtatatatatcgtcccttgctttgggattggtttctggacaccactcccccacccttgctggccatttgccaaggacaccaaaacccaaggatgttgaattcccttttataaaatggcgctgtatctgcatacaacttacacacatcctcccatatactttaaatcatttccagatttcttatacttcatacaatgtgaatgctatgtaaatagttgttacattgtgtacttatatttgtactattgtattaaatattctcaaatattaaaaaaaaaaaaaaaaa

SEQ ID NO: 145510 - DNA, 364 bp, Homo sapiens
  misc_feature (1)...(364): n = a,t,c or g
ctggaaggatattaaaaagctaatataatcatacgaaaggaatcatagtgatgcggggtggagtggaagcaggaaacgtttcactctattccttcaaatatattcaggtatattacacctttatatattttattatatgtatttgaacaatgagtatattaccccttcaaagttacataaatatgaatgcaggaaatctatatggacagatgcataacaattttccatatatagttaaacagaaaaagcaagtttgcagaacagtgtgtacagtatcacttgtctaccacaaaatgtgtgtgtatatgtgtgtatgtgagtgtttannnnnnnnnnnnnnnnnnnnnnnnnnnnnnnnnncaca

SEQ ID NO: 145511 - DNA, 388 bp, Homo sapiens
ctggaaggatattaaaaagctaatataatcatacgaaaataatcatagttatgcggggtggagtggaagcaggaaacgtttcactctattccttcaaatatattcaggtatattacacctttatatattttattatatgtatttgaacaatgagtatattaccccttcaaagttacataaatatgaatgcaggaaatctatatggacagatgcataacaattttccatatatagttaaacagaaaaagcaagtttgcaggaacagtgtgtacagtatcacttgtctaccacaaaatgtgtgtggtatatgtgtgtatgtgagtgtttatatacatacctatatatacatttacacacacacacaccattgaaagcacacactcctcct

SEQ ID NO: 145512 - DNA, 1159 bp, Homo sapiens
atggggaacctgggccaagtacggcggctgagcctgtgggactacctcttggggctgacccaccccagggggctcacaacaagtcaacctggcaggtcaggactgagccctccagctccgccacagcagtccttctgcatgtgccaaaatgtgacaccagggatcatggccttggggatgtctgctgtttatttccaagtcagtggcactaaggagcagccagtcccagggcacccaatgcagagcatcctgcttgagctttggggcttccaggtacaccactgcgtgccagggaaccccaggccagacttcatggaacacagcaaggacctgaccctcagcctcttggatcactcctgccactggcatgggaggagccatagcagcaaggagtacctggagctgcacagggagaacttcctcctcatcctcagatctgcctttcccactggactcttgagggcctggcccagagatggcatctctcagtatttgctggttgaattgaaaaataacatgtttaggtttctggtggcagggtctgcggaaggggcggcaggccccccatgtcccggcccgcgaaaggtggcaaagaagaagccccacctgaaacaagcccccaagaatgcaggcccaaggagatgggacgagggaagataaggctttccaagccagaaacaaaaagaggagcagaagaaactcggaggagcttaaaagcggaaggcccgcgggggaaggggcccttggcccacagggggaattaaggaaatctgggcaaaaaagtaagctgttcccttggtgcctgaggagatggtgaccctttattttcatcctggtaatttaaacctctctatttccctgccataaacattcttttgccaccgtatagctgggaattaagtgttgttcttgggagctgtttgttacattttaaggattaaactttttgtaaaaaaaagggaaaaatctttacagttggctcatcgatctctttagttgttttcactaagtcattccctaccataactggtgaatttaaaagtaaaacccagctcagaatcttgccagagtctgttctttggtccttgttctaccctaaactttgtatcacctgaaattaaaccaactcgatttgaaaaaaaaaaaaagtcgacgcggc

SEQ ID NO: 145513 - DNA, 462 bp, Homo sapiens
ctgtccgtctggcctgccccgcggttccaaccacagtggtgaagcagcgcttgcagatgtacaactcgcagcaccggtcagcaatcagctgcatccggacggtgtggaggaccgaggggttgggggccttctaccggagctacaccacgcagctgaccatgaacatccccttccagtccatccacttcatttttttttgcagggtgctgcctatgggccctctgctccccaatgccttagagagaggaggggagccacggccgctcaccggaaggctgtgtgcggggacatccgaggtggtggtggacaggaaggacttgggaaggggagcgagaaattgctttttctcttcctccttgggcagaatgtagcttttctgcttcactgtggcagcctcctccctggatccttagatcccagaggagggaagaaaatttgcagtgactgaaaacagtaaaaaaa

SEQ ID NO: 145514 - DNA, 504 bp, Homo sapiens; identical to SEQ ID NO: 115226

SEQ ID NO: 145515 - DNA, 798 bp, Homo sapiens
gcttttttcttttttcccccttctcagctgtagatatgatatctcctttcagggccccagcttaagggcaaagtgagttaatgtgtagacaaaggcgagggacaagagagagttaacatctagacagtggaaaaagccatggtgtgtggtttctgggaaccaccaaacacttgcaggtttagctttttcccagggttgacttacaagaaagaaaaccatgtttttgcaagattaaaaatgtggttgaatgtgccctaaaattaacccatcccccatttttatccatatttccaccatcacttccagggttttaaagagtccagtgcctcaccctgggcggagctggtaagtacattttgcttccttagaaagctaagtccctgggttccgtctgattttaggttcccaggaacttcctgagaacacccgaatcgcaaaagggtaaattttctggaagtttgttttgccagggaatagctgggagtatggccaaccctgctccaacgatgcgggtaatgaaatcccagcagaagtggtgaagcagcgcttgcagatgtacaactcgcagcaccggtcagcaatcagctgcatccggacggtgtggaggaccgaggggttgggggccttctaccggagctacaccacgcagctgaccatgaacatccccttccagtccatccacttcatcacctacgagtttcctgcaggagcagatcaaccccactccggacctacaacccgcagtcccacatcatctcaggcgggctggccgcgggccctcgccgcggccgctctaga

SEQ ID NO: 145516 - DNA, 2916 bp, Homo sapiens
cctagcagatagaggacttggtctgaccttcagggttgtgatggggcaggttgggaggtgggcggggagtctctgtggtctgggtgctgaggttgacccgatgggcaggtgaagaaaatcaccttctccattccccttgatttctttatcgtgtgccgcacgaggcatgctgaagggacacacacctttccccctttttatttacaaagtagagagctgagaaagacagctcatgttctgttttgttttgtacacattatctttctcaagagatgtgatgtccttaagtaaactgacctgccttcatggcttgtcctgtaatgaatgcgttcaagacagtgttttggggacaggaaagaggcattcttatgttagcggtggtggggggtggggtggggtggagaggaaacccttctaggaagtagttcaatgaaaaacctaaaaatgcccaaataaacattcgcttacatattatatatcttgggcttctttttatgacagttcattcagggacccagtcagtaaacaggtagttaacttcgtgtaaccaagcaagggttttgtttatcttttttaaaggagaaaaaagcgaggctcaaactctctctttctccttgtcataactattggtttacagtctttatttgtttaaaagtaaagcacattgtatgtatttatttggcaacacatgaggccattaaaaccctgagcctaaggtaccacagttagcctcatttgcctcttgtcctgtgaactccacttagaacgtcattgaacttgggcagacataattctagtgtctgttccaaacgcactgtgtcacacaagctagaattaccattagaggcaccacacccctgagaatacacaagggggcacgcttccagtagatgtgttggggaaggaggagagcacgagcgggacagcgggacatggatgtcagcgtttgtaggtgggtccatgagggttcctaccaggggtagccaggatctgggaaacagatcagcgactctagtctgaagtggctgccctggttccggggctgccttcagcaatgattcactgcaggagagacggaaatagccaccttccaaggccgtgaagtcctggagataaaaatggattttaacctaggaactgccgggagctggcccttcgggggttgttcaaactagggctgtgtgtgcctggctctcgccctgtttccggtgtcctaaactggcttgtttctctttaatggcttggccttcattccgaccctggggtggggccacatccaacccactgcccactgggttgtccgtctggccttgcccccgcggttcccaacccacagtggtgaaagcagcgcttgcagatgtacaactcgcagacaacggtcagcaatcagctgcatccggacgggtgtggaggaccgaggggttgggggccttctaccggagctacaccacgcagctgaccatgaacatccccttccagtccatccacttcatcacctatgagttcctgcaggagcaggtcaaccccccccggaccctacaacccgcagtcccacatcatctccaggcgggctggccggggccctcgccgcggccgccacgacccccctgggacgtctgtaagacccttctgaacactgaggagaacgtggccctctcgctggccaacatcagcggccggctggtggtgcctatgggccctctgctccccaatgccttagagagaggaggggacggcacggccgctcaccggaaggctgtgtgcggggacatccgagaggtctgggagctggaccggctgctgccttgtgacatccgggatggcgccttcattactatgccctttcactgctatgcacaaaaccgtggggagggcctcctgcgccccgccgagctggcggatggagctgcgccgcgggagcttgggcagccaggcggtggcccggaggatggatggggacagccgagatggcggcggcggcaaggaccgccaccgggtcgggaggactacgagaacctgccgactagcgcctccgtgtccacccacatgacagcaggagcgatggccgggatcctggagcactcggtcatgtacccggtggactcggtgaagccgcgtgcccggccccggctgctggcggcgctgaggcgggggaggcggagtggcgagcaccgctggcttcggcggcgactgggctcccgggggacgcgatcgctgaagctctgcacagtcttaccacgctggccgttcgggctggctggggccgcccacacgtgcgcggtttccgagggagttccccgcaggggaagccctcaccacgctggagctgagaaacgtgtggccctggcccggccgcgcgccctcgggacttggtgtgtggctgctgctccccgggttatttcgggaacttggggccggcaagtcttctctcgactagtggcagctctttaccggttcgacagcggcccgtgggatcccctttctgagggttcctgcacttcttcccccgactttgggtcgccgagccgccgggaggcaatgacgtttgccttctccttttgcttgcggggaggaaggcacatgcccagcctcagagaacattactgggccaggatgtctcatgagagacataaagactgggccaatgttggcggcaccatcactgtcctttcagagcccaatttcctgattaacaacacaaggctcgcccggaacagaacgccctgggctcggcatgacaactggtgccaccactggcaacacgtatcacctgaaagcagcctcgactgcgtgaggctccagggccttccctggatggcagcagctgaagtggagatgaagcttcctgctgggcacatgcacatgccagtttcttttcctaataggtccccactgggtgctggctgcatcaactga

SEQ ID NO: 145517 - DNA, 556 bp, Homo sapiens
aaggcatgggaagatgtccctcctgtcctactgcagaaacattctcagggtttccagttcagaccatgccaagcctggtaaagggtgaagatgtttccacagaaaagtgtgcagttacaagtggcttcactgtgtgtgacctgcacgtggtgagggttcaaggttagaccccagccagtggggagagccggcctcatgtgccaaggagcccacagctgtgccaagagggcctgggctgaggaacaggactgcattaacaggcacacagaagcccccacagtcccgggaaggggcacggtgcatcatcgggggctctgctccgtccacaccaccttcttctgctcgtcggcgatggcctggcggacacagctgagcaggccgtccaggtcgctccagccgtcaggagccaggctgctgtatagacagggcgcccggtccaggtctccctcctcctgcctcgcagcctccaggagctgctcctctgaggtgcccaaccgctgtaggcccttcttgagcttctttgccatcttctcgttgacagagacgtgggaattcc

SEQ ID NO: 145518 - DNA, 675 bp, Homo sapiens
gacacgaccctggaggaggccgtggggcttctcaggagggtggacggcttctgctgcctgtctgtgaaggtcaacacggacggtacacataccactcctctcgtgtgcacagctgcctggccagactccatgacccttaagtccctggtggttcttctgcacgcccagcagccagggacccccagagccaagagaggatcagccaggctgtgccccaggtccccaggaggcccccaagccagctggaaacctcccacccactgactccagtgccagagcagcttctgagactgggagggtccttccttctctcctactttaattttctgcaaccttcctcgcagaggctcgtatctgtggctcatctgtggctcatgtccccttttatcaggttataagaggctactccaggacctggaggccaaagtggcgacctcgggggactcattctacatccgggtcaacctggccatggagggcagggccaaaggggagctgcaggtgcattgcaacgaggtcctgcacgtcaccgacaccatgttccagggctgcggctgctggcatgcccaccgcgtgaactcttacaccatgaaggatactgccgcgcacggcaccatccccaactactccaggtgagcagctgcctcgacccgggaattccggccgagacggccc

SEQ ID NO: 145519 - DNA, 4118 bp, Homo sapiens
atgggggaactgtgccgcagggactccgcactcacggcactggacgaggagacactgtgggagatgatggagagccaccgccacaggatcgtacgctgcatctgccccagccgcctcaccccctacctgcgccaggccaaggtgctgtgccagctggacgaggaggaggtgctgcacagcccccggctcaccaacagcgccatgcgggccgggcacttgctggatttgctgaagactcgagggaagaacggggccatcgccttcctggagagcctgaagttccacaaccctgacgtctacaccctggtcaccgggctgcagcctgatgttgacttcagtaactttagcggtgagagctccgactttgacggtttggcaggcacttctaggaacctcaggctcctggtaaccccaggtctcatggagacatccaagctgaccgagtgcctggctggggccatcggcagcctgcaggaggagctgaaccaggaaaaggggcagaaggaggtgctgctgcggcggtgccagcagctgcaggagcacctgggcctggccgagacccgtgccgagggcctgcaccagctggaggctgaccacagccgcatgaagcgtgaggttagcgcacacttccatgaggtgctgaggctgaaggacgagatgctcagcctctcgctgcactatagcaatgcgctgcaggagaaggagctggccgcctcacgctgccgcagcctgcaggaggagctgtatctactgaagcaggagctgcagcgagccaacatggtttcctcctgtgagctggaattgcaagagcagtccctgaggacagccagcgaccaggagtccggggatgaggagctgaaccgcctgaaggaggagaatgagaaactgcgctcgctgactttcagcctggcggagaaggacattctggagcagagcctggacgaggcgcgggggagccgacaggagctggtggagcgcatccactcgctgcgggagcgggccgtggctgccgagaggcagcgagagcaggccagaccctcagagctgctgagcttcacggtccatgtgtcccactctgtccagtactgggaagagaaggaacagaccctgctgcagttccagaagagtaagatggcctgccaactctacagggagaaggtgaatgcgctgcaggcccaggtgtgcgagctgcagaaggagcgagaccaggcgtactccgcgagggacagtgctcagagggagatttcccagagcctggtggagaaggactccctccgcaggcaggtgttcgagctgacggaccaggtctgcgagctgcgcacacagcttcgccagctgcaggcagagcctccgggtgtgctcaagcaggaagccaggaccagggagccctgtccacgggagaagcagcggctggtgcggatgcatgccatctgccccagagacgacagcgactgcagcctcgtcagctccacagagtctcagctcttgtcggacctgagtgccacgtccagccgcgagctggtggacagcttccgctccagcagccccgcgccccccagccagcagtccctgtacaagcgggtggccgaggacttcggggaagaaccctggtctttcagcagctgcctggagatcccggagggagacccgggagccctgccgggagctaaggcaggcgacccacacctggattatgagctcctagacacggcagaccttccgcagctggaaagcagcctgcagccagtctcccctggaaggcttgatgtctcggagagtgcacaagccggtcgtctcccggcctgcagcggcgtcctcatgcggcggaggccagcccgcaggatcctgagccaggtcaccatgctggcgttccagggggatgcattgctggagcagatcagcgtcatcggcgggaacctcacgggcatcttcatccaccgggtcaccccgggctcggcggcggaccagatggccttgcgcccgggcacccagattgtgatggttgattacgaagcctcagagcccttgttcaaggcagtcctggaggacacgaccctggaggaggccgtggggcttctcaggagggtggacggcttctgctgcctgtctgtgaaggtcaacacggacggttataagaggctactccaggacctggaggccaaagtggcgacctcgggggactcattctacatccgggtcaacctggccatggagggcagggccaaaggggagctgcaggtgcattgcaacgaggtcctgcacgtcaccgacaccatgttccagggctgcggctgctggcatgcccaccgcgtgaactcttacaccatgaaggatactgccgcgcacggcaccatccccaactactccagggctcagcagcagctcatagccctcatccaggacatgactcagcagtgcaccgtgacccgcaagccatcttctgggggaccacagaagctggtccgcatcgtcagtatggacaaagccaaggccagccctctgcgtttgtcctttgacaggggccagttggaccccagcaggatggagggctccagcacgtgcttctgggccgagagctgcctcaccctggtgccctataccctggtgcggccccatcgacccgcccggccccggcctgtgctcctcgtgcccagggcggttgggaagatcctgagcgagaaactgtgcctcctccaagggtttaagaagtgcctggcagagtacttgagccaggaggagtatgaggcctggagccagagaggggacatcatcccaggagggagaggtgtccgggggccgctgctgggtgaacccgccatgctgtggagtccctcatggaaaagaacacccatgccctcctggacgtccagctggacagtgtctgcaccctgcacaggatggacatcttccccatcgtcatccacgtctctgtcaacgagaagatggcaaagaagctcaagaagggcctacagcggttgggcacctcagaggagcagctcctggaggctgcgaggcaggaggagggagacctggaccgggcgccctgtctatacagcagcctggctcctgacggctggagcgacctggacggcctgctcagctgtgtccgccaggccatcgccgacgagcagaagaaggtgcaacgccgacgtcatccaagaattaaccccaagccagaggacgggcatcgccacccagcaacgccagtgtcaccgaagaattaacccaaggcagaggatgggcattgccacccagcaacgccagtgtcaccgaagaattaacccaagccagaggacgggcatcaccacccagcaatgccagtgtcaccgaagaattaacccaagccagaggacgggcatcgccatgccttcatcttcggagactctccaaaaaagataagcttctgcccagaaacaccacaggttctaagctcattacttcagggagcctgctgccaatcagctggaaacctgcctggggaacagggacttgaccatggggcaaaacagaagaagcagaaacctgcccaaaggtcgctcaaaggcttcctctaggccagacgctggtaagagccaggcgccgtgctcccaggtgagtgtcggtgggacctgcgtactgcccacgcggcaccgaagcccctgcctgctctctgtgaagggttcagaagtatctgtggctgccaaagcctgaagcaggcctcaggcctcccatttgcaggtccccaaaccaagccagaaaacaagactcccttgtcatgggctgggggcactgccctgtccgcagaccacgtatgtctagaattcccgtgctgggacatggttcagacacaaggacaactgtgtcccctgccatgacggcagtgcccctggtggtggaggggctaggcacatgctctggtcacatgctctggtccccctccaggcaatggcaagagtgaccccacaggaaggaagaaccctccttggatgggagtgtggacggaagggctgttgccactactccccaggctggccggccacacggacacgtgtgggatgtgtctgggacatgcctgggatgtgtgcacaggcctcctgggatggtcacagctcattgtggaggggctggcactggggcag

SEQ ID NO: 145520 - DNA, 516 bp, Homo sapiens
  misc_feature (1)...(516): n = a,t,c or g
caggcatcacctccttgtgccccagagtttcctctaagtccggccaggccaccgtcccttctgatccggataaccagcgaatactctaattccgttaggcgtgtcctgagccaccctctggaggaggcggcatgcagtttcatatgcgtctaacggcctccatccaacaggacaggcgggagaacggcggacggcctgggcgtgtggcaggggctgcttccctcattttaaacgcgcctgaggctcacacccaaggtctgtccctacaggtggtcccacttcgacaggaagttcctcagcagggtcctcatgagacggtcggcccagaagtctcgagaccggatcctgaatgtcttccacgagctgaacctgattcagttctggacatgaggccaatggagttttagggtctccgggctgcttcctgaccacagggagagcgccgcgggtccctggccttcatccgcgaattccaccacacggantgtggtgcgaaatcaaaaggnnnncggccct

SEQ ID NO: 145521 - DNA, 1165 bp, Homo sapiens
gtggtcccacttcgacaggaagttcctcagcagggtcctcatgagacggtcggcccagaagtctcgagaccggatcctgaatgtcttccacgagctgaacctgaaggatgccatcagctacgtggctgagcaaactaatgcaggaacagaaaaccaaacattgcatgttctcacttatcagtgggagctgacaatgcaaaccatggaccccggaggggaccacacaattgtggcctgtaatggagtgtggtggacagcgcaggcatccgaaactcccagaagggccacacccactagagcttccaacccagtggccctacttctgcctgagctctgccggaagttagtagcagaccagactgtttcccgccttcatgaacctccctctctggcgccagaaacacccagtaagcccccacacaacatagctcagcaaagtaccaggacaggtgggcacaaggatgtcaatggcgtaatagtacacacacataaaggggtggagttaccgctggcgttaccggtatttctgcgcagcctgcgggtggtgatggtgcaaactgtaggtatggcggtgattgcggcgttaatcggcgcaggcggttttggtgcgctggttttccaggggctgctaagcagcgccattgatttagtgttgctgggggtgatcccggtaattgttctggcggtgcttaccgacgcgctgttcgatttgcttatcgcactgctgaaggaagggagtttttcggtgctgattggcacatctggctccggcaaatccaccaccctgaaaatgattaaccgcctggtggagcatgacagcggagagatccgctttgccggagaagaaattcgctcgctgccagtactggagttgcgccgccggatgggctatgccattcaatctattggcctgttcccccactggagcgtggcgcaaaacatcgctaccgtgccgcaattacaaaaatggtcgcgggcgcggattgacgatcgtatcgacgaattaatggcgctactggggctggagtcaaatttgcgtgagcgtatccgaatcagtttccggtggtcagcagaacgtgtgggagtgcgcttgactggttggcgatcggaagttactagtggtgacctttgggcttggacggaaaagggggagtgcaataaatag

SEQ ID NO: 145522 - DNA, 1646 bp, Homo sapiens
  misc_feature (1)...(1646): n = a,t,c or g
ttttttttttttttttttaaggtgaaatcacctatgttttattataaaaaacatgtgacacttataataaaacccagtaagggagcacatacaatttgccctgggttcccattttctgagcgatctgtgtttgcttggggtggaggcaccgggaggtgtggccacgtggcttcataaagctcagctgcggttctccgtggccacagtgactctgctccgggtacccagtccccgactccttggccttcccaggggccattcccgggggtctctggagagcacagcctcggttagctttgacttcttgggtgtgggntgaaactcagcctgtacaggagagctgccattgctgccgcggggccttgcccagggtgtgagcacacaagattcgcccgggcccacacctgtgccgtggagggcggctctgggcggctgcacccatgtccaagtgacaggcatcacctccttgtgccccagagtttcctgtaagtccggccaggccaccgtcccttctgatccggataaccagcgaatactctaattccgttaggcgtgtcctgagccaccctctggaggaggcggcatgcagttttatatgcgtttaacggcctccatccaacaggacaggcgggagaacggcggacggccctgggccgtgtggcaggggcctgccttcccctcattttaaacgccgccctaacagggtccactataacaaaacaaaattcaggaaaagaaaggggccgggccacgcgtccggcgggctctagggcgcctgtcacctgaggctcacacccaaggtctgtccctacaggtggtcccacttcgacaggaagttcccttcagccagggtccttcatgagacggtcggcccagaagtcttcggagaccggatcctgaatgtcttccacgagcttgaacctgaaggatgccatcagctacgtggctgaggtagcagagccgcttgctctgccgggtcggggctgcagcaggctcgggcactggctgattcagttctggacatgaggccaatggagttttagggtctccgggctgcttcctgaccacagggagagcgccgcgggtccctggccttcatccgctcccccagcaccgacaacgtggtcaacgtggacttcacgccacgatcgtccaccgtggaggcctctgtctcctacctcctgtatgtggccatggtcatgcagcttccctggggaagagcccagcctcgggagctgagagtcacagacagggctgtggtggctcctggcttgggggtggcatggaagaggggagaggtgcagaaagagggggtgggtgtctcctcccacaagccctcctatattaggccgtggccagactcccttagtgctggacggaaggtgaaagggaggggcagcagcggactgggggccaggcctgacgtgtttgcccctggcccgcagcagcctgtcatggtccccatgccacccttactgctcctccggccctgggctccacagctcacagccagttctcataggaggtccactctgccagatgtgcagatgctggggtccccgagtcttacagccagggctttggagagggaccagtaaggaaagggacccacttcagacaggaggccaggaaggcctcgtggggag

SEQ ID NO: 145523 - DNA, 471 bp, Homo sapiens
gggactcgtggctgtggtggcttcggcagcggcttcagcagatcggcggcatcagcggtagcaccagcactagcagcatgttgagccgggcagtgtgcggcaccagcaggcagctggctccggttttggggtatctgggctccaggcagaagcacagcctccccgacctgccctacgactacggcgccctggaacctcacatcaacgcgcagatcatgcagctgcaccacagcaagcaccacgcggcctacgtgaacaacctgaacgtcaccggaggagaagtaccaggaggcgttggccaagggggagttgctggaagccatcaaacgtgactttggttcctttgacaaggttaaagaaaaacctgacggctgcatctgttggtggcaaaggctcatgttggggtgggcttggtttcaataaggaacggggacacttacaaattgctgcttggccaaatcaggatccact

SEQ ID NO: 145524 - DNA, 2086 bp, Homo sapiens
  misc_feature (1)...(2086): n = a,t,c or g
cgaattcccgggtcgacgatttcgtcgcggccctgctccccgcgctttcttaaggcccgcgggcggcgcaggagcggcactcgtggctgtggtggcttcggcagcggcttcagcagatcggcggcatcagcggtagcaccagcactagcagcatgttgagccgggcagtgtgcggcaccagcaggcagctggctccggttttggggtatctgggctccaggcagaagcacagcctctcccgacctgccctacgactacggcgccctgggaacctcacatcaacgccgcagatcatgcaagcttgcaccacagcaagcaccacgcgggccttacgtgaacaacctgaacgttcaccgaggagaagtaccagggagggntttggccaaggggagatgtttacagcccaagataagctcttcagccctgcacctgaaagttcaaatggtggtggtcaatatcaatccatagcattttcctggaccaaaccctcaagcccctaacggtggtggagaaacccaaagggggagtttgctgggaagccatcaaaacgtggactttggttccctttgacaagtttaagggagaagctgacggctgcatctgttgggtgtcccaaggctccaggttggggttggccttggtttccaataagggaaccggggacaccttaccaaattgctgcttgtccaaaatcagggatcccactgcaaggaacaacagggccttattcccactgctggggattgatgtgtgggagcacgccttactaccttccagtataaaaaatgtcaggcctgattatctaaaagctatttggaatgtaatcaaactgggagaatgtaactgaaagatacatggcttgcaaaaagtaaaccccgattggttatgctgagtatgttaagctctttatgactgtttttgtagtggtatagagtactgcagaatacagtaagctgctctattgtagcatttcttgatgtttgcttagtcacttatttcataaacaacttaatgttctgaataatttgttacgtaaacattttgttattgggcaagtgattgaaaatagtaaatgctttgtgtggattgaatctgattggacattttcttcagagagctaaattacaattgtcatttataaaaccatcaaaaatattccatccatatactttggggacttgtagggatgcctttctagtcctattctattgcagttatagaaaatctagtcttttgccccagttacttaaaaataaaatattaacactttcccaagggaaacactcggctttctatagaaaattgcactttttgtcgagtaatcctctgcagtgatacttctggtagatgtcacccagtggtttttgttaggtcaaatgttcctgtatagtttttgcaaatagagctgtatactgtttaaatagtagcaggtgaactgaactggggtttgctcacctgcacagtaaaggcaaacttcaacagcaaaactgcaaaaaggtggtttttgcagtaagagaaaggaggatgtttatttgcagggcgccaagcaaggagaatatgggcagctcatgcttgagacccaatctccatgatgacctacaagctagagtatttaaaggcagaggtaaatttcaggaaagcataagttaaaggcaaaattgtaaatcagtcgagatcgggagccttcaaggaggtatggctgtataccaaaattgtaaatcactacatgaagcttatatatttggttggcctgaaaggtgaagagtggtaggcaaggggcgggcttacaggttatggtggattcaaagactccctgatttgtgattggttaaggaagcaaagctttgtctaaaaacttggggtccgcagaaaggaacattaaggtctggccaggcccctcaggaagaaactgagaccaaagaatggaggtcagagtttagtccctggtgttcccccttatctgacgtctgtgtgaatccatttggtgggggtctgggtttctgaaaagtagctcaggggcacgtgttaaggatgtctctaggtgactctaacttccctggctattgtttgaaactgttatgacctt

SEQ ID NO: 145525 - DNA, 637 bp, Homo sapiens; identical to SEQ ID NO: 144817
  misc_feature (1)...(637): n = a,t,c or g

SEQ ID NO: 145526 - DNA, 729 bp, Homo sapiens
aattttgccctcgaggccaagaattcggcgagggcaataagctcctagtcccagacgcccatggggtcatttcacagaggaggaccaaggcttactatcgacaagcctgtggggcaaaggttaaatgtggaaaaaatgctggaaggaaaaaacccctgggaaaggcccccctggttgtcctaccccatgggaccccaagaggtcctttgaacaagctttgggcaaccctgtccctctgccctctgcccatcatgggcaaccccccaaagtcaagggcacatggcaaagaaggtgctgaccttcccttggggagatgcccataaagcaccctggatgatcctcaaagggcacctttgcccaagcctgaagtgaactgcacttgtgacaaagctgcatgtggatcctgagaacttcaaagctcctggggaaatgtgctggtgacccgttttgggcaatcccattttcggcaaaagaattcacccctggaggttgcagggcttcctgggcagaaagatgggtgacttggagttggccagtgccctgttcctccaggataccactgagctcactggcccatgattgcagagcttttcaaggataaggcttttattcttgcaagcaattacaaataataaatctatttctgctaagagatcacacatgattttcttcagctcttttttttacatctttttaaatatatgagccacaaagggtttatattgagaa

SEQ ID NO: 145527 - DNA, 14934 bp, Homo sapiens; identical to SEQ ID NO: 131207

SEQ ID NO: 145528 - DNA, 714 bp, Homo sapiens; identical to SEQ ID NO: 115286

SEQ ID NO: 145529 - DNA, 511 bp, Homo sapiens
atgcgggtgcggtggctgctcttttggctcctcttttggctcctgctgggatttatcagccatcagtccacctgtgttatcaatactctggctgaccatcgtcatcgtgggactgactttggtggaagtccttggttacttatcattactgtgtttctgagaagttataaatttgccatctccctctgcacaagttacctttgtgtgtctttcctgaagactatcttcccgtctcaaaatggacatgatggatccacggatgtacagcagagagccaggaggtccaactgccgtagacaggaaggaattaaaattgtcctggaagacatctttactttatggagacaggtggaaaccaaagttcgagctaaaatccgtaagatgaaggtgacaacaaaagtcaactgtcatgacaaaatcaatggaaagaggaagaccgccaaagaacatctgaggaaactaagcatgaaagaacatcaccccttctgcaagaaagcctctttgcaaccgg

SEQ ID NO: 145530 - DNA, 543 bp, Homo sapiens
  misc_feature (1)...(543): n = a,t,c or g
agatcatcagctattgttagtgttagtgtatgttatgtgtggctcaagacaacttttttttttttaatataggcagggaagtcaaaagattggatatccctgctttataccaagaaagacaacaccccacatttgcaatgcctaaaaacactaccagccatctgaaaaacatgagacttctctaacttctgttcttttttgtagcagtggaatcccacggtgatatctgagggatgtggttaccttttggaggaggttgacggtttctaaggatgattctttctgagtgaaatattgtcagtgtcattgaccttttcattatttcaactattattattccaggttatcaatactctggctgaccatcgtcatcgtgggactgactttggtggaagtccttggttacttatcattactgtgtttctgagaagttataaatttgccatctccctctgcacaacttacctttgggttatcaatactctggcttgaccatcgtcatcgtgggactnacttggtggaagtcntggttanntatcatta

SEQ ID NO: 145531 - DNA, 641 bp, Homo sapiens
  misc_feature (1)...(641): n = a,t,c or g
agagattatcatccgctgaggggtggaaggggatagagcagacactccgcaggtgtcttgagattatcatccgctgagggtagagctgagggtggaaggggagtgagcagacactcgggaggtgtcttgaggctcagggagttatcaattatagaatgttgttgagttggaggaggtgggctggtggccccatcctgttttttaaaagtttcagctgtgaggtagggccagtagggcaatcctgaagaatgacgatgctccactgccgccattctgacctgtagggccaaaggagggaatgttttcacacatattcatttgatggacaaaattaccgccacccaacacagtctgcaccttctgttgctggtgatagatttttgcacctttccatcctccaggtttcaaaatagcagtgtcagtgtcataatatcacccttccactgagtactgccgacagctagggggtaaagaaaagtctttgggacacactgttgtctccacatgccactgtgtctgtctgcaaatgtaggcaggctggggtcctgccccagggaagacagagtcataacagagtaataaagaagctatgtttgagacacaggagtgtctatgtctatcctcattcctccctnacagcc

SEQ ID NO: 145532 - DNA, 4702 bp, Homo sapiens
atggggtctacaggtgtgtacaaagtgacccctcgctcctgccaccggtttgagcaagcgttctacacctatgacacgtcttcacctagtatcttgacattgacagccattcgccaccatgtccttggaactatcaccaccgacaaaatgatggatgtcactgtgactatcaagtcttccatcgacagtgaacccgccttggtcttaggccctctgaagtctgtgcaggagctgcggagggagcagcagctggctgagatcgaggcccgcaggcaggagagggagaaaaacggcaatgaggaaggtgaagaaagaatgaccaagcctcccgtgcaggagatggtagatgagttacaaggccccttctcgtatgatttctcttactgggcgcgtgtcctctgttttgtggggacaggacccgccaaactgaagtatattaattattttaggtctggagagaaaatcactgttacaccgtcatctaaagagctgctcttttatcccccttcaatggaagccgttgtcagtggagaaagctgcccagggaagctgatcgagatccacgggaaggcaggcctgtttttagaaggccagatccaccccgagttggaaggagtcgagattgtcatcagtgaaaagggggcaagttcaccgctgatcacagtctttactgatgacaaaggtgcctacagtgttggccccctgcacagtgacctggagtacacggtgacctcacagaaggagggctatgttctgactgcagtggaaggaaccatcggagacttcaaggcctatgccctggcaggcgtcaccctccacagccaggatgtcctcatgctccctggtgacctcgttggcttgcagcacgacgctggccctggcgccctcctgcactgctcgccggctcccggccaccctggtccccaggccccgtacctctccgccaacgcctcgtcatggctgccccacttgccagcccagctggagggcacttgggcctgccctgcctgtgccctgcggctgcttgcagccacggaacagctcaccgtgctgctgggcctgaggcccaaccctgggctgcggctgcctgggcgctatgaggtccgggcagaggtgggcaatggcgtgtccaggcacaacctgtcctgcagctttgacgtggtctccccagtggctgggctgcgggtcatctaccctgccccccgcgacggccgcctctacgtgcccaccaacggctcagcctcggtgctccaggtggactctggtgccagcgccacggccacggctcgctggcctgggggcagtgtcagcgcccgctttgagaatgcctgccctgccctggtggccaccttcgtgcccagctgcccctgggagaccaatgataccctgttctcagtggtagcactgccgtggctcggtgagggggagcacgtgatggacgttgtggtggaaaacagcgccagccgggccaacctcagcctgcgggtgacggcggaggagcccatctgtggcctccgcgccacgcccagccccgaggcccgtgtactgcagggagtcccagtggtcctgctggctggctcctcaggctacctggtgggctttaaattcctggaaagtcacggctctgacagcggctccgctaactcattccaccgtctcatttcacgaaatgaatttaaaactccgctccctgacctcacacgagtccccaggtacagccccgtggtggaggccggctcggacatggtcttccggtggaccatcaacgacaagcagtccctgaccttccagaacgtggtcttcaatgtcatttatcagagcgcggcggtcttcaagctctcactgacggcctccaaccacgtgagcaacgtcaccgtgaactacaacatcaccgtggagcggatgaacaggatgcagggcctgcgggtctctacagtgccagccgtgctgtcccccaatgccacgctggcactgacggcgggcgtgctggtggactcggccgtggaggtggccttcctgtggacctttggggatggggagcaggccctccaccagttccagcctccgtacaacgagtccttcccggttccagacccctcggtggcccaggtgctggtggagcacaatgtcacccacacctacgctgccccagctgcacttggaggcggtgccgtcctcaccaggcagccctcagtgctgctgcacctgtgctccgtcccgcacgtggcttgggagcctgggacccttaaggctgggccgcaggtgagtacagtcctgaccgtgctggcatctaatgccttcgagaaccggacgcagcaggtgcctgtgagcgtgtgcgcctccctgccctctgtgagcgtgtgcgcctccctgactggggcctgctggtaccccagagtgctgatccgcagtggccgggtgcccattgtgtccttggagtgtgtgtcctgcaaggcacaggccgtgtacgaagtgagccgcagctcctacgtgtacctggagggccgctgcctcaattgcagcagcggctccaagcgagggggatacaccttcacgctgacggtgctgggccgctctggcgaggaggagggctgcgcctccatccccctgtcccccaaccgcccgccgctggggggctcttgccgcctcttcccactgggcgctgtgcacgctctcaccaccaaggtgcacttcgaatgcatgggctggcatgacgcggaggatgctggcgccccgctggtgtacgccctgctgctgcagcgctgtcgccagggccactgcgaggagttctgtgtctacaagggcagcctctccggctacggagccgtgctgcccccgggtttcaggccacaattcgaggtgggcctggccgtggtggtgcaggaccagctgggagccgctgtggtcgccctcaacaggtctctggccatcaccctcccagagcccaacggcagcgcaatggggctcacagtctggctgcacgggctcaccgctagtgtgctcccagggctgctgcggcaggccgatccccagctcgtcatcgagtactcgctggccctggtcactgtgctgaacgagtacgagcgggccctggacgtggcggcagagcccaagcacgagcggcagcgccgagcccagatacgcaagaacatcacggagactctggtgtccctgagggtccacactgtggatgacatccagcagatcgctgctgcgctggcccagtgcatgaggaagctgcctgaacaggacatcgcacaaggatcctacattgccctgccattgacgctgctggttctgctggccggttacaaccatgacaagctcattcctttgctgctgcagttgacaagccggctacagggagtcggcgcgctcggccaggcagcctctgacaatagcggcccagaagatgcaaagagacaagccaagaaacagaagacaaggcggacacttgcaacatccatcaacaccagccgagagcccagtacagacgaccagctcccagcccacaatcagaccatgccacagagacacgcacgccgtagcgcacccccaagagcctacgaccgcaaaacaagacaagaagagaacccacaccaaacgagaagtcacgccgctgcgaagcgccgcgagagaccgccccacgacctacagaaacaagcaaccacgcggctgatccccgccggaccgagacgcagagacgggacatccccgagacggacacaaccaccaccgaacacgcgacgcccagcggcggcgggccacctagcacgatttcggcgagccgcgcccggcgcccgcggcgcccgccctcccacagcccgaagggggcgagaagaactcgaccccgcccacatctacgccgccgcccccggactaccaaccccgcccagggcgggaaggacgccccccaccccggaaaggcgagacaggaacacgcgacgccggcggacccgagaagagggagaaggcgagtttagacccgtgtctttcctgaagactatcttcccgtctcaaaatggacatgatggatccacggatgtacagcagagagccaggaggtccaactgccgtagacaggaaggaattaaaattgtcctggaagacatctttactttatggagacaggtggaaaccaaagttcgagctaaaatccgtaagatgaaggtgacaacaaaagtcaaccgtcatgacaaaatcaatggaaagaggaagaccgccaaagaacatctgaggaaactaagcatgaaagaacgtgagcacggagaaaaggagaggcaggtgtcagaggcagaggaaaacgggaaattggatatgaattataatacacttctacatggaaatgtttcaacgtgcgcaagcgttgcggcggcgggcagaggactactacagatgcaaaatcaccccttctgcaagaaagcctctttgcaaccgggtaagtttgcttgttttccttgcttttggacatagtctgccaggtcaggacatggatacatttttctccctacggctctgtgcttcaagccctgcagagggagatggcagagaggaaggctgcctacaagcattcacagtcccatccctgttggtaaccgtgttgcgcaaaaacaccttcatccccacccagtgggggccccatctaatattctaagtgtcagaggttccgtatttgtaatagcaaatgggccctgactgtaaa

SEQ ID NO: 145533 - DNA, 625 bp, Homo sapiens
tggaaatgtttcaacgtgcgcaacgttgcggcggcgggcagaggactactacagatgcaaaatcaccccttctgcaaagaaagcttctttgcaaccggtgcacttacaatttggtattacctgggagtgaaaagaaatattacagccatgcctaactgacttcttgagggtcagaatggcggcagtggagcatcgtcattcttcaggattgccctactggccctacctcacagctgaaactttaaaaaacgaggatgggccacccagccacctcctccaactcaacaacattctataattgataactccctgagccttcaagacaccttccgagtgtctgctcactccccttccaccctcagctctaccctcagcggatgataatctcaagacacctgcggagtgtctgctctatccccttccaccctcagcggatgataatctcaagacacctcccgagtgtctgctcactccccttccaccctcagctccaccctcagtggatgataatctcaagacacctcccgagtgtgtctgctcactccccttccaccctcagcggatgataatctcaagaaactaaggaagaataaataaataatataaaaataaaatgaaaaaaaaa

SEQ ID NO: 145534 - DNA, 1562 bp, Homo sapiens
tgacaagcacatctggctctccatatgggaccggccacctcgtagctgtttcactcgcatccagagggccacctgctgcgttctcctcatctgcctcttcctgggcgccaacgccgtgtggtacggggctgttggtgactctgcctacagcacggggcatgtgtccaggctgagcccgctgagcgtcgacacagtctgctgttggcctggtgtccagcgtggttgtctatcccgtctacctggccatcctctttctcttctggatgtcccggagcaaggtggctgggagcccgagccccacacctgccgggcagcaggtgctggacatcgacagctgcctggactcgtccgtgctggacagctccttcctcacgttctcaggcctccacgctgaggttatcaatactctggctgaccatcagcatcgcgggactgactttggtggaagtccttcggtacttatcattactgtgtcactgagaagctataaatttgccatctccctctgcacaagttacctttgggttatcaatactctggctgaccatcgtcatcgtgggactgactttggtggaagtccttggttacttatcattactgtgtttctgagaagttataaatttgccatctccctctgcacaacttacctttgtgstgtctttcctgaagactatcttcccgtctcaaaatggacatgatggatccacggatgtacagcagagagccaggaggtccaactgccgtagacaggaaggaattaaaattgtcctgggaagacatctttactttatggagacaggtggaaaccaaagttcgagctaaaatccgtaagatgaaggtgacaacaaaaggccacccgccttaccaaaataaaggaaagaaggaaaaccgcccaagaccattggaggaaactaagcatgaaagaacgtgagcacggagaaaaggagaggcaggtgtcagaggcagaggaaaatgggaaattggatatgaaagaaatacacacctaccatggaaatgtttccaacgtgcgcaagcgttgcggcggcgggcagaggactactacagatgcaaaatcaccctttttcaaagaaagcctctttgcaaccgggtcagaatggcggcagtggagcatcgtcattcttcaggattgccctactggccctacctcccagctgaaactttaaaaaacaggatgggccaccagccacctcctccaactcaacaacattctataattgataactccctgagcctcaagacaccttccgagtgtctgctcactccccttccaccctcagctctaccctcagcggatgataatctcaagacacctgcggagtgtctgctctatccccttccaccctcagcggatgataatctcaagacacctcccgagtgtctgctcactccccttccaccctcagctccaccctcagcggatgataatctcaagacacctcccgagtgtgtctgctcactccccttccaccctcagcggatgataatctcaagaaactaaggaagaataaataaataatataaaaataaaatgaatactgcag

SEQ ID NO: 145535 - DNA, 1610 bp, Homo sapiens
  misc_feature (1)...(1610): n = a,t,c or g
cttgnncanttgggactcaagaccctgtgcacctctcagcaggcctttgctggacagatgaagagtgacttgtttctggatgattctaagaggttgatggacggatggctacatggatgtgatggagatggtttactatcgggaccttccgcatcctgctgatgttttgttgcttaggatatgaatggctgagcggagctgtacaacctggcactctgcttgggtatgaggttcttcctgccatcctgccatcatttgttttttatgttttgtcgccaaaagtgacccttgaaggaaccctgggaagctcaggaaggaaagaacacccagaagccagggacagggaagctggtttggggaggaccagaaatcagggttatcaatactctgggctgacatcgttcatcgtgggacctgacctttggtggaagtccttggttacttatcattactgtgtttctgagaagttataaatttgccatctccctctgcacaagttacctttgtgtgtctttcctgaagactatcttcccgtctcaaaatggacatgatggatccacggatgtacagcagagagccagggaggtccaaccgccgtagacaggaagggctgaagtccatttgtatgcacacaaagaaaagagtttcttcctttgcaggaattaaaattgtcctggaagacatctttactttatggagacaggtggaaaccaaggttcgagctaaaatccgtaagatgaaggtgacaacaaaagtcaaccgtcatgacaaaatcaatggaaagaagaagaccgccaaagaacatctgaggaaaactaggcatgaaagaacgtgagccacgaagaaaaggagaggcaggtgtcagaggcagaggaaaacgggaaattggatatgaaagaaatacacacctacatggaaatgtttcaacgtgcgcaagcgttgcggcggcgggcagaggactactaacagcatgacaaaatcaccccttctgcaaggaaagccttctttgccaaccgggttcagcaatggcggcagtggtagcatcgttcattcttcaggattgccctactggtccctacctcacagcttgaaactttaaaaaacagggatggggccaccaggccacctcctccaaactcaacaacattctataaattgataactcccctgagcctcaaagacacctttccgaagtgtgtgctctaatcccctttccaccttcaagcggattgataattttcaaggacaccttccgagtgtctgctcactcccccttccacccctcagctccaccctcagcggatgataatctcaagacacctcccgagtgtgtctgctcactccccttccaccctcagctccaccctcccttagcggatgataatctcaagacacctcccaagtgtgtctgctcactccccttccaccctcagctccaccctcagcggatgataatctcaagacacctcctgagtgtgtctgctcactccccttccaccctcagcggatgataatctcaagaaactaaggaagaataaataaataatataaaaataaaatgaaaaaaaaaaaaaaagggcggccgctctagagtatccctcgaggggccc

SEQ ID NO: 145536 - DNA, 738 bp, Homo sapiens
ctggaagaaagttgacccacaggcaaaaccagatgtaaaccaagtttgtcttgggtacttttcaaattcttttcacagcatccttttctcatccctcatggtggcctctggccctggaaaatcctcatgatagcaacttatcaggcctgtttcctctgatagatctggacttttccccttaagtgctttcctgttgggcttctcacactatggagaactgctcatagttgagatctaagagacaaattaccctatggtgttcaagaatggccgaatttagtatactgcctgtcctggaagtgttcacatttaaaaaggcatgactttccaatgggcaaatatcagacacctacatgcatagataagggaaatatgttatacttaagcaaacttctaggcattgaatctcagtgtttaggtgcagagatgggaattcctattaaggcaatgcagtcattcaccacatcaggaaggccaaaaaatgaacactctcgtaattttgttattatctggaaagttctgatatgataatgaacctaaaatactgaatagatagtgaacatcctaaaattccactgaccagaatccattcccatggtcatcatctgtagagggcatgatacacagacaggcctgaggtatgattataattctggagtaaattaaagcctatatttgttaaactataacagatggacacacattctctagatttctacttggctcttaactgcacag

SEQ ID NO: 145537 - DNA, 1981 bp, Homo sapiens
  misc_feature (1)...(1981): n = a,t,c or g
gcagagcccatttatttgtccaaagtgagagtacgtaatggcggaattaacagcataaggcaccagccctgagctggcaaaagagaaggctccaaggggaactttaaagcctggctgggagttcttcatcaagacaatcatgctgcgtaggttgtagtctcctcatttatgaaacagtgatttggcctggatctaagattccttatacatgttaactaactctaaggggaaagagatagatcataaattacatgttaacgttgaggggaaattgatagatcataaattaaaatataatttaatatgttatatatttctattgatttatatacctatgaaatagtttttatattgaaaggtaggattttttttcccatttgttagcatcatgattgtgctgctgagttttaaaagattgtgctatttgaatatctcaggatcaatttctattttgtgtagtctattaatcaaatatttatcgagaacatttatatgccagactgtgctggagtcatagaatgtaatggttggcagaatctagtaaaaagaaaaagattgagcaaactcctgaatttgcaattttgaatgctttatctccaccttctatcaactgctttgagtaaataaaatttggaagtccacatttcttccctaactttctgaaagccagcatagcatggtggccagagctcagatttggagccagggtgccagtgctcttggttcccagctccatnnnnnnnnnnnnnnnnnnnnnnnnnnnnnnnnnnnccgtgcctcgctttctcatcagtaaaatggagacagtaacatctgccttttacagggctgttgtaaggcttacctgaatttcatatatgtaaagtgctggctcataccgtgggatatatgtttacaatagttatcaataagcaaataagtgaaaatatgccgcacaaagtgattacaatggaattattgcttttatcatgtaaatgataactttggtcttcctgttatttaacatgacttaacattctacaggagtgactaatagctttgcgaaaaatgggccgcaatgcccaagcccagatttgtatcatcactgagtgatgggtaaaacccttcaccattaaaaactgagagcactttgaaaaccaacacagttttctttgtacccctggggagagaagtttgaaagaacccccagcctgatgggccagaaaaacttcaggactgtctgtcaactttcccagatgggtgccattgggttccagccatccaggagtgggatggggaaaggaaaagcaccaataaccaagaaaaattgaaaagatggggaaattagttggttggagtgtgtcatgaacaatggtcacctgtactccggattctatgaaaaagtaggaattaaaaattcccatcatccactttgggacagggagtttaattaaggggatggcccaaggctcagttcgaatgagcaaatctccatactgtttctttctttttttttttcattactgtgttcaattatctttatcataaacattttacatgcagctatttcaaagtgtgttggattaacttaggatcactccctttggttaataaataaactgtgtttgtgctaatatatcttgtatgcattctttaaaccttacaggaaattagtgatgagttttaataattattaattgagtaaaggttggggcagtcttgagggtacgtatattgagatgacactctagcaatttatatagatagctactcttacaggaaatactgtaccaattatttaagcttgccctatactatttgaactttgtatgaattcaggaatcttgaatttctggcagagaccattctcaataaaaggtgactacaacataaactttattattcaaattagagcaaaggtttaattaaccagcattgactaaaatactttttgtgtgtatttatatacaaatataagtaatactatgtatggaataaccag

SEQ ID NO: 145538 - DNA, 228 bp, Homo sapiens; identical to SEQ ID NO: 119617

SEQ ID NO: 145539 - DNA, 469 bp, Homo sapiens
  misc_feature (1)...(469): n = a,t,c or g
gttgttccagtacccagacacggaggggaaggtggaagactttacggaacgcgtggagagagctcatcagagtggggtaggtatacctttcttgtggggggtccgtggaggcgtatcccaacttgtatctgtctacctatctctctctctgtcttttcatgtgccttaatttctttaccattatcacatggaatggtaaaactctccttcctgactccttgctgctacttttttctgttcccggattnnnnnnnnnnnnnnnnnnnnnnnnnnnnnnnnnnnnnnnnnnnnnnnnngcaatggagttcacaggatgtgaacacactctgcccgtcttcctgtagttaagataatttcctactctcccactactctcagggaaagggagcaaccttggtccttttctctcacttcctttctagagcctggcctgctgtgctactgaccttttagctttgtgcatcttgag

SEQ ID NO: 145540 - DNA, 3811 bp, Homo sapiens
cccgcgagcgtccatccatctgtccggccgactgtccagcgaaaggggctccaggccgggcgcacgtcgacccgggggaccgaggccaggagaggggccaagagcgcggctgacccttgcgggccggggcaggggacggtggccgcggccatgcagtcctgtgccagggcgtgggggctgcgcctgggccgcggggtcgggggcggccgccgcctggctgggggatcggggccgtgctgggcgccgcggagccgggacagcagcagtggcggcggggacagcgccgcggctggggcctcgcgcctcctggagcgccttctgcccagacacgacgacttcgctcggaggcacatcggccctggggacaaagaccagagagagatgctgcagaccttggggctggcgagcattgatgaattgatcgagaagacggtccctgccaacatccgtttgaaaagacccttgaaaatggaagaccctgtttgtgaaaatgaaatccttgcaactctgcatgccatttcaagcaaaaaccagatctggagatcgtatattggcatgggctattataactgctcagtgccacagacgattttgcggaacttactggagaactcaggatggatcacccagtatactccataccagcctgaggtgtctcaggggaggctggagagtttactcaactaccagaccatggtgtgtgacatcacaggcctggacatggccaatgcatccctgctggatgaggggactgcagccgcagaggcactgcagctgtgctacagacacaacaagaggaggaaatttctcgttgatccccggttgccacccacagacaatagctgttgtccagactcgagccaaatatactggagtcctcactgagctgaagttaccctgtgaaatggacttcagtggaaaagatgtcagtggagtgttgttccagtacccagacacggaggggaaggtggaagactttacggaactcgtggagagagctcatcagagtgggagcctggcctgctgtgctactgaccttttagctttgtgcatcttgaggccacctggagaatttggggtagacatcgccctgggcagctcccagagatttggagtgccactgggctatgggggaccccatgcagcattttttgctgtccgagaaagcttggtgagaatgatgcctggaagaatggtgggggtaacaagagatgccactgggaaaagaagtgtatccgtcttgctccttaaaaacccagggagcaacacattcggagagacaaggctaccagcaacatctgtacagctcaggccctcttggcgaatatggctgcccatgtttgcaatcctaccatggttcccatggggctggggcatattgcctaggagggtacataatgccactttgattttgtcagaaggtctcaagcgagcagggcatcaactccagcatgacctgttctttgataccttgaagattcagtgtggctgctcagtgaaggaggtcttgggcagggcggctcagcggcagatcaattttcggctttttgaggatggcacacttggtatttctcttgatgaaacagtcaatgaaaaagatctggacgatttgttgtggatctttggttgtgagtcatctgcagaactggttgctgaaagcatgggagaggagtgcagaggtattccagggtctgtgttcaagaggaccagcccgttcctcacccatcaagtgttcaacagctaccactctgaaacaaacattgtccggtacatgaagaaactggaaaataaagacatttcccttgttcacagcatgattccactgggatcctgcaccatgaaactgaacagttcgtctgaactcgcacctatcacatggaaagaatttgcaaacatccacccctttgtgcctctggatcaagctcaaggatatcagcagcttttccgagagcttgagaaggatttgtgtgaactcacaggtcatgaccaggtctgtttccagccaaacagcggagcccagggagaatatgctggactggccactatccgagcctacttaaaccagaaaggagaggggcacagaacggtttgcctcattccgaaatcagcacatgggaccaacccagcaagtgcccacatggcaggcatgaagattcagcctgtggaggtggataaatatgggaatatcgatgcagttcacctcaaggccatggtggataagcacaaggagaacctagcagctatcatgattacatacccatccaccaatggggtgtttgaagagaacatcagtgacgtgtgtgacctcatccatcaacatggaggacaggtctacctagacggggcaaatatgaatgctcaggtgggaatctgtcgccctggagacttcgggtctgatgtctcgcacctaaatcttcacaagaccttctgcattccccacggaggaggtggtcctggcatggggcccatcggagtgaagaaacatctcgccccgtttttgcccaatcatcccgtcatttcactaaagcggaatgaggatgcctgtcctgtgggaaccgtcagtgcggccccatggggctccagttccatcttgcccatttcctgggcttatatcaagatgatgggaggcaagggtcttaaacaagccacggaaactgcgatattaaatgccaactacatggccaagcgattagaaacacactacagaattcttttcaggggtgcaagaggttatgtgggtcatgaatttattttggacacgagacccttcaaaaagtctgcaaatattgaggctgtggatgtggccaagagactccaggattatggatttcacgcccctaccatgtcctggcctgtggcagggaccctcatggtggagcccactgagtcggaggacaaggcagagctggacagattctgtgatgccatgatcagcattcggcaggaaaattgctgacattgaggaagggccgcatcgacccccagggtcaatccgctgaagaatgttctccacactcccttgacctgcgttacatcttctcactgggaccggccttattccagagaggtggcagcattcccactccccttcgtgaaaccagagaacaaattctggccaacgattgccccggattgatgacatatatggagatcagcacctgggtttgtacctgcccacccatgggaagtttatgagtctccattttctggaacaaaagagggcggtcttcttagtcctctgttccctaagttttaaagggattgattttgatggcctctccccagaggcatttgataagcaagaaagatttcatcttcccacccccagcctcaagtaggagttctatataccgtgtatatctctgtaatctctgtcaaggtaaatgtaaatacagtagctggagggagtcgaagctgatggttggaagacggatttgctttggtattctgcttcctttatgtgcccagttgccccggattgggagcccaatttgtgttttgccgtagaaagttttaggaactttaacttttaatgtggcaagtttgccagatgtcatagaggctatccctggagacttaatagacattttttttgttcccaaaagagtccatgtggactgtgcccatctgtgggaaatcccagggcaaatgtttacattttgtataccctgaagaactctttttcctctaatatgcctaatctgtaatcacatttctgagtgttttccttctttttctgtgtgaggttttttttttttttaatctgcatttattagtattctaataaaagcattttgatcggaaaaaaaaa

SEQ ID NO: 145541 - DNA, 607 bp, Homo sapiens
gaagaacatgtcctttgtgaatgatcttacagtcactcaggatgggaggaagatttatttcaccgattctagcagcaaatggcaaagacgagactacctgcttctggtgatggagggcacagatgacgggcgcctgctggagtatgatactgtgaccagggaagtaaaagttttattggaccagctgcggttcccgaatggagtccagctgtctcctgcagaagactttgtcctggtggcagaaacaaccatggccaggatacgaagctctttagtcaagagacggtgatgaagtttgtgccgcggtacagcctcgtcctagaactcagcgacagcggtgccttccggagaagcctgcatgatcccgatgggctggtggccacctacatcagcgaagtgcacgaacacgatgggcacctgtacctgggctctttcaggtcccccttcctctgcagactcagcctccaagctgtttagccctcccagatagctgcccctgccacgcaggccaggagtcttcacactcaggcaccaggcctggtccaggaggagctgtggacacagtcgtggttcaagtgtacacatgcacctgttagtccctgagagg

SEQ ID NO: 145542 - DNA, 503 bp, Homo sapiens
taggcgtccctcaggatctgcacgccccgctttgaggaaagcagtgggattttgctttttgttttggaagccatgttgtgtggtctgtggacctgcttgctttttttgaatgtgagctgctctcaaatctccatcatttgcaccttgcctatttgaaatgttttaaatctaaacagaagacttgtgtattccagggaagctgcgctggttgtgatctgctctttagtcaagagacggtgatgaagtttgtgccgcggaacagcctcgttctagaactcagcgacagcggtgccttccggagaagcctgcatgatcccgatgggctggtggccacctacatcagcgaggtgcacgaacacgatgggcacctgtacctgggctctttcaggtcccccttcctctgcagactcagcctccaggctgtttagccctcccagatagctgcccctgccacgcaggccaggagtcttcacactcaggcaccaggcctggtccaggaggag

SEQ ID NO: 145543 - DNA, 2384 bp, Homo sapiens
  misc_feature (1)...(2384): n = a,t,c or g
gcgggcctggagactgagccggcgccgctcagtgtgaggtggtttctgcgggtgaggctggcgcccgtaccatgagcgaggcggacgggctgcgacagcgccggcccctgcggccgcaggtcgtcacagacgatgatggccaggccccggaggctaaggacggcagatcctttagcggcagagttttccgagtgaccttcttgatgctggctgattctcttaccgttcccctgcttggagccatgatgctgctgggaatctcctgtagatccacagcctctcagacagatctctggaattgcattattttgcagcttcaaagaacccccgctcttgcttggtgttctgcatccaaatacgaagctgcgacagggcagaaagggctgtttgaaaatcaacttgttgggaccggagtccataggcacatattgggggatgtgatgtttactggggacagcagatgggccgggtcgtaaaacttgaaaatgggtgaaataggagaccattgcccggttttggttcggggcccttggcaaaacccgaggatgatgagccctgtgtgtggggagaccccttgggtatccgtggcaggggccccaaatggggacttctctttgtgggccgattgcatacaaggggcctattttgaaggtaaaatccctgggaaaccgtgaaagtgaaactgctgctgtcctccgagacacccatttgagggggaaggaacatgtcctttggtgaatgatcttacagtcactccaggatggaaggaagatttaatttcaccgaatcctaagcagcaaaatggccaaagacgaaaactacctgccttctgggtgatgggagggcacaagatgacggggcgcctgctggaagtatgatactgtgacccagggaagtaaaagttttattgganccagctgcggttcccgaatggagtccagnctgtctcctgacagaagactttgtccctggtggcagaaacaagccatggccaggatacgaagagtctacgtttctggtcctgatgaaaggcggggctgatctgtttgtggagaacatgcctggatttccagacaacatccggcccagcagctctggggggtactgggtgggcatgtcaaccatccgcccctaaccctgggtcttccatgctggatttcttatctgagagaccctgggattaaaaggatgatttttaagctctttagtcaagagacggtgatgaagtttgtgccgtggtacagccttcgtcctagaactcagcgacagcggtgcctttcccggagaagcctggcatgatccccgatggggctggttggccaccttacattcagcgaggttgcacgaacacgattgggcacctgtnacctggggtttttttcaggtcccccttcctctgcagactcagcctccaggctgtttagccctcccagatagctgcccctgccacgcaggccaggagtcttcacactcaggcaccaggcctggtccaggaggagctgtggacacagtcgtggttcaagtgtccacatgcacctgttagtccctggagaggtggtgggaaaggcctgccttcaatccctcgaggatgccccgggccccaccctgggccttgtctttcctgtttaaagggaagtgttaacatatctgcccatgaggaacataaattccatgtaaagccattttctcttaaacaaaacaaaactttctaagtacagtcattctctaggatttgggaagctccttgcacttggaacagggctcaggtgggtggagcagtaaggcactacccagagagcttgctgctgcggccctgtcctgcggcctcaaagttcttctttactatatataacgtgcgggtcataccctttcttcgttgtggtgggggatggaagagccagagggagcatggccccaggggtgttgaaggcccagcgggtgaagagcccgtgttaagccccaagacatgggaacttgtgttcctcaaagggttaatgtggggccgtgggcctcctcccatagtgtgtatggaaaagctttgttggacttcttagccggcttcagagagggacttttgctggggtttcttttctgtggaatatctccgtggctgacccatgctgggaattggatgattctgcaattcggggacctactggcaggggtccctttaagtaacggtcttgtctgtgatctttgttcttgacctctagaccccaagatgtgaacagtgcacgtgttaatgtcatctttgctcatgtgttataagccccaagttgctgtatattttcacaagtatgtctacacactggtcatgattttgataataaataacgataaatcgacttctgctgattaacctttccgcaaaaaaaaaaaaaaaa

SEQ ID NO: 145544 - DNA, 595 bp, Homo sapiens
ccagtagctttttcgtatttttggcagttgttcttaacgatcagtcttattaatttgattaactcaaaccacctctaggaggcaactcagttgcgtgtaccggacgaaatctagtttctggattttaaaagcttattcctgaaagcaaaaactttcatttcttttttgttgttggtgagtattttcagttttacgtgcagaggataaaatatgtgaattgctgttttgtttgaagataaaacttttctctgcattcttttttagtttttaggaatcaactacccaggaaaaacgatttttactcatatgagccaccttctgagaatcctcccccagaaacaggagaatcagtgtgtctccagcttaagtctggtgctcatctctgcagggtttgtggctgtttaggccccaaaacgtgctccagatgccacaaagcatattactgcagcaaggagcatcagaccctagactggagattgggacataagcaggcttgtgcacaaccaggggggtaatcttttttttaagtctcagttcagtttcatcgcctttgtcaacccagatatttccaggacaactttaaaggtaaaattag

SEQ ID NO: 145545 - DNA, 1325 bp, Homo sapiens
ttaaacataatacttggaagaaagggctccatgtgcctagaagagaggtactgagaggaagactcactttggaggctgtagcatacaattttcagatattgcctcaggtaaaaatatacttcctggactttgttttctgacacataagaggtgtgttctgctccctgtaaagacaagggtgggtatccagatggtcccatgagtagggctgcacaagatgctggaggcttggtaagttcctctgggtcgcagatcggtttctcgggtcgggatagtgtgagtgcctagcacacgtgtcgggcacgcagaagggccccttaaaagtttctctttcatcctggccagttttagatacacaattttgtcagtttacttacagtgcatactcttgggtaatacttgtgctgaccaagtatcttagaggcttattttattatagtagccaacatttatccagcacttaccttatataaagggctgtttgtgcatgagctcattaaaatcgtgacagcagaccaatgagtgagaaactgccccattttgaaggtgaggaaattgaggttctgggtataactttctttggtcacataatattaaattttacaatttgagccttgagccatacacaaaaccaccacaaaattagatttatagactcaaaatgaaaacatcagcttactggtttgtagttcataccagtcatacattccaaaacatgttttgagtcttactctgtgcctgaccttgtgcttgataacagggatataatgggaagcaacactccagtggtcagatgctcacagtcttatggaggagcccaaataatatctggggaagttaaagtccatataatgactgataagagtacaatacaggtgcccatgggaacacgtgacatccactgaagactgcctggaaggggaaacagcgtgtgttcatgccctatacggataaacatgataccataatgaaaatgcttatcctttaggagaaaaggagagccttagagtagccaggatcaaggatgaaagctggacttcaaatatgccttgttagtgtaaatgtgactgtggaactgtatgagtattttaagattatggagtaaagtaagttttaaaaagcagtccctaatcatcaaaagtaaaaaactcttgatgtagtcatataaccacactaagaactcttccaggtgacttcaaaacgataggacagtacatctctagtagaatatgccctgagaatgaaaagaatgtaacagtgttagtattttgaataaacatgttattaccaaaaaaaaaaaaaaaaaaaaaaaaaaaagtcgtatc

SEQ ID NO: 145546 - DNA, 1112 bp, Homo sapiens
gctgcgccccacgccagcccgcgccccgcatggctgccgccggggccaggcctgtggagctgggcttcgccgagtcggcgccggcgtggcgactgcgcagcgaggcagttccccagcaaggtgggcgggcggccggcatggctgggcgcggccgggctgccggggccccaggccctggcctgcgagctgtgcggccgcccgctctccttcctgctgcaggtgtatgcgccgctgcactggccgcaccggacgcacttccaccagctgcatcttcctcttctgctgccgcgagcagccgctgctgtgccggcctggcgaggtttttaggaatcagactacccaggaaaaaccgatttttactcatatgagccaccttctgagaatcctcccccagaaacaggagaatcagtgtgtctccagcttaagtctggtgctcatctctgcagggtttgtggctggttaaggccccaaaacgtgctccagatgccacaaagccatattactggcagcaagggagcatcagaccctaggactgggagattggggacataaggcagggcttgtgcacaaccagatcatctgggaccatattaatttccaggaccacaactttccttttttccaggaatttggaaattgtaatagaaacagaagatgagattatgccctgaggggtgtggaaaaaggaagattactccagagattattagggagcattgggttgaagcactttgaagggaagaacttggatttccatgggcaaaacatgaattccagggaagattaaattttttcagaagttttaaaacttcagattagcccttggaaccgaacaagattcttgatatgccggaaggggtttgcccccatctggatttctggtgaaaatattcctcaagaaaaggatattccagattgcccctgtggtgccaagaaaataattggaattccaggtcatgcctcagctcttaaactacctgaaggctgacagactgggcaagagcattgactggggcatcctggctgctttcacctgtgctgagagctgcagcttgggtactggttatacagaagaatttgtgtggaagcaggatgtaacagatacaccgtaa

SEQ ID NO: 145547 - DNA, 2536 bp, Homo sapiens
  misc_feature (1)...(2536): n = a,t,c or g
tgtgtcagcagaatcattacgctttgctgggcacgagggcagggcagagtgagattgcgtccatgctgtattcccgcatgttcatcaagtgctcgtttgccccaatggcagatgacgagagccctacatcatcctcggcagaagagtaactgtgagggaggcggggaccagccagaccgggagcaaaccgtcccttgtccccgtctcctccctgttcccgttcctccctggcccaccccactcacactccccaaggcccacgggtcaaaggcaagcgagctctccctctgcttccctgggggagccccgacggccacaggactccagctccaagtgggttttcttggctcccctgttcaaagtggccacagcgcagaccgaagcaaaattcttgtatacattggcgccagggctgatgctggggtggggggtttatgaagaacattgagaacaatcagctggtaattatggatggaggaagagggagaggaaaaaaatattgtatttttgaatcattgttgcaggagggggtgggaatcttaggatttgttgccagatttgaaagtcactggaacttgcatattttccattttaatcctaagtgttattacgccacccagttggggttcaccctttcatcccctcacatttaattgtctgatatagaaatagtgttgtgtccactgccccgctagacggctttcttaggggaattttcttctggttgtttcacaagacagattctgtccttgtcaacccgggacagaaaacttcagtctttttcacccgcattcaggatggaaggggactcagggacaggctctgtggacttacaggggacccaatcatttcacaatgaggaaatttaccggccaggcgtggttgactcacgtctgtaatcccagcactttgggagggcaaggcaagagcttgagcttgagcctagacgttaaagaccagcctgggcaacacgagcaagacccatctctacaagaaatttaaaaactagccaggcgtggtggtgcgcgcctgtaagtcccagctacttgggaggctgagnccctggaaggtcgaggctacagtgagctatgatcacaccattgcacttcagcctgggcgacacagcgagaccctgtctcaagaaagaaaaaaaaaagagacaaattacccagaaacccctcccttccccacatggaggccttggcaaatgttaattttcctagaaaatccttcagacctggaagacgccgggaaaagaatctggctctccaggggtggcttctgcgtccccgccgccaggccccaaactatggacacagggccgtcctgttcctccccgggactccagaatttctctcctcaaaggaaagaaaacagggcatgcgcttgttgacaaaacgcagggccggctcccaaaaaccccatgtgtgtacgattaaaaagttgggccgtccccagggcttccagcgcaaactttaaagagacagggctttgctgaaaaccaaacatgggccagctgggctttttaacaacctagagactttccggagctgcctgggaacagaaccctgcgggaaaacggggcttgccagaggacacttcacagtttcctttcatgggcctgtttttggttccccttaaggaatcttccacatcattgtctttcttgtgccttttccttggtgagcaacagaaagagaagggttccaagcctctaaaaatgtgctttgtgatcaggagtgcgctccaaaccaaatacgcgcgctgccctttcgaggccagtggagctcagcctccaaggctttaaagccacatttcagcaagagaaagcgctgagagctcgcaggttcattaaagaaggcaaagcactaggtttctctccttaggaaaagtaggtttcttgggttgatgtagaatgggtttgctttggatttttcagtgaaaggggaatgttacgtaaaaacaaaatagggcttggctggtcaaaggagacaagcaggatggatggatggatggatggatggatggatggatggatggatgaatagatagatggtgtttgccatgttaaattgccagagaaaacaaaacccaaagcttgattggaaaaccaatttaattgtggggtgtcctgaggggggaaggtcgcaagctttgggcaagcctttgaggaagcggtacaaagagttcctgtgccctgtgtgtccagcccctggaagccagccagtgcatttattttaaactctttaaaaaccactcccttggcccatggaatgcgtgaccccgtgagatgggtccacgcatctctctacacttccttctctccgtgggatactggactcgtgcctctgcgcccattctctttctcacgcatatccgatgagctttaatttcactttctgatcacggtacgtccataaaagccagtattacactttaaatgaagtatttctttttttgtaatcgtttttttttaggaaggtaaacaaattttaataaagctaccgaataatgttgaaaaaaaaaaaaaaaaaaa

SEQ ID NO: 145548 - DNA, 4184 bp, Homo sapiens
actgttagagtggatataataaccgagtttttttgaaagccatagaatttattcgaatttgcagaagcatgacgataatgtaccacaaaagagtttgattttacaacataaagtatggtaggaagtggtcaatgtacacagtgttgtcagcaaaaaggggaggcagggcagtttcacattttttgaaaggtggtggacgacaactacacttgttccttaaagtaaaataaaagcaggagagacccagcagagaccaacctgatttgcaggttaggcatcagaatctaaatctagtatcacaactttaaggaaactaacaagaaaacttttgcaaaaatagaacatcaaacaagcaaaaaaatatacaaatgtacatatttaaaaaacacacaactccttaataatggctcccatgttccagtagaagaaaatatttacctggagaaaccacagctattcaggtttgataataaaccaaccctcattggtatcattacccttagtgctccttaaactcattgaagctgaaaggcacaacttaagcaggaaacttatcatcttaaatatatattataacttctcaaatgggaaaataagtcccaaacttaatagtctgtcatcaagaaacacaaaatcctttggcttggtaaattaattaacagtttgaatgccatctttcccatcctgcttccctgacccctgctgacaacactaataaattaccctggagaaaaatcttctcttttaaagcttggcccaaggtaactcccatctccctgtggggtttttcagcttggcacttcagcacatttgtaaaaatgaacccaggagggctcccatggcaactgtgccccgaagactcccaggcccagccggggtcccgatggcgagagcgttgtggctccagtgaaagcactggccacaggaaaggctggactcggaggaatcggaggggtgaagatggagtcggctgacattttttgccttaaaaatacattaggagtcataagcgtgatgacacatggagtgtagcttcttgcaccactggatcaacagtcatcaatttcatgactcggataaaggtccccaggagcctggcatgaatgtacatctccctctcccttcagagccttacatataatcttctcatgacgatggcaaacagatatattttaaattacacgtaacaattatacatagtgtatatccagatccgtctgcaggcgaactctgcatcagttccacatataagcctcacgcccccaccaccctgcaatttccccgtcctcggaactgtctcacgagaccaccagcgcacagacacgaacatgcctctcacacaccccagaacgcagctgtgctggagttgggcacaaaggcccctcactccctgtcttcatggtgtgggttcttggctgccaacagaactgtcagcctttattaagaaggaagggtctgtgtaaaaatgggatgtgtgaatcagaagaggggccctggcacagagccaggcaggcttgctttagcattgagtcttgcgtcgcgcaatgcccaggaccttgcctgttaagtctgggtggggcccctatggggcatgtccacgtgcccccgaccagactcattgccctgtctccagtctccactgtgggttgggctggaggccatgccacgtgggactgcaaacaccagccagttcacaatgccatgatccgtggcaggggcacggcagggaggagctggtatcatcagcgtttccacccatctgaacaaaggtgagcgggccatgcacccttccagctgtgcacagggatgtgctggaaggtgcaggaggcagtgccgtcagggccttgggtggctggggtaggtggagaagcccgctgcccccaccatcctgcgggtcacccctggactcgtattggatcctggccactgtgctagagtcagcacaagggaccaggtggctggctgcctgagagagaaaataagtcacagtggaaagagtttttactgctgcaaaaaccaaaagtggggggagatctcagcaattctgacaacagtatacatttagcgacctttctgagacagcctggggaaaatgcatctatcactgtcctctcgatttggaaaaataaatccgatgcataaagccttggacaagggtgtgtgagcagggatgataagtagagtggggggtgtgtagaggcctggtctcctccggacggtgcccctcccaactgcagagctgccctcctgtaagccggctcccgagccagctgccaacaaggcccccactgcctccctggagacccacttcatccccctcttcagcagaggtcctgaggcaggggggtggagatctgctgggtttgctgcttcatgaattagggccttcggaggtcatgaacacatgcagggcagtcacaggggttgtgggagacaggaagggatgtttacccatcacaaatgggtctttccaatgtgggtatttgtggctggtgcacagataaaagtagacacaatactccttggtgggtgtgcctctagtaatgtgtaagttctgactatgtaggaaaatcctggccagtggaactaagaatattcttgtttgggcaagggaactaagagatgtgaaactatcattttttttttgcttgtgtgtatttttatttcagggaaagaaatgagggatatgataagaaaaagtctattaaaattgtaaggcttactccagacaccattgcttaaatcactcccctcgcacacagagagaaaaccccctgggcaagtgcacaaaaacactactcataaaagcacgggtgaccagtgaactattatgcaaggcacccccacgtgtcctttccttaaccagggaagcccgtcctctaaggaaggggccatgggtcccaatccctgccccagcctaggcgtgcttctgtgtcccagctttaaggcctctgcggtgaggaaggcccacagactccccagctgttcagcacgctgtcatgatgagacttggagcaggggagacgcaccttctcaatctacaaaatgagccatggcgcccattaaaatgtcaaatgtcaactcataaatagtctattgggtgctgtcttgcacggaaatctcagccagaaagaaaaactagagaaaagaaaaaaaagaaaaaagcaattctctccccacccacttcacttttccttggagactgtctatcccctcgaattctctttgccctatgtagaaaataacggaaaaaaaaatcaagcaaataactacccaggtcctaagacaagagacaaccaaaaccccaacaaaataagttagtatttatcaaaatatgttacaacaccaatctccataaatgtcaatatcactctttggaaatcggagctctgggctcttatgatgctccctctggaacattcaaaatgagatcagaataaagctcccagcaaggtgagcaggcatgatacggaggcccagcccatggccatccatccgccctccaccagccgtgttcacaaattcttgcacttctctccaagaaccttctgggggcacagggagggtacaagtgccctcaatttatcaggcttctttctacccagatttgtgtcaaagggccagactaaggaagaaatgggaaaggaaacttaagttttggaaaagcaggcattttccatttcccctggtgtccaaaatgcccacgtccctcctcctcccccatcagcatgggccttctgtctcctgaagtagactcagtggaacgctccacccacgttcaggtttcctctggctcccatctacaaggagtgtgtgtgaaatggtgctggccgcaggcccccgacccccggcaaaaacgggggtggccgtgccactggaacctaatgggggtggggaggatgcctcgggtctctccccacttgccagaggcgtggggtccgaagcatccggatgacagatacacaaaagggacagcaatatgccctagaaatcacctcccctgcgacccacgcatctcagctataggacagccgcaggggtgatgacatggccattttcaaagttaatgttatgccctaacttaatttggggggaggggtcccattttcatggcctgtggattgatttcaatttcatcatgtcacagagaggccagacagcttatgtcagggccagaaacgcat

SEQ ID NO: 145549 - DNA, 401 bp, Homo sapiens
taacttaggtgctcttttgcgctatatactttaattcatgcaaaagtgatagaggactggacttgaggctctacagaggcctttctgagaaagctgtgtagctccttactctggcgaagaacaagggggtgtacatcttgtcaatctcaaaagcactgactgcagtctcaccagttgatttgtaagtaatgtgacaagaatgatgtatccagatgagtttgttgaacctctggtgaccactggaacatagctgtagccccacatgaaaactctgatctgcttcttgtacagggacacgactataaatacagatattttggtctgattgtctgtgtcttgtgacaagcgatagtgacccctgaagagcctcagtccattgttccacgtttaagaactaggaa

SEQ ID NO: 145550 - DNA, 447 bp, Homo sapiens
  misc_feature (1)...(447): n = a,t,c or g
agcggcccgnnagnataaccctgggggttcgnactgacggctatganancnnnnaanggngnnagggaacaacacagaactttaattaaacactattttacttttattcagtgagtaaaacttaaaagttgaacagtttcccgtgaggaagataaaatatctttggttctttgttgctggactaacaggtagtcagcaatatatgctttaatgttttacccgttctttaacccgcggtatttcagtgttggtttcatagctatgaataggcatacggactaatagataaggacatattttatactttgagtggggggtgcgtattggacttccttttcttattacataggtacataagattctttcctgatggccatgtgatgatgttgacaacccctgaagagcctcagttcattgttccaccgttaagaactatgaataccaggg

SEQ ID NO: 145551 - DNA, 3761 bp, Homo sapiens
tatatatatatatatatatatatatatatatatatatatatatatatatatatatatatatatatatgtatattaaaaaaaaaaggtttagaaaaaaaatcaacagactgaaggatcccctaactctgatcatgtaaactcagcctttaggctgggtgaggtgttgacgtacacggggaagaggcctgggaggtcacactgaggagtgatttctagagtgtccagagcgtcggctgagctagcaggcctgttagtatcagtagtcttaccccagaggttgcctgcttcacaagctctggtccagtgacctaccaacatgcgtctatggatctgacttaggtacattctggtcctgggacaagtcacagaatcacacatctggccaaagaaggcaacaaaaggtgtcgtgttttctgaaggtgtcgggaggcggcagctgctctcagcaagtctctttcccttgaaccccggttgctgtctttatggagctcagtgttcggttaaaccacgtcttcttggctgcctgcacctcattgagggcaagccctaaatggtgttccaagtcctgtatcttacactcggcctccaccagctggagtttggtctgtgccagttctagctccatttctctcagctggttcttgagcgtctctttctcttcatccgtgtcctcatctaaaacctccttggttgagcttatgccttttacacgcccttctttgttgaaaaattcccggcaccgctcacagtcatccactttttgccgaattttctcaatttccaccttattggctgtctgctgcttctccaatctttcactcaactgagaacaaatctgcttatagtcaccaatgatagaactgttttttttaatctcagattctgccttgtcgagttcccgacggcacatttcttttaactgagcagactcttcttccaaccgtcttttctcttcttctgcatcaatcaacttctgtttggtcatcagcagctccttattcagagcatctgccttttcctcagcgttatccaggtccttccgtagtgcaatcttgctggtcaccagctcatgggctaagtcatcgttttcctgttccaacctcatgttagcttcttgtagacgcctattctcccgctcaaatcgctcgatggggtcttcttgctgggcctgctgttccctcatggtgtgatattctttctcgtattttttcaacttcttctgactaatcttcatgttgcaggctaattccattagtttttttgcattttcttctgagcggtatctcttaggaagctgaaccctaaagaacttcaaggcaccttcaaagtctgtcaacagcaggtcatctttcgaagtctttaataatccaagggcgacattaaaaataacacttattccctcacataaaagcaggtcgatgatatggaagaccatgtagagagggaattttgcagtgaaaagagtaagaaaccactgggaggcatacatgtgtgcttcaaggcttatatccaggaagtggttgtacaggtcaggaatgtattcctgcatgaggcgctccaactggtaaaatttgcaatgcaaatcttcgaagttttgcttgaaaagttccctgagcccatagtcaaacatgatcttgaccagaacactgaatgcctgttcttcaggcatatggagaaggagcacagcagcaagaaatgactggccctggcaataaccaatctcttcatcatacacagaataagccttgcatattttatataaggaatcttgtccatctcctcctgtgtccttaaagtagtcatgggctgggaatgttcggttaatatcccgggtgatagcactgtcctggggagactcctttgtgataagaatgcggtatttctctaccaggtggtcattgttatgacagcctgctagcagctgccagacttctcctcgaagagcttcagggacaccgtttcttactaaggatgacaactgcttcggtctcacattcaagttgagatgccattttgacaacagttctccccatgtttcaagaattttttctgcacattctttggatacatcaccagatccactcaggagaggttcatcattatcttcctcttcatcatcttctggaggagaaggtatcactgaactttgcgatccagactgtggcaggcgaactgaaggactggctgtagttttcctcctctctctttctgattcactttccaagcatacaacttcatataaagtgtcagtattattctttctctccctttgctttatctgttttagtttcaaaaagaaattttcagtagtactacgtttgctgaagggccagaataatctttcattaggtgagcaaacgcggacttttgtctccaggagaaatcgaacaggctcctgtacttctgttattaccaaatctacagctgtggtcataaacaggactttatctttaggagtttcttcatttacaacttgaaaatgtggggattttggattccagctccccgtaataacatacgactttccatctgaacttttgcccatagattccaaatctaataagtgcatgtcactatttcgtacatcttttcctggactaaggagaagaccaaaacacctttcaatggcaagttctttattagttgtttgctgcacatagatgacaatcttcttatcaattccttggcgtagtttaaagcactgtctgtccttatctttgggaactgcactaaaataacctttaccatcatcttcttttatttctaaagacacagagaaggtaaagatgtcactgtcaggagtctggggtgcagcagtggctgaaagtggggtctgcttggcagaacggcggaaggcagtggcaaaactgtaaagtatccggcttacagcttcttgtatttcacaccggaagacgtgtattctgaagagctctgcattgtaatgactttcagtgaaagcaaaacagtcactctcaggagttccatcatgccctctgacacagaagaggattttgtagatagggtagtttgctatttcagtgtttgtctgaggatctaagagtctcacaattccttcagacacattcggcactgaaagggtaacatctagtgaaatctgacactggcttcttaagatggacatcatccttaaggcttccacttcactcctgggagcatttaccgaggcacagcctaagtaagtcagtttactgaaaactacgctgtcctcatcggccactggtgtgaaaggacttgaagcttcagaatctccttgtccaggtttcactggtaggctcatctctggtttttggagccctactaatggcacagggttaatggtggatgaagcggagagctgattagaaagaggcccatctccttcaccatccagttgtgaccttttcacaagctccttttcccctggctggtcgtccattggaggatccatcagtacatctgctagctctttttgcagctgctgttcacttccattccctacaatccttgagtcctgttttctcatcatcacttccattatttgtagatggtgtctcatctccttgcctggaaaccaagacaaaatcttcactatttaagagtagatactgagtctgaagaggacactgatttttccaacagaagccttgtcatccataagctcaagaatgagtctcaacacatgaatgattaaatattttttaatgcccgacctgccgtctcctcctccgccgcccgccgctcgccgtcccggagcctccgcc

SEQ ID NO: 145552 - DNA, 658 bp, Homo sapiens
agaaagtggctgaatgagaaatgtagattgcagagggcaactggtgtgtttatatgcctgacattatttgggttttcccccctcaggcagaagctgaggaagattgtcattctgatactgtcagagcagatgatgatgaagaaaatgaaagtcctgcttgaaacagatctgcaggcacaactccagatgttcccgagctcagtggatgtttgaacttgctccaggtgtaagctctagcaatttagaaaatcgaccttgcagagcagcaagaggctctctcccagaaaacatcggcagatacccaaaggaaaacaagaacaggcaaaagaagaaaagttaagtattatagatattgtaacaaattacattttttttttttggcacatggaaattttcactggacacagtaagtaggcattataaccagactttcgggacataaacacatatcttgtaaaataaaaattttgactagtatactagtttatatatttctcacaatttcttctaggtactttggatggtaccactactcctgcatggcttttttctctgtgggtacactgtcttcattgagctgtcttttgttaatttatagacctctgggattcatgtggttcctaaaagattggtgtctctgaatttattaacagaacca

SEQ ID NO: 145553 - DNA, 2341 bp, Homo sapiens
  misc_feature (1)...(2341): n = a,t,c or g
tcggcgcaggtttccgcagctgagggggcagctccgcggcggcgtccggggtctccagtagggctgacgctccggtgctcgcacaatcccccgcctcggctggcaacgggcgtccctccactccccgagtccccggcagccgccgccaccccagcgcgccccgatctggccccctgccccgcgaagatggctgccgtacgccgggcccgcagttattgccgctgcatggtgcggcttctccgaccgagaacttctgctaagctccgctgcagaagacaaggcaaggagtagacacccnggacacccagcacccctcctccggggggcggtgcaaagggggcacggagagcccctcgagcgcagcaggccgccccgccagcatggcagaagctgagtgaagattgtcattctgatactgtcagagcagatgatgatgaagaaaatgaaagtcctgctgaaacagacgtgcaggcgcttattcccattgatccaagctcaatggaagcttgaacctgctccacgtgtaagctctagcaatttagaaaatcgaccttgcagagcagcaagaggctctctccagaaaacatcggcagataccaaaggaaaacaagaacaggcaaaagaagaaaaggctcgagaactctttctacaagcagtagaagaagaacaaaatggagctctctatgaagccatcaagttttatcgtagggctatgcaacttgtacctgatataggagttcaagattactttttacccggtctccagatggtgatggcgttggaaacagctacattgaagataatgatgatgacagcaaaatggcagatctcttgtcctacttccagcagcaactcacatttcaggagtctgtgcttaaactgtgtcaagcctgagcttgagagcagtcagattcacatatcagtgctgccaatggaggtcctgatgtacatctttcgatgggtggggtctagtgatcttgaccttacatctttgggagcagttgtcgctggtgtgccagaggattcctaacatcctgtgcccagagacccctgaaaatatgcccgtcctggccctgctttgaaagttttggggcagaaagctgttattaaacttgtttccgttacaagtcctgggagagaggatgttttttaggaacggccctcgtgttctggtttgatggcgtgtatatcagtaaaaccacatatattcgtcaaggggaacagtctcttgatggtttctatagagccctggcacccaagtggaatattacaggtacataagattctttcctgatggccatgtgatgatgttgacaacccctgaagagcctcagtccattgttccacgtttaaggaactagggaataccagggactggatgcaattcctactggggtcactatccgcttgtcaccaagacacaggacaatcaggacccaaagtatttggctgttaataactaaggaaaaaaggaaggaaaaaccactttgactattaaatacaggatatttttcgtcgtgttccctgttacaaggaggcagatccatagttttcctgtggggggctaccagctatgtttccagtggtcaccagaggttcaccaaaactcatctggatacatcattcttgtcacattaccttacaagtagatcaactggtgagactgcagtcaagtgcttttgagattgacaagatgtacacccccttgtttcttcgccagagtaaggagctacacagctttctcagaaaggcctctgtagagcctcaagtccagtcctctatcacttttgcatgaattaaagtatataggcgcaaaagagcaccttaagttattaaatgtgtgtgtgtgtgtgtgtgtatatatatatatatatatatatatatatatatatatatatatatatatatatatatatatatgggaattggaacttattttaaattgttggagttcttttaagaagaatataaattgattatttttttttatttaaagggatagttgattcctggggtgttttgaaattaagttggaattaagttgccttaagcatatttatgttggtaagaaacccttaatatgaggtttatcatgcccctttttcaagcagatttatgagcagatttctgtcacataagtcgtcttctgcttgagtatcctaatatttcaatgcatcaggggagcgctccactggataagcattttatttcccgcatggcataatgtttttgcacctaaaaggctcaaagtgtgagaacctggttcctggatttgtttgaaattatttcaccaataaaagatcataaataaaatggtttctttcaagaaaaaaaaaaaaaa

SEQ ID NO: 145554 - DNA, 1682 bp, Homo sapiens
ttttttttttttttgagacagggtcttgctctgtaatccaggctagagtgcaatggcatgatcacagctcattgcagccccaaacccccaggctcaaagtgatcctcctgcttcagcctcccgagtagctgggattaccaagcatgagccaccataccgagcaaatttaaaaaatttttttgtagagacagggtctctctatgttgctcaggctggttttgaactcctggactcaagcaatcctccctgcttcagcctcccaaagtgctgggattacaggcctccatgagcaaccacgcccagctcaagaatgattcacattttaattttcttttgaacaggtttaccactttgtatttgtgttttaggttttaagactaaatctgtgcaataatattccctagggattaaaagtaggggaaatacaaccctctccaaaagcagaaacaaaacttggggtggaaagaggaggtaaaaattacattcgcttttccaaatgagtatgaatcgtaaaaccataaagaatggttttactcattctttgtcagccatttgaaatcaataaactatgattcctacattttgtttgtattccccaaaaagtaaacaacaatgaaagctgtttttaaaagaataaaaacccccacccccaaatagaagagcaccccagacggttctcttggaggggatgtttatcccccagtgcccaaaagcctccccccctctgaaaatgtttctctcagttgacaactttcaaatgatttaaagaacatgaagaccaagtagaaccatgaagcttggatctgaatagtaaagaataatattggagtggtatttacaaaggagaggcagatatatgtgcctagcaccagatttttcaagtaagcaagttcagccccaaactaactgaagttttacatttttaaactctctccattatttcccagagttggaagctgtgaaatgtttcagcatggtgctattcactaatggtgtgaactcaaaaggtgggttttctgcagctgaactgattctaagtctcaggactccaagatacctccagtccaagtgtcgtggactctactggctttatacacctaatttgggactatccattttttccttctttaaagctggctagggaattccttcactaatgataatgtgtgcaaacacacacacatattgaaaatctataactaattctagcagccaaaagatgtttttccttaccagaaattacccaaagaaagttacattagaaataatatgactaaaaatatatttttaaagctatttaatacttttgatgtctaaactttcaatttattgtctgatttctggatatttctgtattttagattctacagacttcagattctgaagcttgttgaaaaagctaagttcctcaatatggatgaaaatctatctggctgtacttttagaggggaatttttctacttttgaaaaaaattctgaatatttatatatagtattaacagaataccccagtaagtcatatttcagataaatattctatagtataatttgcatcatacccaatattttagatattaaaataagggtaaaatttggaatataatcacttgtctgcatatttcccaatgtaagttttcatgtagaatattaaaatttaaattgatatttggatttataagctg

SEQ ID NO: 145555 - DNA, 296 bp, Homo sapiens
gtggctgaaggcccagccatcagtgtcgcttgttgccaccccgtgcctcccttggcctctctgagctttgcccagaagaccaacaatcatacataccctaactgggacaccactctgcagaatgcagatgatccattctggaggaagctgtcccttgagctcagtgagctcccaggcaagcagggcatctggccgacttccctcacaacagctgctcccacatcccctcggactggagcttcagccctgactgagcaatactggagtaaccgcttcctaaaccattttgcagaaat

SEQ ID NO: 145556 - DNA, 423 bp, Homo sapiens
  misc_feature (1)...(423): n = a,t,c or g
cgtggctctgcacagcccaaaaaccagcttactccttatccagggtgtgaggcctcgactatattcttcaaaatgtacttaggctctggttactgggatggccagtagatgtaatgcagatggttggagtttggggagggttaggaggcatcaagcaggacaaggtgctgctgagttcagagggcccacgttcaagggatggaggtggaacctggagaccgactcttaaaagcacagtccgtnnnnnnnnnnnnnnnnnnnnnnnnnnnnnnnnnnnnnnnnnnnnnnnnnnnnnnnnnnnnnnnnnnnnnnnnnnnnnnnnnnnnnnnnnnnnnnnnnnnnnnnnnnnnnnnnnnnnnnnnnnnnnntcagccttactgtgaagcctccaaggctgttcgcaggcagctgtggctctcggag

SEQ ID NO: 145557 - DNA, 3006 bp, Homo sapiens
aaaatctgtaaatagcacatgaccaaatgaacatattgtatagaactatttttatttgaatgtggcactaaccaccaccaccgttactactatcaatgttagcgcatgttctagatgagtctcaccaacagtgtgtaagtcattaacagtcctaactgtggtgttttcctccaatgccttccaacatccatcaactaacgtgagtattttcttcctgggatttggatgctttagcctaaaggtgactgccaccaagtgagataactgtatgtcactaacttatagagccggctccatggcagatgctgctgtgctccctgatgccctgtgagcaccggggttgcctgtggcgcctgccatgtgactcgggcgcagcatcagctggctggaggtgtggctttcatagacctccacaggctgcctaggacaagatgaccaggagggcccaagccagacaaaagccggagtggggagagaggcatttcagccagaccaacaggctgaaggagctgtgcagactattgctaaaatgagggttcgcagctgccaggagtcatcccagaacattgctacttatttattaaaaagctaaaaactagtgaaagcaagtaactgaaccagtgaactctgggtatcgataggttcgtcttaaataggccacttccccactcccccacccccccttgcttggtcttgtccttggtggctaagacttagctctgcaggggatgttaaaagcacagttaagtaggacgtggctcctgcacagccccaaaaaccagcttactcccttaagcccagggtgtgaggccctcgactatattccttcaaaatgtaccttaggctctggtttactgggatggcccagtagatgtaatgccagatggttggagtttggggagggttaggaggcatcaagcaggacaaggtgctgctgagttcagagggcccacgttcaagggatggaggtggaacctggagaccgactcttaaaagcacagtccgtggttgggtgtggtggctcatgcctgtaagtaagtctcagccctttggaggccacagcagaaggattgcttgagcccaggtactcaaaccagcctgggcaacagagtgaggccctgtcaaaaaaaaatcagccttactgtgaagcctccaaggctgctcgcaggcagctgtggctctcgggaagggaggctgctttgcccagcagggaacatttggggcagggggtaaattttgccagtttgagcatcatgaggtgtaacaagaaatgggttgaatgggccaaatgcaaggagtgcatctctgggctgcaaactgacttgagtgctgcactattgctattccgtgcaaacaaaactcagcttttcctgactcagttccttgacttagtggcctttacaaaaaaagttgagtagtgtgtggcctgctgtcgcacagccccctagttagcttcatggtttctcagcttcagacccctccagcccacagaggagcccatggagggacccacttcccttggtccagacagctgggaagtgggttaggcccacttgctgttttgagcagggccacttgctccatttcactgaaggctttgctgggtgaaaacacttcagcatctcctcctcaggtcaacccataaagaccaggtccagcaccgtggtcttggcacatccctggcctcaggccctcacctaacagtgaggcagcagctgcccagccccgcaatgtgcctgctgtcaggcagctcttgcctgaaacttacttccacattctttcctgatgggcaggtggctgaaggcccatccatcagtgtcgcttgttgccaccccgtgcctcccttggcctctctgagctttgcccagaagaccaaacaatcatacataccctaaattgggacaccactctgcagaatggaaattgatccattcttggaggaagctgtcccttggagctcagtgagctcccaggcaagcagggcatcttggccgacttccctcacaacagctgctcccacatcccctcggactggagcttcagccctgactgaggtgggcagacctaagacctgagaccacaagattagctcagtgtctaccaagcatctagccactgtccagggccagagcataccacgtctgcagtgcctgtgagcagagccagcagttgccctgtgactgtaaccaccaaattgtccaaacacccgctgcagttagcaagaagggtaggcttcaccctcctttactgaggagaatgatgcggaggagtttcctctccagggctaggcaaggcaggcgagcagccagaagccgggtgcccacagggcagggacaggaaggctgtgctgctactggctgctcacttctccatcaacctcaccctctgcaccactaaccaagaccttgtcctcttgcctgtctcgctgctttcacagctgcaacgattgtgtctgcctcatggggttttcctccagagcctttattctgtagccagacgacacgaggagtctgtgtcactgagccagtgcttctagatgctaccctgtgtgggcggcacctcagggacagtaaatcagaaatgctggtcttgaaaccttgaaaagatcaagctgaatgttccttttcatctgtcgctgttgatcttcatctatttaaataggtattctaacgtttcctctctgtatttcatgaagctgatttcctctctctttccttttcagcaatactgggagtaaccgcttcctaaaccattttggcagaaatgtaagggtgttcggttgcgtgcatgtgcgtttttaggcaacacatctaccaaccctgtggcatggactggatgttggggggaaaggaaaagtaaaaaacttcccaactcactttgtgttatgtggaggaaatgtgtattaccaatggggttggttagcttttaaatcaaaatactgggttacaggatggtaccaatttagcttaatcacaaagcctctccaaagaagtttggtttctttat

SEQ ID NO: 145558 - DNA, 439 bp, Homo sapiens
ttttaaaatcagtcaatgattcttgcctgagtcagttattgtgatggtggtttgaaaaaggtgcttttctaactctatcattccatccacataaatttactagttgcacctttaagttttgaattcgtagcctcatttgaatccagacctttcttggtttggggaagaattggtgggcaacttgcactgacctttatctgattaatataagatctatgtccacatgttacctttgttctatttcagaccaggtggatgcaacccttattcctattacaaattttagctgtgggatatttgctggtattctggcctcactggtaactcaacctgcggatgttatcaaaactcatatgcagctttatccactgaagtttcaatggattggccaagcagtgacacttattttcaaagactatggactacgtggcttcttcca

SEQ ID NO: 145559 - DNA, 2225 bp, Homo sapiens
  misc_feature (1)...(2225): n = a,t,c or g
aaatctccccttctacagagttcctccggcgcttcctccaccccgggatacacagaacctcatctcctacggtgctgaagcctgcagcagggcaggatgggcaggagagcaaagccgcggagtctgcggcgcgggtgaagagcggcgcgtaattcccgcagcaagattgttccgcgcccgcagcccctggactagcaggatccgaaccccggcggctgcgtgcttataggcgcagacgtgcagagagcccgcggcttaaagcgcgtcgcctggctagcgccaccccctagccttcttcaaggcctccagggctgggccacagcgcccgctcgacggcaccctgggcccagaggactcgcgggcctcatctccaatgattcagaactcacgtccgtcgctgctgcaaccccaagatgtcggagacacggtggaaacgcttatgttacatccggtgatcaaggctttcctgtgtggctccatcagtgggacctgctctaccctccttttacaacactctggatcttcttaaaacacacctgcaaacccttcagccctcagatcatgggtctagacgtgtagggatgctggctgtactcttcaaaggggttcgcacggaaagacttttggacctttggaaagggatgtccccttccattgtgagatgtgtccctgggcgttggaatctactttgggcactctctactcttttgaagcagtatttcttggcgaaggccaatcccccaaaccgccctggaagtcaagtcatgctggggggtngggctctcgctctgttgcaggggtctgtatgtcacctatcactgtaatcaagacgcgctatgagagtgggaaatatggctattaagagtatctacgctgccctgaggagcatctatcacagtgaggggcaccggggcctcttctgtggcctgacagcaactatccttcgagatgcgcctctctcaggaatctacctgatgttttacaaccagaccaaaaatatagtgcctcatgaccaggtggatgcaacccttattcctattacaaatttcagctgtggggatatttgctggtattctgggcctcactgggtaacttcaacctgcgggatgtttattcaaaactcatatggcaggcttttattccacttgaaggtttcaatggattggccaagcacgtgacacttacttttcaaagactatgggactaacgtgggctttctttccaagggtggccatcccccgaggccctccgcaggaactcttaatgggcaggcaatgggcgtgggacggtgtatgaagagatgatggccaagatgggcctgaagtcctgaccaaggagnagggactggggaacgggtgaaatctgttgccctgcttggtttctgccaagggctgcatgcttcttactattcttgcagtaaggatgaagtcctacctgggaaaaccagggcaggaattgtgttgcctttggcctttcagtaatcccctttaagggggaaaatatatgggacctgattttcagcctttcagaatctcccaaaagagggagtcatcaatttcatagaagcaacactaggggtgttaaggaagagaacttttgcaatactcctgagaaggctacttgggnaaaggcattttcccccaggagagctctgtccaggttgctgcgcttctgcccccacccctacacccacagggtcctcccttgggtatgttccttgggcaagcaatccacaaagcccagagaagctgtaaagctgccctgccgggccttgaggagctcccaacccagggaagaactggaaggtgagaagaggagtccctgtcacccaggtcacagactgactgaggtgatggtaggatgaggaggaacagatgcccttctttaattggttctcagttaacttctcagaggctctggagaacgggacagtggctttctagcctctgaatgttccaaataaaattttttggtcttggccctcccgtagtgtactgttttacctctaaattctggcatttttttttccctgcaattaaagtgctgtactttatttattgaactttatcattgaaagctgtttggaaaacctaaaagatgttgtcacacttctgttttctttacctgtgccttataaaaatggaccaaacccttttctaaaataaaatagttctagggtggctggttattgacctatgtaggtccctaaaacctaaaaaaaaaaa

SEQ ID NO: 145560 - DNA, 902 bp, Homo sapiens
tttttttaaaaagcataaaagatattctttttattcctgtaattttataaaacactacataaaagctggcgagttttaaagagggaaaaactgcattgaaaagtataaagtctcacaagggcaaaatcccatctggggcaacagttcccaacatcacggacctctcaggaggagaactggtctccatgaagaggctcccgtacaccccctaccccacatacccttccctgtcaaaacttaagaccaagcatgcccacatctgacaagtcaacttcaaacaattccgtggtgcttttctttcaggctagaaatcatctgtagctattagaaccattcagcaaagcaatatggctttaatgggtacctatgctttgtgaagatatatttatacacacacacacaccgtgtgcttggggccaatcctgagaccatatacctgaggatcactgtctagcagtggctaatctttaagcggtgttaggacagacactctgggaaacacgcaggacattctggactcagtcctgtggtcaatggggggcagctttcattgcatcagacttgagacaccttgggacacatccttcaaagagttggggggctgtaaagttgacctctgtgagaagttgaccagacccatgtgggtcaaggttttgtgccctcacaccatacagtgccccaacacaggaggatcaaaccatccgtgctcagctagaactacggctcaaccataagggaggctgtgcctcatttccacaagagggcaaataagaaaagtaaaagaagtaagaaaaaattaaaaggaatatgaaaaaaaaaggaaaataagaaaaaaaaagaaatcagaaaagtcaaagaaataagaggaaaagaatgaggaaaaacggagaagaaataaaagt

SEQ ID NO: 145561 - DNA, 685 bp, Homo sapiens
  misc_feature (1)...(685): n = a,t,c or g
aggcctagaattcggcacgagggcacagactcagagagagcggaccatggtgctcgtctcctgccgacaagaccaaagcccaacgccccccgcggctaaagctcggcgccacgcctggcgagtatggtggcgagcccctggagaggatgttcctgtccttccccaaccaaccaagacctacttcccgaaacttcgaaccttaagccaaagntctgccccaaacggctctgccccaggtttaagggccacggccaagaaaggtggccgaacgcgcttgaaccaaaagccgtggcggcaacgtggaacgaacatgccccaaacggcgctgtccggccctgaagcgaccttgcacggcggcacaagctttcgggtgggacccggttcaattttcaaaggttcctaaaggccattgccttgcttgggttgaccctggggccgtccaccttccccggctggagtttcaacccctgtcggtggcacgccttcccttgggacaagtttcctgggtttcttgttgaagcaccgtgcttgaacctccaaattaccgttaaagctggagcctcgggtgggccatgcttctttgccccttggggcttccccccagggccctccttccctttcctggaacccgtaaccccgtggtctttgaataaagtctgagtgggcggcaaaaaaaaaaaaaaaa

SEQ ID NO: 145562 - DNA, 483 bp, Homo sapiens
  misc_feature (1)...(483): n = a,t,c or g
ttganaacctttggnaaactgccctctgcctctgcccatcatgggcaaaccccaaaagtcaaggccacaagggcaaaaaaggtgctgacttcccttgggaagatgcccataaagcaccctggatgatctcaagggcacctttgccccagctgagtgaactgcactgtgacaagctgcatgtggatcctgagaacttnaagctcctgggaaatgtgctggtgaccgttttggcaatccatttcggcaaagaattcacccctgaggtgcaggcttcctggcagaagatggtgactgcagtggccagtgccctgtcctccagataccactgagcctcttgcccatgattcagagctttcaaggataggctttattctgcaagcaatacaaataataaatctattctgctgagagatcacacatgattttcttcagctcttttttttacatctttttaaatatatgagccacaaagggtttatattg

SEQ ID NO: 145563 - DNA, 732 bp, Homo sapiens
aattttgccctcgaggccaagaattcggcgagggcaataagctcctagtcccagacgcccatggggtcatttcacagaggaggaccaaggctactatcgacaagcctgtggggcaaaggtgaatgtggaaagatgctggaggaagaaaacccctgggaaaggccccctggttgtcctacccccatggaccccagaggttcctttgaccagctttggcaacctgtccctctgcctctgcccatcatgggcaaacccccaaagtccaaggcaccatggcaaagaaggtgctgacttcccttgggagatgccaacaaagcacctggaatgattctcaaggggcaccttttgcccaagcctgaagtgaacttgcacttgttgacaagcctgcaatgtgggatcctgaagaacttcaaagcttcctggggaaatgttgctggtgacccgttttgggcaatcccattttcgggcaaagaatttcacccctgaaggttgcagggtttccctgggcagaaagatgggtgacttggagttggccagtgcccttgttccttccagataccactgaagcctcttggcccatgaattcagaagctttcaaggataaggcttttattcttgcaagcaattacaaataataaatctatttctgctaagagatcacacatgattttcttcagctcttttttttacatctttttaaatatatgagccacaaagggtttatattgagaa

SEQ ID NO: 145564 - DNA, 1729 bp, Homo sapiens
tccacccgagccccctcccccgggccgttcccgagttctaagttggcgggagcctataaaagctggtgccggcgcgacccgcggacacacagtgcaggcgcccaagccgccgccgccagatcggtgccgattcgctgccctgccccgaccgccagcgcgaccatgtcccatcactgggggtacggcaaacacaacggacctgagcactggcataaggacttccccattgccaagggagagcgccagtcccctgttgacatcgacactcatacagccaagtatgacccttccctgaagcccctgtctgtttcctatgatcaagcaacttccctgaggatcctcaacaattggtcatgctttcaaacgtggagtttgatgactcttcaggacaaagcagtgctcaagggaggacccctgggatgggcacttacagattgatttcagttttcacttttcactggggttcattttgatgggacaaggtttcagaggcatactgtgggataaaaaagaaatatgctgcagaaacttaccttgggtcactggaacaccaaatatggggattttgggaaagctgtgcaggaacctgatggactggccgttctaggtatttttttgaaggttggcagcgctaaaccgggccttcagaaagttgttgatgtgctggattccattaaaacaaagggcaagagtgctgacttcactaacttcgatcctcgtggcctccttcctgaatccctgggattactggacctacccaggctcactgaccacccctcctcttctggaatgtgtgacctgggattgtgctcaattttaccttttagcgtcagcagccgagcaggtgtttgaaattccgtaaactttaactttcaatgggggaggggtgaaccccgaagaactgatggtggacaactggcgcccagcttcagccactgaagaacagggcaaatcaaagcttcctttcaaataagatggtcccatagtctgtattccaaataatgaatctttcgggtggtttccctttagctaagcacagatctaccttggtgatttggaccctggttgctttgtgtctagttttctagacccttcatctcttacttgatagacttactaataaaaatgtggaagactagaccaattgccatgctttgacacaactgctggtggctggttggtgcctttgttatgggtagtagttttctgctaacaccagaatataggataagaaataagaataaagtaccttgactttgttccacagcatgtagggtgatgagccactcacaatttgttgacctaaaatgctgcttttaaaaacatgggcaaagtagaatggttgagtgcaaaccccatagccacaagataaattgagcctagttaaggccaatcaggtaaaatagtcatgattctatgtaatgtaaaccaggaaaaaataaatgttcatgatttccaagatgttatattaaagaaaaccttttaaaaattattatatatttatagcaaagttatcttaaatatgaattctgttgtaatttaatgacttttgaattccagagatataaatgaagtattatctgtaaaaattgttataattagagttgtgatacagaggtatatttcccattcagcacaataatattcataacttaataaatattgtattttagatatattctctaataaaattcagaattctaaaaaaaaaaaaaaaaaaaaaaaaaaa

SEQ ID NO: 145565 - DNA, 402 bp, Homo sapiens
  misc_feature (1)...(402): n = a,t,c or g
cggaagagttaacaatggctggtatttttgtgtagccgacaattcctattcccgtttctctcatttattttgtcactgagtactgacactgaattctgggatctctccagctggaagtccagtcctcattttcagcactccggagcccaaacgctgaactagccaaggggaaagcaggttccataccttttatctaaaaaaacttggcttaaataggtaaatatgacattcnnnnnnnnnnnnnnnnnnnnnnnnnnnnnnnnnnnnnnnnnnnnnnnnnnnnnnnnnnnnnnnnnnnnnnnnnnnnnnnnnnnnnnnnnnnnnncagaaccgcttcttaaaaccccttcagcactcgctgccccccccactgaaacccctaacatatgccccaaacctatt

SEQ ID NO: 145566 - DNA, 3183 bp, Homo sapiens
tttttttttttttttttcccataatgaaaatagctttatttgatttttctttattttaacgataatacatacaaattttaagcgaatacaaaatggtattaaaaattaaaggtaatgcaaacttccatctctagaggtgaccatagttattaacaattcaatcaacatcctaccccatatataaagttttatataaatgtgaatatcatgcaattctataacctgcttttttcactaaaaaatatgagttttccttgtcaatgaatatagctatatatcatcttcaatggctgtaaaatattcaacggtgtaactgtaccataattcatttaatccccctcctggatggacattttcaattggccttaagtttttgcaactgtaaacagtgctatgacggggcatttctggttagtcatcttcaaggatttggtttctagaagtgcctatgaggatcctcagtgaatgttctgacacacaggcaaatgcttcacatctccttacacttatattcccatctagggcattggaaaatgcctgcttcagacaggtgtaattctgagaatgaagatggggaagggagaaagggtgcttaaggtaccaagcccagcattaacccagcctcctcgggccacacagaagtgagaagtagcacatttgcaatcagtttccatgaggtgtcggcgctgttgggaaggactgggagataaagacgggaaagcgtgagctggatccctttgcacagacacgtatgaacgccaggtggcagagcctgcaactggggaacaatcattcaacagttatctatttgacacctgttttgagcctgaacctttgctggggcccatggagttataaaggcgtaagaccccagagtttagcatttggtggagactgtaaatcacccaactttatcacaagatgcagttatcgggcaggtgacacatgcaccagaagacaggcttcagttgttcttgtccatttatctcagatcaggcacgaccctgtccaaacatggagcagagcatcttagccagtgtctccaaccccagagtgtacatccaggcatgtgcgcactgtagcacagatgtgtcctcctatgtttggagccagggatccccattatcttcagacgccctcaccttccccctaggctgccaagtactggtggggaaaatcccaccaccttggggcttgatgtccttgaagtatatgggcttcccgtgggccctgagtgtgctcggcaaaagacacgccttccatcaccacacgctctccagccacatcttggccccatcttgagatttccaggagttccctccccttttttaaaacttgaagttgccttcaaagactttttagggttccctagctacaggagcattcagaatgaaaatcttctgggaagagttaacagttgctggtatttttgtgtaggcgacaattcttattcccgtttctctcatttattttgtcactgagtactgacactgaatactgggatcacaccagctcgaagtccagtcctcatcttcagcactccggagcccaaacgctgaactagccaaggggaaagcaggttccataccttttatctaaaaaaacttggcttaaataggtaaatatgacattcctatctcagaaaattttaattatcaagcatgaaacttcccctcttcggcctcccctccacctacagattctttcctgtggcctcagcagtgaggcaccctctgaacacaggtccccttcctgtgctctggaccccattttcttccaaacatggctctgatagtcattctctttctcttctctgaattttattaacatgcttaagtttgtcccacctttaaataaaacaaagcctcctttaactctatctcccctacttaaagcaactggcctcccttcccatccagagctgtttttttttttgagacaagatcttgctctgtcacctaggctggagtgcagtggcgcaactgtagctcactgcaacctcaacctcctgggctcaggtgatgttcccgcgtagctgggcctacaggcatgcaccaccacacacccagctagttgtttttatttttgtagggacagggtctcactatattccccaggctggtctcaaattcttgggctcaagtgattctcccacctcggcctcccaaaatgctaggaatacaggcataagccactgtgcctggcccagagccgcttcttaaaacaccttcagcactcactgcccccaccactgcttcccctcccatctgccccaaacctattgcctcatgtgttacaaagggtttcattgtctgcccagtgtctgggccagaagcttgcggggcatcctagctacctccctctcccctcaagcctctcatcaaatcaaggaccgatctcagtggttccgaaactctcctgagctctggccccaccatacctgcccttttcagctctcctgagggtagggataagcctggctgctcttcctgcctccagtctcacgccttctggtgtgtccagatcacgaagcgacaatggtaatgtggaaagcgcctcccaggtcctatcagacacccatgtgatgtggctcctgctcgtttttctccatgggcctcactgactttaccctacaccaagccacttgacatttccctagatgcgcctacctcaccctgccagacagacagggaggcagaagcaacaaacacttttacaccttttagactcagttcaagcatcaggttctccacaaagtcctccctcctgggtccccagctggaataccaccttcttcctttgtgctcctgttattccttgtagaggcttctggctcagtacccctaacccactactggcctacttgatttcccacacgtgcaagctctttacaaaaaatgcacaagccctaaagacaactggccccgccagcctcaggatacaggaagcagaggaggaagttctgaaaccagaggagacatcattccaaggaaataagaaaaacagacttacgtcagaatgatcattagatggaacttaacaaagcaacctgaaatctttgtctctctggaggaaagagttaacaacatggaaaagggggcagactggaataaacctacagggctggtctcaaagcatcagtgtgaattcatgatttttagtatctatttatgtcaggtatct

SEQ ID NO: 145567 - DNA, 2031 bp, Homo sapiens
  misc_feature (1)...(2031): n = a,t,c or g
agacgcagctcctcaggcgcccggcggtatttgttgggtcggcggcgtcagggattcgcagaggcctgtggtcggcgtcgtccggccactggtgcgcccccgcggcaggcagagctcacgctcctgtcccccggctggtccggggtctgggcgccgcgtcgacggcggccccgcaggacgcgcagaccgggccgcagcccatgccccgagcggactgcattatgaggcacctgccttacttctgccggggtcaagtggtgcggggcttcggccgcgggctccaagcaagcttgggcatcccccacagctaattttcctgagcaagtggtagataatcttccagctgatatatccactggtatttactatggttgggccagtgttggaagtaggagatgtccataagatggtgatgagcataggatggaacccatattacaagaatacgaagaagtctatggaaacacatatcatgcataccttcaaagaggacttctatggggaaatcctcaatggggccattggtgactacctgagaccagacgataactttgattctttacagtcacttatttcagcaattcaaggtgatttttgaggaagctaagaaatgactagatttaccagaacatttgaaactcaaagaagataatttcttccaggtttctaaaagcaaaataatgaatggccactgatgaaaaatcatattatttattcattcactgttttctagtgtttctgtgtttattactggttcagcatcatcctggttatatactgaaaatcaaacactttactacagttgtgaattagtttaaaccgtacaatgttgttatcatatcatgccttcaactattaaattaggcccatcatatcatagcactaaaaagattgagttaaaaataagatttaaaaaatatatattgattaaaatgtaccactagaaaggtgttacatgtgtataagtatgggtaaaaaggcaagtcactagtttgagatgaaaactaaaattttcatggtaaaatgccagcatgtatgtacttgtgtagtgtgtactttctaaacagagaaggcttataaaagtaaatgcattaaggccaagtgcagtggctcacaccggtaatcccagcactttgggaggccgaggtgggaggattgcttgagctcatgagttcaagaccagtctgggcaacatagcgagactccatctctataaataaaaaaaaaggaaatgcattaaatagaaggttgatagtttatcataaacctgcggggaagaaactcagactttctatttttgatattttgtgcattaatacattacaaacatgaaggatgtttgtaaagttttgtttttagtcattttctttgcagtcacatcattggtaccaccttcattattgtataggagctgcttcaattctgnggtcctctggacttcccctgcctatctgtttgttgttgttgttgaagacagtaaaataagtgttttcaaatctatatgtctcctttttgttggataatgtttcttctttttaatggtaaatattcttgttcttcaacatttttctttggttcttttttccttttttaggaaaaacaaaacaacagacttcatccttaggttttctcaagatttaagtgaacacatttacacatatcaatttctttaaagaacacaaaatgtttcctccctaggcaaaactatttaagagccaattaaactatgaaatagttataaaattatttttaatatttaaggccttgaaattatattccaagggcaaatctaaatggggtgtagttgtatatggcacggtgtaatttaatgctaaagagtacttacagcttgagggaaaagcataaagttttagttaaatagccttcatactgtggatttttcctcctactaactaatatgtgggaaattaagattacagatgctttgggccccctcaaacagtacattgctacagttcactgtagcaacagatttggtggtgatggggggatagaggtagaagcagataa

SEQ ID NO: 145568 - DNA, 569 bp, Homo sapiens
ttgtcacagatgttaccacagacaagacctatttatagtaagagtgaatgcatttctgaagtactgacctggaagagctacctactctaggctggttctagaaacaagaacttatcattctttcctgtccttttgtctccttgacctacagagaacggctgcctgccaacttctttaaattccagttccggaatgtggagtacagttccgggaggaacaagaccttcctctgctatgtggttgaagcacagggcaaggggggccaagtgcaggcatctcggggatacctagaggatgagcatgcggctgcccatgcagaggaagctttcttcaacaccatcctgccagccttcgacccagccctgcggtacaatgtcacctggtatgtgtcctccagcccctgtgcagcgtgtgctgaccgcattatcaaaacccttagcaagaccaagaacctgcgtctgctcattctggtggggtcgactcttcatgtgggaggagccggagatccaggctgctctgaagaagctgaaggaggctggctgtaaactgcgcatcatgaacctcgtgcc

SEQ ID NO: 145569 - DNA, 1960 bp, Homo sapiens
tccgaattgccgcgtcgacccacgcgtgcgcccgtcatccccagccagatttagctgctgacagctgcgttgggactctggcgccagggcctggcccagacctgcctgcctctctcctctccctcagagactcctgagccacagcccctccatggcccagaaggaagaggctgctgtggccactgaggctgcctcccagaatggggaggatctggagaacctcggacgaccctcagaagctgaaagagctgattgagctgccgccctttgagattgtcacaggagaacggctgcctgccaacttctttaaattccagttccggaatgtggagtacagttcccgggaggacaaagaccctccctctgctatgtggtttgaagcacaggggcaagggggggcaaagttcaggcatcttgggggatacctagaggatgagcgatgcggcttgcccattgcagaaggaaagcttttctttcaacaccatcctgccagcctttcgacccaagccccttgcggttaccaatgtcacctgggttatgtgtcctccagcccctgttgcagcgtgtgctgaccgcatgagtcaaaacccttagcaagaccaagaacctgcgtctgctcattctggtgggtcgactcttcatgtgggaggagccggagatccaggctgctctgaagaagctgaaggaggcttggctgtaaacttgcgcatcatgaagccccaggactttcgaatattgtcttgggaagaattttgtggagcaaggaagagggtgaatccaaggcctttcagccctgggaggacattcaggagaacttcctatactacgaggagaagttggcagacatcctgaagtagggcaactgggctttgcctcaagtattcctgctgccacccaagagccagccaatgacatgtacagccatctgggacatgcctgtcttcctaataccatttgggagctgggacaacatttggacaccaaccaatcatactgggacaagggccctagaggacttgaaatatacttctcatgctggtagtttatttaggctgtgacctctctctcctaatgctgctctcggggaaggacgaaagtgacactgcacggagagaaatgcaaccatacatgggctccgagtcgaactatgggactgaaggtcctaattgctcacccaagggggctgcttaacacaaacagcctcagacccgaggtttagatttctgaaatatgcattttatgttaagttgggtattttttttaaaaaaagaaaaacagcaacattaataaaagaagtggtgtgtttttcccgtggccagatttttaagaaacttgaacatctggaagttgccacagacaagcgagctagtcccagacaccagggacacttcccaggctatgaaccaagcccatggttaaaccaagacttgcctagacaatgcagaataactctcccatacagacttcttacgacaatcaagtgagggcctttcccttctctgaaggcaagttaataaggcagaaggtggaacaaaaagtatgataattctaatgtagccacatcccaaatgccagataataagcaactagcttttttattagagaggagcgggtgaaaagtagtagtttaatgttcagatatacaatcatttaaaagtattcaatacatggtgtttgatggtaatggcaggatgatgtcaagtctctctttttttttttttaaaggtttgtttgagtcctatgtggaagcaaaaattcacaggtgaatttccgggtgtttgccaaactctaactaggtttccaggaataatgtgttcactctgattaccagggcatgcctcctttcctcaggcttcaagtgtgataagtcgtcggaatttgacccaagactactatcggcaaatgacaaagtgctttatcacattcctgctaagtcccagaattccacttacagccaatc

SEQ ID NO: 145570 - DNA, 1203 bp, Homo sapiens
attgaagactctgagacgagcagggaactcagaacattgagtccctatttgatgttaaaatatgaccgttaaacttctgggtaagataatgaatggcactatggtttatactgtttctgttttatgggctcttccagagacgtgaactggaaaaggctctgcagtgtctgggattcgctcagtgctgcaggggagggcaggtgtgaggggaatggccctggagggtgatggggctggggcatccgatgcagctttatagttctgtaattaccacttttaaactttttattacgaaaaatgtcaaggaccctgggaattacggtgaggtaggcaggataatggcccccaagatgcccgtgttgtgacccccagaccttgtgagtgcctcacatggggagattgtcctaggtcatcttgcaggcccagggcagccccatgggcccttaaagcttgagagcctttcctgctgagtctgagagatgccagaagcaggagaggttagaacccgaggagggccgcacctgcgctgctggccttagaggagggccgaggagtgtggtggcccctaagcagctgggactggggacctccgtcccagccctgcaagaaactgaattctgccagcagcccccatgatggaggaaaggaaggatcctgcccctgcccagccaccttggacctctgaccctcccacaatttgtaagccctgaggttttgtgtagtccccccatagaaaactcacacacataagaactctgtacctgattccaacaatagaacatgtcacacacggaactggaaactgattcttgtgggcgacaagagtctatagtaaaacgttatgacagattctttgaatgcgctaatctcagactggactaaagttgggattaaatttaatttgtacttgagttcagtgcattgctgttctgggcataggaaatccaggttgctggtgatgaacagctgaaaagagctgtgtcaccatggttgtctctgtcagtcatgtgaccacccttacccttgtaaaatcaagcaagggagagattattttctaatgtaaatgaaaataaaaaataaagcagcttgcagaaacttggtctttgtttcctctattctgtccccccaaccctttccataacactcttctccctaacctcttgcctgagccctccacgaccactccggcaccactctgctgag

SEQ ID NO: 145571 - DNA, 2445 bp, Homo sapiens
atgatctgtacaattcatttttccgcagaatctaaacaaaatcttaatgttgacaaagatactaccttgcctgcttcagctagaaaagttaagtcttcggaatcaaaggaacgtggtgcccaggacaggcggatccaggatctggaaactgagttggaaaagatggaagcaaggctaaatgctgcactaagggaaaaaacatctctctctgcaaataatgctacactggaaaaacaacttattgaattgaccaggactaatgaactactaaaatctaagggtatgatggctaagcaagaaggcatggagatgaagctgcaggtcacccaaaggagtctcgaagagtctcaagggaaaatagcccaactggagggaaaacttgtttcaatagagaaagaaaagattgatgaaaaatctgaaacagaaaaactcttggaatacatcgaagaaattagttgtgcttcagatcaagtggaaaaatacaagctagatattgcccagttagaagaaaatttgaaagagaagaatgatgaaattttaagccttaagcagtctcttgaggagaatattgttatattatctaaacaagtagaagatctaaatgtgaaatgtcagctgcttgaaaaagaaaaagaagaccatgtcaacaggaatagagaacacaacgaaaatctaaatgcagagatgcaaaacttaaaacagaagtttattcttgaacaacaggaacgtgaaaagcttcaacaaaaagaattacaaattgattcacttctgcaacaagagaaagaattatcttcgagtcttcatcagaagctctgttcttttcaagaggaaatggctaaagagaagaatctgtttgaggaagaattaaagcaaacactggatgagcttgataaattacagcaaaaggaggaacaagctgaaaggctggtcaagcaattggaagaggaagcaaaatctagagctgaagaattaaaactcctagaagaaaagctgaaagggaaggaggctgaactggagaaaagtagtgctgctcatacccaggccaccctgcttttgcaggaaaagtatgacagtatggtgcaaagccttgaagatgttactgctcaatttgaaagctataaagcgttaacagccagtgagatagaagatcttaagctggagaactcatcattacaggaaaaagtggccaaggctgggaaaaatgcagaggatgttcagcatcagattttggcaactgagagctcaaatcaagaatatgtaaggatgcttctagatctgcagaccaagtcagcactaaaggaaacagaaattaaagaaatcacagtttcttttcttcaaaaaataactgatttgcagaaccaactcaagcaacaggaggaagactttagaaaacagctggaagatgaagaaggaagaaaagctgaaaaagaaaatacaacagcagaattaactgaagaaattaacaagtggcgtctcctctatgaagaactatataataaaacaaaaccttttcaggaagtatcaaaactccgctgtcagcttgctaaaaaaaaacaaagtgagacaaaacttcaagaggaattgaataaagttctaggtatcaaacactttgatccttcaaaggcttttcatcatgaaagtaaagaaaattttgccctgaagaccccattaaaagaagagttttgttctgtggcattgccttggatgatagaggtactgacaacaactgactctcagaaactgctacaccagctgaatgccctgttggaacaggagtctagatgtcagccaaaggtctgtggtttgagactaattgagtctgcacacgataatggcctcagaatgactgcaagactaagggactttgaagtaaaagatcttcttagtctaactcagttctttggctttgacacagagacattttctctagctgtgaatttactggacagattcctgtctaaaatgaaggtacagcccaagcaccttgggtgtgttggactgagctgcttttatttggctgtaaaatcaatagaagaggaaaggaatgtcccattggcaactgacttgatccgaataagtcaatataggtttacggtttcagacttgatgagaatggaaaagattgtattggagaagccttctgtgttggcattttctatcattgcattagagatccaagcacagaagtgtgtagagttaacagaaggaatagaatgtcttcagaaacattccaagactactacggggaatcagctaccagcttactgccatgtggagaactgcacgagattccgggattggaatcaaaatgctaatttaaaaggtcaagtgaagctgctcctcacgttttggcgtgcctgcgctctctgcaggcagaagcgaacaaagacccagcaagagaaggcagaggctaagacccatcccgtatctgctctcctgaaataa

SEQ ID NO: 145572 - DNA, 458 bp, Homo sapiens
cggagttctagattatcctttatgttttaattgaaataaggtagagtcatgggcttactggttttgtttttgattttttaggtacagcccaagcaccttgggtgtgttggactgagctgcttttatttggctgtaaaatcaatagaagaggaaaggaatgtcccattggcaactgacttgatccgaataagtcaatataggtttacggtttcagacttgatgagaatggaaaagattgtattggagaaggtgtgttggaaagtcaaagctactactgcctttcaatttctgcaactgtattattcactccttcaagagaacttgccacttgaaaggtaagtgacctttgttttgaacaagagacatttggaaatcagaatggtattgtatggatattgcataaaatcagtatcctcatagaattctaataaaaataagtaaaatgaaaaaaaaaaaaa

SEQ ID NO: 145573 - DNA, 2192 bp, Homo sapiens
gagctctgtcaagatgatagaggtactgacaacaactgactctcagaaactgctacaccagctgaatgccctgttggaacaggagtctagatgtcagccaaaggtctgtggtttgagactaattgagtctgcacacgataatggcctcagaatgactgcaagactaagggactttgaagtaaaagatcttcttagtctaactcagttctttggctttgacacagagacattttctctagctgtgaatttactggacagattcctgtctaaaatgaaggtacagcccaagcaccttgggtgtgttggactgagctgcttttatttggctgtaaaatcaatagaagaggaaaggaatgtcccattggcaactgacttgatccgaataagtcaatatatgtttacggtttcagacttgatgagaatggaaaagattgtattggagaaggtgtgttggaaagtcaaagctactactgcctttcaatttctgcaactgtattattcactccttcaagagaacttgccacttgaaaggagaaatagcattaattttgaaagactagaagctcaactgaaggcatgtcattgcaggatcatattttctaaagcaaagccttctgtgttggcattgtctatcattgcattagagatccaagcacagaagtgtgtagagttaacagaaggaatagaatgtcttcagaaacattccaagataaatggcagagatctgaccttctggcaagagcttgtatccaaatgtttaactgaatattcatcaaataagtgttccaaaccaaatgttcagaagttgaaatggattgtttctgggcgtactgccctgaaatggtcccttaactggattattacagcaccaaaaaacttctctgaagcctttctccacaaccttgttctatggattccataatgttacaatggatttaagctatgaagcctcaaaacatcacgagataagcatgatggtctcagacttgggaaaactgcctaatattatgctgtagtggaattatgtttagatttgaattcatctgtgaagcattcaaatcaaagctaaaagcctaaatgaaatgctaatgacaagcctgagaaggtaaactgtgaatcttcatttctatcattgatctaactttagatattggatcaatatatttaggtggtattgaaaatgctattggaggagtcacactaatactatcaactatcagtcttcccacagcttcaatcactgtcattattctaatcctactcctacttaaattttaagttatgaggtttatgtcaaaagcaacatttcacaatgtacttttaaggcataataagggttaacattctaggcagtataaacacaccccataatgcaagtaataggtaatctagagatgtggactttattgctatatgggaattacatttaaatttgagggcattttatataaagaaaaatacagacctataaagtttggcatattcattaagttatcttttaatatttttttctagaaaacaggtgacatttgtatctacgataaaaatttttatacagaacctactgcctcaaactgaatcccatcaagaaaactagtttctattgtattagtaactcaaaataaattatcacttcgaaaacttgctttcccacactaaggtaagttcagactagattgaacactccagaattttttactacagactgtttttaagttagaagtgatggcaattttataaatagagatatacttccactgatgcccttactgtgccaaaacaaaaatcttaagaaaagcaagtagacaccttcataactatgaatgaagctgctgaagtagtgtttaggatcctccatggcagttagtgaatgtaagaagtacagtgttaaagtgttgtaaacagttactcagtgcaatgtatagcctgagtctatccatgatggctatatccaatttgacatcacgttatggatcactacacaatgaaaaaccaaagaaccacagtatatcttattcttaacttttgtaaaccatgttttatgggtaactttttagttttcccaaaagggtgataaatttcaatattttgaatacatcattgttaattttgagttggcagaggtaaactaaccaactaccattatgttttagtactaagggatatacctttcaataaagttaatgaaattc

SEQ ID NO: 145574 - DNA, 2763 bp, Homo sapiens
tcgagcggccgcccgggcaggtgtgccagtcaccttcagtttctggagctggccgtcaacatgtcctttcctaaggcgcccttgaaacgattcaatgacccttctggttgtgcaccatctccaggtgcttatgatgttaaaactttagaagtattgaaaggaccagtatcctttcagaaatcacaaagatttaaacaacaaaaagaatctaaacaaaatcttaatgttgacaaagatactaccttgcctgcttcagctagaaaagttaagtcttcggaatcaaagaaggaatctcaaaagaatgataaagatttgaagatattagagaaagagattcgtgttcttctacaggaacgtggtgcccaggacaggcggatccaggatctggaaactgagttggaaaagatggaagcaaggctaaatgctgcactaagggaaaaaacatctctctctgcaaataatgctacactggaaaaacaacttattgaattgaccaggactaatgaactactaaaatctaagttttctgaaaatggttacccggagaaatttgggaattctaagcttggagttgttgaaacttggaaccaaaggggaaccaagattgaggggtatgatgcctaagcaggaaggcatggagatgaagctgcaggtcacccaaaggagtctcgaagagtctcaagggaaaatagcccaactggagggaaaacttgtttcaatagagaaagaaaagattgatgaaaaatctgaaacagaaaaactcttggaatacatcgaagaaattagttgtgcttcagatcaagtggaaaaatacaagctagatattgcccagttagaagaaaatttgaaagagaagaatgatgaaattttaagccttaagcagtctcttgaggagaatattgttatattatctaaacaagtagaagatctaaatgtgaaatgtcagctgcttgaaaaagaaaaagaagaccatgtcaacaggaatagagaacacaacgaaaatctaaatgcagagatgcaaaacttaaaacagaagtttattcttgaacaacaggaacgtgaaaagcttcaacaaaaagaattacaaattgattcacttctgcaacaagagaaagaattatcttcgagtcttcatcagaagctctgttcttttcaagaggaaatggttaaagagaagaatctgtttgaggaagaattaaagcaaacactggatgagcttgataaattacagcaaaaggaggaacaagctgaaaggctggtcaagcaattggaagaggaagcaaaatctagagctgaagaattaaaactcctagaagaaaagctgaaagggaaggaggctgaactggagaaaagtagtgctgctcatacccaggccaccctgcttttgcaggaaaagtatgacagtatggtgcaaagccttgaagatgttactgctcaatttgaaagctataaagcgttaacagccagtgagatagaagatcttaagctgggagaactcatcattacagggaaaaagcggcccaaggctggggaaaaatgcagaggatgttcagcatcagattttggcaactgagagctcaaatcaagaatatgtaaggatgcttctagatctgcagaccaagtcagcactaaaggaaacagaaattaaagaaatcacagtttcttttcttcaaaaaataactgatttgcagaaccaactcaagcaacaggaggaagactttagaaaacagctggaagatgaagaaggaagaaaagctgaaaaagaaaatacaacagcagaattaactgaagaaattaacaagtggcgtctcctctatgaagaactatataataaaacaaaaccttttcagctacaactagatgcttttgaagtagaaaaacaggcattgttgaatgaacatggtgcagctcaggaacagctaaataaaataagagattcatatgctaaattattgggtcatcagaatttgaaacaaaaaatcaagcatgttgtgaagttgaaagatgaaaatagccaactcaaatcggaagtatcaaaactccgctgtcagcttgctaaaaaaaaaacaaagtgagacaaaacttcaagaggaattgaataaagttctaggtatcaaacactttgatccttcaaaggcttttcatcatgaaagtaaagaaaattttgccctgaagaccccattaaaagaaggcaatacaaactgttaccgagctcctatggagtgtcaagaatcatggaagtaaacatctgagaaacctgttgaagattatttcattcgtcttgttgttattgatgttgctgttattatatttgacatgggtattttataatgttgtatttaattttaactgccaatccttaaatatgtgaaaggaacattttttaccaaagtgtcttttgacattttattttttcttgcaaatacctcctccctaatgctcacctttatcacctcattctgaaccctttcgctggctttccagcttagaatgcatctcatcaacttaaaagtcagtatcatattattatcctcctgttctgaaaccttagtttcaagagtctaaaccccagattcttcagcttgatcctggaggtcttttctagtctgagcttctttagctaggctaaaacaccttggcttgttattgcctctactttgattcttgataatgctcacttggtcctacctattatcctttctacttgtccagttcaaataagaaataaggacaagcctaacttcatagtaacctctctatttt

SEQ ID NO: 145575 - DNA, 2500 bp, Homo sapiens
cggacgcgtgggcggacgcgtgggcggacgcgtgggccgagctgaccctgatcacggccgagttgtctcggcggcgctgccgaggcctccacccaggacagtccccctccccgggcctctctcctcttgcctacgagtccccctctcctcgtaggcctctcggatctgatatcgtggggtgaggtgagcaggcccggggagggtggttaccgctgaggagctgcagtctctgtcaagatgatagaggtactgacaacaactgactctcagaaactgctacaccagctgaatgccctgttggaacaggagtctagatgtcagccaaaggtctgtggtttgagactaattgagtctgcacacgataatggcctcagaatgacgtgcaagactaagggactttgaagtaaaagatcttcttagtctaactcagttctttggctttgacacagagacattttctctagctgtgaatttactggacagattcctgtctaaaatgaaggtacagcccaagcaccttgggtgtgttggactgagctgcttttatttggctgtaaaatcaatagaagaggaaaggaatgtcccattggcaactgacttgatccgaataagtcaatataggtttacggtttcagacttgatgagaatggaaaagattgtattggagaaggtgtgttggaaagtcaaagctactactgcctgtcaatttctgcaactgtattattcactccttcaagagaacttgccacttgaaaggagaaatagcatcaattttgaaagactagaagctcaactgaaggcatgtcattgcaggatcatattttctaaagcaaagccttctgtgttggcattgtcctatcattgcattagagatccaagcacagaagtgtgtagagttaacagaaggaatagaatgtcttcagaaacattccaagataaatggcagagatctgaccttctggcaagagcttgtatccaaatgtttaacctgaatattcatcaaataagtgttccaaaccaaatgttcagaagttgaaatggatttgtttctggggcgtactgcacggcaattgaagcctagctactacagaattaacttcaccttccaacaattcctggaaatgggtcccttaactggggtttatttacagcacccaaaaaacttctctggaaggcctttctccaccaaccttgtttctttgggattccataatgtttacaatggggttttaagctatggaagcctccaaaacatcacggggttaggctggtgggtctcagacttgggaaaactgcctaatattatgctgtagtggaattatgtttatgatttgaattcatctgtgaaggcattcaaatcaaagctaaaagcctaaatgtgaaatgctaatgacaagcctgagaaggtaaactatgaatcttcatttctatcattgatctaactttagatattggatcaatatatttaggtggtattgaaaatgctattggaggagtcacactaatactatcaactatcagtcttcccacagcttcaatcactgtcattattctaatcctactcctacttaaattttaagttatgaggtttatgtcgaaagcaacatttcacaaatgtacttttaaggcataataagggttaacattctaggcagtataaacacaccccataatgcaagtaataggtaatctagagatgtggactttattgctatatgggaattacatttaaatttgagggcatttatataagaaatacagacctataagttggcatattcattaagttatctttaatatttttctagaaacaggtgacatttgatctatcgataaaattttatacagaacctactgcctcaaactgaatcccatcaagaaaactagtttctattgtattagtaactcaaaataaattatcacttcgaaaacttgctttcccacactaaggtaagttcagactagattgaacactccagaattttttactacagactgtttttaagttagaagtgatggcaattttataaatagagaatatacttccactgatgcccttactgtgccaaaacaaaaatcttaagaaaagcaagtagacaccttcataactatgaatgaagctgctgaagtagtgtttaggatcctccatggcagttagtgaatgtaagaagtacagtgttaaagtgttgtaaacagttactcagtgcaatgtatagcctgagtctatccatgatggctatatccaatttgacatcacgttatggatcagtacacaatgaaaaaccaaagaaccacgtatatcttattcttaacttttgtaaaccatgttttatgggtaactttttagttttcccaaaaggctgataaatttcaatattttgaatacatcattgttaattttgagttggcagaggtaaactaaccaactaccattatgttttagtactaagggatatacctttcaataaagttaatgaaattcaaaaaaaaaaaaaaaaaa

SEQ ID NO: 145576 - DNA, 2214 bp, Homo sapiens
  misc_feature (1)...(2214): n = a,t,c or g
agattccgggattggaatcaaaatgctaatttaaaaggtcaagtgaagctgctcctcacgttttggcgtgccttgcctctctctgcaggcagaagcgaacaaagacccagcaagagaaggcagaggctaagacccatcccgtatctgctctcctgaaataattctggagtcatgcctgaaatgccagaggacatggagcaggaggaagttaacatcccctaataaggagggttctgggttactgggtgccactggggcttccttggcagagctgtacacaaagaatttcagcagaataatttgggcatgcagttggctgtggtttcagaagagcaagaccaaaatttgaacaggttaatctgttgggattctaatgcagttcatcacatcattcatgattttcagccccatgttatagtacattgtgcagcagagagaagaccagatgttgtaggaaaatcagccagatgctgcctctcaacttaatgtgggatgcttctggggaatttaggcaaagggaaggcagctgctgtttgggagcatttctccattctacatttaggctcaggtttttgtattttgatgggaaccaaatccaccttacaagagaggaagacataccagcttccctaaattttgtatggccaaaccaaatttagatgggagaaaaggctgtccttggaggaaccatctaggagctgctgttttgaggattcctattctgtatggggaagttgaaaaacctcgaaaaaaagtgctgtgaactgttaatgtttgaataaaagtgccagttccagcaacaaagtcaagcaaaacaatggatccactggcaagcaagaggttcccccccacacatgtccaaagatgtggccccactgtgtgcccggcagcctagcagagaagagaatgctggatcccatcaattaagggaacctttcactggtctggcaatgaacagatgactaagtatgaaaagggcatgtgccaattgccagatgcccttcaacctccccagcagtcaccttaagaccctattactgacagccctgtccctaggagcacaacgtccgagaaatgctcagcttgactgctccaaattggagaccttgggcattggccaacgaacaccatttcgaattggaatcaaagaatcactttggcctttcctcattgacaagagatggagacaaaccggtctttcattagtttatttgtgttgggttcttttttttttttaaatgaaaagtatagtatgtggcactttttaaagaacaaaggaaatagttttgtatgagtactttaattgtgactcttaggatctttcaggtaaatgatgctcttgcactagtgaaattgtctaaagaaactaaagggcagtcatgccctgtttgcagtaatttttctttttatcattttgtttgtcctggctaaacttgggagtttggagtaatagtaaaattanggaccccttaaaatatttgaagaagtccaggatgaaagcagaacctgctgtaagaccttttccagatgaaaattgttccattcctcgtaacctcccatattttccaggatttttgaagcctgttgaccttttccatgttgattattttaaattgtgtgaaatagtataaaaatcattggtgttcattatttgctttgcctgagctcagatcaaaatgtttgaagaaaggaactttatttttgcaagttacgtacagtttttatgcttgagatatttcaacatgttatgtatattggaacttctacagcttgatgcctcctgcttttatagcagtttattgggaagcacttgaaagagcgttgtgtccatgtattttttttctaggcaaacattgaatgcaaacgtgtatttttttaatataaatatataactgtccttttcatcccatgttgccgctaagtgatattttcatatgtgtggttatacttcataataatggcgccttgtaagtcttttcaccattcatgaataataataaatatgtactgctggcatgtaatgcttagttttcttgtatttacttctttttttaaatgtaaggaccaaacttctaaactaattgttcttttgttgctttaatttttaaaaattacattcttctagatgtaacatgtgatacatacaaaagaatatagtttaatatgtattgaaataaaacacaataaaattaacacttgaaaaaaaaaaaaaaa

SEQ ID NO: 145577 - DNA, 523 bp, Homo sapiens
  misc_feature (1)...(523): n = a,t,c or g
aattcaaaccgccaaaatggacccccaaaaaagggagagagagagagagccagcaactgtaccaggagcacccgctgcacaggcagaacacctctggtgccactttcaagacaaaacaagagcacagttgaaacatctaatttgaaaatgttgatctcctttcctaagacattgctaaggggcccacaggaaggctggtggcaccagggaataaaccctggaagtggtgcagccactctgggaccaggcagcntccgcagaggcctcaatccatgcagccagctgctcgatggcacggcgcactttcttcgcagtttcctcaaattctttcttcttattgttggtttcctttgcatggggtcgtcatctggctcccagccttccagctccttgaagcagaagaaacactgggccaagtctggctcgttctcagtggggcagtggatgaagccagcctcggccatccgctccggggtgcagcgcagccctccaagaagggccagttcttgaatgtagagatgcg

SEQ ID NO: 145578 - DNA, 427 bp, Homo sapiens
gtcaaatgagatttaattaggttgtaagcatcaccaaggcaccagcatatagagaggtatccgttcacaacagctgtttaagaagcaatgagggtggaaagcaaccctcccatactaagtgtctttgcaactcaaatcttttgacaactcagttcaaaacaaagcccatcgaggctggccagagaagacttacatggggtcgtcatctggctcccagccttccagctccttgaagcagaagaaacactgggccaagtctggctcgttctcagtggggcagtggatgaagccagcctcggccatccgctccggggtgcaggcgcagccctccaagaagggccagttcttgaatgtagagatgcggtggtccttgagaaagggctgccaggcagggggcaacgtcggggcacccatgccgccgacgaaa

SEQ ID NO: 145579 - DNA, 1014 bp, Homo sapiens
atgacctccagaggtttccagcgaagctgtaacaatccaccctgcagctctatgacagggaggagggcgaatcaaatccatcatcttacgccagacttcagcctgcgggagctgctgcctccaaagaaagcggggacctgggcggactgcgtctctcccccgtgtggagaacgtgacagatgtgaaggttgggctgacagacacacggcctgcagcagcccagccagcacctgccaagtccacactcaggactgtgacagcctcaacaacatgaggtccagacacattcactgtggaaggctctgccacgcgaacaaagctgtcagctctagcaaaagggacactgccttcttcctccctcacttctcacctggtaagcccgggaatcaaaacagcaaaaatgagcccccaaaaaagagagagagagagagaagcagccactgttacccagcagcacccgctgcacaggcagaagcacctctggtgccactttcaagacaaaacaagagcacagttgaaacatctaatttgaaaatgttgatctcctttcctaagacattgctaaggggcccacaggaaggctggtggcaccagggaataaaccctggaagtggtgcagccactctgggaccaggcagctccgagaggcctcaatccatcgaggccagctgctcgatggcacggcgcactttcttcgcagtttcctcaaattctttcttcttattgttggtttcctttgcaattttgttcttggctctttctctgtccagtttcaaaaattcaccaagggttaattcttcaaactgcttcttgacagaaaggaaagcgcaaccggacgaatgctttttatgttcctctatggggtcgtcatctggctcccagccttccagctccttgaagcagaagaaacactgggccaagtctggctcgttctcagtggggcagtggatgaagccagcctcggccatccgctccggggtgcagcgcagccctccaagaagggccagttcttga

SEQ ID NO: 145580 - DNA, 1596 bp, Homo sapiens
tcaatccatggcagccagctgctcgatggcacggcgcactttctccgcagtttcctcaaattctttcttcttattgttggtttcctttgcctgagatgttggagacatggagtgaggccccatggagagggcagatgaggagggtggattagggctgatcttgggagctgttgcccccatatccctttgacattcgccttggcaaactttgtaggcccggaggagagttctcaaaacacagtgagtgtgacctttcacatgcacaaaggtgttgatccaaccgaagcaatattgattcttgttatattgctttattgtggggtcagtgtcagagtaccacgagttttcatcacgcaccgttctttccccagtccccagcaggaagtagcagccggtgaaaagcagcagagacacgctctgggccagggagctgagcaggccgcagatccagccacacacgagaaggaccaggctcaggggcaggaccacaatgactgcacggtgcagcacaggaggtaggtgggccctgctccgagtccccaagggccgtttccgatttggaaccagaccagacaaaccaccgaagccattgggaaagggaccattgggccggatttggccaaaacggttcacgcacacggcccgcaacccagccatgctcaccaccaccatgttcgtctccacgaaggtgggatcaactgagcagacggacaacaccagctcctggagtcctgggccaggtccagggccaccgcagccagcatccaccacctggtgcatgcttccacccagggctttttggaggcgccaggcttcttcaatgaagtccttgggcctcccagccagggaccccactggggcgcccaggcccttggagaggcagaaagacacagagtcacagtgctccacaatgtaggtgggcgggacatgcagggccagcaccacgttcatcagctgggccctgtccaggtggacccaggccccataggtctgggccaggaggtgcacctggcgtaggtagttgatggggaggatccggacccccgagatgctgtgtgagttctccaggcaaatgagctcgcagacctgagccaccccaccctgctcatagacgtggaggtggcactcctgcccaaggaggagctgggagccccggcgccagcagtgacacatcactgcgcctggaggcccctccacagagcatcgcctgctggagaagctgctgcaatgctgcttcttggtggacacgcagccgaggcacctgcagtcgtcagacccagagatgaggttggccatagtgttggagggcacaaagagggtgcgccccagccctagcagctccacagccatttcttgcagctcatcacggacagcgctccgctgccgcctccacgacccccggcctgcacgccggtcttcgccgtagtcgtcgtcccccacgaccgcctcggccatgacgcacctcatggccggcccgggcctggtcaccttgtcgctgcgcaggcccaccacgtaggctgcgacccccgcgctcccacaccccgcccggagcgccccatgtaccggggccgccgctcgggccagtctgcggagcat

SEQ ID NO: 145581 - DNA, 2375 bp, Homo sapiens
  misc_feature (1)...(2375): n = a,t,c or g
tctgaaagaaagtctaggcggttgcgcttagacaagggcctacggttttattaacagatgtcgaggaagctttcaggtgctggcagccatgagggtctggttttaaggatggcctttaaggaaaggccgtggcaggcgggctgagaggggcggctccagctcagccctgcccacagcacaggctcacagaagccgagatccacatcaccgcctgggcatgcaaaggagttgaagacaaaaccatttttttccagcttctctacaaagccaattactaaggcaacagttattaaagtggaagtatcccatttaacagactgaacacaaatatcaaaaataaggcagcttaggatgaggtacagagggcttggagtgcattttctgcttaaccaaaaaccacttgtggatatttctcccagttttagagggaaaagtcttttcttcaggccgactcagatgttggcagaataagtgggtcttgaagtgcatttttcagttgtttctgcccggaaggagcccggatgatacaaacaggtctggggttccgtggctctggcaagcgcccagagacaactgcgtctctgcccaggacgctcatcctcactgcggctgtctgggcagatggctgttggcaggctagggacgacgatgaaaaactgacaatattttaaaaacccagtagggtccacagcagtgtttgaaatggacaggctttttatttcttcaggaacagccgagatgacctccagaggtttcccagcgaagcttgtaacaatccacccctgcagctctatgacagggaggagggcgaatcaaatccatcatcttacgccagacttcagccctgcgggagctgcttgcctccaaaagaaagcggggacctgggcggactgcgtctctcccccgtgtggagaacgtgacagatgtgaaggttgggctgacagacaccgggcttggcagcagcccagccaagtcccccacagcatcgagccaagtcatttaaaaaggatttaaggccactgcctttttttctcgagggaggagcggccagcatgttgccccgcggcttcacttgggcctgtctaatcacacagcagtgggcaaaagggagtatctggccagacgcttcctatcactctattctgtctcctcatccacctgnagtttcaccccgtttccccaatgacttagaatggcttttgtgcttagtttttaaattgtagtttgtgctattctgtgaattaacaattcaaacaaaataagaaagccatgttgttaaacagtagaggagccagggactctgtctccattctctcatcacacacaagtcatgcatctaccaaaaaaaaaaaaaacaaaaaaacacaacaacaaaaaaactgtcctctgaggaggcacaggtgtgacagataaggaacctgcagctcagattcaacaggcacctggcaaggtcccccctcaggactgtgacagcctcaacaacatgaggtccagacacattcactgtggaaggctctgcccacgcgaacaaagctgtcagctctagcaaaagggacactgccttcttcctccctcacttctcacctggtaagcccgggaatcaaaacagcaaaaatgagcccccaaaaaagagagagagagagagaagcagccactgttaccagcagcacccgctgcacaggcagaagcacctctggtgccactttcaagacaaaacaggagcacagttgaaacatctaatttgaaaatgttgatctcctttcctaagacattgctaaggggcccacaggaaggctggtggcaccagggaataaaccctggaagtggtgcagccactctgggaccaggcagctccggccagaggcctcaatccatgggcagccagctgctcgatggcacggcgcactttcttcgcagtttcctcaaattctttcttcttattgttggtttcctttgcaattttgttcttggctctttctctggtccagtttcaaaaaattcaaccaaagggttaattcttcaaaactgctttcttgacaggaaaggaaagcgcaaccgggacggaattgcttttttatgttcctctatggggtcgtcatctggctcccagccttccagctccttgaagcagaagaaacactgggccaagtctggctcgttctcagtggggcagtggatgaagccagcctcggccatccggctccgggggtgcaggcgcagccctccaagaagggccagttcttgaatgtagagatgcggtggtccttgagaaagggctgccaggcagggggcaacgtcggggcacccatgccgccgccgccacctctgccaacgggtccggcgattcaaatctggcggttaatggcgcctcgtgc

SEQ ID NO: 145582 - DNA, 745 bp, Homo sapiens
ttttgagacagagtcttgctctgctacccaaagtggagtgcactggcgcgatctcagctcactgcaaccttcacctttagcattcaagtgattctccggcctcagcctcccgagtagctgggactacaggcgccgcaccacccctggctaatttttgtatttttagtggagacggggtttcaccatgttggccaggctggtctcaaactcctggcctcaagtgatccgttcaccttggcctcccaaagtgctgggatcataggagtgagccactgtgcttgaacagaagacttttgagtgagtattttttgggtaggttcttagatctctaatacagactttgagttgttttaggtgctgattaaaagcatatacacatatttttttttgtaactaaatgactacatgttttaaattaaattttacccttaacattttttgaatatttagcatttcttctcaaggagcccaaaaatttatgcttcagctgaagacacagtttcaaaactaatcaaaatggggccaatacaataggacatcagagcactaagtaggttcctctattttcagcagtatagcacagacaaaattctaacatgtggtttcacgtgtgcctacttgtggtaatattcttctattttcttgttcatatgaagtacttaaaatgcaaattccttggctaactatatttatattctgctggtctggggtgggaaccctgcatgccactatgtggtctcgtgcc

SEQ ID NO: 145583 - DNA, 441 bp, Homo sapiens
  misc_feature (1)...(441): n = a,t,c or g
cggtctctataaagggcccaccagagagagagggtaagtgtaagtgaagaatgtaagccggaagtttcagccaaaccggtaacactttggtcaaggaaaaggcaaaggtcaaaaggggaaaaggaaggaaggggaaggggtacaggaaaataaaaggcgggaatccaggtccaggaaaaggcactggcgcaggaattggcataggtattggtataggcattnnnnnnnnnnnnnnnnnnnnnnnnnnnnnttatattaaatagtgggtaacttttcatttcccagcaggttcagatgctttagaaacatagtttgagattcactgctttaggaccacatactcatgatgaaagacaaaaacgaaaaataaacagagtcagggagattaaatctataaccaaagacaacatgagtatttaatgtcagctactcaagctccag

SEQ ID NO: 145584 - DNA, 2128 bp, Homo sapiens
gccattttgtcccagtcagtccggaggctgcggctgcagaaagtaccgcctgcggagtaactgcaaagatgctgtccgtgcgcgttgctgcggtcgtggtccgcgcccttcctcggcgggccggacctggtctccagaaatgctttgggttcatctttcattgctgcaaggaacttccatgcctctaacactcatcttcaaaagactgggactgctgagatgtcctctattcttgaaagagcgtattcttggaagctgatacctctgttgatcttgaatgaaacctgggcgtgtcttaaagtattggtgatggtattgccccgcgtacatggggctgaaggaatgttcaagcagaagaaatggtaagagttttcttcaaggcttaaagggtatgtcctttgaactttggaacctgacaatgttggtgttgtcgtgtttggaaatgataaactaattaaggaaggagatatagtgaagaaggacaggagccattgtggacgttcccagttggtgaggagctgttgggtcgtgtagttgatgcccttgggtaatgctattgatggaaagggtccaattgggttccaaagacgcgtaggcgaagttggtctggaaagcccccggtatcattcctcggaatttcagtgcgggaaccaatgcagactggcattaaggctgtggatagcttggtgccaattggtcgtggtcagcgtgaactgattattggtgaccgacagactgggaaaacctcaattgctattgacacaatcattaaccagaaacgtttcaatgatggatctgatgaaaagaagaagctgtactgtatttatgttgctattggtcaaaagagatccactgttgcccagttgggtgaagagacttacaagatgcaagatgccatggaagtacaccattgtggtgtcgggctacgggcctcggatgctgccccacttcagtacctggctccttactctggctgttccatgggagagtattttagaagacaatggcaaacatgcttttgatcatctatgacgacttaatccaaaacaaggctgttgcttaaccggtcaaaatgtctctgttgctccgccgaccccctggtcgtgaggcctatcctggggatgtgttctacctacactcccggttgctggagagagcagccaaaatgaacgatgcttttggtggtggctccttgactgcattgcaagtacatagaaacaacaggctggtgatgtgtctgctacaatacaaacagatgtcaattccatcagctgcccgaacagatcttcttggaaacagaatgggttcaacaaaggttatccgcccggcaattaacgttggttctgtctgtatctcgtgcaggatcccccccgacaaacccaggggctatgaagccaggtagccaggtcccatggaagctggaattggcctccagtatccgtgaggttgcctgctttttgcccccagtttcggtttctgaccctcgatgctgccacttcaaccaaccttttggagtccgtggccgtgccgtcttaactggagtttgctgaaagccaaggaccagtattctccccatggctaattgaaggaacaagttgcctgttatcttatgccgggtgtaaaggggatatctttgataaactggagcccagcaagattacaaagttgagaaatgctttcttgtctcatgtcgtcagccagcaccaagaccttgttggtgcactatgcagggctgatggaaagatctcagaacaatcaagatgcaaagctgaaagagattgtaacccaatttcttggctggatttgaagcttaaactacctgtggattcacatcaaataccagttcagttttcgtcattgttctagtaaattagttcccatttgtaaaagggttactctcatactcccttatgttacagaaatccacatgaaaaataaaggttccataatgcgtaaaaaaaaaaaaaaaaaaaaaaaaagggcggccgcccttttttttttttttcagaaaatagtgaacttgattcccctgcttccactaaatccagttgtgacaaaatctaacgtgacatcagatcgaaaggttatagaaataaaactaatgagatctaaaaaaaaaaaaaaaaaa

SEQ ID NO: 145585 - DNA, 2911 bp, Homo sapiens
tcccagccttgccctgtttttgagtatgtttgatgtttttaaaaattttgcccttcctctgtggatgaccaggaggcctacagcaattaacctttaagccctccttttagagatatttttaaagccttgtttaaaatttttcctgcaattcatatattaaattgcacttacttgcatacgctcatattctagggttttttctctatttttagggtatcatagtaaatcattagtaaatgagtctgtagttactaaaccctaatggaataattattaatgaaagatttttgaaatataaaaaataaattaggcccaatccaagaaattgagtgagaaggaaacacttgtttttattcacagaggtaaagtgtcttttcaatattaacccagcaatttaggtggccatcttataaaaataaaaaatttcttactgtggacatccccttttccaacttttctacataatggcttagttctgactactaagaaatgttaagaaataggccaaagtgcggggtgtcacgcctataatcctatcactttgggaggcctaggcaggcagatcacctgaggtcaggagttcaagaccagcctggccaacatgaggaaaccccatctctactaaaaagacaaaaaattagctgggcatggtggcatatacctgtaaccccaactacttgggtggctgaggcaggagaattgtttgaacctgggaggcggaggctgcagtgagctgggattacaccattgcattccagcctgggcaacagagcaagactgtctcaaaaaacaaaacgaaacaaaaaaagaaagttattcttagtaaggaacttcttgtttaatagcatttttgtttattttaaaaagtgatcagaagtagtaaactatctttgaggaaatactgtaaccccagaatatttcctcttgacttctttttgtaacaaggataatttagggatttataaagttgtaaggatttcactgttttcggactgcctataataatagcacattaaccttcacataataagaaatctggacaagttcagttacacagtatgatgaatacttgaattaggaacattgtggaaaatttgctttagagaatcaaggcagtagtttggtatttggtgcctattaaaaaagtgggtttgttttgaactggaagcaagttgaccaaggacttatgactaatgtgatgctaagttccccttggccccttttaaaaacgtgtatgtgccttttgaagatacccaaaaccctgaggattttagttttgaaatcaaagactattaaaggagctgtacagaggtaaaaaaataaatgtggaacattattaacttattttgtgtctaggaacaatggattttgtatctgatttaaaatgccaacactgttttgtctctgttcattttttctgtgaggatacttaaggttattattcctgtctgtttcctgtactcccctagtcatgagcacttgaagtacaaggtgtctccccctagggtgcaattaggttgtttctttgtttttagtttcaattctatgtgcatagcaggaatgctccacaggaatggcttctgacaataatctgtcctgttgattttgttttccttgcccatgacttgaacaactgtgttttaaagtactgtagtctagtaggtaactttgtgggcaaaaattttcaatataatacattctggaaacaatagttgctgccttgcaaaggtaatctctcattttaaaattggacagtattaatgaaggggaaatatacaatttatttctattgagtggtagaactatatgtctggtcccttgctgctcttgtttaggccactatcatagatatatttcaaatattgtactactcagtgttaagtattgaatgactgtttccctttccttcaagggcctagagtatattctgaaaatttatggaatgagtgaagaaatcttaatactttccttccttaacatacaacatgagtcccgagaataattgatagtagcaagagaaaactatgtcagtaacatgttgctttgtataaaaatcttatttataaatgcgaagctttttgatgccatcaaaacttattaaaaaataggatctacttttttctaattctgacctaaggaaaaataatgaggaacaaggctgttggcaaggctcttttgtaggtctattggaatattttatagatattcaaaatttcctacaaactataattttttccatgatttagcagagagtgattttctaggctttggctcttattaggtattgtaaatagtagggttatatcgatatcagcttttgtgatgggcattgtgggtcatcagcttcatggacattttaccccatttgcagtgatcctgtgtaaaactgccaaggaaagtaattacctgtaggagtttgctgagcttggaggagtggaaactgttgtgaatgagcctgatcataaaacggaccaggccattcattattccctcaagggttaatatactgacttatgcagtattcaaacccatctagtgccaatgtttttgtttttgttttttttttttttggtaacacaggtgccagtgtattatagaaaaaataaaaactacaagcattagcagttttaatactgcctgtgtcagttttgtaaaaaatgtacaattatgtcgttttgacatgttgaattttaaactagggaaatgacattgtaaatcatagtagcctcttttaatttaatatgaaaaatgccactatattgaaagtacttaatgtattgtatatatttctctactttggttctagctattttatatgattgacatgttatttaaaagataactgccttgaacttttggagacttgtactgtaaataaagaaatcttaacaataaactcagaatctactta

SEQ ID NO: 145586 - DNA, 485 bp, Homo sapiens; identical to SEQ ID NO: 144610
  misc_feature (1)...(485): n = a,t,c or g

SEQ ID NO: 145587 - DNA, 372 bp, Homo sapiens
  misc_feature (1)...(372): n = a,t,c or g
cagggctgttgtgaggggcgctgtgatgcggttccaaagcacagggcttggcgcaccccactgtgctctcaataaatgtgtttcctgtcttaacnnnnnnnnnnnnnnnnnnnnttttttattaagggggccgaagcttaatccctttaagggggggtaattttaacttgggcccggcccgggttttaaaaacgggggaagggaaaaaccctgggggtacccaaattaatccccttggaaaaaaatnngnnngnttntcggtnacttttatcttgtataactaacctccctccaataacccctaaaagcctgccaaagaataccggaacatactgaacctagcaagctatccactcctatacggtggttacg

SEQ ID NO: 145588 - DNA, 603 bp, Homo sapiens
  misc_feature (1)...(603): n = a,t,c or g
ttttttcctaaggggttttttttgggttacccccgggtttttccctttcccccttttttaaacccgggccctggccaaatttaattttcccccccttaaaaggaaagcttcgggccccttaaaaaaaaannnnnnnnnnnnnnnnnnnngttaagacaggaaacacatttattgagagcacagtggggtgcgccaagccctgtgctttggaaccgcatcacagcgcccctcacaacagccagcacccagcggtccgggcccaccaggagagccgggatgagagcgcctgtgtgccagtcacaaagcgtttatttcacacaaacaatctcattgaagcccacaataaccgtgccaggcaggtgtgacgctttccaggttacaaacaacaaactcgcccaggccacacagtcagaaggggttgcgggggcctcgaacccagaccttgagtctcacgagccagcccacggcatgcagcgagaattctcaggggtcacagccgtctcccaagcggacactgtcatgaattaccctgtttctaacgggtgggaaaatcgaggctcagggtgattcaagtaacctacctggtacccatgtaccattctt

SEQ ID NO: 145589 - DNA, 1468 bp, Homo sapiens
  misc_feature (1)...(1468): n = a,t,c or g
attgacgaccactagtccagngcggttggattccccaggaccaaagcgggcacgggaacagctgtagtgtgtgcccccccgggctttggccacaggtctccctctcgaggtgtggttgtgactgcgacccttcccttgccgtgatgccttcctcccccggggcttggtccagctccttcactctctagcagctgctggggcccacctcccatgccgaggactattaggggtatacctccagggagcatctgcaggctctgcttctgcccggctgctggcttgctctccctggtggctctccagcggccagcttcctcacccacccggcactccgctttgctctgtctcctgaggtgggcctgaccaacctccccttctctgcctcagtccctgggctccagggctcagctccacagccctctgccatagcaggctggttctccctgccacgcccatacctgtggtcacctgggccctcctgtggtctgagtaccactcccctgccccaggagccactcccactccagctgcctgtttccagcaggttcccagtgcccctgacaagcccctgctggtgtctccatctcctgccaagcatcctccagtgcctcctcctgtgggcctgggcctcagggctatggacagactcctggtcccatcccagagacccctcgtgatcgttccctgtcaccccactccaccgaaaagtaaactgcaggcacgtgggccgtggcgagcttgggtcggctgaagaactgcggatggaagctgcggaaagaagccttgatggggccaaccatcccggacccaaaatcttctcccctggcgggcctctcgtctcccttcccctggttttgggcggaaacccatcaccctggaatgccctaacgtgggaaaagggaccctcgaaaatgtgggaacccccagcccccttctcccaagcttcgaaaatcccctcccacagcccacggggaccaccctgcaccctaattccccacgggaaaaggctggaccccaaaagactcttggaccccggggcctcccccttgaagtagaagaccccgccctctgaactgatggaccgccgcttgaccctggggtcagaacccgtgggcttggacccctgcccacccccgcaagaaaccctgaaggcctaggggaagctgtttgagcctttcagtgtctgcatgtgggaagtgggctccttcacctacctcacagggctgttgtgaggggcgctgtgatgcggttccaaagcaacagggcttggcgcaccccactgtgctgctcaataaatgtgtttcctgtcttaacnnnnnnnnnnnnnnnnnnnnnnnnnnnnnaagggggcggaagtttattccttttaagggggggaaattttaatttggccgtggccgggtttttaaaaaggggggaagggaaaaaccctggggttacccaaattaaagccttttggacagaaagg

SEQ ID NO: 145590 - DNA, 682 bp, Homo sapiens
cccccgcttttttttcaggcggccgggaagatggcggacattcagactgagcgtgcctaccaaaaggcagccgaccatcctttcaaaaccaaggaagggggtcctgttgcggagaaactggcaaaggagaagctcccgcggctactacaaagaacattcgggtctggggcttcaaagacaccccaaggaggcttattgagggccacctacattgacaaagaaatgccccttcaactggtaaatgtgtccatttcgagggcgggatcctctctggcagtggtgaccaagactgaagatgcagaggaccattgtcatcccgccgaggactatctgcacttacatccggcaagtacaaccggcttccgaggaagcgccacaagaacatgtctgtaacacctgtccccctgctttcaggggacgtccagattcggtggacatcgtcacaggtggggcgaagtgccggccttctgaggcaagacagtggcgcttcaacgtgctcaagggtcaccaagggcttgcccggcaccaaagaagcagtttccagaagttcttgaggctgggacatcggggccgctcccccacaatggagataaggttagttcctgcatccccgggaaaaaagaagaagaaaagttttgtccccacagggggggcggtggatagtatcggcgggcggggggtt

SEQ ID NO: 145591 - DNA, 468 bp, Homo sapiens
atggcagttcttctaaagggctcctaccgcaaacacactgtactttatcctcgaggcactcatcacatcaggcagcgtcgccgccgtggtagcagcctcagccgtttctggagtctcgggcccacagtcaccgccgcttacctgcgcctcctcgagcctccggagtccccgtccgcccgcacaggccggttcgccgtctgcgtctcccccacgccgcctcgcctgccgccgcgctcgtccctccgggccgacatgagtggggaccacctccacaacgattcccagatcgaagcggatttccgattgaatggtgagtgtgccccctgcgccgactccggggccccccagccgccggccgcctcccccgcgccctgccggtgccgggcagaggacagacatggcgtcccagagactaagtcccggctcctcgctcaccggccccattgttcccatcgggccgcctcttga

SEQ ID NO: 145592 - DNA, 2386 bp, Homo sapiens
gaggacctggagcccacctgctttgagagaagtgatgacattgggggattatggaagtttactgtacgtggttcatctctatcagtcatgatctggccatttgctttgtctctgctcagacatggtggcttttgttacagtgacttccctttccacgaagattatcctaatttcatgaaccatgaaaaattttgggactatctccaagaatttgctgagcactttgacctcctgaaatacattcagtttaaggtaagatactttgggttatggaagatgaatagatgggggctggcctattcagcaatctaatgaaaattgacagagggcaagcaaaatagagctgtctttgatgctgttatggtttgcactggacatttcctgaatccccatttacctttggaagcctttcctggtgagtcatttctacctgagaccatgcctatgcttctgggttcttctagaagtaaacttattgatttgcgcaaagttcccttacgctggtgtcagactggctctcttccacagggccttctggtccacatgaaatatagatcttgtattgtcaacagtgggagaaatgctgccagtgcagccaccatccctcgaaggcagtcccagtcacggccttacaagcaccagttgctgtgctctgtagaccccaaacatgaaggtctcgctcagagtggtctccttgaagcccctcacacctggctccatgtcaacatgacagaaaaaaatgccacaattcctgtcaatttccaactcctagccacttcaacctcaaccattttagactgtcaaagtgagtgtgaggctaagtcagaatcacaaaactggcctcacacacacagtttctgcaaattcagcatagaacgcgtcttggtgattggtcttgggaacactggaggagacattgctgtggaactcagtcgaacggcagctcaggtacatcatctctgaattaatgcccctaatcccatcatcagttatgatggctggaaagagatattcaaaatgatggttacaagaagatgctgtagttttattgcacaagttctgccttcacgttttctaaactggattcaagaaaggaagttgaataagagatttaatcatgaggattatggattaagtattaccaaagggtacttacattttttatttagtagaaaaaatattaaatcaatatttatcattacattttattcagaattaaccagcgtgattgaatttacagaaacctctgctgtctttgaagatgggacagtggaagaaaacattgatgttgtgatcttcactacaggatatacattttcttttccattttttgaagaacctcttaaaagcctctgtacaaagaagatatttctatacaagcaagtctttcccttaaacctagagagagcgacattagccatcatcggccttatcggccttaaaggatccatcttatcaggcacagagctccaagcacgatgggtcacaagagtattcaaaggtaccatgactctactgaaagtcctctctttggatcgtaaaattggtgccctgccatttagctaaaatcggtatgaaatgtagcttgctctagggcaaacttacagtatattctgttacaaaaaaaggattcagagtattagactcaatactggtattctgaataagcatctccaggatctcatggagagcttgacagccaaggtattccatacatacaatgcctccatcacgctacagcagcagctagaagaactcacagccccggatgagaacatcccagcgaagatcctttcttataaccgtgccaatcgagctgttgcaattctttgtaaccatcagagggcaccaccaaaaacttttgagaagtctatgatgaacttgcaaactaagattgatgccaagaaggaacagctagcagatgcccggagaaacctgaaaagtgctaaggctgatgccaaggtcatgaaagatgcaaagatgaagaaggtagtagagtcaaagaagaaggctgttcagagactggaggaacagttgatgaagctggaagttcaagccacagaccgagaggaaaataaacagatggccttgggaacctccaaactcaattatctggatgctaggatcactgtgccttggtgcaagaagtggggtgtcccaattgagaagatttacaacaaaacccagcgagaaaagtttgcctgggccattgaaatcgctgatgaagactacgagttttagccagtctcaagaggcagggttctgtgaaaaggaacagtgtggtttgggaaagatggataaactgagcctcgcttgccctcgtgcctgggtgagagaggcagcaagtcttaacaaaccaacatctttgcaaaaagctaaacctggg

SEQ ID NO: 145593 - DNA, 3857 bp, Homo sapiens
  misc_feature (1)...(3857): n = a,t,c or g
taaattaatctctcccccccaaaaaatgcgaacttaggctgttacacaactgctggggtctgttctcgccgcccgcccggcagtcaggcagcgtcgccgccgtggtagcagcctcagccgtttctggagtctcgggcccacagtcaccgccgcttacctgcgcctcctcgagcctccggagtccccgtcccgcccgcacaaggccggtcgccgtctgcgtctcccccacgccgcctcgcctgccgccgcgctcgtccctccgggccgacatgagtggggaccacctccacaacgattcccagatcgaagcggattttccgattgatggattctcttaaacacaaagataacgcaaaaagatgagaacgcccgggccagaggacacaaagaagagaaggaccggggaagagtccaagcatagcaacagtgaacataaagattctgaaaagaaacacaaagagaaggagaagaccaaacacaaagatggaagctcagaaaagcataaagacaaacataaagacagagacaaggaaaaacgaaaagaggaaaaggttcgagcctctggggatgcaaaaataaagaaggagaaggaaaatggcttctctagtccaccacaaattaaagatgaaacctgagatgatgggctattttgttcctcctaaagaggatataaagccattaaagagacctcgagatgaggatgatgctgataataaacacataaaaaaattaaaacagaagataccaagaaggagaagaaaagaaaactagaagaagaagaggatggtaaattgaaaaaacccaagaataaagataaagataaaaaagttcctgagccagataacaagaaaaagaagccgaagaaagaagaggaacagaagtggaaatggtgggaagaagagcgctatcctgaaggcatcaagtggaaattcctagaacataaaggtccagtatttgccccaccatatgagcctcttccagagaatgtcaagttttattatgatggtaaagtcatgaagctgagccccaaagcagaggaagtagctacgttctttgcaaaaatgctcgaccatgaatatactaccaaggaaatatttaggaaaaatttctttaaagactggagaaaggaaatgactaatgaagagaagaatattatcaccaacctaagcaaatgtgattttacccagatgagccagtatttcaaagcccagacggaagctcggaaacagatgagcaaggaagagaaactgaaaatcaaagaggagaatgaaaaattactgaaagaatatggattctgtattatggataaccacaaagagaggattgctaacttcaagatagagcctcctggacttttccgtggccgcggcaaccaccccaagatgggcatgctgaagagacgaatcatgcccgaggatataatcatcaactgtagcaaagatgccaaggttccttctcctcctccaggacataagtggaaagaagtccggcatgataacaaggttacttggctggtttcctggacagagaacatccaaggttccattaaatacatcatgcttaaccctagttcacgaatcaagggtgagaaggactggcagaaatacgagactgctcggcggctgaaaaaatgtgtggacaagatccggaaccagtatcgagaagactggaagtccaaagagatgaaagtccggcagagagctgtagccctgtacttcatcgacaagcttgctctgagagcaggcaatgaaaaggaggaaggagaaacagcggacactgtgggctgctgctcacttcgtgtggagcacatcaatctacacccagagttggatggtcaggaatatgtggtagagtttgacttcctcgggaaggactccatcagatactataacaaggtccctgttgagaaacgagtttttaagaacctacaactatttatggagaacaagcagcccgaggatgatctttttgatagactcaatactggtattctgaataagcatcttcaggatctcatggagggcttgacagccaaggtgwttccgtracatacaatgcctccatcacgctacagcagcagctaaaagaactgacagccccggatgagaacatcccagcgaagatcctttcttataaccgtgccaatcgagctgttgcaattctttgtaaccatcagagggcaccaccaaaaacttttgagaagtctatgatgaacttgcaaactyaagattgatgccaagaaggaacagctagcagatgcccggagagacctgaaaagtgctaaggctgatgccaaggtcatgaaggatgcaaagacgagagaaggtagtagagtcaaagaagaaggctgttcagagactggaggaacagttgatgaagctggaagttcaagccacagaccgagaggaaaataaacagattgccctgggaacctccaaactcaattatctggaccctaggatcacagtggcttggtgcaagaagtggggtgtcccaattgagaagatttacaacaaaacccagcgggaggaagtttgcctggggccatttgacatggcttgatgaagactatgagttttagccagtctcaagaggcagagttctgtgaagaggaacagtgtggtttgggaaagatggataaactgagcctcacttgccctcgtgcctgggggagagaggcagcaagtcttaacaaaccaacatcttttgcgaaaagataaacctgggagatattattaagggagagctgagccagttgtcctatggacaactttatttaaaaatatttcagatatcaaaattctagctgtattgtttgtttttgaattttgagttttattttcaagagggcaagtggatgggaatttgtcagcgttctaccagggcaaattcactgtttcactgaaatgtttggattctctttagctactgtatggcaaagtccgattatattgggtgcgttttttacagttagggttttgcaataacttctatattttaatagaaattaaattccctaaactccccttccctctctcccatttcagggaatttaaaattaagtaggaacaaaaaacccagcgggcacctgttagagtcgtcactctctattgtctggggggtccaattttcattaaacttgaagccagtcgtgggctttggcagtgttttggttcagacacctgtttcacacgaacaagcatgatgcgccaatattccctgacctgcagtctcccttcttaaatgtagcatttatatttacttcttaattatattaacacacttaaaacctgtgtctctgatcttaaaagatcgtgtagactgggcttggggagggatgaacggcgagtgaatctaaggataatcgaataatcagtgactggaaaccatttttcccatcatcttttgttctgaggcattccgcctgtacccccttttaaggatatcccatcctttttccttttttaacccttaatctttgcacttggaaaggattttattgtataaaaaaggtttccacggggtcaattaaacttaggagggaaaatgaggtatttgggtcccaaaaaaagggaaaaataatccaaggattttaggggctttttattttttttccntttgtaattgtgttaaaaatggaaaaaaacactaaaaagcagaattttaatgtgaagacattttttgctataatcaatagattatagaggcattgttagtcctagtgtgtgtgtgcagagtccatttcccacatctttcctcaagtatcttctatttttatcatggaattccccttttaatcaactgtaggttatttaaaaataaattccatcaacttaatggaaaaaaaaaaaaaaaaa

SEQ ID NO: 145594 - DNA, 380 bp, Homo sapiens
gaaaaactgttaatttattgattcaaagttgttttttttctttttaaaaaacaatccccaatacatgcagttcagggttaagtatcacatttgtagcacattgttgagtctcaaaacaaaaatatgcatcacctgtataatcccatcacatctttttccagcctctacaatacctagttgggggtgttttcatttatacatccacatagctcagaagcatgttattaacggttgatctggcccgatgcttctccgccacctcagtcttaatttattaagatcactgacaaactttggcttcttgtgtgctcatgtggtccctgcttttgctttcggaagggtttatattgaaacgactgtgactctgatcggttattatc

SEQ ID NO: 145595 - DNA, 148 bp, Homo sapiens
  misc_feature (1)...(148): n = a,t,c or g
aaaaccccacgctnaagccctgcagaacaggggtgtgtgtgtgtgtgtgtgtgtgtgtgtgtgtgtgtgtgtgtgtgtgtgtgtgtgtgtgtgtgtgtgtgtgtgtgtgtgtgcaggtgggtgcttgcgtgtgcaacgtgtgtgctgc

SEQ ID NO: 145596 - DNA, 2436 bp, Homo sapiens
gacggtgatgtaggtgcagacaccgcctgcctgccttgtcctggggttttgtaactgcagctttgacacaggcattcttcctttgaagcacacagcttgcttttccagcacctagacttttacctctcttcatgccttagacttagaccataactgggcttgaaatgctcaccccttcctgggtctggtcttggcacctaggctattcctttccaaactgaagtgagtccagtttcagaccatctcttttcctgtctccaaaaaccatttttgtttccaaacctagctcccccgaaattttaagactatttacctagattcggagatggtcttggagagttccaaaaggggtgtgtgtgtgtctgtctgtgtgtgtgtctgtgtgtgtgtctgtctgtgtgtgtgtgtgtgtgtgtgtgtgtgtgtctgtgtgtctaatatttagacctaaaccatggtaaatgtacgcacccagtatccttttcagttaggatattcttagcttaaactcatctcagtacttttcatttgtttgcttcattatcttaaacaggttaaaagtgcctatgataaggacttaattatttcctaaagaaaagcaaaaaatgtggggaacagggtagtgttatactatcatctcaggtactgcctaaggttcaagaacatagaccctggtatgggtgagaacaaaaggttcctatgccaaatccagatggctatatcatttgttggctacaaatgatcctgactgcaaggattgcttctgctgataaatcccatggtgagagttgaactcatgaattgctgagtcacatttgcacctatggtgtggtggcagttcactctcccctgggatgctgtcagctgggccttgctttcatcctatccctgtagggcagggtaggtggcttgggtaggagaagctattgagtgtatgacgcagacccaagctttcctgggccttctcaccaactagagaagcgctgatgtcgttcattgaggcacttaaacaccagtcactcagccaggcctcctcccagacattctgtaacatgtcagcactcacaaggtttaaagcaaatgtgttcccttgcagagaggaaggtgctctcagactgatagattagaggagacagacaaactcgtaatccttggggacttgaagagagtggctaggggaagggctgttaaaagaaaagggaccaataagaaaatccatctaaaggtagctcttgaggaggaaattaacttcttgaggggataaattagagggtaccaagtttatgttctggaatgtaccctggggagggctgctgcccacttgggtttggtcccagttggacttgaaaggtggtgctcttcgagttcaggcgtttagtcccagagagagctgggtgccgcgggtcctcgtggtctgtgcctactcagggaaatgacttatgttctcccaggtgctctgttgataaggatggaagcagaactactttgagacacaagcaacaattggaagagtttttttatatgaactgaaatagatctaagagagcctggttaacagtttcctgtgtaataccagttccagatttaaatggttactttaggaaacctgtgttactgtgtgagcacccacagaaacaagcaaacttatttcctacaaaaaatgaggggataataacccgatcagagtcacagtcgtttccaatataaaccccttcccgaaagcaaaagcagggccccacatgagccacacaagaagcccaaagttttgtcagtgatcttaataagttaagactgagtgaacatcctgccctttagaaaaaaataaccccgaggttgaagccccagggccaggggaaggttgccggagaagccatcgggcccagatcacccgttaattaacatgcttctgagcctatggtggatgtataaatgaaaacacccccaactaggtattgtagaggctggaaaaaggatgtgatgggattatacaggtgatgcatatttttgttttgagactcaacaatgtgctacaaatgtgattacttaaccctgaactgcatgtaatggggattgctttttaaaaatgaaaaataacaacttttgaatcaattaaattaacagtttttcacttgctggctcttcttgctgtaaatggtgactaagaggttgggacagaaatcttgacaactagtggaaaacttggataatcttcaaggaccatggagccttctgtttccttctgtttgcagaaaagcaacactgcctgggttgtgatcctttacaagtgactacttcagacacaattggccacctctttgtatcactggatgactgatgtatgatttatgtgctgctgcccttagagggaagaaaaatgcccatgttaaatcctgttttcttaaataaaaatgttgacaataaaaaaaaaaaaaaaaa

SEQ ID NO: 145597 - DNA, 1439 bp, Homo sapiens
aacaaccgagcagcggactcctttggctatggcctccaactttaagaaggcaaacatggcatcaagttctcagcgaaaaagaatgagccctaagcctgagcttactgaagagcaaaagcaggagatccgggaagcttttgatcttttcgatgcggatggaactggcaccatagatgttaaagaactgaaggtggcaatgaggagccctgggctttgaacccaagaaagaagaaattaaggaaaatggattaagtggaaatttgattaagggaagggacaggaaaaatgaactttggtgactttttaactgtgattgacccaggaaaatgtcttgagaaagatactaaagaagaaatccttgaaagcttttcaaagctcttttgatgatgatggaaactggggaagatttcgttcaaaaatctgaaacggcgtggccaaggagtttgggtgagaacctgactgatgaggagctgcaggaaatgattgatgaagcctgatcgagatggagatggagaggtcagtgagcaagagttcctgccgaatcatgaaaaagacccagcctctattaagatcagtgtcttctttttctactgcaagcaccatgtaactagatttagtgcctgccatggtgtgaaatctggcttttgagaacacaaaacttttccccccacggacctccctttatcactttaatagtgaccttgagcctattttagccgtttgggaagtgttctttgatattacagttctttgtaaaatgacctgcggaatttaccccctaattcttcaaaagcaaaacaagagcacacaagcgtgaaggaaaagggatctttaaagctttgagcacctggccattctgccttgcatcggttcccttcgcatgcatttccacatattcaccaaccccagaacgactctaaaccagccacatgttacacctgtgttgccacaagcagtcattcttgacggctccagtttttatttgacacttgagtttagatattatcttttataaacccagtgaactcctgcactggcatttggatgtgtgttaatgctatttgtttctctcttaaaagtaaaacctttctcagtttgaacttgtattctctaaggatgagttctttagctttgcttatgagttcctcttctcaattattgtgttgaaggcagcctattagatacaaaactccttaccagcctatggacagaaaatgaataatcctttgctactttcctggcatgaattgctttttgccttggaaggctgctggtttgtaaaactagcagaatttttatatcacctaagcctaaatgatgctctaaaaatagttttggcaaagctaagactggaaaagagtcttgttagtaatttgtgcttgaataaaatggggagagccaggctaacgcaacactaggatggattcagccaaaaaaaa

SEQ ID NO: 145598 - DNA, 488 bp, Homo sapiens
  misc_feature (1)...(488): n = a,t,c or g
aggtctccttgcccttgttctccttaacacagctnagagtccccaagcctgggcccgtccaggtaggggtgggaggtgggcgagcagaaggccctagttctagcagcaagccaagaccgacaggtgtgcctgcctcatcanagaggcccaggacccaatccgcttctccgaccctcgccctccggcaggctcagacatcaatgggctcccgacctcggttctgcctcttcaccacaaacaccctctgtcctgacaccgtcaccagcagtgtgtgttctccaaagaccacanacaggcgcttgaagggnacattcatgccgcggtgcagccggaaaccgcaggctgtgctgaccagctcagagatggcactggctgcctgctcatnattctccaggtccccagatgacttcactcagtaccaggtagccgagctggtctgggattcgctccagcccctgggtcagngcagaagtcattgcagtcttcgg

SEQ ID NO: 145599 - DNA, 406 bp, Homo sapiens
aagcccgaagctacctatctggaatggagctcccccagcaccgaacactgcgatgacttctgcgctgacccaggggctggagcgaatcccagaccaactcggctacctggtactgagtgaaggggcagggctggcgtcatctggggacctggagaatgatgagcatgcagccagtgccatgtctgagctggtcagcacagcctgcggtttgcggctgcaccgagggatgaatgtgcacttcaagcgcctgtctgtggtctttggagaacacacactgctggagacacgtgtcctgacagaaggtgtttgtggcgaataggcagaaccgagggcgggagcccattgatgtctgaacctgccagagggcgagggtcggagaaacggattgggtactgggcctgtgtga

SEQ ID NO: 145600 - DNA, 583 bp, Homo sapiens
tcgcccacgcgtccggggcagcaaaggccttttggggtagcaaaggtgggatgtggaaggccaggggagcccgggggcgagagagggggcagatggaggctcgggaagatcagtattgaggaccatgtatgggggagggggccgggaagggacctggctggggaatgagaaaacctggggccatcgtcaacccatagacttgtgtttgcaggtgaagggtatcggtccgtccatccctctagcatgcttctcacgacttgcatctttacccactagacttctgcgctgacccaggggctggagcgaatcccagaccagctcggctacctggtactgagtgaaggtgcagtgctggcgggcagcaagtgtgaagacagaaaaagatggagccattaacagtcatctggggacctggagaatgatgagcaggcagccagtgccatctctgagctggtcagcacagcctgcggtttccggctgcaccgcggcatgaatgtgcccttcaagcgcctgtctgtggtctttggagaacacacactgctggtgacggtgtcaggacagagggtgtttgtggtaagaggca

SEQ ID NO: 145601 - DNA, 1464 bp, Homo sapiens
  misc_feature (1)...(1464): n = a,t,c or g
tcgatacgacttttttttttttttttttttttttttttggagaacaattaaactcatgtttattagggagtgagggagcacaaagggaggtctccttgcccttgttctccttaacaaagcttaaaagtcccnaaaccctgggcccgtccaggtaggggtggaaggtgggcaagaagaaggccctagttctaagaagcaagccaagacccgacaggtgtgccttgcctcaatcacagaggccccaggacccaaaatccgcttctccgaaccccttcgccctccggcaggctgcagacatcaaatgggctccccgacctcgggttctgcctcttcaccacaaacacccttttgtcctggacaccgtcaccagcagtgtgtgttctccaaagaccactggaggagagacacaccagacaggcgcttgaagggcacattcaatgccgcggtgcagccggaaaaccgcaggctgtgctgaacagctacagagatggcactggctgcctgctcatcattctccaggtccccagatgacgccagcactgcaccttcactcagtaccaggtagccgagctggtctgggattcgctccagcccctgggtcagcgcagaagtctagtgggtaaagatgcaagtcgtgagaagcatgctagagggatggacggcccgatacccttcacctgcaaacccaagtctctgggttgacgatggccccaggttttctcattccccagccaggtcccttcccggccccctcccccctacatggtcctcaatactgatcttcccgagcctccttctgcccccactctggccccgaggctcccctggccttccacatcccacctttgctaccccaaggggcctgtgctgcccctctggcccctgccctcagaccctctcttcacctcccttcgtctccgcccgacctgcagactacccgcagccccagaacaccctcccacagacccctccccagcattctcgtcgccatccctcccatttccatcccctcttcctccccgagcggataggaggtgagggtggagcgcaggcccaccagggggaaaccacacagactggggagcagagacgctgaacccccggcgggtcctctcgcgcatgcgtcctcactcaccatcgcagtcttcggtgctgggggagctccctaccagataggtagcttccggcttcaggccccggtcacgtgcttgcagccgctgcgctcctccttctgcttgcgccactggcctttagccccgcctctagcatgaggattggacagtggccacgtcgtcagacccaaccagccagtgcgaagcgctgtttcccggaggcgcacgttgattggtgatatcccctctttaacacccatctccccgcccctcagtgcctgagcgagaggaagacgcgggagcgtccgaggagggaaggatctgggaggggcgggagtaggccggggttgac

SEQ ID NO: 145602 - DNA, 557 bp, Homo sapiens
tcgtccccgctgcgggtggcggtggtgtgctcgagcaaccagaaccggagcatggaggcgcacaacatcctcagcaaacggggattcagcgtccgatcctttggaacagggactcacgtgaagcttccaggaccagctcccgacaagcccaatgtttatgatttcaaaaccacatatgaccagatgtacaatgatcttcttaggaaagacaaagaactgtatcccagcgggttgccctttaaaaaccccccgtgtggtcctccctgggaaggtgttacgtgtgggctcgggcacaggaggcgtgtcaccctgtgcagtgcaaacactggctcctctgtcttttgcgagagtttggtttctatttctggggtgcacgttgggttcgttccacgggttagttccagtgccacccatgggcagtaggcgtggtgaggcgcacagacacggtgtggggttcaccctgacgtggttcagcagagggtcttgacatagcgtagaccagggatgcttaggtgaggaggtggaacccacgaaatcccattgcttttcacactgca

SEQ ID NO: 145603 - DNA, 1216 bp, Homo sapiens
  misc_feature (1)...(1216): n = a,t,c or g
gcacgagccgcggtagggtgggaacccaagcgggagagccgcgggatttgcggccgccgccatgcccgtcgtccccgctgcgggtgagcggtggtggtgcctcgagcaaccagaacgcggagcatgggaggcgcacaacatacctcagccaaacggggattcagccgtccgatcctttggtaacagggactcacgtgaagcttccaggaccagctcccgacaagtcccaatgtttatgaatttcaaaaccacatatgaccagatgtacaatgatcttcttaggaaagacaaaagaactctttacacagaatgggattttacatattgctggacagaaataagagaatcaagccccgggccggaaagattccagaactgcaaagacctgtttgatctgatcctcactttgcgaagagagagtgtatgaccgggttggttggaagatctgaatttccagaggaacagggagacctgcccagccccgtgcacgtggtcaattgtggacatccaggacaaccacgaggaggccacccttgggggcgttttctcatctgtgaagctctgccagtgtatccagcacacggaagacatgggagaacgagatcgacgagctgctgcaggagttcgaggagaagagtggccgcacctttctggcacaccgtcttgcttcttactgagccccagcgccccgcatgggagcccgcctcttgggagcttcctgtttgtttcatacttttttccttcctggacatttgtttttaatttaacaggtgtttctgcttggtgacggttagcatttacccaaataaactgtgcatatgaaatggggaggagagatgccaaaacgcccagatgaaagcaatcaagtttcttccttttccacttttacttatgagcgggatattgatttacaaagtttttcttctttaaccaaaaagggaaagacaacggttttgtgtgcacttcccgacatacctgtgtgcttcgtgtgcctgccttccctccctcctccccaccgggcgcggactgtaacagagccctgctgcggcgtgttaggaatgacctggaattgtcaataaacagatgctgctgtcaaaaaaaaaaaaaaaaaaaaaaaaaaaaaaaaaaaaaaaccaaaaaaaaaaaaaaaaggnggggccgaaggttttttccctttggtnggggttatttttggcttggnattggccttcgtttt

SEQ ID NO: 145604 - DNA, 1434 bp, Homo sapiens
tttttttttcttttttttcatagaccaaaatagagatttttatctccaaacacaaagcccatacctctttaaaaacataacacaacagcaaaaacgccaaaccaccttttcgaacactgctacttccaactcccacaaaaggaaggggaggaaaacctccctgccaactttaaaatatagcactaagaagaaactccggggtcctggtgttcctccctggatcgcggcgaaggctccattacctttggacttgatatcaaccgagataacacacacatgttccgagacagtcgtttggctccactcctgcttgccttcccgagaaagcttaatttattggcaaaatgcatgtttttaccatgcacaaaataatatgacaagagttagatatgggtccctctggcgtattggtttacataattaggaatatttaaaacaatggaatgtgtttgtctttgacatcaaaaatcatttatgcagcatctacatgcacatatacacacacaagtgtgaacgcatacacaaacacacacacacagacacacacacacacacacacacaccccatgccattgcttggtccacactgcatgaaacacaccattccagctacatgaacaggtcagtatcaggttagtgtaaccaggtctccaggtacaaaggatgaagtgggtttgctcacatagacttagcttagggtagagtgaacttgtttatgagaacctcgtttatgcagaggttggactcaaggcgatcgcagcactcaatctggttgtgatcatcagcgtcatctgggagcagcttccccaaacattctcagcatcgccccagacatccttgttcacaatctcaggggtggaggtcatgagcaggccaaactcactctacccgacctgctgcctccaggatgggttctgaggagacatggggccctcccatgggacggaatgacaatgaaaacgaaaaaatccatctgggtggggggctttggaatgagggctctggtctttcggacttgaaaattggagggaaaacgtaatcgttcctccaaagctggtattggaaacttgccattttcccaacacacacacacagaaagagagagagaaaggagaaaatttaggacccacagaattaagccctctttcaaagcaggttatctgctatcctgagaaaaagagggcatcgtgtctaaaccagcccaaggaaattcccagatgacacagatctaaggggtcatctgaccttcccttctttatggagaatgccagggagaggcataaaaactctggactttgggtaaaacgtcctgagcccgatgtggtctccctggcttctgagagaccacaggctggtgtctgttgtgctgaagcccagagctggaagccagggctcgcccagttgtgcttctgcatggagatgtgtgtagtactc

SEQ ID NO: 145605 - DNA, 422 bp, Homo sapiens
tttttgacacaaacccactttattcagcattgagccagcccacacgctgggcaggtcaaactcacagacatcgcaccaagggccggggactcagaagggctgaaaggcttcatctggaaatgggcaccgctcacaagcccggctatccccaaatctcaacaactgtctgcatctatgtccccgactttgcaatcctgtccccagtgctgagtttctgtcgactaatttatctacacacaaggatgctgcaggcaactgagctactgctacaagctttgcaaaattcaactactaaaggaaatgggaggagggaaagagctagagataacagcaagatgagacacgatggcagggcctggagatgctaaatggggttagccacctgccagcagcatgctgaggcccaggttgcgatgcttttt

SEQ ID NO: 145606 - DNA, 393 bp, Homo sapiens
ggcacgaggcaagaaacccaacctcagggcttttcttctgcctctgcccagggcctggcctgaaccccagaccctgcagcaacccagatggccctgaacggttcagttgcccgtgccagccataggtgacaaggctttggccctggggagacggaagtctgggccaggccctgggtttgttgtgctcaggacagtacctcatgcgctgtctcatgtgcgctctctctttcgctctctccttttgcctctgtctctgactctgtgtgtctctttctctttttgtctctctgtctttccctctcccctcccatgcagtgatggcgccaacccgtggcagtcccagagctggaagcaggaggatggatcctcatctccatgggaagtgtcagcgtg

SEQ ID NO: 145607 - DNA, 1718 bp, Homo sapiens
gtcctcctcaccatgctttagcacgtgtcacgaggaagtttcctttgacactggagggtggccagggcagggggaagaggccaggtggacacacggagacgaagcaaacgagctgacacaaacccactttattcagcattgagccagccccacacgctgggcaggttcaaactcacagacatcgcaccaagggccggggactcagaagggctgaaaggcttccatctgggaaatgggcacccgcttcacaagcccggcctatcccccaaatctcaaacaactgtctgcatcctatgtcccccgaacttttgcaatcctgtccccagtgctgagtttctgtcgacttaattttatctarkacacaaggatgctgcaggcaactgagctactgctacaagctttgcaaaattcaactactaaaggaaatgggaggagggaaagagctagagataacagcaagattgagacaccatggcagggccctggagattgctaaaatggggttagccacctgccagcccccttcacccaggggaaacagagaaagaggcttctttctgcggaaggccaggtggaaccacagggagggctccctgggaaggcaacaggagtggggtgggggcccaggaagggggaggtggacagagcgacttggataaggctgggccgggcccacgcccacctcaagagggggggccgcctcctcaggacgatgcgaggttgcagtccagtcttccttgcgctccctgaagacctgagttccagccttcacaggagcgtcattcgcattcttctgtctggatgctaaccccaaatccggcactcaatggtgcacctcaggtacctgccaaggatctgtgggcccacatgggaaggtgcagggtctgggtccctggatgacgaggtgagggcaagatgggtgaccagggaagggcatgacccagagctgccgggactcatggaggatgggctgtggctaggacttcaggaagggacgggcaccagttgggaagggtcctcaggtccagcctctaccgggagttgtttgcaagcccccaaaacacgcctcggggtgaaggataaatggacattgttgaaacacgcaactatgtagatggacccaaggccaggcgcctgccacgcttccctggcagccacacgctgacacttcccatggagatgaggatccaaccctcctgcctccagctctgggactgccacgggttggcgccatcactgcagcagcatgctgaggcccaggttgcgatgcttcttctccagctcccagaccgcctgcagcagtgacctgaaccgctcagtggggtcaagccaagctcgtcctcaagggagcccctcctccttctcagcctcctgcaggaaatgctcctccgtcctccacaaagaaggcccgcagcttcttgtagtcggtcaagtgccttctttctacggtccatcaacgtgtcccttccacactgcagctgctgactctgcctggccatgcaggtcccgggcgtcattcaaagtcctttctcatgatttccacagaccccttgttctccttgccgcgcagcgccttcctccagcgcggttcccactcgggcggctcggggcccgcagccatacggcaggcggcgcagagcgggccggcgtcggcgcggcacagcagctgcagcgcagacctcgctggccgggccgtcgcgcgcgggcgccgcggccgc

SEQ ID NO: 145608 - DNA, 728 bp, Homo sapiens
aattttgccctcgaggccaagaattcggcgagggcaataagctccttagtcccagacgcccatggggtcatttcacagaggaggaccaaggcttactatccacaagccttttgggccaaggttgaattttggaagatgctggaaggaaaaaacccctgggaaaggctcccctggttgtcctaccccatgggaccccaagggttcctttgaacaggctttgggcaaccctgtccctcctgccctctgcccatcatggggcaaccccccaaagtccaaggccacatggccaagaaaggtgctgacttcccttggggagatgcccataaagcaccctggatgatcctcaagggcacctttgccccagcctgagtgaactgcactgtgacaaagctgcatgtggatcctgagaacttcaagctcctggggaaatgtgctggtgaccgtttttggcaatccatttcggcaaagaattcacccctggaggttgcaggcttcctggcagaagatggcagaagatggtgactgcaagtggccagtgccctgtcctccagataccactgaagcctcttggcccatgaattcagaagctttcaaggataaggcttttattcttgcaagcaattacaaataataaatctatttctgctaagagatcacacatgattttcttcagctcttttttttacatctttttaaatatatgagccacaaagggtttatattgagaa

SEQ ID NO: 145609 - DNA, 724 bp, Homo sapiens
aattttgccctcgaggccaagaattcggcgagggcaataagctcctagtccagacgcccatggggtcatttcacagaggaggaccaaggctactatccacaagccttttgggccaaggttgaattttggaagatgctggaggaagaaaacccctgggaaaggcccccctggttgtcctacccaaatgggaccccaagaggtcctttgaacaagctttgggcaaccctgtccctctgccctctgcccatcatggggcaacccccaaaagtccaaggccacatggcaaaagaaggtgcctgaccttcccttggggagatgccaataaagcaccctggatgatcctcaaagggcaccttttgccccagcctgaagtgaactgcacttgtgacaagcttgcatgtggatcctgagaacttcaagctcctggggaaatgtgctggtgaccgtttttggcaatccatttcggcaaagaattcacccctggaggttgcaggcttcctgggcagaagatggttgactgcaagtggccagtgccctgtcctccagataccactgaagcctcttggcccatgaattcagaagctttcaaaggataaggcttttattcttgcaagcaattacaaataataaatctatttctgctaagagatcacacatgattttcttcagctcttttttttacatctttttaaatatatgagccacaaagggtttatattgagaa

SEQ ID NO: 145610 - DNA, 1848 bp, Homo sapiens
  misc_feature (1)...(1848): n = a,t,c or g
ggcacgaggcagagagcatcggccggcgaccgttccggcggccatttgcgaaaacttccccacggctactgcgtccacgagtgcggtggcgtggggactccctgaaagcagagcggcagggcgcccgggaaagtcgtgagtcgagctttcccgggcctaaatccatgcccgggttggaagcctgctgacgcaaggtcggcgcccaggtgctgggtcgactcggggacggcctgggtgctgccctgggcccggggaacagaacacacatctggctttttgttagaggtcttcatggaaagagtggtacatggtgggatgagcatctttctgaagaaaatgtcccatttcattaagcagttggtctctgatgaagataaagcccaattagcaagtaaacctgtggcctctgaaagatgaaccatggcctattacatccttgggaaaccggttcctttaaagtttggcttatttgacttgaaggctgggcatgttggccttttatggaccaaggatggtcaaaagcatgtggtcacattacttcaggtacaagacctgtcatgtcttaaaatatacgtcaaaggaaaactgtaatggaaaaattggcaacccggtctgttaggagggaaaaactgtatcacgttttcgtaaagctacatccatattggaattttacccgggaacttggattgccgccgaaacacgacagttaaaaatctttaatataacagataatgctgcaattaaaccaggcactcctctttatgctgcttcacttttcgtccagggacagtatgtggatgtcacagccaaaactatttggtaaaggtttttcaaggntgttcattgaaaagatgggggatttaagggccagcctgcttaccgcattggtcaaaccgaaaaccccacaggaagacctggagcttgttgcaactcggtgatattggcagagtctggcctggaactaaaatgcctggaaaaatggggaaacatatacatggacagaatatgggactgaaaggtgtggagaataaacacaaagccccccataatcctatgtaaatggctctgttacctgggacataaaaaattgcttagtaaaggtcaaaggattctaaactgccctgcatataaggatctcggtaaaaatctaccattcccctacataattttcctgatgggagatggaagagggaacttgccagaaagattttgtattgattgaaaaccgtgttgtcagccccggtggcgccctccaattaacatttgccctaacatcctttgggacgtgggcagaacccttaccatattcctgtgagcctccgatgagcccagagtgatatccataacccacccagaaatccatactctccctttccttagtcacaacaaaaatcacacatgtcatctttggccagggnccataaatatatccattccatacccccccataaattttgttagaaaaaattaccccacattaaatatatgagttaaagtagattggatttgcctgaaattggtgttgggccatattagcaaaatattccttaatttgtggactcgattccttttttacctacatatttccccaagttatccttaagatgtcctgtaaatttaacttttattaaagttttgtcaatctttgtgaaatagtggttgtggaacagtagaaaaccatatggggactatagtgcaacctatttgggtaaagaaaccatttgcttaaaatgggagaaataaattggatttttaatttaaaataacaggaaccatttttaaagccccggacaaaggaaagacaataaaatcataaattatcaaaaaaaaaaaaaaagggcggccgct

SEQ ID NO: 145611 - DNA, 704 bp, Homo sapiens
  misc_feature (1)...(704): n = a,t,c or g
tgagtgaagggtctgctgctgaaatttgggggcaaataaccggagtaggtttgttcctgtgccttgncgagtcgccggcctgcctgggaacggggactttctaaaaggaacctatgtcctggaaggcctgtggtccccaaggcccctttttgcctggcctataagccgggggttctcccggaaccccaaaggggagccacacaggctccttctttaaaaatttgaagggtgtttaccgccccgagatgaaaccagaattcctatttgggccaggagatgcgcttatgtagtataaagcaaagaagtaagtttatgacactgcaacacagtcactcctgggcggcaaaccaaacaaaacccagagtcatctgggggaaaagtaactccgggcccatgggaaaccagtggccatggttcgtgcccaaattcccgaaggcaatctttcctgcttaaggccatttggacacaggaatccggagtgatggttgttacccctcaaggattttaaacttaacggaaaaatccaattaaattaaatgttggatttgtgctccttggtatttttaaagtgggatttaaaaaacttactaccttaagaaaaaggaagaaggagaaggatgaagaaaaagttcgcccggccgcattttggtggtggtgtcgaccgggatttcggacgggtcctcagggttccagtttcccttggt

SEQ ID NO: 145612 - DNA, 477 bp, Homo sapiens
cttcgagagcgaggacgagggcgaggaatttgatgactgggaggacgactacgactatcccgaagaggagcagctcagtggtgccggctacagaagccgacaagatgtttctgagaacaagagaaccagccctggatggcgggtttcagatgcattatgagaagaccccgtttgatcagttagcttttatcgaagagcttttttcactgatggttgtcaatcgtctgaccgaagaactcggctgtgatgagattattgatagagagtagttagatgctgttaaaagaggaggaaactacttgaggagggacccaactttccgctatcttttgggttcattccaaatagttttgtgccattgaaaaacttgaccttcaaaaaatttgtttttcagaatagaacacaataggacagtgactgccacagttgtgaaaaaaggaagagaatcattaaagaaaaaagaaaaaaagattttag

SEQ ID NO: 145613 - DNA, 456 bp, Homo sapiens; identical to SEQ ID NO: 93636
  misc_feature (1)...(456): n = a,t,c or g

SEQ ID NO: 145614 - DNA, 1553 bp, Homo sapiens
ttaagcgccgcccagccagtcctccccgtcacagggggcgctgtccgccttcctctcgcctacacaaagaccccgctctcgaatctggggtgacaggaaggagccggtccaggctccgggggctgggaaagggcgcgtctcaaaggctggctgtctccggcagctcttgagggtgatgcctgttttggtgctgatgtcatccaggtctttcttggtgcctttggacagcttcttgcccagcacctcccgaacaaaggcctcatcaaaggcatagtaccttgtggagtcagagaacaccattgaccctccataaaagacaggaaagggagtcccttccactctcaactttctgatggctgggtaaatcccatccctccctgggcctgtttcagccggcaaaatgggtatacagtcagactggttgatgtctccaccatcccagagggtgagcacctctcgatgagtagtgcctgccgggagggcaggaatctggaagatgagctggtgcagtagcttgggcggcgcatgcagcagccgctcgagcatgtggaaggtgcggtaatggtccatggtgtcgctctgcagcaccgctgccgtggcgccagtctgctccaggattcccgagcgcacccgcagggccaccgcgtcggtcacccatttttgcggagatttaggatagagccctgtgaaacccctaagtttaggatacaggtcaaacttaggaggtcccgaagagggcagagaaggtgggagaaaagccaggaggaagtgaggggagaagttacggggaccgaggagacgaagaggaggcactcccttcgtgctcctggccaaccggtcagagaggaggaagtgttgctgaatattgtccaccagggagccccgcatttcctctaccaccttgaagacccgtttaaagttgtcaaacaaaaaggcttgtggagaaggtggcatctcacctcttgtcttggatttcaaggggtagatattgccaagaacagtaccctccaggtagaagcaacatgagtaaaggaaagcctggggctgtctccggcagctcttgagggtgatgccctgtttgggtgttgatgtcatccaggtctttcttggtgcctttggacagcttcttgcccagcacctccgaaacaaaggcctcatcaaaggcatagtacctctcgatgagtagtgcctgccgggagggcggaatctggaagatgagcttggtgcagtagcttgggcggcgcatgcagcagccgctcgagcaatgtggaaggtgcggtaatggtccatggtgtcgctctgcagcaccgctgccgtggcgccagtctgctccaggattcccgagcgcacccgcagggccaccgcgtcggtcaccgagtaaccatcgagccagaggcgatacacgtcctcgtcgataagggtcgtgttccccacgaagatgtccagctccctgcgtcatggcgacgcccggggccgcaccgccccgagcaggagcgagcactgctcgggactggcgcgccgcaaaaaaaaaaaaagcggtcgctgaattctag

SEQ ID NO: 145615 - DNA, 2034 bp, Homo sapiens
  misc_feature (1)...(2034): n = a,t,c or g
gcgctgcggccccgggcgtcgccatgaccagtgagctggacatcttcgtggggaacacgacccttatcgacgaggacgtgtatcgcctctggctcgatggttactcggtgaccgacgcggtggccctgcgggtgcgctcgggaatcctggagcagactggcgccacggcagcggtgctgcagagcgacaccatggaccattaccgcaccttccacatgctcgcaaggatccttaatttaattaatcccccccccccggcgcagcatctgtcttgctggaagctttttcctagaggttgagcggtttgcacaatgtcggaaatggctgagttgtccgagctgtatgaagagagcagtgacctgcagatggatgtgatgcctggcgagggtgaccttccgcagatggaggtaggcagcgggagccgggagctatccctgcgtccctcccgcagcggggcccaacagctcgaggaggaaggcccaatggaggaggaggaggcccagccaatggcggcgccagaggggaaacggagccttgctaacgggcccaacgctggggagcagccaggccaggatggcgggcgcagactttcgagagcgaggacgagggcgaggaatttgatgacttgggaggacgactaccgactatccccgaaggaggagccagctccagtggtgcccggttaccagagtatcagccgctcttgaagaagccagacaagatgtttctggagaacaagagaaccagccctggatgggngggtttccagatgccattaatgagaagaccccgtttggatcagttagccttttatccgaagagctttttttcacttgattggtttgtcaatccgtctgacccgaagaactccggctgtgattgagattatttgattagagagttagttaagattgctgtttaaaagaggaggaaactacttgaggagggacccaactttccgcgtatctttttgggttcattcccaatagttttgtgccatttgaaaaactttgaccttcaaaaaaatttgtttttccagaatttgaacaccattaggacagtgactgcacagttgtgaaaaaggaagagaatcattaaagaaaaagaaaaaagattttaagaccgttgaaatcaattatcaaggaacgtccttaaaacacctatgggcttttgactttgttatttgatccaggattattttccttgcattggggggaaaatatctttccatatttgtttgcttgtaaaggtgggttttgccaggattaggtcatgacccaggccaactgccaatacaaaagcccactgatactaattatataatgaggaaaaaaatgtatccaactagggacacatatcttttgagttatttgggactggaaaggctttanggaaaacttgggaaaatttctattttgtgatcttggtccaaggccacagttattcaagggcttacattttccgtgtaagataaatggatgagttaactcaaatatgtatcacgtgtgctttgtatcttaagatgcgtttccaagagcatctgaaattttgattgtacatgtatcttgaccattgataaagccactgcgatctataaatcaaggaaaatccattgtccataaccatttttaaaagtccaaaaattaaggacatccttaattaaaaagttttcaaatctaggacactaaatgtgtgtggatgtacaaagaaaacaaaccattggcttatgctgttatatactagaggaaattttgttttgcttgctgttttaacttgacagatggagggactttaggttggaacttcatattgtaaggaactgttaattaaaggttgtccaggtaaaaagccgctaaatatttctaaaaagactttatgaacagttattctatcaacttttaaaggttttaaacctgcccagaaattaccttggtatctgaagtttccctctgtctcctcctctaattaagcttgttatttgtcatgcaccagcattggagataataaaatttcttgttctgtgtaaaaaaaaaa

SEQ ID NO: 145616 - DNA, 452 bp, Homo sapiens
tagtccagcgcggaggaattcgcgggcgctgctgggcctcgggctgctggttgcgggctcgcgcctgccgcggatcaaaagccagaccatcgcctgtcgctcgggacccacctggtggggaccgcagcggctgaactcgggtggccgctgggactcagaggtcatggcgagcacggtggtgaagtacctgaggcatatccccccacgtccatgtccaggagcccccctactgtcctggtcatctgtggcccggggaataatggaggagatggtctggtctgtgctcgacacctcatactctttggctacgagccaaccatctattaccccagaaggcctaacaagcccctcttcactgcattggtgacccagtgtcagaaaatggacatccctttccttggggaaatgcccgcacagcccatgacgattgatgaactgtatgagctggtggg

SEQ ID NO: 145617 - DNA, 1179 bp, Homo sapiens
  misc_feature (1)...(1179): n = a,t,c or g
ggcgcgcgctctggagctggatgtccaggctgcgggcgctgctgggcctcgggctgctggttgcgggctcgcgcctgccgcggatcaaaagccagaccatcgcctgtcgctcgggacccacctggtggggaccncaagcggctcgaactcgggtggccgctgggactcagaggtcatggcgagcacggtggtgaagtacctgagccaggaggaggcccaggccgtggaccaggagctatttaacgaataccagttcagcgtggaccaacttatggaactggccgggctgagctgtgctacagccatcgccaaggcatatccccccacgtccatgtccagggagcccccctactgtcctgggtcatcttgtgggcccggggaataatggaggggatggtctggtctgttgttcgacacctcaaactctttgggtaacgagccaaccatctatttaccccaaaagggcntaacaagccctttttcattgcattggtgaacccagtgttcagaaaatgggacatccttttccttggggaaatgcccgcagagcccatgacgattgattgatgactgtatgagctggtggtgggatggccatctttgggcttcagctttcaagggccgatgttcggggaaccgtttccacaggcatcctgagtggtcctggaagggattcactgttgcccatttgccagcattcgacatttccctcaggatgggaacgtggaagaagggaaaatgcctggaagggaatcccagcccagacttgcctccatctcccctcacagcacccccaaaaaatcctgccaaccccagtttacccggtccgcctacccattaccctggggggtcgttttgtgcccacctgcctnctggaaaagaaggtaccaggctgaacctgcccacccctaccctgaccctgagtgtgtgctatgcgtctgcagtgagggaaggtgggtggggtattctccccaataaagacttaagagcccctctcttccagaactgtggattcctgggagctcctctggcaataaaagtcagtgaatggtggaagtcagagagcaaccctggggattgggtgccatctctctaggggtaacacaaagggcaagaggttgctatggtatttggaaacaatgaaaatggactgttagatgccaaaaaaaaaaaaaaaaa

SEQ ID NO: 145618 - DNA, 414 bp, Homo sapiens
  misc_feature (1)...(414): n = a,t,c or g
ngctggagcagtcagttcagactcaccttgtggcacagacctcacaagacaggcaagtgccctcaaatccttgtgaaacagccactggttgagtggtgacttaggagctctgcagtaactgtcctagtctctctgatccactctccaagctcttttgcacatcacccttcagtcgacacataaccccactgcctggagagccccccgggttttaaggccatttttatacggggcagacttttcacagaggcgtgtttttgccgcattgcttaagaatgattcttaagaatccaacgtggaatgtcaatctgtgacttgggacccttggtatccttgaccctcaaagagatgaagggctttgggttttgcagtccacccccacgaattcgggaaaaccaaaatgggagccctggc

SEQ ID NO: 145619 - DNA, 798 bp, Homo sapiens
tgcagttagtgaagacagcggccaaaggccagggcttccatccctctgcaccagccacctcaggaggcctgtcagcctccagcagcagctctcacaagaccccagcctcgtcctcttctgccctgagccatccagcaaagccacattcagtcagctctgcaggctcatcttacaagaataatccctttgccagctcaatctccaaacatggggtttcttctggcagctcttcctcgggaggaacaccagtccagagttctgtttctgggagcctggtccctggcatacagcctccctccgtgggacaggccaccagccgacccgtcccaagttcagcagggaaaaaaatgcctggtttcccagaagttgactctggtagcccctccaggcggtccaaacggagattccagtggtgggacccagggagtggcaaagttgctgacctcgccgtccctaaagccctctgcagttagtagtgtgacatcgtctacctccttgtcaaaaggagcgagtgggactgtgctgctggccggctcctctttgatggcttcaccctacaaatccagcagcccaaagctgtctggggccatgagctcgaactcctcggggtctgggggctgcaggggtttccctggcgcagcgaaagtctctgagcacttaccgggcgtgaccgtttcttaggtgtgagaggggctgtggcttttgtgcagcgactatgttggtgttaggggtggtgtggagattgttaatcttgtataaagcaattcaataaattgtttcaaggtttccaaaaaaaaa

SEQ ID NO: 145620 - DNA, 800 bp, Homo sapiens
ccggaattccttggtggacacacgcctccgaggcggtccaaacggagattccagtggtgggacccagggagtggcaaagttgctgacctcgccgtccctaaagccctctgcagttagtagtgtgacatcgtctacctccttgtcaaaaggagcgagtgggactgtgctgctggccggctcctctttgatggcttcaccctacaaatccagcagcccaaagctgtctggggccatgagctcgaactccttgggaattataacccctgtccctattcctgtccatgtgctctccttcagcgctgactcctctgccaaagcaggggtctccaaggatgccatcgtcacaggccctgcccccgggtccttccaccatggccttggccacagtcttctggctggcttgcactccagcccgccccatgcagcgcctctcccacacgctgcggtgcccacccatatcccgcagagtctgccaggtaatcacccgacggtcagtgtgcacacgcgcaccgtgtgcctttgccctctccacccctaggtgctttgccgctgccaagggtcttggtgtctttgccttgacgctgttgttgttttggtttgtcctttgaggctgtgctttgtcagtactcagggtgacacgcacttctactcttggggtttcctctggtccccacttggagtgccgccaggtcagcctcagcctgtgtgatcacagggaaagttgcggggggcagggtggtgcgcttttgtgtgcggtggaggagttcctaaccctcggcttgtttttttctcttcagttt

SEQ ID NO: 145621 - DNA, 784 bp, Homo sapiens
ttttttttttttggaaaccttgaaacaatttattgaattgctttatacaagattaacaatctccacaccacccctaacaccaacatagtcgctgcacaaaagccacagcccctctcacacctaagaaacggtcacgcccggtaagtgctcagagactttcgctgcgccagggaaaacccctgcagcccccaagaccccgaaggctgctctgccccaaccctctgctgcggcctcgcctgtagggtctgccttgccatgggctggttcagtcattcgctctttcattaccacaaataaaggcataaacaagggaaaagaaatcttcaaactcccccatcaaaagaaaacgtttcccctgaggccaagaggccatccactaaaatccctaaaaatgagggtaatcctgctcccagctgcacgccgcaatggttacatggggaggagggagccaccaaagggaaaggaaggagggccctgggacccgggtgtttatgggcagagaagccctggagagtccctgctcagcctcccactgccggcctctgcttggctttgagctcagcaatacaaatctccttctttggctcttttgctactacctaagactactctgtaaacaaactggaaatccaagttgcaaaaaatatatataacaaagggataaggaatccacttagcccaatgtgaaacacagattggttcttatgtaaaaaaaggagtcagagcagaggccgggccaaagggcagacagaggtcttgctccttgggaaaccgggaaggccac

SEQ ID NO: 145622 - DNA, 2318 bp, Homo sapiens
ttggaaaccttgaaacaatttattgaattgctttatacaagattaacaatctccacaccacccctaacaccaacatagtcgctgcacaaaagccacagcccctctcacacctaagaaacggtcacgcccggtaagtgctcagagactttcgctgcgccagggaaaggaaggagggcctgggacccgggtgtttatgggcagagaagcctggagagtccctgctcagcctccactgccggccctcctgcttggctttgagctcagcaaatacaaatctcttctttggctcttttgcctactaccctaagactactctgtaaacaaactggaaaattccaagttgcaaaaaaaatatatataaccaaaagggattaaggaattccacttagccccaatgtgaaaacacagattggttcttatgtaaaaaaaaggagtcaggagcagaggccggggccaaagggcagaacagaggtcttgctccttgggaaaccgggaaggccaggcaaacctctgaatgaaggatgagttacttgggcgctgtaccctgggagacaggagccaagagcggtccgttttcccaacaggtgtatgtgctgaggaacaccgtaatactcctcaacgtgccctggatcacttagctggagcagtcaagttcaagactcaccttgtggcacagacctcacaagacaggcaagtgccctcaaatccttgtgaaacagccactggttgagtggtgacttaggagctctgcagtaactgtcctaagtctctctgatccactctccaagctcttctgcacatcacccttcagtcgacacataaccccactgccctggagagccccaggacttcaaggcctatttctaacccggcagacacttcacagaggcctgcttctgccgcactgcctaagaatgattcctaagaatacaaactggaatgtctatctgtgacttgggacccctggtatccttgaccctcagagagatgaagggctctgggctctgcagtccacctccacgaactctggaaaaacaaaatgggagccctggctatactgggacttggaatttgggggccccagacaaccttctagtcaggacggcacagataatgatgtgcaagtgtaaaaaactcaaaactggcttctctcttcaatacagacatatctttaaaaaggtcttcgtctcagatccattcagagggctgaatggacatgtgttgtcgaattctgctccaccataaaggcactgggaattatgtcttcctataatatgatgtgtgaagaacagtccccttctatccaatgcatttaatggtaatgatgaaaactgagcccaaaataggtgtctgtaaaaatcctatcataattgttgaatctacaaaggtcttttctctaaaagagcttcattgtcatgttccgagggagaaactggcccccacagtgagcacaccctaggtgttcttagtatttcgcagggacagtgcaggtctcccagctgtggctctggcctgagttttgtccgctttgagcacacagcctggggatggggcggcactgtgaccatccagggagcttactgcagccagaaggagcccctgagcagtggggtgctctgaggtactctgaccaaatgccaggggatcaggcagattcacccacaggtgtgccaactgctctgccaccagagcctgtaaacactgtgcctcccaccacggcccagcgcaagccccagcctagagctgcccctctaacaaccgtctagcgacagagctgcaaggcccagagcacggggcagtctgcacctcctgagcagcaagggcccggctccctccatgggaggcacatcagaagtgccgagaagcgctccgctgagaactcacgctcctccagaagaacaccaagcagcagaaagggcgcagtgagtgtacatcctgggagacctgcacgttctgattccacccagacccaagtggcaagccttgcctctgaagcggtcacaatttccgtggtacagcaggccctttcccgtgaagctgagaagcacctggaaaagagtaagaaaaattagaacgcaagtttttcatgctctctgatttccttaaggcagtagtaaccaaacttcaagggagacacctaaatagcaaaagtccccaaatgctgagtgttctagagctcaaacaagccatgagacaccagccagcagttattcgtgtacactactcctggccacagcctgcaagcacactatcactgtgaaggtcggtggtcactcagcacagtgtttccagaacagcaactctgctgtgcaacttgg

SEQ ID NO: 145623 - DNA, 517 bp, Homo sapiens; identical to SEQ ID NO: 115477

SEQ ID NO: 145624 - DNA, 1845 bp, Homo sapiens; identical to SEQ ID NO: 115478

SEQ ID NO: 145625 - DNA, 450 bp, Homo sapiens
atgtgggaaagtttggaacttcctagagacttgttgaatggctttgtccaaaatgctgatagcaatatagacaataaagtccaggctgaggtggtctcagatggagatgaggaacttgttgggaactggagcaaagctgctccagccgtggctgaaatgcgccaatgtaaagctcaggccatggtttcagagggtgcaagcctcaagccttggcaacttccatgtggtgttgagcctgagaatgcacagacgtcaagaattgaagtttgggaacctctgcctagatttcagaagatgtacggaagtgcctggatgtccaggcagaggtttactgctgggctggggctcttatggagaacctctgctagggcagtgtgggagggaaacatgaggtcagaacccccacacagagtccctactggggcaccacctaatggagctgtgagatga

SEQ ID NO: 145626 - DNA, 1113 bp, Homo sapiens
tcaacagagttccaaggtgatcaccttggtacagaaagccatggccattttccaaaaccatgcctttgtgtaagtgccttgaaccttccggtaaattctgaataccttaggccctaagatcggggtttgcgttcggcgtttgctttcttgttttgcgttctggtttcctggtgcaggctcccttctccttttaaaggtgccggcctcattgttatgatctggcttttctctttctctgcgtggaagcatttccttctccctgtgtttaaggttggcatgtgtgtgacttatcccaggtgttactgttgaagtcacggtaccatgaaagccgctcattaaaccaggatgggtctctgaacttcctaagcccatgaattgggcttcatgcagcagaaccttggcctcctttttgttgcaggccgccagatcccacccttggacccccatgaaaatggaaacaatggaacaatcaaagttgagaagccaaccatgcaagccagccgccggtgctgttgacccaagggccgtggtccacggtacttgaagaagccagagcccacatcctgtgcactgctgaaggaccctacgctcggtggcctggcacctcactttgagaagagtgagcacactggctttgcatcctggaagacctgggagatactgggtgggagtgtgaacatttggctccacattacttatgcaaatttctgcagccagcttggatttctcctcagaaaatgggattttcttttctatcacattgccagactgcaaattttctaaacttttatgctctgcttcccttataaaaccaaatgcctttaacagcacccaagtcacctcttgaatgcttctctgcttagaaatttcttccgccaggtaccctaaatcatctctctcaagttgaaaattccagaaatctctagggcaagggcaaaatgctgccagtctctttgctaaaacataacaagagtcacctttgctccagttgccaacaagttccccatctccatctaagaccacctccgcctggactttattgtccatattgctatcagcattttgggcaaagccgttcaacaagtctctaggaagttccaaactttcccacat

SEQ ID NO: 145627 - DNA, 828 bp, Homo sapiens
ttaaaaggctcctgattggcaggacatgagggcagacaggagaagaggatgagcccttggtggttgtagcaaccgcaaagggagacttgagcttgaaaggtgggtgttgagcttgaacgctttcttaattggtggctgcttgggctgacaggcaggagttggggctgccaaggatgacgagtcctggaaaagactgattaaagtgtggaaaacagtggagtgatccgataacaagcccacagaccgagtctcaattacttgggtcttctcaacagcagcttcatcaacagcgtcaccttcagggaccatgaaaataaaaccgtgatagccctctctgcttctctctttcctcttgcccaatacccaaaacatacacaaatcgccacattttgcttccttttcctccaaaagtttatgcaaatttctgtagccagcttgaatttctccccagaaaatgggtttttcttttctgtcacagtcagtttgcaaattttccaaacttttatgctctgcttcccttataaaactgaaagcctttaacagcatccaagtcacctcttgaatgctgagctgcttggaaatttcttccaccagataccgtatattatctctctcaagtttaaagttccacagatctctaaggcaggggcaaaatgctgccattctctttgccaaaacataataagagtcacctttgctccagttcccaacaagttcctcatctccaactgagatcacctcagcctggattttattgtctatatcactatcagcattttgggcaaagccattcaacaagtctctaggaagttccaaactttcccacat

SEQ ID NO: 145628 - DNA, 1642 bp, Homo sapiens
agctgggaccgttcatgtgcacagcagtccagtgcccctttctcgtatctgtagcctttcaactctcttaaccaagacatccatgccctcccctgcttcccctgtgtctcgagcatggtcccggaggtgcccctcacagagcccagccaagctccacgggtggtcccacagagccagagcaagacgatcactcactccctctaaacactgcacttttattaacacggccacagctcgtattcttggcagccacaatacaccagtgctgaatattaactttattctcaaccaaactttaacccgttttactcctgctcccgctaaatctcagggccacacctcagacgtctgcagttcgttttctgaacccaagagctgggccttttgtttgccagctctgtggagcacaacgggggggcgggataagtgtaggggccacggcacacacggtgggggctcacagacagaggccaagtacatctgtgatctcctcacaccacccaatgcatctgtaagctccctgccagtgagggcaccccccacccccaccacagattccaccagccaagagtgtccgcaccggcactggcttctctcgccgcaagaagtactgagcttccttcttttccctcttgattttgagagtctctacaccgccatggtaggaagtgagaaggaaacgggggaaggcacaccttctgtaggaaagcatgcttatgaaagagcccatgccgacggacctcctggcttgggagagggaatcaactctccccttccaacatgcactggcgtacgtgggctgacccaggacatccaagacactggccaggaatcagacaccctgagcacattagggagtgaagatgatgagaagactgctaagcctcagggtgacacctcagaggtcctgccagctgtaaagaactcaccacggactttccaagaggatggtgacattcccagactaccactgggagctgccaaaaactcagctcaaaaaccccagcgactagggcggtcgttgtgtgtgtggctagccaagtcacacagaggagacttagatggccccacattttattttttgaggaagacagaaacagaaaggagcataggtgtgagaagctggagccccactgtggacctgctgagtctgaggcatccacgcacatccagggggagccgcaggtgtgcggcgctcagggagacaaccggtaggacacttagacctgagttgtcagaggacatagcggggttccaagccctgggaagagatcccaccgatcacggggcagagaggctgagaagggaagagaagccgggaccaaagaagctccggcagagccgaagaagcctggcaaagggaggagccccagccgccccctttgcccctggagttcagcccacatggatctctcctttccagagcccctgctctcttgagctcagccctgcacagcctgatttctcccataactatgccctgagtgttcacttcactgttcccaaacagactttcgattctttgaagtggggctggaagagaatgctttcttacttgtgtgtcagtcattcagaatgtcggaaaggcgatgatgctgaagctataacagcacctaaggacgtgcaaactgtcatggcctaa

SEQ ID NO: 145629 - DNA, 1651 bp, Homo sapiens
ttaagcttcaaagcaatctcctttgacttcaggtctcacatccaagtcacactgatgcaaaaggtgggttcccatggtcttgggcagctccactcctgtggctttgcagggtatagtctccctcctggctgatttccctggctggcattgagtgtctgtgacttttccaggtgcacaatgcaagctgtcagtggatctacaattctggggtctggagaaaggtggccctctactcacagctccactaggcaaagtcccagtagagactctgtgtgggggttctgatcccacattttcctcctccatttccctaacagaggttctccatgatgaccctgcccctgcagcaaaattttgcctgggaatccaggcgtttccatacatcttctgaaatcttggtggaggttcccaaacctcagttcttgacttctgttcaccctcatgcccaacaccacgtataagccaccaaggcttggggcttccaccctctgaagcaacagcctgagctctacatcggacactttcagccatggctgggatgtaggtcatcaagtccccaaaatgtcctggagtcattttcccattgtcttctcgattgatatttggctccttgtttcctatgcaaacttttgcagtcagcttgaatttctcctcagaaaatggctttctcttttcaatcacattgtcagactgcaatttttccaaactttcatgctctgccttccttttaaacataaattccataagttcaaaaccatattgtagtgaatacataacactgaatgcttttaacagcacccaagttacctcctgaatgctttactgcttagaaattttttctgccagataccctaactcatctccctcaagttcaaagttccacaaatctctagggcaggggcaaaatgccaccagttctctttgctaaaacataacaaaagtcacctttgctccagttcccaacaagttcctcatctccatctgagaccacctcagcctggacctgattgtccatattgctatcaggcttttggtcaaagccattcaacaagtctccaggaagttccaaactttcccacatttttctgtcttcttctgagccctccaaactgttccaacctctgcctttacttttatcaaaattgctttgaattaaggatgggagaagaaccttggatacggacacattagttacattaaaatcaagtctgttgtgaacctgaatgctagagctagctcctgaacctgaatggttcctgggaaagaagtgaatgaaggatgactcacacttgtcatgaacctctgggatccttgctacaggggaccccacatcccccatggacttatgaattgtctggaggatcttcctgagcagggaaggagcccccatcttaaaagcactgcaacaggtgagatgcacaggttcttgggccagggtggaagtggggtgagcttccttctgaaggaccattccagaaaggctgtggcatatctccctgctgtagcctttccttaagggagccccacggcccagagcacctccaaacgagtccactagctccccaacaatggttcttaaccagcctgcaaagactctgagaaatgagtcctgcagtgtgcccaggaagaagagaaacactggtgagcacat

SEQ ID NO: 145630 - DNA, 958 bp, Homo sapiens
cgaggatgctgctgagccccggcactgcctggctgcgagcacatgatggcgatacgggagctcaaagtgtgccttctcggggacactggggttgggaaatcaagcatcgtgtgtcgatttgtccaggatcactttgaccacaacatcagccctactattgggggcatcttttatgaccaaaactgtgccttgtgaaaatgacttcacaaagttcctcatctgggacactgctggtcaggaacgtttttattcattggctcccatgtactatcgaggctcaggtgcagctgttatcgtgtatgattttaccgaggccggattccattttcatcccttgaagaaatgggtccaagcggctgaaagaacttggtccggaaaaacattgtaatggccatcgctggaaacaagtgcgacctctcagatatttagggaggttcccctgaagggatgctaaaggaatacggctgaatccataggtgccatcgtggttgagacaagtgcaaaaaatgcctattaatatcgaaagagctctttcaaggaaatcagccgcccagatccccacccttggaccccccatgaaaatggaaacaatgggaccatcaaaagttgagaagccaacccatgcaagccagtccgccggtgctgttgacccaagggcccgtggtccacggtacttgaagaagccagagccccacatcctgtgcactgctgaaggaccctacgctcggtggcctggcacctcactttgagaagagtgagcacactggctttgcatcctggaaggcctgcagggggcggggcaggaaatgtacctgaaaaggattttagaaaaccctgggaaaacccaccacaccaccaccacaaaatggcctttagtgtatgaaatgcacatggaggggatgtagttgcatttttgctaaaaaaaaaaaaaaaaacctttaaaaattgttggatgtgt

SEQ ID NO: 145631 - DNA, 1076 bp, Homo sapiens
tttttttttttttttttcacatttttagtctttattttttaggtaaattccattgaatcaaatataacaaaattacagtttttgtttgtaatgatctttgttcaccaccacacaatcatagtagaatcaaaagtaatatgagaacataaaatgatcaaggacatcaatgtttagtataatttcttaataaaggtaaatatccccatatttagaaaaaattgcattgctagttgcaaatcttaaacacctcagtgctgaaggatcctgtatttccccccaaagatccagcagcacggaggctttcagagcccaaactcgaaaaatatagtatttcagggtcagcattataagtttcagaaaacccaatcaaaacagatcaaaatcagaatcaggaatgtgaaagtgatggtgctctaaaaatcaatctggaagcagatctgccaacataagaatgtggttgaacagagtctaaccaggaaaaggagagatgcgaaactcgctccccctcccctctcgccatcgtcccccgcccccagcgagcaagccgccccctgctctgcgctgtctctcccaatggcgtcctgcctccggggccacggcgaagcacgagcagatccctggtcctcgacccgccccatagacctcaaattcaaaggccccttcacagatgtagtcactacaaatcttaaattgcgaaatccatcggatagaaaagtgtgtttcaaagtgaagactaccgtgcctcaccggtactgtgtgaggccccaacagtggaatttattgaccccagggtcaactgtgactgtttcagtaatgctacagccctttgactatgatccgaatgaaaagagtaaacacaagtttatggtacaatttttgctccactaaacacttcagatatggaagctgtgtggaatgaggcaaaacctcatgaattaatggattccaaatggagatccccaatgaaaatgataaattgaatgacatggaaccagcaaagctgtcccactgaatgcatctaagcaagacggcccacgccacaaccacacagtgcttcacttcatgctgtgccgaat

SEQ ID NO: 145632 - DNA, 2389 bp, Homo sapiens
atggatgaagctggaagccatcatcctcagcaaactaacacaggaacagaaaaccaaacactgcatgttctcactcgtaagtgggagttgaacaatgagaacacatggacacaccagtctgatgattgcaatgatctgatcgtagaataccacaagcctaaccaagctgcggccctgctacagctgccaaacagagcagtattgttgctaaagcagattattaaaacctcagtggaagtggatcatcgtaaaggtcttcatcctcatggtctttacgttgagtgggctgaggaggaagataagggaggagttggtcttgctgtctcaggggtggcagagatgggagaaaattcccctctttacaattcttcaaaatccacaattctattgatctttgaccagattacaaataggaacaatgagagttgccgtggccatgggctcagtttgtttgtcccatttgtgtatgatcgccttcccctgcggggaactgggcaaggggcaagcctggtggttcagtcctctggagtcctgatgcttgttgggctttttctttttgccagcatgctctggcactggcaaacaagtcatttagagggagctgaggagagatcaacagaatctgagaaaagtaggcaatgtgcacgcagaggccgtcacgtgggtcgccgaggctcgcaagtgcgcgtggccgtggcggctggtgtggggttgagtcagttgtgggacccggagctgctgacccagcgggtggcccaccgaaccggtgacacagcggcaggcgttagggctcgggagccgcgagcctggcctcgtcctagagctcggccgagccgtcgccgccgtcgtcccccgcccccagtcagcaaaccgccgccgcgggcgcgcccccgctctgcgctgtctctccgatggcgtccgcctcaggggccatggcgaagcacgagcagatcctggtcctcgatccgcccacagacctcaaattcaaaggtgatggatgagtatttatacgaccagaacaatactacactgtatgaaaatggtgtaaaagaagtaaaagacatggtcccttccggccccttcacagatgtagtcactacaaatcttaaattgcgaaatccatcggatagaaaagtgtgtttcaaagtgaagactacagcacctcgccggtactgtgtgaggcccaacagtggaattattgacccagggtcaactgtgactgtttcagtaatgctacagccctttgactatgatccgaatgaaaagagtaaacacaagtttatggtacagacaatttttgctccaccaaacacttcagatatggaagctgtggtgggaaagaggcaaaacctgatgaattaatggattccaaattgagatgccgtatttgaaatgcccaatgaaaatgataaattgaatgatatggaacctagcaaagctgttccactgaatgcatctaagcaagattggacctatgccgaaaccacacagtgtttcactttaatgataccgaaacaaggaaactaatggaagagtgtaaaagacttcaggggagaaatgatgaagctatcagaagaaaatcggcacctgagagatgaaggtttaaggctcagaaaggtagcacattcggataaacctggatcaacctcaactgcatccttcagagataatgtcaccagtcctcttccttcacttcttgttgtaattgcagccattttcattggattctttctagggaaattcatcttgtagagtgaagcatgcagagtgctgtttcttttttttttttttctcttgaccagaaaaagatttgtttacctaccatttcattggtagtatggcccacggtgaccatttttttgtgtgtacagcgtcatataggctttgcctttaatgatctcttacggttagaaaacacaataaaaacaaactgttcggctactggacaggttgtatattaccagatcatcactagcagatgtccagttgccacattgaagccccttatgaaattccataaataaagaattggtcctttcctttgtggttttaaataagagttccaagaattgttccagagtcttgtaaatgttattttaataatcccctttaaattttatcgggtgcgtgtaacttcttgaaatatgatttatttagattgctaatcccactcattcaggaaatgccaagaggtattccttggggaaatggtgcctcttacagtgtaaatttttcctcctttacctttgctaatatcatggcagaattttttttatcccttgtgaggcagttgttgactgagtttttcatccttacaatcctgtcccatggtatttaacataaaaaaaaataaaactgttaacagattcttgctcgataaaaaaaaaaa

SEQ ID NO: 145633 - DNA, 405 bp, Homo sapiens
  misc_feature (1)...(405): n = a,t,c or g
attataggcacccgccaccatgtctggnnnnnnnnnnnnnnnnnnnnnnnnnnnnnnnnnnnnnnnnnnnnnnnnnnnnnnnnnnnnnnnnnnnnnnnnnnnnnnnnnnttttgctgtttcattgctgacagtgttcaacaatatgccccatctttatatatcctaagaaacactaatcctaggttattgctagccaaaatatttttgtcctgagtagtgtcactgggccaaaagatagatcaggacgacagcctttagttttcctgaaatcaccaggtcaggcacaaggagaaaaggttcctggatactgactaacttgggtgggtctagccaggagaaagacagtaacatgtgttctgtactttctgggaagatccctgaagccatcacagaggctccccaac

SEQ ID NO: 145634 - DNA, 1896 bp, Homo sapiens
  misc_feature (1)...(1896): n = a,t,c or g
gggtatgagcgcattggcttgtctgccgcaggcacagaagggtataaagccacagcagggggcagtccagcagactctgactcaactttctaggcacctagcagagaaagataagatcaaaagggggttgggttttcttttaatttttattgtagtttttttgggtgggtgggggaagtaaactagactgaagcgatggatttttttttttcttttttttctttagtgtttttccctttgttcttgaacacttttgccctgcagcctcagttttgaattcttttagcaacttgggattagaggggcccatatgtcagaagctcccagcacctcctacttggggagaaaagtgagccatctgctggtcaggaagtcctccagagagggcagcttttccccacaatgggtggcaggaaactttgggggaaagcaggaatggtgtnccactgctgcggaaggaactgccttcagagaaggtggggctggaaaagggttagaagcctcctagctgggattgtctttgtttcacctttctttaaattagaattacagaagcccctgcccagtgaacagataacaattggtcttatgctcctccctttcccccattttttcttttgctgttttgttttttgttttttgtttgtttgtttgtttttttgagacagagtcatgctctgtcacccgggctggagtgcagtggtgcgatctcagctcactgtaacctccgcctcccgggttcaagcaattatttgcctcagcctcccgagtagctgggattataggcacccgccaccatgtctggcttttagtagagacggggtttcaccatcttggccaggctggtcttggaactcatgacctcgtgagccaccacgcccagcctcttttgctgtttcattgctgacagtgttcaacaatatgccccatctttatatatcctaagaaacactaatcctaggttattgctagccaaaatatttgtggcctgagtagtgtcactgggccaaaagatagatcaggacgacagcctttagttttcctgaaatcaccaggtcaggcacaaggagaaaaggttcctggatactgactaacttgggtgggtctagccaggagaaagacagtaacatgtgttctgtactttctgggaagatccctgaagccatcacagaggctccccagacttctgagtcgcccatctgttgctgtgggagtgtgaacggatcgctgaaggagagggagctttgctctctctaggtgggcaagtttcctgggctctctgtgttgcctccctctggcttcttcctcccgtgccctctccccgtgtcccccaaggggaatcagggatcctcacccctcctgaaggcccagtggggaagaatgaacatggcttcatcccaggttaactgatgctgcccatttgccccagcctcttcccatcccagccctgtcaagtgagcccaggtctggtgcaaactgcctgccaggaatgcccctgtaagtagggaaacctcctggaagtgtaattgggcctgaaggtgggattttcccctcccccacagtgcactgagcaatggagggtggtgagggagcccatgcctgcctgaattctggttggcatttcccccatttatgtaaaatggggtgttgggtagggcagactctgcttgggtttggttgtaagataaacctggaggagaagcacagttgtcccattgaattatttgagcaaaaactactgtaaataattcaatgggcagactctgcttgggtttggttgtaagataaacctggaggagaagcacagttgtcccattgaattatttgagcaaaaactactgtaaataacttttttgtcttttgtcaaataaaatttttttttgtttttttaagcag

SEQ ID NO: 145635 - DNA, 476 bp, Homo sapiens; identical to SEQ ID NO: 137430
  misc_feature (1)...(476): n = a,t,c or g

SEQ ID NO: 145636 - DNA, 2237 bp, Homo sapiens
  misc_feature (1)...(2237): n = a,t,c or g
gcgcgatcgagaccctattgagtgccgtggaattcggctgcgcccatgtaacatcactagcgaccggtgacctctttttcccccttgcctgtctcctgtggtggcaggctgggcacgaggacacatgctgggccagagccaccaacaagttgctgccccactgaaacaccgtccaattacaccaacagagctctgtcaaaaatgtctctctcttatcaagaagaccaagtttctaaatgcctacattactgtgtcagaagaggtggccttaaaacacgctgaagaatcagaaaagagatataagaatggacagtcacttggggatttagatggaattcctattgcagaaaaagacaatttcagcacttctggcattgagacaaccatgtgcatcaaatatgttgaaaggttatataccaccttataatgctacagtagatcagaagttgttggatcaaggagctctactaatgggaaaaacaaaattaaatgattttgctatgggatctgggagcacagatggtgtatttggaccagttaaaaacccctggagttattcaaaacaatatagagaaaagaggaagcagaatccccacagcgagaatgaagattcaaactggctgataactggaggaagctcaggtgggagtgcagctgctgtatcggcgttcacatgctacgcggctttaggatcagatacaggaggatcgaccagatatcctgctgcccactgtgggctagttggtttcaaaccaagctatggcttagtttcccgtcatggtctcattcccctagtgaattcgatggatgtgccaggaatcttaaccagatgtgtggatgatgcagcaattgagatgggtgcactggccggacctgaccccagggactctaccacagtacatgaacctattaataaaccattcatgcttcccagtttggcagatgtgagcaaactatgtataggaattccaaaggaatatcttgtaccggaattatcaagtgaagtacagtctctttggtccaaagctgctgacctctttgagtctgagggggccaaagtaattgaagtatcccttcctcacaccagttattcaattgtctgctaccatgtattgtgcacatcagaagtggcatcgaatatggcaagatttgatgggctacaatatggtcacagatgtgacattgatgtgtccactgaagccatgtatgctgcaaccagacgagaagggtttaatgatgtggtgagaggaagaattctctcaggaaactttttcttattaaaagaaaactatgaaaattattttgtcaaagcaccagaaagtgagacgcctcattgctaatgacttttgtaaatgcttttaactcctnggagtagatgtcctgcctaactcccaccaccttgagtgaggcagtaccataccttggagttcatcaaagaggacaacagaacccgaagtgcccaggatgatatttttacacaagctgtaaatatggcaggattgccagcagtgagtatccctgttgcactctcaaaccaagggttgccaataggactccagtttattggacgtgcgttttgtgaccagcagcttcttacagtagccagatggcttgaaaaacaagtaaagtttcctgttattcaacttcaagaacttatggatgattgttcatcaatccttgaaaattgaaaagttagccctctgtctctctaaaccagtaaacatatcttaccaaattaaaatgacttttaggctgggtgcagtggctcaacacctgtaatcctagcactctggaagcctgaggtgggtagatcacctgaggtcaggagttcgagaccagcctggccaagatagtggaaccccgtctctaccaaaactacaaaaaatttaactgggcgtggtggcaggtgcctgtaatcctagcaacatgggaggctgaagcaggagaatcacttgaaccctggaggtggaggttgcagtgaaccgagatcatgccactgcactgcactccagcctgggtgacaaagcaagactgtgtctcaaaataaataaataaaataaaataaaatgacgtacagagattctatattctagagagtcaaatggtcttgctcaattcttgtaattaggttcttgttaatacagtcattccatggaattactttttaaaattcctgtgacaattaataataaataacgtgtcagcatttaaaaaaaaaaaaaaaaagggcggccgct

SEQ ID NO: 145637 - DNA, 1936 bp, Homo sapiens
  misc_feature (1)...(1936): n = a,t,c or g
tttttttttttttttaaaaggatttaaaaattactcttttactttttattacaatagaataagtgatcaattaatagaattaaacaacttttcaattaaaacctactgcattacttttggggtttcacagcagcaggaaacaaacataaatccagttgaaagggcaaggctttccagaatccagtgccaagaaacagtctggtcttgattattcgggactagcaatggggaaatactggatacaggataatgccaaaaaccaatggaatgcatcgggcatactctcctttgtaacatcacattatctgaacacttttaaaatattccaggctaaggtaatttaaggccaaggcccatggaggctctggtttctggcaacaggttaggagttctcccccaggcaagcccggcagcacaattgctcccagagccaccctctggcccagaaaacggggccccatcatcatggcagaccttagaagcctccaccctggtgggaagcagccatctttctcaaagctctttatggctcacacaacccatggttaaaggaaaatgggaaagtgacatatgtaaagggcctttctcgaggactgagatgaactggaagacagacagactgtggcctccccagatcaggaaagaggcctccagaagtaaggggcccacatgccagatgaactccccacatgaaagaaactatcctgataaaggctgacccattttgctgataatcaagcagactgcatgtatatatgaatatatccataccataccatatggtaggtgaaatatatggtgtacatatttaaaatgggcatacacaccacatcacnaccacaacccagataaaataaatggtacatacattgctactatgaacactgcacgtcccagacagaccaatgactaatatgttcaattaaactacttgaattaaactactcttcctctccccaaaatattctgcttgcagcaaacatattccagttggctcaagcggtgttgtttcctaggttccctgagaaggaatggaatcgtccctcttgtttccagaacacctaacagaaagcccaactgccaacaggacccaagcctaaaacaaattccatatttgaatttgggcccatgaattccctcccacctattccttagtccacagggcatgaaaccttactcagaaagatatcaatttctttttcctacaactggctacagtatttactgtattatgttagatggaggggactgggggaaggcgggcagcaggcagtttacatgttggcaatcattcatttgctttcccttttaccaaaagaaaatgctactttaaaaaaaaaaaacacccagaaatttagagttcaataatgaattttgctttcttggcacatttttgaaatgatcatatcattacatgtagctaggtcttttatcctcctggaatgctcctcctagggaggcaaggtatctaaacaacaaaataaccctacaaaaaaagttaatattgtgagcagtctcaatttgtagttattaaactcaaagtctaatgctgaaaggcaacagtaatttaaacagatttgtttatttttattattattttttgagatggagtcttgctctgtcactctggctggagtgcagtggcacaatctctgctcactgcaatctccatctcccaggttcaagtgattctcctgcctcagcctccccagtaactgggattacaggcacatgccaccatgcccagctaatttttttgtatttttattacatgacggggtttcgccatgttgctcaggttggtgtcgaactcctgggctcaagcaatccacctgccttggcttcccaaagtgctgggattacaggcacctgccccagatttataatgctattcacagatcttgcagaattataacaggctccttctacaacttgg

SEQ ID NO: 145638 - DNA, 4255 bp, Homo sapiens
  misc_feature (1)...(4255): n = a,t,c or g
ggaattcgcctgggcgggctgggaggcgcgggttgaaaagtctcgtttcaagtttggagagagagagaagagcgcctcagacctcggtacccgcgagcggggaggaggcaggaaagaaggacgcggcgtctggggagcacccaggcagcaagacggggcccgggctttcgacagtggggagtgtgacgcgcttgggaaaggcaggagcgccagcggtcgggctgctcttggctaacgagaggagtccgaggcggcggcgaggggcgaacgacccgacgcaagatggcgagtaaagagatgtttgaagatactgtggaggagcgtgtcatcaatgaagaatataaaatctggaagaagaatacaccgtttctatatgacctggttatgacccatgctcttcagtggcccagtcttaccgttcagtggcttccttgaaagtgactaaacctgaaggaaaagaacatgccccttcattgggctagggctggggactcatacgtctgattgaagcagaatcatcttggtggttgctcgagtacatattcccaatgatgattcacagtttgatgctttcccattgtgacagtgacaagggtgaatttggtggctttggttctgtaacaggaaaaattgaatgtgaaattaaaatcaattcacgaaggagaagttaaaccgtgctcgttaacatggccgcagaatccttcacatccattgcttacaaaaacaccctcttgcttgatggtgttggtttttgactatacaaaacaccctgctaaaccagacccaagtggagaatgtaatcctgatctcacgattaagaggtcaccacaaggaaggctatggtctctcctggaattcaaatttgagtggacatctcctaagtgcatctgatgaccatacctgtttgtctgtgggatataaacgcaggaccaaaagaaggcaaaattgtggatgctaaagccatctttactggccactcagctgttgtagaggatgtggcctgggcacctgctgcacgagtcattgtttgggatctgttgctgatgatcagaaacttatggatatggggacaccaggtcccaataccacctcccaaggccgagttcacttgggtgggatgcggcacactgcccgaagtcaactgcctctcattcaatccctacagcgaatttattctagccaccggctctgcggagtaagaccgtaggctttatgggatctgcgtaacttaagattaaacctccataccttcgaatctcataaagattgaaattttccagggtccactggtctccacataatgaaactatttttggcttcaagtgtacctgccgccggcctgaatgtgtgggatttaagtaaaattgggaaagaacaatcaccagaagatgcagaaaatgggcctccagaaattcctgttaattcatgaaggacaccatggttaagatttcagattttagctgggaccccccaatgaagccttgggtcatttgctcaagtgtctgaggataaccatcatgcagatatggcaaaatggcctgaaaatattttacaatgatgaaagagtcagatgtcacgaccatccgaaactggagggcaaaggatcttaaaccccaaagtacgagaaatgtntcccttttnngggtttnttngnaaanaaaatttnggntaatgctacatgaatgcttgatttatcaaagcgcctaaaaaggcattgtatagtaggaaatgtaaagtggggtggctttatggcttctttatcctcatgattctagcactttcaagtgagcatgttgcgtactgtatcatattgtagctattagggaagagaagaatgttgcttaagaaagaacatcaccattgattttaaatacaagtagcagggtattgcctttgattcaactgttttaagtcctcattttctcaaactaagtgcttgctgttcccaaatatgcaagaataacttttacactttttccttccaacacttcttgattggctttgcagaaataaagttttaaaataaaacttgtgtttttttaaaagcttagtggggggtggcgggggagtctactttttgagtagaaatgggtaaaatggtacctttggactcctacagttaaggtcacatggataatgaaagaatacacagaagctgttaagtttatcatacatatttacttaatctatacagaatcaagtagataaaatcagattcacattagtgaaaaatctctacaaaatgtctttgaaaagcaaaacgagactgcctcttaacaattcgtatcctcatgaaagacgtgggctgtaaaaataaagcagtgtgtttagcacaaactagaagatatctgcatcatttttttcacagttatttccatctacagtctgaaagaggtagatttttctgcaacacctgagaattgaattgtgataaccaggtgtaataaaggcagttgcatacataactgaaaaatactggtctcaagaccaaggaaatgtactcctaacaagtctgagggatggaaatgggtccatatttacccaagacccaagttttctgctacaccttgggagtccaccgccaatataaataatacacatcacgattccatggatggtgcaccaattgcaatttaagtgaattcaacgtttaaaccttttctgggccagcctagtagcattacagtgttctagaatatggtagatacggggtgcgctacaaagcctcaacgctgggctggtgaggtgatcactgtaggtagatgtccttctcagggggtcccatttgtttttattcacagggtaatgggaggaagggttctgaaaggacaacaaatgcatcccgggcagaatccatatcctttaaacactataatagcatctagctaaaaatgcaaagtaagccaaaagcagcaggccaagtactgttaatcacaatgctttaaagcccttgaaagtatgcaacaggcccatgatgtacatttttccacacaggacaagcaccgcaaagaaacgtggtgggctacacgaatggcttaataaaatggttaagagctgtacatccagcagagttcttgtgaaataatgtgatcattagtactaattttaaggtggattatatttctgatctatacctgcattcccccccaccaccagggaaatgagtctagtattttagtagcagaacagggtgtactcctacacaggctgttggagggtggtgttttttgcttctgactcattttggatggtaattaggataatctactttgtggatttattttcctccactgtggccccttgaattaacatgactgatagtggaggcttagatacaaccctcctccactccaggcggtttcctatctatctatctgttggacaattttcaattctttcaacccagtttcgaccatggaatgtgacaggacttttacaaataacacttgtaacaaagagaaaacccttttaactggacaaaacagagtttattcagtccagtaagcaatttaacaagtgtcagtctgatagttttgctcaggtggaatgtgctaacatcagttctagtagaaccttttatttcataaagcatttcaatgcaaattataccaggggacaaagtcaaaacttccatcaggtgcagcctgattaatcatctgcataactgcgccacattcaacattgaaacaaagaactaattcaaaagttatgtgcttaatttcaaattttcccccagtccaagtgtagagaccttgataatactgtggcttttcttttttcttcttaaaaaagagattggaactaagaagggggtgagaaaacagactgaacacgtaagtaacagatcatgactaacactctgccaagtcttcccaaagtaaaaatgttggtgccagtgtttgttttggaaatgaaaatcaatttcggttggtactgatccataatgaaaattcccttttgaaaaacctggagtactttgctggtggaatttctgtagtaactttcaagtagccacaaggtattggagaaccttctgcctagtgaaagtgacacgtgaattgaccgtccttgtctttgacaagggacttcattgagcggcaaacatgaacaccagttttcaaagaataagtggccttctatgggaagtggagaatatgtcctgaaatcccaaatcagactcaaacacaaaccgccatcctatacgggagcccctcatggtcggacgcgtgggcgcacgcgtggacgcacgcgtggg

SEQ ID NO: 145639 - DNA, 662 bp, Homo sapiens
gatttctcttggctcctgtggaggtgagtgaagggtcttttgctgaaatttgggggcaaataaccggagtaggtttgttcctgtgccttggcgagtcgccggcctgctgggaacggggactttctaaaagggaccttatgtctgtgaaggcttgtggtcccaaggcccatttttgcctgggctataaagccgggggtctcccgggaacccaaaggggagccacacaggctcttctttaaaaatttgaaggtgtttacgcccggaggatgaaaccggattccaatttgggccaggagatgcgcttatgtagtataaagcaaagaagtaagtttatgacactgcaacacagtcactcctgggcggcaaaccaaacaaaacccagagtcatctgggggaaaagtaaactcggggcccatgggaaacagtgggcatggttcgtgcccaaattcccgaaggcaatctttcctgcctaaaggccatttggacacaggaatccggagtgatggttgttacccctcaaggattttaaacttaacggaaaaatccaattaaattaaatgttggatttgtgctccttggtatttttaaagtgggatttaaaaaacttactacctttaggacagacaaagggagaaaaggtcgacgcgccgacgtatgagagt

SEQ ID NO: 145640 - DNA, 1413 bp, Homo sapiens
tgctctctgtgagccgcaacctttccaagggagtggttgtgtgatcgccatcttagggagaaagatgttctcgtccgtggcgcactctggcgcgggcgaaccccttcaacacgccacatcctgcagctggtgcacgatggtctcggggacctccgcagcagctccccagggcccacgggcaagccccgccgcccctcgcaaccatggcagccgccgccgtggaagagcagtatagctgtgactatggatctggcagattctttatcctttgtggacttggaggaattattagctgtggcacaacacatacaagcattggttcctctagatcctggttaaatgcagaatgaaggttggacccccaaaagtacaaagggcatatttaacggatttctcaagttacacttaaagaggatggtgttccgtggtttggctaaaggattggctccgacttttccttggctactccatgcagggactctgcaagtttggcttttatgaagtctttaaaagtcttgtataggcatatgcttggagaggagaatacttatctctggcgcacatcactataatttggctgcctatgcccgtgctgaattctttgctgacattgccctggcttcctatggaagctgctaaggttcgaattcaaacccagcccaggttatgccaaacactttgaggggatgcagctccccaaaatgtattaaggaagaaggccttacaagcattcttacaagaggggtgctccctctctggatgagacagataccatacaccatgaattgaagttccccatgccttgaacgtactgtttgaagccactgtacaagtttgtggttccctaagcccccgcagtgaaatgttcaaaagccagagcagcttggttgtaaccatttggtagcaggttaccatagctcgagtcttttgtgccaattgtttctcaccccgtgctgattctgtggtatctggtgttgaataaaggaaaaaggtagccagtgctttctctggtccctcaaagagacttgggatttaaaaggtgtaatggaagggactgtttgcccgtatcatccatgattggtacccctgactgcacttacagtggtttatctattgactccgtgaaggtctacttcagaccttcctcgccctcctccaccccgagatgcaagagtcttttgaagaagaagcttggggttaactccagtagttagatcaaagcaaattgtggactgaatctgcttgttgatccagtgtttgaagaaagtgcaaaaggaacttttatatatttgacagtgtaggaaattgtctattcctgatataattactgtagtactcttgcttaaggcaagaagtttcagatttactgttgtaaataaacccgaactcttcatgaaaaaaaaacaacaaaaa

SEQ ID NO: 145641 - DNA, 3013 bp, Homo sapiens
  misc_feature (1)...(3013): n = a,t,c or g
gtgttagaagcgctggtaggccttggagaggcgggttaggaaaagtggagactgctgcacggactctggaaccatgaacatatttgatcgaaaggatcacttttgatgcgcttttaaaattttctcatataaccccgtcaacgcagcaggcaccatgaagaaggtctatgcaagttttgcccctttgttattttggtgccgcctgcaggggcctatgtcaatatggtcactcattttcattcaggctggcctgcatgtctgccctgggcctccctaatattgatgatttggctgatggcaacccctcatagcccatgaaactgaacagaaaagactggggacttctttgctgggattttgcattccttacaggaagttgggcctgggccctgccctgggaagttttgtaattgctgtcaaacgccaggcatcccttccgactgctttcatggggcacagcaatggatctttccctgctttcaccctcagtgcactcctatgccaaggccccgtagctacctctttctgggaaggtatcttggatgtcagccctgagcttggttgccttttgccttcccctggggaaatgttttcttttggatcccattttgggttttccaggcaaaacctgtatgttggaactggtggtcatgtgtgggcttcgtcctttttgatactcaactcattatttgaaaaggccgaacagggagatcaagattataatctgggcactgcaattgatctcttcttagattttcattactgtctttcagaaaaactcaatgaaggatcctgggccatgaatgaaaaaggataagaagaaaaggagaagaaatgaagtgaccatccagcctttcccaatttagacttcctctccttccacccctcatttccttttttgcacacattacaggtggtgtgttctgtgataactgaaaagcatcagaaaagcttttgtactttgtggtttcctctattttgaattttttgatcaaaaaactggattagcagaatatagtttggagtttggcttcatcctccctggggttcccctcactcccttttttgtcaaccccatctgtagcctcttcctctactcaggcaagtcgacccgccacgatgagaagtggggaccaggcagaggggcgccaacttcaggagtcccgcttttcccaccaggcttcattcacccagtggaacctgaactgtttgggtagagccacccggcccttccttccttcattgttgtttggtatgcgcacagttcctgtgggactggggccgtgagtttttccattgggaaagaagtttcagtgggtcccattgtttaactcagccttcaaatcttcaactgtcagggccctacaaagaaaatgggagagcctcttctgggtgggatgctttgctccctctgagctgcccatgctggtctggcaaacacacctttctgctttgccttcacaaaagacaacgtgtgtgacttgtccaaccccttgcctgaccctcagggagtcagcctgcttccatccatgggtgggaagacttcagcacaaaggaaagactaattcttgtcaggcatttttgaaaaggctgattatgtgtatcaaggtacagcatcgtagggttcccctaaacttgccctgtttttgtttttttagtttgttatccccttactgagcggcctctactaggtggctgtgattaaatgtcccaagcaaggatagggaaggggaatggttgagcctctggagatcattgtaaccaatcctgccagaacctgtttggggcagtggggagcaaacctagataaggacctgtttggggcagcagggagcaaaatctcctttaacaaccaagcagttcctcattcacattcaacagagcgaggctgttgataactttagggaggccagcaatccttaatagttccttcagtggcatttttagtcttgtctcccaactgggacaccagtaggtagtgtcaagccagagattcggggcagtagataaatgttcattttacttgatgcactttagtttttgggtctgttacctgttttccagaaatttgtgggcctttttaggcgggaagttaggcgaccaaaccagtgagagcccccaatcccctgcagttttgtggctttcaagtgtgggtggacagtcctaatggggatctccagctccttccctgtgggctgccacagacagctacccccaggaagggtcaaaatgttgggaaagtggttgtggcctcctgaagcctgcctcctaaagagcttcaagtgtgaagagggatcgaagccattgaaaagctcaattacccaagtaggnacaataaatttttggctctccccctattcaacaacccagtgcaacaagtttgaacaacaagtggccctcaaggttcaacaagtgcaccatgttcactgtgcttattcctacggaaatcatttgtttcctaaagttgtgtttattccctggagtgacatgcccaccccggaaatggctccactttccactgaggatgctgtcctctgatttaacttgctgcctccagcctctggtttggaggaactttacttaaaggcactttccttcctgtttaaacccccctgttaaactctcccataaaatttggggattctcctgctaggccctaagattttgagtttaacatctcttggaagccaaacttccaccttctgtgcttttttgcttgggataatggagtttttctttaggaaacagtgcccaggaatgacaagatattaaaaaaaaaaaagaaagaaaaaaaaaataaacacctacttttaaagaaaatacctaacagatttttaatatagttatctctaccactttcttttctagtttcttgattttcagctcaggctgcattctaactcatactgtgaagacaaaggtgtttttgattcagaaatatatgaaatctgcatagtcttaatttgtaaaaaataaagaaaattccttaacctttaaaaaaaaaaaaaaaaaa

SEQ ID NO: 145642 - DNA, 622 bp, Homo sapiens
aggatccttaattaaattaatccccccccccccctcccccgttctttctcgactccatctttcgcggtagctggggaccgccggtttagttcgccaataatgcagcctctttgttccgcgtcccaggagcttacaaccccttcgaagggtgaccggcccaggaaacgggtcgccccagatcaaaggctcatgtagcctcaacatggagggcatttcccccggaagatcaagtcgtgctcctggcaggcgcgccccctgggaggatgaggcccacttctgggccaagtgcggggtggaggcccttgactaccctggaagtaaccaggcccgcatgcttggaaggtaaaagtccatggttcccttggcccgtgcttggaaaagtgatgaaggtcagactcctaaaggtggccaaacaaggagaaagaagaaagaagaagacaggttcgggctaaagcggccggattcaagttacaaccggcgcttttgtcaaacgttgttgcccaccctttggcaagaaagaagggccccaatggccaacctcttaaagtctttttgtaaattcttggctttctcctaataaaaaagccacttagttcaaaaaaaaaaaaaaaagtcgacgcgg

SEQ ID NO: 145643 - DNA, 495 bp, Homo sapiens
ggcacgaggtggttttgtctgctgcgcccgctcttcgcgctctcggttcattttctgcagcgcgccggcaggatggcccacaagcagatctactactcggacaagtacttcgacgaacactacgagtaccggcatgttatgttacccagagaactttccaaacaagtacctaaaactcatctgatgtctgaagaggagtggaggagacttggtgtccaacagagtctaggctgggttcattacatgattcatgagccaggtaagctatgctatgttatagtaaagcagtaattgttgaaatattggtggttatggttgtcaaaattttaaaaatatcattgacatcaaatgatatctgaaagtaactgttctgataagtttttttttttaatgactaatttcttgactctggagagagttccaattttatggtaaataaaataccacagcagtgaaagtaacacattattctacttggaaaataatgtaagaagt

SEQ ID NO: 145644 - DNA, 646 bp, Homo sapiens
ggcacgagcggcgagttgttgcctgggctggacgtggttttgtctgctgcgcccgctcttcgcgctctcgtgtcattttctgcagcgcgccagcagggatggcccacaagcagatctaatactcgggacaagtacttcgaagaaacactacgagtaccggtttgttatgttaccccagagaactttccaaacaagtacctaaaactcatctgatgtctgaagaggagtggaggagaacttggtgtccaacagaagtcctaggctgggttcattaccatgattcatgagcccagaaccacatattcttctctttagaccgacctcttccgaaaagctcaacaaaaatgaagtttatctcggggatcgtcaaatcttgtttcaaatttaatgtatatgtggtatataaggtagtattcagtgaatacttggagaaatgttcaaatctttcatccatacctgtgcatgagctgtattcttcacagcaacagagctcgagttaaatgcaactgcaagtaggttactgtaagatgtttaagataaaagttcttccagtcagttttttcccttaagtgccggtttgagtttactgaaacagtttacttttgttcaataaagtttgtatgttgcatttaaaaaaaaaaaaaaa

SEQ ID NO: 145645 - DNA, 565 bp, Homo sapiens
  misc_feature (1)...(565): n = a,t,c or g
ttgaacctgctcatgtccccacaagggcaggtgctgagtgcccatgtgtcgggccgggtggtgatgaagagctacctgagtggcatgcctgaatgcaagtttgggatgaatgacaagattgttattgaaaagcagggcaaaggcacagctgatgaaacaagcaagagcgggaagcaatcaattgccattgatgactgcaccttccaccagtgtgtgcgactcagcaagtttgactctgaacgcagcatcagctttatcccgccagatggagagtttgagcttatgaggtatcgcacaaccaaggacatcatcctgtccttccgggtgatcccgctagtgcgagaagtgggacgcaccaaactggaggtcaaggtggtcatcaagtccaactttaaaccctcactgctggctcagagctccccgaaaggccagtaatggatccccggcctcagtccctactctgctttgggatagtgtgagcttcattttgtacacgtgtgattcgtccagttacaaacccaataaactctgtagagtggnnnnnnnnnnnnnnnnnnnnnnnnnn

SEQ ID NO: 145646 - DNA, 1981 bp, Homo sapiens
tttcgtggacatcttgggatccggagagtggccgggccggcaggagcagggggccgaggacaccaggtctgttctcagagcgatgggccgcggagactgatctgccgccatgattggaggcttattcatctataatcacaagggggaggtgctcatctcccgagtctaccgagatgacatcgggaggaacgcagtggaatgcctttcgggtcaatgttatccatgcccggcagcaggtgcgcagccccgttcaccaacatttgcttcgcaccagcttcttccacgtttaaggcggtccaacatttggctgggcagcagttcaccaaggcagaattttcaacggttgccatggtcttcgaattcctctataagatgtgtgacgtgatggctgcctactttggcaagatcagctgaggaaaacattcaagaacaattttgtggttcattatatggagctgctggatgagattctagaatttggctacccacaagaattccgagacagggcgcgctgaaaaccttcatgcacgcagcagggcattcaaggagttcaggcttcagacaaaaggagggcagttcacagttcaccagccaggtaactgggcagattggctggcggcgagagggtatcaagtatcgtcggaatgagctcttcctggatgtgctggagagtgtgaacctgctcatgtccccacaagggcaggtgctgagtgcccatgtgtcgggcccgggtgggtgatgaaaaactacctgagtggcatgcctgaatgcaagtttgggatgaatgacaagattgttattgaaaagcagggcaaaggcacagctgatgaaaccaagcaagagccgggaagcaatcaattgccattgatgacttgcacctttccacccagtgtgtgcgactcagccaagtttgactctgaacgcagcatcagctttatcccgccagatggagagtttgagcttatgaggtatcgcacaaccaaggacatcatccttcccttccgggtgatcccgctagtgcgagaagtgggacgcaccaaactggaggtcaaggtggtcatcaagtccaactttaaaccctcactggctgggctcagaagatcgaggtgaggatccaacccccactgaacacaaggcggggtgcaggtgatctgcatgaaggggaaggccaagtacaagggccggcgaaaattcctttgtgtggaagatcaagtcgcatggcaggcatgatagaatacgcatatcatctcagagattgggtttcttcctaacaaagaaaagaagaaagggggctgcccccccctttttccaagaaattttgggttcaaattcgcgccctctggcctcaaggtgggctaacttgaagggtgttgaacccgaagctgaactacagcgaccatgatgtcatcaaatgggtgcgctaaaattggccgcaagtggcatttatgaaaactcggcttgtaaggccactaggcagctagcccaacttccccagccacccttccttcaacaggtccaggtgccgctccttccccaaaccacacatcaagtgtctccctcccctccctgctttgcctgcccttcccctttgcaaccaagccccgaagtcttaggtctgggccaaagcaacattacaaagtgggaccggtggaagcaacccctgggctcccctgggcaggggagttctgaaggctcctgctctccccatccacctgtctgttcctggcctaatgcccaggctctgagttctgtgacccaaagcccaggtgggttccctttccttccccacccctgtggccacagctctggagtgggagggttggttgcccctcacctcagagctcccccaaaggccagtgaatggatccccggcctcagtccctactctgctttgggatagtgtgagcttcattttgtaacaagtgtgacttcgtccagttacaaacccaataaactctgtagagtggaaaaaaaaaaaaaa

SEQ ID NO: 145647 - DNA, 2675 bp, Homo sapiens
  misc_feature (1)...(2675): n = a,t,c or g
acattcacttggccctaggcacaggcaggtgaccaggcaaaggtcagcacccaatggtccccaaagaagcccgggttgccaaccccacttaccctaagtgcccccacacccaaaacccccgcccgccctactccctgtgcctacccaacatagccacacgaatttccaagtaacagcaagttgtagcagtagttgtcactggctcacagcagctcactctcaacctgaggaaggttacagtagatcagtcataaacaggtgagggttatgcaggcactgaggccactgatatcacccacccacaacttaggaatcaacagtgggtccctagatgtaagccttttccaatttgtgacttgaaaatacaaccagaaagaaattatttattttttttgagacaagagtctcactctgtcacccaggctggagtgcagtggtgtgatctcggctcactgcaacctctgccttcccgggttcaagctattctcctgccttcagcctcccgagtagctgggactacagatgtgcaccaccacgcccagctaatttttgtatttttagtagagatggggtttcaccatgttggccaggatggtcttgatctcttgacctgctgatccacccaccttggccctcctcaaagtcctgggattacaggcgtgagcccaccgagcccagcccctcccttaaaacagtttctaaatcagaatccgttattttacccaaaatgggttgaagggaacaaaaaaccaaccctcatcaaccctaatttgggtgaaaaataaatataaaaaaaagatgatcctcctcttaaaagggtcaccttccttcagggggntttgtaagactcagcactttaaaaagcttgaaacagaagtccggtattgccactgtggactgtttttgaggcaagttccctaatgtggacagccccacacctaagagcagcagatctaacttggaacgtctcaaccatgggttaaaatcagacgggatgaaagaacacctcaggtgactctcaacagctacggaagtctcacattgcagggctgactgatgaggtgctggcttcttattctccggccctctttcctaagcaatgtttgtcagggaataccaggtccgcttcctgaaatgccagggcccctctaggaccttatcattccacagccacatcagtaataggaaaaccaccaatggctacctggaggtggcaccaacttggaaagggaaggctgggcaggggtttggacactaagcccatgagctgtttggacaacttcaatctctggaattgagtttaaatttctgtaaacaactttaaagtcaactctagagagacattttgtgtgactggtccaaataaaacagcacatttaatgaggtcagattcttcgttgaaactttttaagagaagcaaaatcaatggaaaagccattaaaatttacacaaagaccattaaaactctactagtgtcaattaaaacaaagccaataaaacatgaacaacttcaaagttaccatcactttccacactgttctacagctataggaatatattcaagcaccatattgataataggtaggtaaacgatggaagtcctacttttggcggtctgacccacgctcacacaaacgaggagcttcctagtcaagatgcccccagtccttgggcaatgtgcctgcttcctgggcattgctcagtggcaatggaagagccaataaatcaaatcgctggtggaatattttactttgaaatggagtgatgtttggttaataatttgagacccactaatccctaaatggggtgaccccatttaaaatggccctctgtgtaaattccacagttccattaaatagagtcctggtttgaacaggtcattatgtagttagtataataagtaatggattgagccaaggatggctgggggataccccatggggacacactggctgagtcctggtggctttcataacactgtcaagctttcttttaatgtgagattcatttaaatcacccaacttaaatttaggtggttttgcccttagtaacctcttttggtttacagtagaaaatgcagtgccaaaaattttaaaatgaggaatattcccatttacaattaatttaaaacttatgaagctgttttaactggcccatctaaatgtgttaattaacatcaatgatggtttcttatttttcacactttgttactctgatcattaacagtgatggaaaagctaaattaagttaatggggaacggattataaattcttaaaggacttcttaagtttgttttcaactggaaaatatatagagaaagatgaaggggcatttttgcctctactcatcaatttttggtaccaaaatttcttaaaaaccagatggtttaaagaaaatttttccaaaaattatgttaacattctgctcagacatggctgctaaaaaaatagcatatacacatataatactgaacagcttctgcagtgcctgtaaactctcagctcattttctctttctaaaaaaaatatatattataactgatcccagaactcaatctctattgtgcagcagtatcaaaggtccttaaattctcaacaatgaaggaaaaacaaaaaaccattccccggaccgcttgagcaggactagggaaggaggagtccgtggatgcaaaggt

SEQ ID NO: 145648 - DNA, 466 bp, Homo sapiens; identical to SEQ ID NO: 114486

SEQ ID NO: 145649 - DNA, 786 bp, Homo sapiens; identical to SEQ ID NO: 114487

SEQ ID NO: 145650 - DNA, 1153 bp, Homo sapiens
cggacgcgtgggcggaaaatggcgcctcacgacccgggtagtcttacgaccctggtgcgcctgggctgccgccctgctcctcgctctgggcgtggaaagggctctggcgctacccgaggtacagaagcaagtttgaggtcgggctgaagcagggtcgctggccagccagtgcgtcgcgctcgccagcggctcccccgttctcctcggcgggcctgcggttctgatttcgtccctgacgcttcccgaccctgcccagccagatatgcacccaatgtccagggagcgtgcaaaatttgtcaaaagtggccttttattgtaaaaccgacacgaagagctaatgcttgcatgccccgttgctgcctgaatcagaagggcaccatctttgggggctggatctccagaacttgttctcttggaagaccctggtcaaaacttttcaatcaggcacataaccactgtcatcatagaacttgcaagcaaaccccctcacaggtgacttggccaacaccttcccgtggctttactcagctccagactctgatactgccacaacatgtcaacttgtcctggaggaattaatgcctgggaatactatcacctcttatatagacaaccaaatctgtcaaggggcaaaagaacctttgcaataaccactggggaccccagaaaatgtgtccctgaaaaagggatcttgtgttacctgaatggtcccaaggtcttttggcagtgtggtttgtgctggatggtttcccatgggatacaaagtgtattgcccccagggctcgttcctcactgccttatgttccttcgggaattttgggagcccacccactctatccgtctcccattcttgcttttggcggacccagcgcctgaaaagccaaggactttcatggaacttacatagggtctttaccatttgaccttaagatcaatctggaactatctttagccccagtcaggggagctctgcttcctaggaaaggcatctttcgcccagtgggatttcgcctcaaaggttgaaggccgccattgggaaggatggaaaaattggcactcccttggtgttaggacaaattaccagtttcccatttgggtgtttgttggcctataaattaaacacttttttctttttaaaaaaaaaaaaaaaaaa

SEQ ID NO: 145651 - DNA, 404 bp, Homo sapiens
  misc_feature (1)...(404): n = a,t,c or g
agcgataaccccggtaaccccatcnagttcagagccaaaatttgccnggaaaagacatctgcagttccactgacagggggcaggaatatgagaggacacctgatacttcgggggcccgcgtcatagagcgaccatatcttactgtcatcatcatccacaataatctgccgtggccgcccccacgtcccttcccctccttcaggaggccgctcttcgctccagtacgagcgcgggccgtggaggcggctgggcccgggtcggggcgggcggcggagcactcgggacccacgggcacagcaggctgcgcggtgcgtgcgggaggccggcctctgagggggcggggcgcgtggccgagcgagcttgggccgccgcgctccccccgcccgaccgccgctcctcgtgcc

SEQ ID NO: 145652 - DNA, 308 bp, Homo sapiens
ggattgtcttcatatgaaaggaatacttagggtaacatttccataatgtgaaaagaacatattaaaacactagttgattacagctttctgtatgtgtgtgtgtgttttacctttcctatggtgctgaagctttgtgttttttaaaggtgtttgatcagagtgcgctttcaactgaagctaaagaagaaatgtacaagctgtatcctaatgcccgaagagctcatctgaaaacaggaggcaatttcccatacctgtgcagaagtgcagaggtcaatctttatgtacagatacatttgctgcaattccat

SEQ ID NO: 145653 - DNA, 400 bp, Homo sapiens
cccctcagagccaaaatctcccgagaaagaacatatgcagttctccactcacaggggacagaaatatgagaggacacctgatacttcgggggcccgcgtcatagagcgaccatatcttactgtcatcatcatccacaataatctggagggaaggttaaaagaaaaaagtggaaaaccttataaatttgctttttatgttattttacgctgtcatttcactgacaattttactactgctgccttgtttgttacaaggtaacctggagctcacaccagattagcatgcatgacaagctcctgtgatctccttttctttcctcagggctaacgtattccacagagctacttagaactactttataatcttccaaagggctgatgcttctctgattcttccagt

SEQ ID NO: 145654 - DNA, 1832 bp, Homo sapiens
  misc_feature (1)...(1832): n = a,t,c or g
ccttcgatcttctgtccagcgtggaggaatgcgggtcccgagtgctccgccgcccgccccgacccgggcccaaccgactgcacgggccgcgctcgtactggagcgaagagcggcctcctgaaggaagggaagggacgtgggggcggccacggcaggattaacctccatttcagctaatcatgggagagattaaagtctctcctgattataactggtttagaggtacagttccccttaaaaagattattgtggatgatgatgacagtaagatatggtcgctctatgacgcgggcccccgaagtatcaggtgtcctctcatattcctgccccctgtcaagtggaactgcaagatgtctttttcccggcagattttggctctgacctggatggggttaaccgggttaatcgcttttgcagtaatcccagtttattgcgaccatctcgagttctgtgatggattcagaaaactgttagaccatttacaattgggataaagttcatctttttgggcgcttctttgggaagggtctttggcccatgcgatttgcnggaatacctttacaaatctcctagagtcccattcccctaatcctctgcaattccctcagtggacacctctatcttcaaccaaacttgggactgcaaacagcttttggcctgatgccctgcatttatgcttcaaaaaaatagttccttgggaaatttttcatcctgggccgggtggaccctatggatgggctggatgccatttggattttcatgggtaggacagggcttaggaaagttttggggtccaggagttgaacttggcttttcaaggacttaccttggaattgtcaaaattcttatgtgggaaccttcattaaaattcggggacatacctgtaaactatttatgggatgtgtttggatccaggaggtggcgcttttcaactgaagctaaagaagaaatggtacaagctgtatcctaatggcccgaagaagctccatctgaaaacaggaggcaatttcccatacctgtgcagaagtgcagagggcaatccttatggtacagatacatttgctgcaattccatggaaccaaatacgcggccattgacccatcaatggtcagtgccgaggagcttgaggtgcagaaaggcagccttggcatcagccaggaggagcagtagtgtgtcctcctcgcctgtcaatgatgagttgaccccggtgtgttccttgtatagtcagtgggcattcagcacccgttcagaccggccttttcccttccaggttccgtcagggctcacccggggtcctcactggggtctggggaaagtaggactggatggtcatcttccatgaccaggcggcatctcccactaagccctgtgtaactgttcccctctttgggttttcttaggcttttggaaatttgaagaaagtacttttgaagactccccattttaaagaacccgtgccaaatttgcttacccaaaagtcttcacccactgtgttcttaagtgaatgttaatttctcgaggtttggggactttgtgggtgggtttttttcttctttttctttttccattcttcatttctttctttttatattgtttgctgtaaatgctgcacatccagattgcatatcaggacgattggttattttatgctttcttgggatataaccatgatcagagtgcccagggcactaccccactggtttgctctcctgcaaatcaactgcttttaatttacacttaaacaaattgttttgagtgttagctactgcctttctagatattacgtcatttggaataaaaattcaatttccctgaaaaaaaaaaaaaaaaaa

SEQ ID NO: 145655 - DNA, 1545 bp, Homo sapiens
  misc_feature (1)...(1545): n = a,t,c or g
tcagntggggcggcggagagagcctgcagttattaggccagtgacttgcagaggcacagtattgcccagctggatccagaggccttgggaaacattaagaagctctccaaccgtcttcgcccaaatcttgcagcagcattacggacccacaaatgagacaccaaagttgacaggatggacttttaatggggcacttctgggaccctgaagagacttcttcccttcaggcttattgtttgagtgtgaagttccagagcaaggacgccatgttcctctaagggaattcaggaattcagacgtgctattcccacaccagttaggtagagctgtctgttcaccctcccatcccagctgatcccaggtcactgcttgctggggccatgccatggaagcttcccatcagtctcccagctgaatcctccctgctctctgagctgctgccttttgcctcctgcaactcaacatcctcttcaccctgccctgcctgcagttgatggggcgaagaagaaccctgtgttctcaggaagactgcctccaccaccgctacccagagaacctctgcatctggcatttctgctctctatgcttgagaccgggaggtttaggctcagataagtgagctctgggccatgagagggtaggtccagaaggtggggggaactgtacagatcagcagagcaggacagttggcagcagtgacctcagtagggaacatgtccgtctaccctctcgcactcatgacacctccccctaccaagccctcctcttcctcctcctcctcctcctgtgggaaggtggtcagtgggacttagggatctttcacctgctgtgcccagtagttctgaagtctgcttgtggagaagtgttttatgtttaatccctggttactgaaagaaccaaatactggggtggagacaacttccatgtcttgctcttctacctccctagttagtggaaatttgggataaagggaaactgtagggcccagattcctggaggttttatgtcattggccacagaataaactgtctctaagctatccatggtccaagtggtccctgccaagtctgtagacttcagagagcacttctctcttatggggttcatgggaacaggggtgggtgtgacttgcttggtggcctcattccatgtgtgcctgtgcctggggcatggactttgttaagcagagtcagcagtgaggtcctaattctccaagccagcctctctgccctggagaatcatgtgctaatgttctaagaatttgagaactagagtcctcatccccaggcttgaaggcacatggctttctcatggtagggctctctgtggtatttgttattattttgcaacaaggaccattttagtaaaacagtcctgttcaagttgtattcttttaagttcttttattctcctttccctgagatttttgtatatattgttctgagtaatggtatctttgagctgattgttctaatcagagctgggtacctactttcaataaattctggttttgtgttttcttttgtaaaaaaaaaaaaaaaaaaa

SEQ ID NO: 145656 - DNA, 320 bp, Homo sapiens
  misc_feature (1)...(320): n = a,t,c or g
cattttttttaatggcagttcttatatagctcgaacattaagatcaacaaattctcagatgaagtacattaataagacacctcagaagtgaaacaaacctagtttttactaaaatgatgggataaaggtagtgtctatgctgaagagcagcttcacttgtttccccacagaaaaaggcccaaaatttttggaggataatttaaaaactaagccnnnnnnnnnnnnnnnnnnnnnnnnnnnnnnnnnnnnnnnnnnnnnnnnnnnnnnnnnnnnnnnnnnnnnnnnnnnnnnnnnnnnnnnnnnnnnnnnnnntctcgtgc

SEQ ID NO: 145657 - DNA, 2603 bp, Homo sapiens
ctggaagtatagtctccagccagttactctcatgatagtactgctataaaactcattcttgtgtggtgttctgtgctatagagtctgtgtattgctgttcatattcggagttctggttttgtttttcccttaaaacctgttaacagttttttttgggggtggggggattcagaactcttgtttcccattccatagcacctgacattatttcaagttttataatatcttaaggtgtatattttattttttttattggcttagttgttttttgttttgttttgtttgacgatggacgtttcactgttgcccaggctggggtgcaatggtgtgatcttggctcactgcagcctccagcctcccgagttcaaatgattctccctggcctcagcttcctgagtagctggggattacaggtgcatgccaccatgcccggctaatttttatatttttattagagacgggatttcgcccatgttaacccaggctggtctcgaactccctgaccctcagggtgatctgccccgccttggcctcccaaagtgctggggattacagggcatgagccaccgtgcctggccttattggcttagtttttaaattatcctccaaaaattttgggccttttatctgtggggaaacaagtgaagctgctcttcagcatagacactacctttatcccatcattttagtaaaaactaggtttgtttcacttctgaggtgtcttattaatgtacttcatctgagaatttgttgatcttaatgttcgagctatataagaactgccattaaaaaaaatgggataatagatgattttatcagtatacctgtggaatatgtacaaactggatctatagatattttgaactggaccaggtgggtattgaagtaacccatcaaaatatgctctgcagtgattccgcttaatgtttaaattcagtaacgtacttggaaaggcaaatttcagtgcttttgttatgttggaggagggcttactgatgccgtgcctaagaccgatttcctgattgcagggatgaaccttggggctccatttttttcttggtgaagtcctctttcctagaaaattttttggttttgttctttttaaaaaattacatacttttttgaatgtatcatgtcttcattaacaacagaaaatccacatggtgtttactaaacttgtttacgacaattaaaaatttcctttttatttttaagtagcccaggttgagtttttcacaagagatttttttcttagctgaggtatagttgtatagcaagaagaattaagccagattttttgtgtgtggaaagacagttttctatccacgtctttttctgtttgtcagaaggtgggagtatgggtccaaataaatccattagggtaccccctgcagcatgcgcattttagcttctctcttgactgaggatcaaatatccctttgtgagctggccctcagctcctttgctcatgtgtacaaacctcagatgttactacattttatatctaccagagctattcaagcaatagtatttgaaccactagccttttaaataaaattctgccccattactgatgtgcagatattgagttcactttcattttttgccagatttctttgcactactttagggtaaaaatagttaatctatttttctttgacatcctagttggcgtcaggtgccagaacctaactgcttagtcctgtggacttttaaaaaatcttataaatttaatgccactgtcccaagtggaaatgtccctagttggtcattgtgattaagggggccaaactttccagggcagccaggcagagatactattctcttccctctccccagcaaatttgtattcccttcgcccaacgcattcctgctatactagatggcagccaagtgatggaactataaagatgtctgtgggtcatatgttgaatgtggtcgcttgcagtatgtactgcccacggggtgtatctagggcaggtctgtcttcccagtcccatgtgttctcggtcgccgtagacgagcgctctggctaccaccgtgaggctgacttgaactgtcaggggcatctgcctaaaaccagaatcttttgttcagaaaccttaacccaacaaaaacaaatctttgagtaagctcatggcccgggctctttaggaattttgtctgtttaaaaaaaaaaaaaaaaaaaaagtccaacttactttattttatttttttaacctacgtcactgtttacaattgtatgctaaagcctgaaatattgtctgtgctgtggtgtatgagcattgccaactttatatttattgcagtgaagaagaaactaaaaatatatggaaatgaggagcatgtccaaagctcctaaaatcccgtgtggggtgcatgtgggagaaagtgagttaagggcccctttgaaaggaaggctttttggagaggggtcccccaggtttcttggtgttcctgcttggggatcactggctgctaactgactggacctccccattggaagtttgtgattttgctttggcaaagtttcattgactagtagaactcattctgttttagtgtatatttcaatataaatgtaaacattttgctcaaaaaaa

SEQ ID NO: 145658 - DNA, 2430 bp, Homo sapiens
ggcggtggagagggaaattcaagcggccgcgtggtgcggaggacaaaagcgggcggcgggccgatgtgtctgacggcgctccctctctgctttttgttctcgcctcgccgccccgcccctccgcagctctcgaggctcctcccgctgcgggtcggcgctcgccctcgctctcctcgccctccgccccggccccggccccggccccgcgcccgccatggagaagactgagctgatccagaagcgccaagctggccgatgcgaggcgtagcgtctacgacgacatggccacctggcatgaaggcagtgaccgagcagggcgcccgagctgtccaacgaggagcgcaacctgctctccggtggcctacaagaacgtggtcgggggccgcaagtcccgccttggaagggtcattctctagcatcgagcagaaagaccgacacctccgacaagaagttgcagctgattaaggactatcgggagaaagtggagtccgagctgagattccatcttgcaccacggtgctgggaattgttggataaattatttaatagccaatgcaaactaatccagagagtaagggtcttctatcttgaaaatgaaggggtgatttactttccgggtacctttgcctggaagttgcctgttgttgatgatcgaaaaacaaacgatagataattacccaaggagcttaccaaggaggcattttgatattaaggcaagaaaggaggttgcaacccacacacccaattccgcctggggggtttgctctttaactttttctgtattttactatgagattccttaataacccagaagcttgcctgcacgcctggctaaaaacggctttttgatggagggccattgcctgacttgatacactgaatgaaagactcatacaaagacagcacccctcatcatgcagttgctaagagacaaccctaccactttgggacatcagacagtgcaggagaagaatgtgatgcggcagaaggggctgaaaactaaatccatacagggtgttcatccttctttcctttcaaggaaaccttttttacacatcttccatttccttatttccacttgggattttcctattaggccaaaggaaacccctttcatgtgtttggggattcaactgtttatagtctttttcacactgcagctttggggaaaacttcatttccttggatttgtgttttgtcttggggctttcctgggggttgccagtactgctgtagggaaaagtattaatagcttcaattcatattaaacataagtaactccaaaccacttatggaagaggactaaaaatgtatctggtatttaagtaatctgaaccagttctgcaagtgactgtgttttgtattactgtgaaaataagaaaatgtagttaattacaatttaaagagtattccacataacttcttaatttctacattccctccccttacttctacggggatttcatttaagatagcaacgtttcccatgctctaaatgaattcctattctagtaggaatccgaaaggatttagatgaaatggaaaggcacttgcccatctctgtctaggggttcacaaattgaaagggtccttgtatcccaatcgggagttccttgtgtaacctgtggccaacagggaggttcccttattcactctttattttgctgctgtttaagttgacaacccacccttctcaaataaaaaatacactatacacctacctgccattagtagtttctggtattccactttactatgtgatagaagtagcatgttgctgccagaatacaagcattgctttgggccaaattaaagtgcatgtcatttctttaatacactcgtaaggggagattaaattaaggtacacaaggtcccaaggtctaaaacctttagtactttttccatgcagatttgtgccacatgctgagagggatgtcccagttttttctagtgattgttatttagagaggtggacccactatggtgtgtggctaatccattgactgtagtcccgaaaaaaagccttgtgaaaatgttatgccctatgtaacaggcaggagtaacataaaataaaagtacattttataaacccatttactatggctttggtaacaaattgccatacccatattttaagggacaggtgaaatttactactttctaaagtttattgatacttcccttttatgtaaaatgtagtagtgatacctatatttaccacattgtgcattgtgacacactttgtctagggatgcctggaagtgtataaaattggactgcatttcttagagtgttttactatagatcagtctcatgggccatctcttcctcagatgtaaatgatatctggttaagtgttatatggccataaagtggacattttaaaactagcaaagttaaaaaaaaaaaaaaaaaaaaaaggcggccgct

SEQ ID NO: 145659 - DNA, 523 bp, Homo sapiens
  misc_feature (1)...(523): n = a,t,c or g
cgcatctctacattcaagaactggcccttcttggagggctgcgctgcaccccggagcggatggccgaggctggcttcatccactgccccactgagaacgagccagacttggcccagtgtttcttctgcttcaaggagctggaaggctgggagccagatgacgaccccatgcaaaggaaaccaacaataagaagaaagaatttgaggaaactgcgaagaaagtgcgccgtgccatcgagcagctggctgcatggattgaggcctctgcggangctgcctggtcccagagtggctgcaccacttccagggtttattccctggtgccaccagccttcctgtgggccccttagcaatgtcttaggaaaggagatcaacattttcaaattagatgtttcaactgtgctcttgttttgtcttgaaagtggcaccagaggtgttctgcctgtgcagcgggtgctcctggtacagttgctggctctctctctctctcccttttttgggggtccattttggcggtttgaatt

SEQ ID NO: 145660 - DNA, 584 bp, Homo sapiens
ttcgtccggttgcgctttcctttctgtcaagaagcagtttgaagaattaacccttggtgaatttttgaaactggacagagaaagagccaagaacaaaattggtcttactctgtcacccaggctgagtgcagtggtgtgatcttggctcacctcagcctcgaccccctgggctcaaatgattctcccacctcagctacatgggaagctgaagtgggaggatcacttgaactcaggagcagccttggtgacagaacaagaccctctctcaaaaaaatatttaaaaaaaggtgggtcatccattctcctttaccaaacaggctttgaaatgacacattccattcatttgcatctttttaaaaaacttctgattccttactgagtgtccagcagcctcaaagtttttaatggtagctgatgcagacataaacagtgctcaatttggcccttaaactataaaatcaagaaagagtatttcaatcccatccacctgcctgcaagatttcttaatgttcactagttataaccattgtttaaacagtgctttttgtgtaatttaaaaataaactttaatgctttttaaaaca

SEQ ID NO: 145661 - DNA, 1014 bp, Homo sapiens; identical to SEQ ID NO: 145579

SEQ ID NO: 145662 - DNA, 1596 bp, Homo sapiens; identical to SEQ ID NO: 145580

SEQ ID NO: 145663 - DNA, 11109 bp, Homo sapiens
  misc_feature (1)...(11109): n = a,t,c or g
atgggtgccccgacgttgccccctgcctggcagccctttctcaaggaccaccgcatctctacattcaagaactggcccttcttggagggctgcgcctgcaccccggagcgggtgagactgcccggcctcctggggtcccccacgcccgccttgccctgtccctagcgaggccactgtgactgggcctcgggggtacaagccgccctcccctccccgtcctgtccccagcgaggccactgtggctgggccccttgggtccaggccggcctcccctccctgctttgtccccatcgaggcctttgtggctgggcctcggggttccgggctgccacgtccactcacgagctgtgctgtcccttgcagatggccgaggctggcttcatccactgccccactgagaacgagccagacttggcccagtgtttcttctgcttcaaggagctggaaggctgggagccagatgacgaccccatgtaagtcttctctggccagcctcgatgggctttgttttgaactgagttgtcaaaagatttgagttgcaaagacacttagtatgggagggttgctttccaccctcattgcttcttaaacagctgttgtgaacggatacctctctatatgctggtgccttggtgatgcttacaacctaattaaatctcatttgaccaaaatgccttggggtggacgtaagatgcctgatgcctttcatgttcaacagaatacatcagcagaccctgttgttgtgaactcccaggaatgtccaagtgctttttttgagattttttaaaaaacagtttaattgaaatataacctacacagcacaaaaattaccctttgaaagtgtgcacttcacactttcggaggctgaggcgggcggatcacctgaggtcaggagttcaagacctgcctggccaacttggcgaaaccccgtctctactaaaaatacaaaaattagccgggcatggtagcgcacgcccgtaatcccagctactcgggaggctaaggcaggagaatcgcttgaacctgggaggcggaggttgcagtgagccgagattgtgccaatgcactccagcctcggcgacagagcgagactccgtcataaaaataaaaaattgaaaaaaaaaaaagaaagaaagcatatacttcagtgttgttctggatttttttcttcaagatgcctagttaatgacaatgaaattctgtactcggatggtatctgtctttccacactgtaatgccatattcttttctcacctttttttctgtcggattcagttgcttccacagctttaatttttttcccctggagaatcaccccagttgtttttctttttggccagaagagagtagctgttttttttcttagtatgtttgctatggtggttatactgcatccccgtaatcactgggaaaagatcagtggtattcttcttgaaaatgaataagtgttatgatattttcagattagagttacaactggctgtctttttggactttgtgtggccatgttttcattgtaatgcagttctggtaacggtgatagtcagttatacagggagactcccctagcagaaaatgagagtgtgagctagggggtcccttggggaacccggggcaataatgcccttctctgcccttaatccttacagtgggccgggcacggtggcttacgcctgtaataccagcactttgggaggccgaggcgggcggatcacgaggtcaggagatcgagaccatcttggctaatacggtgaaaccccgtctccactaaaaatacaaaaaattagccgggcgtggtggtgggcgcctgtagtcccagctactcgggaggctgaggcaggagaatggcgtgaacccaggaggcggagcttgcagtgagccgagattgcaccactgcactccagcctgggcgacagaatgagactccgtctcaaaaaaaaaaaaaaaagaaaaaaatctttacagtggattacataacaattccagtgaaatgaaattacttcaaacagttccttgagaatgttggagggatttgacatgtaattcctttggacatataccatgtaacacttttccaactaattgctaaggaagtccagataaaatagatacattagccacacagatgtggggggagatgtccacagggagagagaaggtgctaagaggtgccatatgggaatgtggcttgggcaaagcactgatgccatcaacttcagacttgacgtcttactcctgaggcagagcagggtgtgcctgtggagggcgtggggaggtggcccgtggggagtggactgccgctttaatcccttcagctgcctttccgctgttgttttgatttttctagagaggaacataaaaagcattcgtccggttgcgctttcctttctgtcaagaagcagtttgaagaattaacccttggtgaatttttgaaactggacagagaaagagccaagaacaaaattgtatgtattgggaataagaactgctcaaaccctgttcaatgtctttagcactaaactacctagtccctcaaagggactctgtgttttcctcaggaagcattttttttttttttctgagatagagtttcactcttgttgcccaggctggagtgcaatggtgcaatcttggctcactgcaacctctgcctctcgggttcaagtgattctcctgcctcagcctcccaagtaactgggattacagggaagtgccaccacacccagctaatttttgtatttttagtagagatggggtttcaccacattgcccaggctggtcttgaactcctgacctcgtgattcgcccaccttggcctcccaaagtgctgggattacaggcgtgaaccaccacgcctggcttttttttttttgttctgagacacagtttcactctgttacccaggctggagtagggtggcctgatctcggatcactgcaacctccgcctcctgggctcaagtgatttgcctgcttcagcctcccaagtagccgagattacaggcatgtgccaccacacccaggtaatttttgtatttttggtagagacgaggtttcaccatgttggccaggctggttttgaactcctgacctcaggtgatccacccgcctcagcctcccaaagtgctgagattataggtgtgagccaccacacctggcctcaggaagtatttttatttttaaatttatttatttatttgagatggagtcttgctctgtcgcccaggctagagtgcagcgacgggatctcggctcactgcaagctccgccccccaggttcaagccattctcctgcctcagcctcccgagtagctgggactacaggcgcccgccaccacacccggctaatttttttgtatttttagtagagacgggttttcaccgtgttagccaggagggtcttgatctcctgacctcgtgatctgcctgcctcggcctcccaaagtgctgggattacaggtgtgagccaccacacccggctatttttatttttttgagacagggactcactctgtcacctgggctgcagtgcagtggtacaccatagctcactgcagcctcgaactcctgagctcaagtgatcctcccacctcatcctcacaagtaattgggactacaggtgcaccccaccatgcccacctaatttatttatttatttatttatttattttcatagagatgagggttccctgtgttgtccaggctggtcttgaactcctgagctcacgggatccttttgcctgggcctcccaaagtgctgagattacaggcatgagccaccgtgcccagctaggaatcatttttaaagcccctaggatgtctgtgtgattttaaagctcctggagtgtggccggtataagtatataccggtataagtaaatcccacattttgtgtcagtatttactagaaacttagtcatttatctgaagttgaaatgtaactgggctttatttatttatttatttatttatttatttttaatttttttttttgagacgagtctcactttgtcacccaggctggagtgcagtggcacgatctcggctcactgcaacctctgcctcccggggtcaagcgattctcctgccttagcctcccgagtagctgggactacaggcacgcaccaccatgcctggctaatttttgtatttttagtagacggggtttcaccatgctggccaagctggtctcaaactcctgaccttgtgatctgcccgctttagcctcccagagtgctgggattacaggcatgagccaccatgcgtggtctttttaaaattttttgattttttttttttttgagacagagccttgctctgtcgcccaggctggagtgcagtggcacgatctcagctcactacaagctccgcctcccgggttcacgccattcttctgcctcagcctcctgagtagctgggactacaggtgcccaccaccacgcctggctaattttttttggtatttttattagagacaaggtttcatcatgttggccaggctggtctcaaactcctgacctcaagtgatctgcctgcctcggcctcccaaagcgctgagattacaggtgtgatctactgcgccaggcctgggcgtcatatattcttatttgctaagtctggcagccccacacagaataagtactgggggattccatatccttgtagcaaagccctgggtggagagtcaggagatgttgtagttctgtctctgccacttgcagactttgagtttaagccagtcgtgctcatgctttccttgctaaatagaggttagaccccctatcccatggtttctcaggttgcttttcagcttgaaaattgtattcctttgtagagatcagcgtaaaataattctgtccttatatgtggctttattttaatttgagacagagtgtcactcagtcgcccaggctggagtgtggtggtgcgatcttggctcactgcgacctccacctcccaggttcaagcgattctcgtgcctcaggctcccaagtagctgagattataggtgtgtgccaccaggcccagctaacttttgtatttttagtagagacagggttttgccatgttggctaagctggtctcgaactcctggcctcaagtgatctgcccgccttggcatcccaaagtgctgggattacaggtgtgaaccaccacacctggcctcaatatagtggcttttaagtgctaaggactgagattgtgttttgtcaggaagaggccagttgtgggtgaagcatgctgtgagagagcttgtcacctggttgaggttgtgggagctgcagcgtgggaactggaaagtgggctggggatcatctttttccaggtcaggggtcagccagcttttctgcagcgtgccatagaccatctcttagccctcgtgggtcagagtctctgttgcatattgtcttttgttgtttttcacaaccttttagaaacataaaaagcattcttagcccgtgggctggacaaaaaaaggccatgacgggctgtatggatttggcccagcaggcccttgcttgccaagccctgttttagacaaggagcagcttgtgtgcctggaaccatcatgggcacaggggaggagcagagtggatgtggaggtgtgagctggaaaccaggtcccagagcgctgagaaagacagagggtttttgcccttgcaagtagagcaactgaaatctgacaccatccagttccagaaagccctgaagtgctggtggacgctgcggggtgctccgctctagggttacagggatgaagatgcagtctggtagggggagtccactcacctgttggaagatgtgattaagaaaagtagactttcagggccgggcatggtggctcacgcctgtaatcccagcactttgggaggccgaggcgggtggatcacgaggtcaggagatcgagaccatcctggctaacatggtgaaaccccgtctttactaaaaatacaaaaaattagctgggcgtggtggcgggcgcctgtagtcccagctactcgggaggctgaggcaggagaatggcgtgaacctgggaggtggagcttgctgtgagccgagatcgcgccactgcactccagcctgggcgacagagcgagactccgtctcaaaaaaaaaaaaaaaagtaggctttcatgatgtgtgagctgaaggcgcagtaggcagaagtagaggcctcagtccctgcaggagacccctcggtctctatctcctgatagtcagacccagccacactggaaagaggggagacattacagcctgcgagaaaagtagggagatttaaaaactgcttggcttttattttgaactgttttttttgtttgtttgttttccccaattcagaatacagaatacttttatggatttgtttttattactttaattttgaaacaatataatcttttttttgttgtttttttgagacagggtcttactctgtcacccaggctgagtgcagtggtgtgatcttggctcacctcagcctcgaccccctgggctcaaatgattctcccacctcagcttcccaagtagctgggaccacaggtgcgtgtgttgcgctatacaaatcctgaagacaaggatgctgttgctggtgatgctggggattcccaagatcccagatttgatggcaggatgcccctgtctgctgccttgccagggtgccaggagggcgctgctgtggaagctgaggcccggccatccagggcgatgcattgggcgctgattcttgttcctgctgctgcctcggtgcttagcttttgaaacaatgaaataaattagaaccagtgtgaaaatcgatcagggaataaatttaatgtggaaataaactgaacaacttagttcttcataagagtttacttggtaaatacttgtgatgaggacaaaacgaagcactagaaggagaggcgagttgtagacctgggtggcaggagtgttttgtttgttttctttggcagggtcttgctctgttgctcaggctggagtacagtggcacaatcacagctcactatagcctcgacctcctggactcaagcaatcctcctgcctcagcctcccagtagctgggactacaggcgcatgccaccatgcctggctaattttaaatttttttttttctcttttttgagatggaatctcactctgtcgcccaggctggagtgcagtggcgtgatctcggctgacggcaagctccgcctcccaggttcactccattcgcctgcctcagcctcccaagtagctgggactacaggcgctgggattacaaacccaaacccaaagtgctgggattacaggcgtgagccactgcacccggcctgttttgtctttcaatagcaagagttgtgtttgcttcgcccctacctttagtggaaaaatgtataaaatggagatattgacctccacattggggtggttaaattatagcatgtatgcaaaggagcttcgctaatttaaggcttttttgaaagagaagaaactgaataatccatgtgtgtatatatattttaaaagccatggtcatctttccatatcagtaaagctgaggctccctgggactgcagagttgtccatcacagtccattataagtgcgctgctgggccaggtgcagtggcttgtgcctgaatcccagcactttgggaggccaaggcaggaggattcattgagcccaggagttttgaggcgagcctgggcaatgtggccagacctcatctcttcaaaaaatacacaaaaaattagccaggcatggtggcacgtgcctgtagtctcagctactcaggaggctgaggtgggaggatcactttgagccttgcaggtcaaagctgcagtaagccatgatcttgccactgcattccagcctggatgacagagcgagaccctgtctctaaaaaaaaaaaaaaccaaacggtgcactgttttcttttttcttatcaatttattatttttaaattaaattttcttttaataatttataaattataaatttatattaaaaaatgacaaatttttattacttatacatgaggtaaaacttaggatatataaagtacatattgaaaagtaattttttggctggcacagtggctcacacctgtaatcccagcactttgggaggccgtggcgggcagatcacatgagatcatgagttcgagaccaacctgaccaacatggagagaccccatctctactaaaaatacaaaattagccggggtggtggcgcatgcctgtaatcccagctactcgggaggctgaggcaggagaatctcttgaacccgggaggcagaggttgcggtgagccaagatcgtgcctttgcacaccagcctaggcaacaagagcgaaagtccgtctcaaaaaaaaagtaattttttttaagttaacctctgtcagcaaacaaatttaacccaataaaggtctttgttttttaatgtagtagaggagttagggtttataaaaaatatggtagggaagggggtccctggatttgctaatgtgattgtcatttgccccttaggagagagctctgttagcagaatgaaaaaattggaagccagattcagggagggactggaagcaaaagaatttctgttcgaggaagagcctgatgtttgccagggtctgtttaactggacatgaagaggaaggctctggactttcctccaggagtttcaggagaaaggtagggcagtggttaagagcagagctctgcctagactagctggggtgcctagactagctggggtgcccagactagctggggtgcctagactagctgggtactttgagtggctccttcagcctggacctcggtttcctcacctgtatagtagagatatgggagcacccagcgcaggatcactgtgaacataaatcagttaatggaggaagcaggtagagtggtgctgggtgcataccaagcactccgtcagtgtttcctgttattcgatgattaggaggcagcttaaactagagggagttgagctgaatcaggatgtttgtcccaggtagctgggaatctgcctagcccagtgcccagtttatttaggtgctctctcagtgttccctgattgttttttcctttgtcatcttatctacaggatgtgactgggaagctctggtttcagtgtcatgtgtctattctttatttccaggcaaaggaaaccaacaataagaagaaagaatttgaggaaactgcgaagaaagtgcgccgtgccatcgagcagctggctgcccatggattgaggcctctggccggagctgcctggtcccagagtggctgcaccacttccagggtttattccctggtgccaccagccttcctgtgggccccttagcaatgtcttaggaaaggagatcaacattttcaaattagatgtttcaactgtgctcttgttttgtcttgaaagtggcaccagaggtgcttctgcctgtgcagcgggtgctgctggtaacagtggctgcttctctctctctctctcttttttgggggctcatttttgctgttttgattcccgggcttaccaggtgagaagtgagggaggaagaaggcagtgtcccttttgctagagctgacagctttgttcgcgtgggcagagccttccacagtgaatgtgtctggacctcatgttgttgaggctgtcacagtcctgaggggggaccttgccaggtgcctgttgaatctgagctgcaggttccttatctgtcacacctgtgcctcctcagaggacagtttttttgttgttgtgtttttttgttttttttttttttggtagatgcatgacttgtgtgtgatgagagaatggagacagagtccctggctcctctactgtttaacaacatggctttcttattttgtttgaattgttaattcacagaatagcacaaactacaatttaaaaactaagcacaaaagccattctaagtcattggggaaacgggntgaaacttcaggtggatgaggagacagaatagagtgataggaagcgtctggccagatactcccttttgcccactgctgtgtgattagacaggcccaagtgaagccgcggggcaacatgctggccgctcctccctcgagaaaaaaaggcagtggccttaaatcctttttaaatgacttggctcgatgctgtgggggacttggctgggctgctgccaagcccggtgtctgtcagcccaaccttcacatctgtcacgttctccacacgggggagagacgcagtccgcccaggtccccgctttcttttggaggcaagcagctcccgcagggctgaagtctggcgtaagatgatggatttgattcgccctcctccctgtcatagagctgcaggggtggattgttacaagcttcgctgggaaacctctggaggtcatctcggctgttcctgaagaaataaaaagcctgtccatttcaaacactgctgtggaccctactgggtttttaaaatattgtcaggttttcatcgtcgtccctagcctgccaacagccatctgcccagacagccgcagtgaggatgagcgtcctgggcagagacgcagttgtctctgggcgcttgccagagccacggaaccccagacctgtttgtatcatccgggctccttccgggcagaaacaactgaaaaatgcacttcaagacccacttattctgccaacatctgagtcggcctgaagaaaagacttttccctctaaaactgggagaaatatccacaagtggtttttggttaagcagaaaatgcactccaagccctctgtacctcatcctaagctgccttatttttgatatttgtgttcagtctgttaaatgggatacttccactttaataactgttgccttagtaattggctatgtatagaagctggaaaaaaatggttttgtcttcaactcctttgcatgcccaggcggtgatgtggatctcggcttctgtgagcctgtgctgtgggcagggctgagctggagccgcccctctcagcccgcctgccacggcctttccttaaaggccatccttaaaaccagaccctcatggctgccagcacctgaaagcttcctcgacatctgttaataaagccgtaggcccttgtctaagcgcaaccgcctagactttctttcagaaaaaaaaa

SEQ ID NO: 145664 - DNA, 436 bp, Homo sapiens
tcctgggccacgtgggtccttcaggagtttttcaggcaagtttttcctctgtttttaatatataactataatatatatgaatagataaatataactaatgtgcgtgagaatgggcctggcacacctggggtgctcgggggtagggctgccatgctgcagagctgatggagtgatgttgtgggcacaaggcatctgtcagctgcctcctttaacagccatgccttctggaatctggaagaggagctgactttggtcaaaggccaggctctgcccagcaggggacttgactgccctgggcgccctgcccctcccgctgcgtgtccaggtccaaagtggagagcctgcctttgggtttagttcccgaatcagaatcccatctcaccagggcgaaattttaatttaaaaacttaaaaagagacttttctaacaaaaaaaa

SEQ ID NO: 145665 - DNA, 1235 bp, Homo sapiens
  misc_feature (1)...(1235): n = a,t,c or g
ccgcgctgagcacgcccgcccaagaaaccaactagcccaacagccaccaccaccaccagatgaggcgcacgcccagcaacacccccgccacgccgcccaacggccccgatacgctggccatgcacgccaagcaccgcgcctccgagggcctgcatttgagcaacagccccatgacagccgcagcctgcgccccaccagcaaacagcagctctcttctgggcctcgcccccgcccagccaccaggcgccctggatcccgcccttcctcccccaaccaccttcccaccacctccaccgccccacagcccacgtggccccccaggagcacagcaggggggcgccccagcagaaaagccatggcgcccatggacggcccagagatgagactggacgccgccgggcgctgggctggagctggggggcagcccagggttgtggggacacaggagggccagggaggggggagccggggagggcagggggtttcccgaagatcgcactggaagattttataaaagaatttttgtgggtcggggggacagtaaacttcctgggccacgtgggtccttcaggagtttttcaggcaagtttttcctctgtttttaatatataactataatatatatgaatagataaatataactaatgtgcgtgagaatgggcctgggcacacctggggtgcttcggggntaggggctgcccatgctgcagagctgatggagtgatgttgtggggcacaagggcatctgtcagctgcctccttttaaacagccatgcccttcttggaatctggaagaggacaccactcctggcagtcactggggcagccaacatagcaagctgcaaggtccccaggagggcctgaaggtcaaagcctgtggaaaggcccttcttggtatcagggctctcttccccatgggcctcttcccccaactcttgaattgctgggttgtggccccataagcttcatcaacccctggtcttcctgctgaatgtggcagggctgatgntggcactgaaggagctgactttggtcaaacggccagggctctgcccaagcagggagacttgacctgccctggggcgccctgcccctcccggcttgcgtgtccaaggtccaaaagtggagagcctgcctttggggtttaagttcccgaatcagaatcccgatctcaccagggcgaaattttaatttaaaaacttaaaaagagacttttctaaaaaaaaaaaaaaaaa

SEQ ID NO: 145666 - DNA, 417 bp, Homo sapiens
  misc_feature (1)...(417): n = a,t,c or g
tttcgtgtccgccatgttttcaggccgggtctggcttggtcttcccccgtaaggaaatggccggggagctccaggggacccaggcgccgtcgcttcggcggagcctgggctgaccagccaggacagcggggtaaacccgaacaattctgcgcgaggtagggaggccatggcgtccggcagtaactggctctccggggtgaatgtcgtgctggtgatggcctacgggagcctggtgtttgtactgctatttatttttgtgaagaggcaaatcatgcgctttgcaatgaaatctcgaaggggacctcatgtccctgtgggacacaatgcccccaagagatcccatttcattctgaaggtcggcatccccgttccttaatgggcaagaatttccgctcctacctgctggatctgcgaaan

SEQ ID NO: 145667 - DNA, 458 bp, Homo sapiens
tcttgcgataccgctccggaatttccgggtcgacgattccgtgtctgacttggtcttcccccgtaaggaaaaggcctgggatctccaggggacccaggcgccgtctcttctgcggagcctggactgaccacccaggacagcggtgtacacccgaacaattctgcgcgaggtatggaggccatggcgtccggcagtaactggctctccggagtgaatgtcgtgctggtgatggcctacgggagcctggacttgaaagaggagattgatattcgactctccacggttcatgatatcaagtatgagccccagctccttgcagatgatgatgctagactactacgactggaaacccacggaaatcaaaggtgctacaactatctgtataggatgaaagctctggatgccattcgtacctctgagatcccatttcattctgaaggtgcgcatgcgcgttcctt

SEQ ID NO: 145668 - DNA, 740 bp, Homo sapiens
cttactgtcgtagttccgcgtctgagcgctcgacgctcctgggtgccattgcctgcctgagtcacgtgtcagggggaagctggaaggcgtcgttctcctttcccagctctcctgcctgtccgccatgttttcaggccgggtctggcttggtcttcccccgtaaggaaatggccggggagctccaggggacccaggcgccgtcgcttcggcggagcctgggctgaccagccaggacagcggggtaaacccgaacaattctgcgcgaggtagggaggccatggcgtccggcagtaactggctctccggggtgaatgtcgtgctggtgatggcctacgggagcctggtgaggagattaccccaccccattcctgctgtcgcatcttacccagtagagaccctccttttgagctgtaccccgtctgcattctccacccactcacctgcgcctatccgggctttgactccttattccaggagtaggtgggagtttaagtcacttagtcgggccgacccgccctcgttagtctagaaccctccctttaacgctagagcacagaccccacgcctccctgctgctggcttcttagatccacccccatcataacggccttgctttgccccaagttttaccctgaaacattcctgagagccggaatctggggatttggaatgaaggcatgcttttttaaaaaaaaaaacaaaacaaaactgactttttattaaaggattttaacatcttt

SEQ ID NO: 145669 - DNA, 726 bp, Homo sapiens
  misc_feature (1)...(726): n = a,t,c or g
ataaccaaggctatacaaaggaagccattttcgtggccggagatttaggtggggatacccccggtttttcccactatagtgtttgataaaccccggccccagaatcagtttttgggccacctatttaacagtatttgtctcatcacgcggcaatgtaaaatttggttcttttaaaaggcgcacccnnnnnnnnnnnnnnnnattgattcatacgttttatttgataatagttccttttattaaatatttaatagggtcagtccagtgcattgggcttgttaggggaaaccattccttcctgctgtcacatagcctggcagattatatcaggtgccaaaacattcccttttattcaatttattaatgagagtgtgaaattaaagtagatcgtggcatgtcaggaaagctgcaacacatctggtttaagtggagcacaaaggtaagttattccacattcaccaacttccccacttgacctcccaccagttcctgtctgctttttccatcaatcaactctaagatgccctaaacccaaacagttcccatatctaacaacgtaaaaataaaatgacagtttgaacatacaaaacccaccacaggcacattaggggctggatagggcattccattggccacaggataggactgggcagggacaaaggctggttgcagggctgggaccacacccactggcacaggctgagaggtgaggaatgcattcccttg

SEQ ID NO: 145670 - DNA, 1856 bp, Homo sapiens
  misc_feature (1)...(1856): n = a,t,c or g
tttcgtgtcagggggaagctggaaggcgtcgttctcctttcccagctctcctgcctgtccgccatgttttcaggccgggtctggcttggtcttcccccgtaaggaaatggccggggagctccaggggacccatgcgccgtcgcttcggcggagcctgggctgaccagccaggacagcggggtaaacccgaacaattctgcgcgaggtagggaggccatggcgtccggcagtaactggctctccggggtgaatgtcccgctggtgatggcctacgggagcctggtgtttgtactgctatttatttttgtgaagaggcaaatcatgcgctttgcaatgaaatctcgaaggggacctcatgtccctgtgggacacaatgcccccaagggacttaaaagtaggagattgatattcgactctccagggttcaggatatcaagtatgagccccagctccttggcagatgatgatgcttagactacttacaactgggaaacccaggggaaatcaaagttgcttacaactatcttgttatagggatggaaagctcttggattgccatttcgtacctcttgagatcccatttcattcttgaaggccggcattccccgtttccttaatggggcaagaatttccgttcctacctgctgggatctgcgaaacactagtacggcttttcaagggtgtacggcaaagcacctcattgataccctttttgggatggctatggaaacaagcccgctatggggacaagggggtcttttggccaagaatgaagtacctacgctatcaggaggccctgagtgagctggccactgcggttaaagcacgaattggggagcttttcagcgacattcaccagttcaggcagccaaagacctaactcagtcccctgaggtctccccaacaaccatccaggtgacatacctcccctccagtcagaagagtaaacgtgccaagcacttcctttgaattgaagagctttaagggataactataacacattgggagagtactctgtgacggagctgaaagaacctctgccgtaggattaagccagtcagttggcaatgtggcaaggacaggctggtttgccggggccgccctcgggaacattttgggcccaggcagggcccaggactgtattccatccaagttccccgttgtattccagagttcttaggagcttgtgttctaaaggggtaatttccccaacccttccttatggaggcatttttaggaacattgggcttaaggactattttccacccagtaggcgcttttttctggggatttgcattcaggtgtattttcttaaatgtttctgtcaaaacctcccttaaaaaaccttcaactggtttcaagcccatagttccacccttcccctgtccccgggtttaatttaaattccccaaaggtgaagagttggaagtgaagatgtccttccccatatcctataccctttgtgccacagttgaatggggaactgtttggggtttaagggcatccttagagttgaattgatggaaaaaagcagacacggaactggtggggaggtccaagtggggaagttggtgaatgtggaataacttaccctctggtggcncccacttaaacccagatgtgttgccagctttccctgacatgcaaggatcctactttaattcccacactctcgattaataaattgaataaaaggggaatgttttggcacctgatataatctgccaggctatgtgacagtaggaaggaaatggtttcccctaacaagcccaatgcactggtctgactttataaattatttaataaaatgaactattattcaaataaaaaaaaaaaaaaaaaaaagggcggccgct

SEQ ID NO: 145671 - DNA, 2160 bp, Homo sapiens
  misc_feature (1)...(2160): n = a,t,c or g
tgggaagggtccatctgggcaaggggaatggggccatgttgttgacattaggtacttaataagccttggagctagtggagagggagaggaagggttctgtccaagacagttcaggttaattaattttcttctccattgcttcaccttaagggttaataatgtagagaggagggaggaccacattgatgaccagaacctactggtactttatagcatttgccccaccccacagcttaggtttttctgtcatcctcagatcccacaggcattgcgaagaagctgcttcctatacccaggtataactcaaaatccaaagggatagggccaggatcccttattcctaccccatctattctctgttggctccaagagctaccccagagaccttaaccagaaacagtagctgaggcttcttcctagatacctgactagggaagtttgtctctcctttcttgcccaaccaggtcaaagtaaaatgtgagttgacagctcaaagcacttgtaactgactgccccctccctacctctactccccaaaatggaatcatgggatagggaaggcccccatggggtcagaagggcacggtagttcttgcaattatttttgttttacccttcataccctgtcaaacatatttttttctaatgagaaagccaggcccccgccagcacacatgctgtttttaatgcgctgtagttcttgtgtgtctgctgtgctgtgcaaatggagattcagttcaaaataaaatcatttaaaaacctgcataaaaagaactctaaacccacccctgcaacaaaagtcactacataaacatgttcagcagtattcacctatcagagtatttgttgtgagtatagattatcaattgaaaacactactcttgttttcttaattgtacagttttcaatgtccctttcttaaagagacagtatatttctcttcacccctagcccatcttccctcaccctcctgaatgacatcagggaggtatatccagggtgtctccttccttcctactctcttgaccagaagttaacagactatactgtctctttaaaaataaaatttaaaaagctttgttgtcttttcagacatacatatgcatatatgttttagatgttcttataagagaaaagatggtttttaaaatgtgccaagttgtggtgtgtgtgtggtatatatatgtgtgtatgtgtgtgtataatatantaatgtgtgtgtgtgtgtatatatatacacacacacacacacacctgctgtgtgattggtaagcaatacaatagtaaacatgtccccattacttttttctaatattggaccaatgctgtcctaattgtacatttccccttatggtgacgatgctctgactcgtttaggtagacacattgaccaccttccattccattaaatattttttcctttttcccctttctgtgtcattcttgaggaaaaaacaaaagagagaggggatgccaatgatccccttgagcagagaaaaagcaaaataaatattttattaaagaaaaaagagaattaagaaaatagtttggagtattttcttactgtagagaagcactgtacattactaagagacctgggtataaagatactcacatggtggagctggaaaaatcgcatgtccaagcccgtttgagtggtttcttttgtttttcattgcagggagtgggtgggagggaggtgggactaggggcactttgggggtctccttttagtcaaaagcgagaaaatgacaagaaagagattaaaattcaatgtttcctttatagtgttaaacactaaaattttaaaaaagatgaaaaagaaaaaaaaactttgtaaaatgcgagaacagaagcaaaagacactacgctctgtcattttatctttcttttgttgaaagactaaaaaaaaactgaaatgttttttagacaatcaaatgttaggtaagtgcaaaaacttgttttttcttagtggtgtagaaattaatgcctttttttatttttcagttattttataataacgaaataaaaagaaccccccagctgccaggcgggttttggtgtttgaaatgcggggcaaagcactacatcactgcaaatagatacagagttagtctgcatgtctgtaggctgtgtgattgcggaaaatataaatgctgc

SEQ ID NO: 145672 - DNA, 822 bp, Homo sapiens
atgaagagaagtttagagaaaaaagaaaaaaaaaatgaacaaagcctccaagaaacatgggactatgtgaaaagaccaaatctacatctaattggtgtacctgaaagagacggggagaatggaaccaagttggaaaacactctgcaggatattatccaggagaacttccccaatctagcaaggcagcccaacattcaaattcaggaactacagagaatgccacaaagatactcctcgagaggagcaactccaagacacataattgtcagattcaccaaagttgaaatcaaggaaaaaatgttgagagcagccagagagaaaggtcaggttacccacaaagggaagcccatcagactaacagctcatgtcttggcagaaactctacaagccagaagagaactaaaccaggaagaagatgaatctctgaatagaccaataacaggctctgaaattgaggcaacaattaataccttaccaaccaaaaacagtccaggacctgaaggattcacagccgaattctaccagaggtacaaggaggagctgagcctgaagacactggagcagaaatcattcacgtctgattgtgtgcgggttgtcattttcctggacatccatgaagagctgaaggaaattgtttactgccaattgtatacctttcttatgtcctttaatagcatagactggacagggcacatccagcccgtgcctgtgttcactgtgccccgaagtgcaattacccataccccttctcagcctggggaccccaggcaaccacagactgtccactcaggggagctgaatcccagggtatacaccaagtaa

SEQ ID NO: 145673 - DNA, 1583 bp, Homo sapiens
  misc_feature (1)...(1583): n = a,t,c or g
gggtcgacgatttcgtccagcctgcacggaggagatgggagatgctgggggtcctgccctcagtctttttgggccttaggcgtttcgttcatcctgctaaggggatgaagcaaacacgaggtgattcctttgcctttcagagtggaagccctggagtttgttttgaaggccaggaggctgaaggatctctaagctacggtgtgggcttaatagcagcaggctttgtcctcctgtctcctccaagccagtgtctgattccttggcaacacaggtcttagtctgtggagtggctctgctgtggccttcctctggccgggcaggcactgtccagccatagccagctcctgagaataggtcagcctctcctttctgtctcccagggcacatccagcccgtgcctgtgttcactgtgccccgaagtgcaattacccataccccttcctncaacctggggacccccaggcaaccacagactgtcccactcaggggagctgaatccccaggtcagccctgcccaatgtcccttaggaaactgccccaggcaaggcccctggttttgtatacttgttcctgccacccagcagtagatgagtgtttcaggtgaagaccaggatagattttctaagtgtgaatccccgcttcacatatggaaccccttatgctgaacttgaaaagcaccaagacttcctgtagacaagaaagtgcttaggtagggacagcccctgggcatcccacccaatgtagctggcaccccactatggcaaaggtgccttgataactgagccctgtatccctcccatgcccagccagattctcatgggaagccctctcccttcttttctgcctaacaccatctcatcgtttctggcctcactgtggacaatccacacacattcttctttcctctcctgggcggggcacagagccacccccttgccttttcttttcttgaaggttctagttcagctcctgattcatcagacccttctagccccctgcatctagcagtgaagcatgaagcctggtggggatgtggtactcccatctggtgtggccaccagctctgccaatgttcctgtagccttggaaaacttgctctctcggttcttttggggtgctgtgtactccccagcttccccccttccccccccattttgcaactggggtttagtgaaaggatggcatttggttgacccatatagaaacccagaatgaggtctcagggccaggaggcctggtatttgtaggccagggaaggggaagaggcaagtggtctggggtatcaccagccagccctctctgatttggcctctactccccataagtcacagtaccataagcaggcttctggcctcagcaatttggtctttgtgcccaagtttattgtgagaatttcctgaaaactctataaaaggtctcttcctactgtaggcctctaatgtttctcccctttttgcttcagtccactcttcagtcttgtaggcctagttttcaaacctgcacatgtgtcctacctggccacaggcatgcaggcctcaggcagctgggccagtttgggagccttcggtgatgtctgcacgatc

SEQ ID NO: 145674 - DNA, 2915 bp, Homo sapiens
ccagcggccgccgacgctaggaggccgcgctccgcccccgctaccatgaggccccggaaagccttcctgctcctgctgctcttggggctggtgcagctgctggccgtggcgggtgccgagggcccggacgaggattcttctaacagagaaaatgccattgaggatgaagaggaggaggaggaggaagatgatgatgaggaagaagacgacttggaagttaaggaagaaaatggagtcttggtcctaaatgatgcaaactttgataattttgtggctgacaaagacacagtgctgctggagttttatgctccatggtgtggacattgcaagcagtttgctccggaatatgaaaaaattgccaacatattaaaggataaagatcctcccattcctgttgccaagatcgatgcaacctcagcgtctgtgctggccagcaggtttgatgtgagtggctaccccaccatcaagatccttaagaaggggcaggctgtagactacgagggctccagaacccaggaagaaattgttgccaaggtcagagaagtctcccagcccgactggacgcctccaccagaagtcacgcttgtgttgaccaaagagaactttgatgaagttgtgaatgatgcagatatcattctggtggagttttatgccccatggtgtggacactgcaagaaacttgcccccgagtatgagaaggccgccaaggagctcagcaagcgttctcctccaattcccctggcaaaggtcgacgccaccgcagaaacagacctggccaagaggtttgatgtctctggctatcccaccctgaaaattttccgcaaaggaaggccttatgactacaacggcccacgagaaaaatatggaatcgttgattacatgatcgagcagtccgggcctccctccaaggagattctgaccctgaagcaggtccaggagttcctgaaggatggagacgatgtcatcatcatcggggtctttaagggggagagtgacccagcctaccagcaataccaggatgccgctaacaacctgagagaagattacaaatttcaccacactttcagcacagaaatagcaaagttcttgaaagtctcccaggggcagttggttgtaatgcagcctgagaaattccagtccaagtatgagccccggagccacatgatggacgtccagggctccacccaggactcggccatcaaggacttcgtgctgaagtacgccctgcccctggttggccaccgcaaggtgtcaaacgatgctaagcgctacaccaggcgccccctggtggtcgtctactacagtgtggacttcagctttgattacagagctgcaactcagttttggcggagcaaagtcctagaggtggccaaggacttccctgagtacacctttgccattgcggacgaagaggactatgctggggaggtgaaggacctggggctcagcgagagtggggaggatgtcaatgccgccatcctggacgagagtgggaagaagttcgccatggagccagaggagtttgactctgacaccctccgcgagtttgtcactgctttcaaaaaaggaaaactgaagccagtcatcaaatcccagccagtgcccaagaacaacaagggacccgtcaaggtcgtggtgggaaagacctttgactccattgtgatggaccccaagaaggacgtcctcatcgagttctacgcgccatggtgcgggcactgcaagcagctagagcccgtgtacaacagcctggccaagaagtacaagggccaaaagggcctggtcatcgccaagatggacgccactgccaacgacgtccccagcgaccgctataaggtggagggcttccccaccatctacttcgcccccagtggggacaaaaagaacccagttaaatttgagggtggagacagagatctggagcatttgagcaagtttatagaagaacatgccacaaaactgagcaggaccaaggaagagctttgaaggcctgaggtctgcggaaggtgggaggaggcagacgccctgcgtggcccatggtcggggcgtccaccggaggccggcaacaaacgacagtatctcggattcctttttttttttttttaattttttatactttgttgtttcacttcatgctctgaatactgaataaccatgaatgactgaatagtttagtccagatttttacagaggatacatctatttttatcattatttggggtttgaaaaatttttttttacaccttctaatttctttatttctcaaagcagataattcttctgtgtgaaaatgttttctttttttaatttaaggtttaaaattccttttccaaatcatgttgattttgctctttaaaaaaaaaaaaaaaaaaaaaaaaaaaaaaaaaaaaagaagggctgggaccaaccggggtgagatccacaagtctctggatgtggctgaaggcaaatacacaatatgaagtactttcctgttttggaagtgccttccccttttggaatctggtttgaaaacatgccagccttctggtctctagccccaaggaaaagacccaaaacataggggaaattaaaagcatttatctttgtcttggaaagtaaattgttgaagttgtgcagttgatcaagtgcacagttagatggcaatgtttattagaaatatgattgttaaaaccaaattttacactggcatgtgtgggtgtagtttctaaaaggcacttcacatttgaaatttttcttaccttagaaagtttctagtgatctaaatgtctagttttgtattcttttgtgagtgttcactgtttctcagtattaccacttgaataattctctgtacaggggggtttgtgctatacactaagaatgtccaaatgcagcaataaagcctttctttaaaaaggaaaaaaaaaaaaaaaaaa

SEQ ID NO: 145675 - DNA, 852 bp, Homo sapiens
atgaatgcaatcaaagaacagaatgctactagagatgaagtatcagaaagcaccaaatttggattacagataagcatggattcctggttcattcttgttctgctcggcagtggtctgatatgtgtcagtgccaacaatgctaccacagttgcaccttctgtaggaattacaagattaattaactcatcaacggcagaaccagttaaagaagaggccaaaacttcaaatccaacttcttcactaacttctctttctgtggcaccaacattcagcccaaatataactctgggacccacctatttaaccactgtcaattcttcagactctgacaatgggaccacaagaacagcaagcaccaattctataggcattacaatttcaccaaatggaacgtggcttccagataaccagttcacggatgccagaacagaaccctgggaggggaattccagcaccgcagcaaccactccagaaactttccctccttcagtggaaggggctgaagcacaaaacgtaattcaaagagattacttgagccacaatgaggacagctgcctggaagaaacagacccaggtatccttggatatgaactccctttggagctttgcaacaagcagtttcttaaaggcaaaaaggacaaggagtgggatgatgcaaagaggcctgctattctcctggatgacttcaatatcctcatggatgacaaccaaaatccccatctaggccagcctctcagttccttgacttccttcactccaacaacgctttatctctgctacacttgggccactcacgacaatggctgtactccagatgctgtcatcacccagaaaagcccccatactgaataa

SEQ ID NO: 145676 - DNA, 3215 bp, Homo sapiens
aattccgtggtaatggatgatgcagttcaaataactaaggacacatgttcaaagagcataattaactttttaaaagaagctagacttcttcagaagcttgccagtttttcaagctgatttctctcactggcaactcttcagagtgctgttcctactccaccctcccctggtgataagcatggattcctggttcattcttgttctgctcggcagtggtctgatatgtgtcagtgccaacaatgctaccacagttgcaccttctgtaggaatcacaagattaattaactcatcaacggcagaaccagttaaagaagaggccaaaacttcaaatccaacttcttcactaacttctctttctgtggcaccaacattcagcccaaatataactctgggacccacctatttaaccactgtcaattcttcagactctgacaatgggaccacaagaacagccaagcaccaattctataggcattacaatttcaccaaatggaacgtggcttccagataaccagttcacggatgccagaacagaaccctggccggggaattccagcaccgcagcaaccactccagaaactttccctccttcaggtaattctgactcgaaggacagaagagatgagacaccaattattgcggtgatggtggccctgtcctctctgctagtgatcgtgtttattatcatagttttgtacatgttaagggttttaagaaatacaagcaagctgggagccattccaattctttcccgcttatccaacgggccgcactgagggatgtgggagccccagagtgtgccacttctgggccagatccccaaggcaccaacagggaaataccccacccctggcccgtgggacaagctggaagaggaaattaaccggagaatggcggacgacaataagctcttcagggaggaattcgacgctctccctgcatgtcctatccaggccacctgtgaggctgcttccaaggaggaaaacaaggaaaaaaaatcgatatgtaaacatcttgccttatgaccactctagagtccacctgacaccggttgaaggggttccagattctgattacatcaatgcttcattcatcagcggttaccaagaaaagaacaaattcattgctgcacaaggaccaaagaaagaaacggtgaatgatttctggcggatgatctgggaacaaaacacagccaccatcgtcatggttaccaccctgaaggagagaaaggagtgcaagtgcgcccagtactggccagaccaaggctgctggacctatgggaatattcgggtgtctgtagaggatgtgactgttctggtggactacacagtacggaagttctgcatccagcaggtgggcgacatgaccaacagaaagccacagcgcctcatcactcagttccactttaccagctggccagactttggggtgccttttaccccgatcggcatgctcaagttcctcaagaaggtgaaggcctgtaaccctcagtatgcaggggccatcgtggtccactgcagtgcaggtgtagggcgtacatagtacctttgtcgtcattgatgccatgctggacatgatgcatacagaacggaaggtggacgtgtatggctttgagagccgtatacgaacacagcgctgacagatggtgcaaaccgatatgcaatatgtcttcatataccaagcccttctggagcattatctctatggagatacagaactggaagtgacctctctagaaacccacctgcagaaaatgtacaacacaatcccaaggaccaacaccaatggattataggaggagtttaagaagttaacatcaatcaaaatcccagaatgacaagatgcggactggaaaccttccagccaacatgaagaagaaccgtgttttacagatcatttccttaggaattcaccagagtgatcattccagttaagcggggcgaagagaatacagactatgtgaacgcatcctttattgatggctaccggcagaaggactcctatatcgccagccagggccctttttctcaacacaatgagggacttctggcgaatgatctggagtgggaaatcctgctctatcgtgatgctaacagaacttgaggagagaggccaggagaagtgtgcccagtactggccatctgatggactggtgtcctatggagatattacagtggaactgaagaaggaggaggaatgtgagagcttcaccggtccgagacctccttgtcaccaacaccagggagaataagagccggcagatccggcagttccacttccatggctggcctgaagtgggcatccccagtgacggaaagggcatgatcagcatcatcggccgccgtgcaggaagcagcagcagcagtcagggaaccaccccattcaccgtgcacttgcagccccgggggcaaggaaaggacggggaccttctgtgcccctgagcaacgtccttggagcgtgtgaaagccagaggggattttggatgtctttccagactgttcaagagcctgcgttaaccagaggccacaaattggttccagacaattggaacaatattgagttcttgcttacaaggtggtgccaggagtaatattggatgccattcctcagattaatgcccaacttcaaagtaaagcggcaaacaagggtcccgtggacccaggaggattgccctttaatattttggtaatattcctgttttgttaatataccccaaattgtgtattattctttataactgtttttgaaaattggtacataggctttctattaccctattaggtgggaaaattttatatgtaaaatgtgttagcactggatagtccctttttccaatgtttttatgggggaaattaaatagtgtgaatgttggattgatatccgtgaaatccttcagccgagaaaattgggctggatttgtgctttggttaataccatcctttccctaaaggaagattaatgcacaaaaatcccattccagggtagctctggcaccaactaagaaaaaaagcacaaagttctcagagctctcgaggaaagtggttgtccccgtaccaccgatgcactgtaaatatccctcccctctctccctggtcccctcccccatccccaaccactgattatcatggggagtaataggaccagagcggtatctctggtcaccacactagggactatcaggtaataaaaagctctgtactccctgaggaaaaaaa

SEQ ID NO: 145677 - DNA, 915 bp, Homo sapiens
atggaaaccagtgtgattgaaggtggattaaatatcactctcaccatccgactacttatgcatggaaaggaagttggcagtatcatcggaaagaaaggagaatcagttaagaagatgcgcgaggagagtggtgcacctatcaacatctcagaagggaattgtcctgagagaattatcacttttgctggacctgctaatgccgtcttcaaaggctttgctatgatcattgacaaactggaagaggacataagcagctctatgaccagtagcacagctgccagtagacccccagtcaccctgaggctggtggtccctgctagtcagtgtggctctctcattggaaaaggtggttgcaagatcaaggaaatacgagagagtacaggggctcaggccatcactattgctggcatcccacaatccatcattgagtgtgtcaaacagatctgtgtggtcatgttggagtcccccccgaagggcgtgaccatcccgtaccagctcaagccttccagctctccggtcatctttgcaggcggtcaggcctatacccttcaaggacagtttgccattccacagccagatttgaccatgctgcaccagttggcaatgcaacagtctcattttcccatgacgcatggcaacactggattcagtgcaggtttggatacatctgctcagactacttctcatgaacttaccattccaaacgatttgattggctgcataatcgggcgtcaaggcgccaaaataaatgagatccgtcagatgtctggggcacagatcaaaattgcgaacccagtggaaggatctactgataggcaggttaccatcactggatctgctgccagcattagcctggctcaatatctaatcaatgtcaggctttcctcggagacgggtggcatggggagcagctag

SEQ ID NO: 145678 - DNA, 866 bp, Homo sapiens
ctgccagtagacccccggtcaccctgaggctggtggtccctgctagtcagtgtggctctctcattggaaaaggtggatgcaagatcaaggaaatacgagagagtacaggggctcaggtccaggtggcaggggatatgctacccaactcaactgagcgggccatcactattgctggcattccacaatccatcattgagtgtgtcaaacagatctgcgtggtcatgttggagtcccccccgaagggcgtgaccatcccgtaccggcccaagccgtccagctctccggtcatctttgcaggtggtcaggcctataccattcaaggacagtatgccattccacagccagatttgaccaagctgcaccagttgggcaatgcaacagtgttcattttcccatgacggcatgggcaacaccggatttcagtgcaggtttgggatgcatctgcttcagactacttctcatgaactcaccattccaaacgatttgattgggctgcataatcgggcgtcaaggcgccaaaatcaatgagatcccgtcagatgtctggggcgctgatcaaaattgcgaacccagtggaaggatctactgataggctggttaccatcactggatctgctgccagcattagcctggctcaatatctaatcaatgtcaggctttcctcggagacgggtggcatggggagcagctagaacaatgcagattcatccataatccctttctgctgttcaccaccacccatgatccatctgtgtagtttctgaacagtcagcgattccaggttttaaatagtttgtaaattttcagtttctacacactttatcatccactcgtgattttttaattaaagcgttttaattccttaa

SEQ ID NO: 145679 - DNA, 781 bp, Homo sapiens
tttttttttttttttccaggaggaaataactttatttgaataggacccaagacagcatattgggctaaaggaggagaggtaaggttccaaaaccgcagttcaaagcttcatcaaccaaaatgggactctacttcccaggcaacccttgcagttagtgcaaccaacaaaaggcctgctggggaatgtatttgccactaaatttccccaagtatgccaacattacaaaaaagataggtttttcattcataattgaatttccacaaacctccccaatcaccaagtattataagtggaagtaaaaaatcaccattttaccagatctcaaaacttgtccttcaaacatttagttcatcatcttcaaaaaatagctcccctgccctaaattcattaagctatatgatctaaccaagcagcaaacaagatggccaggcccatggcaatcctcttccccatttcccctaggccactcaggggctcaacagcagggtgaggctcaggtggaggtagggggtggggagcacaagggctacattcccccagtacaacatgggcatctgaagcttgatggggagagcagaactgggtgagacttgaggggaagggtccaggggcctgtattcagtcaggaatcactgctggaagaggaggaggaagaggaggaatgcttgccatgcttgtggtacttgtggtgcttttggtgctttgtggcatctttttatgagctttcttcattttcttctgcatcttcttgtctactatcactgctggtccaaccatgcca

SEQ ID NO: 145680 - DNA, 1715 bp, Homo sapiens
  misc_feature (1)...(1715): n = a,t,c or g
aactggaagaggacataagcagctctatgaccaatagcacagctgccagtagaacccccggtcaccctgagggtggtggtccctgctagtcagtgtggctctctcattggaaaaggtggatgcaagatcaaggaaatacgagagagtacaggggctcaggtccaggtggcaggggatatgctacccaactcaactgagccgggccatcactattgctggcattacacaatccatcattgagtgtgtcaaacagatctgcgtggtcatgttggagtcccccccgaagggcgtgaccatcccgtaccggcccaagccgtccagctctccggtcatctttgcaggtggtcaggacaggtaccagcacaggcagcgacagtgcgagctttccccacaccaccccgtccatgtggctcaaccctgacctgggaggggaaccacctcttagagggcttattaccatttcaagggacagttattgccatttccacagccagattttggaccaaggttgcaccagtttgggcaatgcaacagtgttcattttcccatgacgcatggcaacaccgaattcaagtggtatggatacctcagtgtttatttctgtaaggtgtagtgcaagagagaggccagtcccaaggtcttcagcttggacatctgtttaaaacaaacttcgtttattccagcatcccgctggtttaaacttgcctgtctactaatggctaagccccaaggaggtaatgtgtttgttaacgtgggttttcatttggggtcaggttattctaaaagaaaaaaaaagccctgggaaggtttgggggtgaaggtttgggggaatgccttgtccaggccaaaagggtaaggcctgaatatttcctttgaagccccatccctgactgcctgccccccttgatcctgatccagcaccccctttctctcccacccagcaattcacaggcttggggtagagacccatcccatttgtgcccaaatttgtgtaggtgttttttttttgtttttgttttttgtttttaattnttgtttccggtttttgggggcttttctgtataaggaataacttgtccgatatggtttaggatgagaccaccaaactcatttttcacttgtatcttaacaggcattggaatccagctctccagaggtgaaaggctattggggtaatgattaaaaaaaaaaaaatctgtagtattctactgttatattaataaactggtgggagtcttgtttcactgcccatgaaccataccagcaacatgcacatggcagagaggagctgagagagcaaaggggtgggcctggagcccccgagggtcccttgatggatctggccaacccccttctaaaaatgatgagacagcagccatagctgagatcaggactaagctttgagtgttagcccagtgggcctgggttcagtccaggtgttgttaaagatgggtacgggtatttgctgatgggatttttttttctttctttttctttggaaaacaaaatgaaagccagaacaaaattattgaacaaaagacagggactaaatctggagaaatgaagtcccctcacctgactgccatttcattctatctgaccttccagtctaggttaggagaatagggggtggaggggattaatctgatacaggtatatttaaagcaactctgcatgtgtgccagaagtccatggtacccattaacaggcataat

SEQ ID NO: 145681 - DNA, 1477 bp, Homo sapiens
cctcctcctcctccacccccccttcctcctccgcccttccccttcccgcccgctccccttttcccctcacacgcctcgcgcctgcagtttttggctttcaccctcaaccatgtgaccaaagacttgaccactcaaagtccagctccccagaacacatgctcgacatggacaccggtgtgattgaaggtggattaaatgtcactctcaccatccggctacttatgcatggacaggaagtcggcagtatcatccggaaagaaaggagaatcagttaagaagatgcgcgaggagagtggtgcacgtatcaacatctcagaaggggaattgtcctgagagaattattcactttggctgggacccactaattgccatctttcaaagcctttgctatggatcattgacaaactgggaaggagggacataagcaagctctatggaccaatagcacagctgcccagttaggacccccggtcaccctgaagcttgggggcccctgctagtcagttgtggttctctcattggaaaaggtggatgcaagatcaaggaatatacgagagagtataggggcttcaggtccaaggtggcaggggatatgctacccaacttcaactgaggcgggccatcactatttgctgggcattccaccaatccatcatttgagtgtgttcaaacagatcttgcgtgggtcatgttgggagactctcttccccagttcccccccgaagggcgtgaccatcccgtaccggcccaagccgtccagctcttccggtcatctttggcaggtggtcaggacagggtacagcacaggcagcgacagtgcgagctttccccacaccaccccgtccatgtgcctcaaccctgacctggagggaccacctctagaggcctataccattcaaggacagtatgccattccacagccagatttgaccaagctgcaccagttggcaatgcaacagtctcattttcccatgacgcatggcaacaccggattcagtggcattgaatccagctctccagaggtgaaaggctattgggcaggtttggatgcatctgctcagactacttctcatgaactcaccattccaaacgatttgattggctgcataatcgggcgtcaaggcgccaaaatcaatggagatccgtcagatgtctggggcgcagatcaaaattgcgaacccagtggaaaggatctactgataggcaggttaccatcactggatctgctgccagcattagcctggctcaatatctaatcaatgtcaggctttcctcggagacggggtggcatggggaacaactagaacaatgcagattcatccataatccctttctgctgttcaccaccacccatgatccatctgtgtagtttctgaacagtcagcgattccaggttttaaatagtttgtaaattttcagtttctacacactttatcatccactcgtgattttttaattaaagcgttttaattccttt

SEQ ID NO: 145682 - DNA, 1440 bp, Homo sapiens
  misc_feature (1)...(1440): n = a,t,c or g
tttttttttttaaacaaagaatggctacttcataggcagagcagccacttttggctaatttttaacatccaaagctaataaataatcaagaagaaatagagaacattaacaaaataaattatgttctatttgggaatacctaatatcagatactaacaagtacagtgataagaataaaaaagataataatcacacataccttctaggttagtagaaaagttaggaaaagatattaaatttaaagaaaccaatattttgcatgcacacaaaaaacaaaggaacttcggctcatggatgtgggaaatcatggacccagcaggcaatccgtcttcctgggtccagattcactgggaagggcccgggtggggcccccctgggggaaggcccacggcaggaacctggctgggactttaactcgccagaaaaatcaccacccagttcaggaagtttgcagagggaaacctaccaatgggtccacggatatgactttccctggctcctggagggctccctctggaagaggcttgcagcattccagtcatagaatgtgggtgagcactacagcgggcagcctcccacacctgcttggctgtaagcccccagaaagcccccgaaggcccctctggctaaaaaagatcagactcaagcttggagcccctgnagttgatgccagcaaagacccatgtttaatgaacacccaaagctggcggtacagatgagggcctcaggggnctacaggcgggggcctggagggctgcggtgggctgagatgagtggcgacttccctcccatacctctccccgtgagagggattcaccccatccccctgcgagcctctcaacagtcctgtgaggaggacagcagggcatggggactggccccatttcacagctggggaaactgagttccagacgggtttgtcagcttgcccaaagccacacagggttcccggtccttcctcctgcaccactgagaagcccagtcagaggctacatgagcagatggtcaggggaggctaaagctccatgggaggagcaggcaatggtgtggggatggaaagtggcacggtgcaggggactccaagtggctctggctggaggccagcagggacgggggtgggggcaaggaactgctggtacctgcctctgtgaccccaggcttcccatggtccccagaacagccacttgggcctctgtgtctcccttctccccctccgtggtgaccagaccctcaagacgagttgaaggaggtcatggggcatggagggaggtcacaaggcagggggctgccccctatagtgcccagaggcaaggcctcccctggcacctacctgcgtctggccagcgcagggctcaggcagggcaggggcccaggggcccaaaggctgtaaggtgagaggctcacagaaaaccctgacacgtggccagccacagcctcgtg

SEQ ID NO: 145683 - DNA, 399 bp, Homo sapiens
tcaatgatcatgatagttatttagtaagaaataatggttgttaatcaaatacatgttatgtcttgtccttctctgatttttctgacttggattccttaatttgcagtgatgtcttagaaatggaaaaagtatcctctgggctttcagactttcagcaacaacagccagtgggatacctctgagttcttgtgttctagtctcttgtatgtcttgggtgtctccagccaaaatgcagttaatcaatattccatagaacggagcattgtcggaggtgactgctgtcctttctttccctggtatgtacatcattcctgggccacacttaaggaacagcgtctttttctggcccaacagcaacaggaagatcatgaggactgcacaaagtttgaggtgccacat

SEQ ID NO: 145684 - DNA, 556 bp, Homo sapiens
  misc_feature (1)...(556): n = a,t,c or g
cttctcatgagagtcagcttgccctctgaagtttttttttgtgttgtttttgagacagagtctcgctttgtcacccaggctggagtgcagtggcatgattttggctgactgcaacctccgcctcccaggttcaagtgattctcctgcctcagccccccgagcagctgggactacaggcatgtgccaccatgcctggctaatttttgtattttctagtagagacagggtttcaccatattggacaggctggtctcgaactcctgacctcaagtgatctgaccgccttggcctcccaaagtgctgggattacaggcatgagccactgtgtccggccagagacagggatttcaccatgttggccaggctggtctgtaactcccgacctcaagttcaagtgatccacccacctcagcctcccaaagtgctgggagtacaggcgtgcanccacgcctggctcatttcattttcaagatggggagacagatggttgatgagaagagacaataaaaattgtgggcaggttgggtgcagtagctcacgcctgtaatcccagcac

SEQ ID NO: 145685 - DNA, 846 bp, Homo sapiens
  misc_feature (1)...(846): n = a,t,c or g
tgagacagagtctctctatgtcacccaggctggggtgcacgtggcatgatcttggctcactgcaacctccacctcccaggttcaagtgattctcctgcctcagcctcccaagcttgaccacctttgacacctccctgaagagtatggagtgaagggatccagggccacagcttaggaacttgctgaagttgattacgtaggctattgattatgtaggctctcactacactttccagattgagaagttaacacattattggggcaatgctgtttttttctttaggtatacaaaggtggaatccttcttttcccctcaaaagcttgaaatcccagactgctaaaatttccaatttgagacatttaataggtatccctaggggnaaataaactcctaaattgaacaagtttagttatgccttatccatatatcaacattctaagaagaaatggagcccaaatttaaagcgtacatctgcctttaaatattaaaaatacaagattgcttcacttgggtgtctccagccaaaatgcagttaatcaatattccatagaacggagcattgtcggaggtgactgctgtcctttctttccctgggtatgtacatcattcctggggccacacttaaggaacagcgtctttttctgcatagccttgtgatacactaaggaatcatcccggcaggaggctccaataggcctgagggaaaacccctctccaaaatgggggtcattctccgtgggccttctctttgcccgaactcacttctgggtattggggggagccatctatctgtaaggggcaaaggcattcagatatgaaaaggttttgacacccctgcttggaca

SEQ ID NO: 145686 - DNA, 426 bp, Homo sapiens
accctgtgagtgtgttaggttatatggcaaaggtggaattacagttgcagatggagttacaattgctaatcagcaagatggggagattatcctgggttgtccagttgggtccagtgtcatcacaaaggtcccttttaagtggaaagagaagcaggagagagagcagcagagtcagagatctgaagatgctgctggccttgaagatagagaaaggggcccacctgccaaggagctcgcccgtcagcgaggagtcctggagcgcacagagaagatggtggacaagatggaccaagatttgaagatcagccagaaacacatcaatagcattaagagcgtgtttggggggctggtcaattactttaaatccaaaccagtagagaccccacctgaacagaatggcaccctcacctcccagcccaacaacag

SEQ ID NO: 145687 - DNA, 1719 bp, Homo sapiens
atggcagcccactgctgggacctgaaggaggtcaatgcacagcccatcctggagggaagcaaggaatataagcaccagaactttaacaactacttaatgggactaaagcggccaaggtcacagacatttgataagctagaagtcaggttagcaccaatctgccgggaccttctcaccccgaaggtgcatgataaaatcaaatatgagaaccgacaaggccaaggaccagataaggatacagaggctctaagagttaaatttacccaagaggacatgaccgagagccgcgccggcaccatgtcagcttaccctaaaagctacaatccgttcgacgacgacggggaggacgaaggcgcccggccggccccttggagggacgcccgagacctccccgacgggcccgacgcgcccgcggacaggcagcagtacttgcggcaggaggtcctccgcagggctgaggccacggccgccagcaccagcaggtccctggccctcatgtacgagtccgagaaggttggggtcgcctcttccgaggtgagtaaaaattctgaacagcaggtcctaggtttgggaaatggagagtccgtttcttcgacattatttcctgtgcaaaatctggcacagggttttggccattccttccggagtgagccagaaagagaggactatgtgcctgcgagtgtcagcacacaacagtcacccacactgggcattccattcagaggtgggagagaggaggacacccctcctggcccaggagcagaggccatcaaggtgtccccggaacttagagtagatacattgccaaaagccacccaagtccgttcagggacctcattctcccacgggaagttggagaagatgggccgtggctctgcggaggggggtgtggacctgcctcggtacctggagcggttgaggcctgtcttggtggtggctggggcacaggagctcgcccgtcagcgaggagtcctggagcgcacagagaagatggtggacaagatggaccaagatttgaagatcagccagaaacacatcaatagcattaagagcgtgtttggggggctggtcaattacttcaaatccaaaccagtagagaccccacctgaacagaatggcaccctcacctcccagcccaacaacagaccccgtgagtgtgttaggttatatggcaaaggtggaattacagttgcagatggagttacaattgctaatcagcaagatggggagattatcctgggttgtccagttgggtccagtgtcatcacaaaggtcccttttaagtggaaagagaagcaggagagagagcagcagagtcagagatctgaagatgctgctggccttgaagatagagaaaggggcccacctgccaagctgaggagagcccagatggaggaagagcggggagcaggagagactaacatcatcagcacagttcattctggaaaggcaagtggaggaaaccctgtccccagaggggctggttctgccatgagtactgatgcttacccaaagaacccacaccttcgagcctatcaccagaagatcgacagcaacctagatgagctgtccatgggactgggtcgtctgaaggacatagccctggggatgcagacagaaattgaggagcaagatgacattcttgaccggctgacaaccaaagtggacaagttagatgtcaacataaaaagcacagaaagaaaagttcgacaactctga

SEQ ID NO: 145688 - DNA, 2139 bp, Homo sapiens
ggtcggcgggcggggcgaggccctggacggtggcggcagtggggctcctccttctgtttcccagactgagagccgcgccggcaccatgtcagcttaccctaagagctacaatccgttcgacgacgacggggaggacgataggcgcccggccggccccttggagggacgcccgagacctcacccgacgggcccgacgcgcccgcggacaggcagcagtacttgcggcaggaggtcctccgcagggctgcagccacggccgccagcaccagcaggtccctggccctcatgtacgagtccgagaaggttggggtcgactcttccgaggagctcgcccgtcagcgaggaagtcctggaagcgcacagagaagatggtgggacaagattggaccaagatttgaagatcagccagaaacacatcaatagcatttaagagcgtgttttgggggggctggtcaatttactttcaaatccaaaccagtagagacccccacctgaaacagaatggcaccctcacctcccagcccaacaacagattgaaagaagctataagtacaagtaaagaacaggaagcaaagtaccaggccagccacccaaaccttagaaagctggatgatacagaccctggtcccccagaggcatgggcttctgcccctggagtactgatgcttaccccaaagaacccacaccttcgagccctatcaccagaagatcgacagccaacctagatgagcctgtccatgggactgggttcgtctgaaggacatagccctggggatgcagacagaaattgaggagcaagatgacattcttgaccaggctgacaaccaaagtggacaagttagatgtcaacataaaaagcacagaaagaaaagttcgacaactctgaagacagacggatttccactctattgtgatgaaaagatttgaaagatctttttttgaacttccaagaaatttcatttactattttagtatgtaaattaatgtgtgtttgcaaatgttataatagagtaggtcttaagacatttttgctgttataagggaagtgtttgtcccacattttcctagggttaacacctcaccaagttcttccagcaaaatggcttattagagtttttgtctgagcacagtagcctggccgtgcatatcttgggcgtttgattactatgttggaataagaagagttgcatttctcattttaatgagcatatggaaagatgggaacagaatttcagtccttgccaggcccatgagcctctatttctcattcctaagccttaccatgagtcagagtgttaagggggcctgtgaaccagtcgtttggtggaggagggtccttcccacacctttgtttaggagtcatcattcacacacacacacacacacacacacacacacacacacacacactctctgagcacattatctgtgattctttcatcctcccagaaaggatcagtgttagaatgggaaatagagtgtgccatcttgctcttttgttggcagatgtccccgcttccctccagccccccatccttggcatgtatattagtaggagggcttcacaccagcactgctcactgcgactcctggaaatgtgtggggaattgggtgagcccctcttccccacgtggctcccatctgttaactctccatctgtgatttggcaacaggtctttccactgggctcgaggctgcgaggctgaccgacaggggcgcccaatagagattgtgggaatggagtattgcacagatgcagctgcacaatgggcttccttcacccctctgggaatcaccattaggcaggcctcagtagggcaaaatgtttatttggtaccgggggtctcctgacctgtctagcattcccacccactcttctgcacttcttgcaaggtaacttgaatcatcacttatttctctgccacctggttttaggactggcactctataaatgacgctgactttgtatagaaggattttgctaagggggcaaaaagcccagataccattttaactgggcccagctcattttctcctttcattttacaaaagaaatcatgcagaagcatcaattaaaactgatttatttatgttggtacatccaacaaaatagttggagccacaaggcccttgtctttt

SEQ ID NO: 145689 - DNA, 1875 bp, Homo sapiens
aaagaagtggaaagggaggagcgtgcaggagagacaggagaagagaataactaaacaaagacattaaagacaaaaaaaaagtaggaaagggagacttagaaaatattaaaagccaccaaaaacacatccaaagacggtttccccttacgttagttgggctaaaagaaagcaaatgggaagaaggttttaaattgattatcccagtgacaaatcccaggaagctttcacatcaaatcaccctattctgggtttttaactccttccatcgagtttaacctctttacctcccacatcctgggtaaaccctgccccctcccttaccgccccctttgctgggtgatttaaatcctggaaggttacacgagtattttcagtggaatggaatgggcttaacaggaaaaggggcctccccttccccctttaccctgggcgggtgttttttcagttttattccacttttccggccctttttccctttaatggaacacagggcttaattttcggggccttgttcgaagggaaggaggctggcaggacgtttattgaggttaggtggctgggatttcccgttatttcgtcgcataaggatccttctttgtctgcgaagggaaaaacacactgattattcattaatggagggtgaactgggccaccgccggggccgggggcgaatgtggcttcttaagccacacttctaattttggtgatggagccgacatttctttggcttctcatttaagtctttgcctctgtcccagtgcgaagtccattcagcggggttgaaagttgcaggcagctttgggaagggggccgtcggaaaagggttgcatttgtagaaaagtggcttttgttcggatccttcgcacaagatgcaaatggcccagagcaattcattcccctttccttcaaagagctgaggactgggggggcccactggtgatcagttcccccaactcctagctctccctctgacctcatctcaggaccccattgaggacatcccaaaactcacctcaagatcacccaagtggtaggaaagtacctaactcctggggcatagcccctaggggagtgacctacaatgtggaatactcatggaatgcctagccagggtgaagaagtgaatggcatgttggcaatcccagagggacccccctttaaggagggcatagtttgggggttcagatttgacatccagcatactgttgaaattggggcacagggggctagtgattagtcaggatccaatcagtgggagagggagatttaaaactcacatctgggagtcccggaatcagaacttgtagttctttttttttgaaatggagtctcgctctgtcgcccaggctgggagtgcagtggcgtgatctcggcttcactgcaacctttgccttccgggttcaagcaattctcccaccttcagcctcctgagtagctgggattacaggcgcccacccaccacagccggctactttttgtatttttagggagagacggggtttcaaccatgttggtccaggctggtcttgaactccctgaccctcatgatccaacctgccttagcctccccaaagtgcctgggattacaggccgtgagcccacccatgcccagcccctatagtagttccttcttttgccccttgaatatcctcaccccacatgtcctgtaccctggcctgaaccctccttcctctttttgttctgatctttgagctccctagagcccataattctttagagcaggtatgtcccgagtctgaaacatgcccttatttgtcccaagctctggaaatttctcaccccaaggcggatcaatcatgattaaatcactccaattaaactttaggctccagtcagaccttcagccaaatggaa

SEQ ID NO: 145690 - DNA, 336 bp, Homo sapiens
ggcacgagccaggattgagtcctatgaaggaagggaaaagaaaggcatatctgatgtcaggaggactttctgtttgtttgtcacctttgacctcttattcgtaacattactgtggataatagagttaaatgtgaatggaggcattgagaacacattagagaaggaggtgatgcagtatgactactattcttcatattttgatatatttcttctggcagtttttcgatttaaagtgttaatacttgcatatgctgtgtgcagactgcgccattggtgggcaatagcgcttttctctcaaggggcttttggctatgtgctgcccatcatttcattcat

SEQ ID NO: 145691 - DNA, 1811 bp, Homo sapiens
  misc_feature (1)...(1811): n = a,t,c or g
ggttacagttctgttcatgcattacgccattcctggcacgagggcgcggtataagatggactgggtcccggtcacgccccgccaagccccgcccctcatgccggggcgcgaccgcggatccgcagttcccgggccagcctggggcggccggccaggaaccacccgttaaggggtcttctctttaaggatggtgaggttggaaaaaggctccttgtaaccctcctccaggatgaaccaccgtgccagaagacatggagaacgctctcaccgggagccagagctccattgcttctctgcgcaatatccattccatcaaccccacacaactcatggccagggattgagtcctatgaaggaagggaaaagaaaggcatatcttgatgtcagggaggatttctgtttgtttgtcaccttttgacctcttatttcgtaacattactgtgggattaataggagtttaaatgttgaatgggagggcatttgaggaacacatttaggagaaggaggtgattgcagtattgacttactatttcttccatatttttgatattatttcttcctgggcagttttttcgattttaaaagtgtttaatacttgcatatgctgtgttgcaggactgcgccattggtggggccaatagcgtttgacaacggccatgaccagtgcccttttactagccaaagtgatccttttgaagctttcttctcaaggggcttttggtatatgtgctgcccttcattttcattcatccttgcctgggattgagacgtggttcctgggatttcaaagtgttacctcaagaaagcggaagaagaaaacagacntccctgatagttcaggatgcttcagagagggcagcacttattacctgggtggtctttctggatgggtcagttttattcccctcctggaatccgaaggcaggatcttgaaggaagcttgaaggaaaaacagggacagttgaggaaaccactttttaggaactatgagtactactttttgtttaaatgtggaaaaaccctcacagaaagtcatcgaggcaaaaagaggcaggcagtggagtctccctgtcgacagtaaagtttggaaatggtgccgtcccctgctgggctttatttgaacagcttaattaaaggtttattttatttgtaattaccctcacagacgttgttaccatattccatggcacatttagttggcctgcctgtggctggggtaagggtaatgtccatgattcatcctctcttcagtgagactgagcctgatgtgttaacaaataggtgaaggaaagtcttgtgctgtattccctaatccaaaggccttaatatattggaagtaaccacttttttaggtaaggcaaggatacctttttattttcaatttcacagaatgggaattttttttgtttcatgtctccagatttatttggtatttcctttttaaacactccaacattccccttgttttttaaccccatggcacaggtgcccccttggtaccagttttaaaaaagtggtaataaaatcctgacatgtcaatgtggcctagttttatttttcgttgttttgcattatgtgtatggcctgaagtgttggacttgcaaaaggggaagaaaggaattgcgaatacatgtaaaatgtcaccagacgatttgtattatttttatcatgaaatcatgtttttctcatgattgttctgaaatgttcataaatactcttattttgaatgcacaaaatgacttaaaccattcaatatcatgtttcctttgcgttcagccaatttcaattaaaatgaactaaattataaaaaa

SEQ ID NO: 145692 - DNA, 515 bp, Homo sapiens
tcaccttgccagggacccttgttttcagctacggggatgaaattggcctggattcagctgcccttcctggacagcctatggaagctccagtcatgctgtgggatgagtccagcttccctgacatcccaggggctgtaagtgccaacatgactgtgaagggccagagtgaagaccctggctccctcctttccttgttccggcggctgagtgaccagcggagtaaggagcgctccctactgcatggggacttccacgcgttctccgctgggcctggactcttctcctatatccgccactgggaccagaatgagcgttttctggtagtgcttaactttggggacttcagcctgacatggacccactacccttctcctttccttcccaggccctttggcttctgatttttctcttttttaaaaacaaacaaacaaactgttgcagattatgagtgaacccccaaatagggtgttttctgccttcaaataaaagtcacccctgcatggtgaaaaaaaaaa

SEQ ID NO: 145693 - DNA, 618 bp, Homo sapiens
  misc_feature (1)...(618): n = a,t,c or g
agaatctgaggnatgcatcntcattcttgggtgagtggcaaaatatcacaagggcttcagtgaagacaggctcttgatgccggggactaactcctccgaccttcagcagatcctgagcctactcgaatccaacaaagacttgctgttgactagctcatacctgtctgattctggttctactggggagcatacaaaatccctagtcacacagtatttgaatgccactggcaatcgctggtgcagctggagtttgtctcaggcaaggctcctgacttccttcttgccggctcaacttctccgactctaccagctgatgctcttcaccctgccagggacccctgttttcagctacggggatgagattggcctggatgcagctgcccttcctggacagcctcacgaagggctgctgctccgcttcccctacgcggcctgacttcagcctgacatggacccactacccttctcctttccttcccaggccctttggcttctgatttttctcttttttaaaaacaaacaaacaaactgttgcagattatgagtgaacccccaaatagggtgttttctgccttcaaataaaagtcacccctggatggtgaagttttcccttttaaa

SEQ ID NO: 145694 - DNA, 2246 bp, Homo sapiens
  misc_feature (1)...(2246): n = a,t,c or g
tgctgcagtcgttttantgatccccgtcngtcgccggntctgcaggcaccatgagccaggacacccgaggtggatatgaaggaggtggagctgaatgagttagagcccgagaagcagcccgatgnncgcggcgtctggggcggccatgtccctggcgggagccgagaagaatggtctggtgaagatcaaggtggcaaaagacgaggagatgcagtagccgaaaactgcgcggaggcacgagaggccggggagagcgttctgggtccgagggtccaggtaggggttgagccaccatctgaccgcaagctgcgtcgtgtcgccggttctgcaggcaccatgagccaggacaccgaggtggatatgaaggaggtggagctgaatgagttagagcccgagaagcagccgatgaacgcggcgtctggggcggccatgtccctggcgggagccgagaagaatggtctggtgaaagaaattttcccccaaaaaaaaaaggggggggggtcggcggaagacgaggcggaggcggcagccgcggctaagttcacgggccctgtccaaggaggagctgctgaaggtggcaggcagccccggctgggtacgcacccgctgggcactgctgctgctcttctggctcggcttggcttcggcatgcttgcttggtgccgtggtcataatcgtgcgagcgccgcgtttgtcgcaagctaaccggcgcagaagtggtggcacacggggcgccctctaaccgcatcggcgaacctttaaggcctttccaggggcaacggcgcggggcaaacttggccgggtctttaaaggggcgtctcgattaccctgagctctctgaaggtgaagggccttgtgctgggtccaattcacaagaaccagaaggatgatgtcgctcagactgacttgctgcagattcgaccccaattttggctccaaggaagattttcgcagtcttcttgcactcggttaaaacaaagaacctccggggcattctggacccttactcccaactaccgggggtgagaactccgttggttctccactcaggttgacacttgtggccaccaaggtgaaggatgctctggagttttggctgcaagctggcgtggatgggttccaggttcgggacatagagaatctgaaggatgcatcctcaattcttgggctgagttggcaaaattatcaccaaagggcttcagtgaaagacaggctcttgattgcggggactaactcctccgaccttcagcagatcctgagcctactcgaatccaacaaagacttgctgttgactagctcatacctgtctgattctggttctactggggagcatacaaaatccttagtcacacagtatttgaatgccactggcaattcgctggtgcagctggagtttgtctcaggcaagggctcctgacttccttctttgccggctcaactttctccgactctaccaggctgatgctcttcaccctggccagggacccctgtttttcaagctacggggaatgaagattggcctgggatgcagctgccccttnctgggacagcctatgggaggctcccagttcatgctgtggggatgaagtcccagctttccctggacatcccagggggctgttaagtggccaacatggattgtggaaggggccagagtgaagaaccctggctcccttcctttccttgtttccggcggctgaattgaccagcggagtaaagaagcgcctccctactgtcatggggaacttccaacgcgtttctcccgcttgggccttggactctttctcctattatccgccaactggggacccagaatgaaacgttttctgggtagtgcttaaatttgggggatgtggggctctcgggctggaactgcaggcctccgacctgccttgccagcgccaagccttggccagccaaggctgacctcctgctcagcacccagccagggccgtgaggaggggctcccctcttgagctggaacgcctgaaactggagcctcacgaatgggctgcctgctccgcttcccctacgcggcctgacttcagcctgacatggacccaactaccctttttcctttccttcccaggccctttggcttctgatttttctcttttttaaaaacaaacaaacacacactgttgcagcattttgagtgaacccccaaatagggtgttttttgccttcaaataaaagttcccccctgcatggtgaagtcttccctctgcttctctcataaaaaaata

SEQ ID NO: 145695 - DNA, 905 bp, Homo sapiens
gtttccaaacacgttagcctaagaatttcgagtcatgcaaaaaataaattcccagagtcgcagggttaaaaaaaatcagattccagggccccatccttgttgttcctgagtcagactccccagtcaaactgccagagaacctcttctttgaacaaacacttcaggcaactttcccaggataaagcaagtttcagaaactctcacacagcttcttatgtatctcagatatggctcttgccctccagatgtttacaaatgaaaacaagaaatctggttccaacaagcaaaagcccagagagacctcaaacacaaagatgcgaatcaaaattagtagagaaataaatgagccgggacgttgtacttcggtcgcggggctggctgaggtcactacctgcacagccgactgttggaagttctgcggtataccagctgaatggccttgaacaagtcccatctccactcggagcctccgtttccgcatctgtagaatggggatatgtgggcctaactcacagcgttgtgaaaaattcaacaagaacaacatcaagcagctgtgaaatgtagcaagccggcatttgattaaatgttagttttcgtcctaagaaaaatagctaatatttctgagcacttaacggccgagccctgagctaacatttacttcctcctttaactcccacaacaacccaatggggtagggatctattattatcccccatttcacagatgcggaaattaagacacagaaaggttaaaaaaaaaacacgcacaggccaggcgtggtggatcaccccctgtaatctcagcactttgggaggtggagcctggaggatcgcttgaggccaggagtttgagactagcctgggcaacatagcaagaccctgtctctataaaaaaaaatttaaagc

SEQ ID NO: 145696 - DNA, 591 bp, Homo sapiens
ggcacgaggccgccaggaagtacaagcaggctgccaagtgcctcctgctggcttcctttgatcactgtgacttccctgagctgctgtcccccagcaacgtggccatctacggtggcctgtgcgccttggctacctttgaccggcaggagctgcagcgcaatgtcatctccagcagctccttcaagttgttcttggagctggagccacaggtccgagacatcatcttcaaattctacgagtccaagtacgcctcatgtctcaagatgctggacgagatgaaggtgggccccgcctggggtaggggtgaggtggggccctgcctggcctcctgtcctggtcctgaccagccccttccccaggacaacctgctcctggacatgtatctggccccccatgtcaggaccctgtacacccagattcgcaaccgtgcccttatccagtatttcagcccctacgtgtcagccgacatgcataggatggcggcagccttcaataccacggtggccgccctggaggacgagctgacgcacctaatcctggaggggctgatcagtgcccgtgtggactcacacagcaagatcctatacgccg

SEQ ID NO: 145697 - DNA, 2443 bp, Homo sapiens
ggggctggtcctcctgcctcctggggttgaggtggcgtcccgttcttctccgtggcttggaggaaactacatcaggatggtggctgggaacgtgtaggggccctcagaggcccctgtgtagttggttgtcccctgtctgctttctggctttcagagatgagcggctagaatcaggcgaggggtttctgcttctgagccttagagtcttgtgaggagacccctccctgatgtggtggcacaggagcctgggtgggggcgggggtgactgggagggcacacctgggggacagcagcggcgggagtgtggtccgactggcctggaagatcttgggcagagctgacctcagagaacagtgcgggtctctcgccctcctggggcagtccccaggacgaggtgccaggtgcctggcccatgttgcagggggccgtggagcccatgcagatcgacgtggacccccaggaagacccgcagaatgcacctgacgtcaactacgtggtggagaaccccagcctggatctggaagaattcgcggccagctacagcggcctgatgcgcatcgaacggctgcagttcattgctgatcactgccccacgctgcgggtggaaggccctgaagatggccctctccttcgtgcagagaacctttaacgtggacatgtacgaggagatccacccgcaagctctcagaggccaccaggtcctctctcagggagctgcagaacgcaccccgacgccatccctgagagcggcgtggaacccccagcccttggacacggcctgggtttagtgttacgcggaagaaggcgctgctgaagcttggagaagctggacacagacctgaagaactacaagggcaactccatcaaagagagcatccggcgcggtcacgacgacctggggcgaccattacctgggattgtggggacctaagcaacgccctcaagctgctattttccggccccgggactactggaccagcgccaaacacgttattaacatgtgcctcaatggtcatcaagggtcaacggtttactttgcagaattggtctcatgtgctcagctacgtcagcaaggctgagtccaccccagagattgccgagcagcgaggagagcgtgacagccagacccaggccatcctcaccaagctcaagtgtgccgcaggcttggcagagctggccgccaggaagtacaagcaggctgccaagtgcctcctgctggcttcctttgatcactgtgacttccctgagctgctgtcccccagcaacgtgggccatctacggtggcttttgcgctttggttaccttttgacccggcaggagctgcagcgcaatgtcatcttccagcagctcctttcaagttgttcttgggagctgggagccacaggttccgagacatcatcttcaaattctacgagtccaagtacgcctcatggcttaagaaggcttgacgagatgaaggacaacctgctcctggacatgtatctggccccccatgtcaggaccctgtacacccagatttgcaacccgtgccctcatccagtatttcagcccctacgtgtcacccgacatgcataggatggcggcagccttcaataccacgggtggcccgccctggaagaacgagctgatcaagtttatcctgggaggggctgatcagtgcccgtgtggacttcacacagcaagatcctataacgcccgggacgtgggatcagcgcagaaccaccttttgagaaagtctctgtttgatggggcaaggagttccagcgccgcgccaaggccattgatgttgcgggcagctgttgctccgcaaccagatccatgtcagttacccgacccagaggaaggacgccaggggggagctgactccagccaacagccagtcccggatgagcaccaacatgtgaggggtgaaccttggcctccaagaacattttgcacccccccttccccaccttccacgggacctcggaccttccaaggcgggctcaagttgctgtgcggcccagcttaagggggcctggccactagggtgccacccacgcctgtgtgccctccctgggggctgaaggaggccaggcggctgctaagttgtggcccttccttggaaggagaaggcctgcaagggttcgaccctgttgggttttctgtcccgagggaagcaagactgtgcggcacccaggcccaagttggaaccatttcccagaacccttcttgttcccgcctcagtcaggtgcagacaagtgggcggtgtccattaaagagcagactcagcgttgctcttggctgttctttcctgccgtgcaggctctggtcacccctgggtggccttgggttcctgagggctgtctccctgggactaggcttggaggcagggcctggtgagagaaatgagaagcctggccctcagattcaacagcccccagcagcagccactgtggcctcg

SEQ ID NO: 145698 - DNA, 1105 bp, Homo sapiens
ggcacgagcaaagttgtcatgaatactgacttgggcgtgggacccatccgagatgtgctggaccacatctacagtgcgctgtatgtggagctggtggtgaagaatcccctgtgcccgctgggccaaactgtgcaaagtgagctctttcgctcccgactggactcctatgttcgctctctgcccttcttctccgcccgggctggctgaagcaacctacctcaagtctcaggagaattcatgtctgcctggggcccttccgggaacccgagcccaaggagtgggggcggccccggagcgaggctcacactccccgccctgcagaatgactgtccacaacctgtacctgtttgaccggaatggagtgtgtctgcactacagcgaatggcaccgcgaggaagcaagcaggggatctcccaaggaggaggagtataaggctgatgtacggggatggctcttctctatccgctcgtttgtcagcaagatgtccccgctagacatgaaggatgggcttcctgggccttccaaacttagccgttacaaactccattactacggagacgcccactggggatcaaagtttgtcatgaattactgactttaggcgttgggacccatcccgagattgttgctgcaccaacatcttacaagtgcgcttgtatgtgggagcttggtggtgaaagaatcccccttggtcccgctggggcccaaaactgtgccaaagtgaagctcttttcggttcccggacttggactccctatgttcgcttctctgccctttctttctcccgcccagggctgggcttgaagcaaccttacctcaagtcttcagggagaattcatggtctgcctggggggcccttccgaaccttgtgccaactaaaggggcccccactgtaagcccccgtacccccaccccttggcccagagcaacatcctaaaaggcctgccctggatgctctcctcctaccagagtgaagcccacaggagtccctccacctccacaccaaggcccttctctccaagttttatcccctgcctaaatgctgcgaggaagcacaggaataaacctttttgtcactctcaaaaaaaaaaaaaaaaaaattcct

SEQ ID NO: 145699 - DNA, 540 bp, Homo sapiens
caagtgatccagcaaggtcggcagagcaagggcgttacgcagaaggacctggccacgaaaatcaatgagaagccacaggtgatcgcggactatgagagcggacgggccatacccaataaccaggtgcttggcaaaatcgagcgggccattgatgtgggaaccaggagtgctcgtgtgctgagagcccagtgaggcacgggagcggcgtggccccccttccctgggaagatgttgaagaggggccagcgtttgggggaggagggagctggtgctgcagtggccagtggctgtggctcatttcaggcctcaagctccggggaaaggacattggaaagcccatcgagaatggggcctagggcgaaatgaacacaaagcctcgaaatcagtgcgctccagctgatctcgttccgccggttccccttggccgccagttccgttcatctcacgggccgaacggaacaaggggtccagcttgcgggggaccctccccagcccattcctgctgtcaaacaaacaaaaccttgcaaagcgaaaaaaaaa

SEQ ID NO: 145700 - DNA, 764 bp, Homo sapiens
  misc_feature (1)...(764): n = a,t,c or g
ggacgtagcgtcgccgcgccaggtttttagcagctgtcgctgagccgccggacggacgcttgttttttgtccgccatggccgagagcgactgggacacggagacggtgctgcgcaagaaaggcccttacgcccgcccaggcctaatccaaggcaggctatcttagcggcacagagacgaggagaagatgtggagacttccaagaagaggtgttgctggccagaacaaacaacaagctattaccaagaacacggccaangctgggacgggaagacagaggaagctgcaaccatgacaagggttgaccccttgaaggtggggcaagggtgattcaaaccaaggtggcaaaagcaaggggcttaaccccaaaaggacctgggccacgaaaaatcaatgagaagccacaggtgatcgcggacttattgagagcggacgggccaatccccaaaacctaaggtgttttggataaaatagaagcgggccattggccgtcaagcctccggggaaaggaccattggaaagcccatctgagaaggggcctagggcgaaatgaacacaaaagcctcgaaatcagtgcgctccagctgatctcgttccgccggttccccttggccgccagttccgttctcctcacgggccgaacggaacaaggggtccaagcttgcggngggaccctccccaagcccacttcctgcttgtcaaacaagaggaaaccttgcaaagctaaaaaaaaaaaaaaaaaaaaaaaaaaaaaagtcgtatcga

SEQ ID NO: 145701 - DNA, 436 bp, Homo sapiens
ctcgcaggaccatgtgcggggcttcctggagaaggagtcggctatcgtgagccggcccctcaaccctttcacagccaaggccctctcgggcaccagcccaggtgactcagatgatgtccaacctgggcccagtgtgggtcctccaagtaaggacaaggacaaagtgctgcccagcttctggatcccgtcgctgacgcccgaagccaaggccaccaagctggagaagccgtcaccctcgaatgcgtggagaagctgattcggaaggacatggtggaccctgtgactggagacaaactcacagaccgcgacatcatcgtgctgcagcggggcggtaccggcttcgcgggctccggagtgaagctgcaagcggagaaatcacggccggtgatgcaggcctgagtgtgtgcgggagaccaaataaaccggcttgggtgcg

SEQ ID NO: 145702 - DNA, 461 bp, Homo sapiens
  misc_feature (1)...(461): n = a,t,c or g
gaccgagggactgggagtcgttagtgaggatgacgcggcatggcaagaactgcaccgcaggggccgtctacacctaccacgagaagaagaaggacacagcggcctcgggctatgggacccagaacattcgactgagccgggatgccgtgaaggacttcgactgctgttgtctctccctgcagccttgccacgatcctgttgtcacgcctacgagaagcagcggggcacccggcgcgaggagcagaaggagcttcagcgggcggcctcgcaggaccatgtgcggggcttcctggagaaggagtcggctatcgtgagccggcccctcaaccctttcacagccaaggccctctcgggcaccagcccagatgatgtccaacctgngcccagtgtgggtcctccaagtaaggacaaggacaaagtgctgcccancttctggatcccgtcnctgacgcccgaagcca

SEQ ID NO: 145703 - DNA, 449 bp, Homo sapiens
cccacgcgtccgcccacgcgtccgttgaggcccaaagatggacaggcacttgagcttggtcacagtcaaaagggtggaggggagtcagccgtcagcccctccaccaagctgccactcagtgaccaggcctgtctgcctctcaccctccagggttgacaactccctgtgggttcagcccgtggccccagcacacaggcagcggctcccaactgcctgtttctctctgagtcccccacccccaccaccgcgttgtctctgtgcctctctctggggctttggagacggacatgtctcctgttgctccgcccctccatcactctgcccatctctgtccccagcggcctcgggctatgggacccagaacattcgactgagccgggatgccgtgaaggacttcgactgctgttgtctctccctgcagccttgccacgatcctgttgtcaccccag

SEQ ID NO: 145704 - DNA, 1069 bp, Homo sapiens
aatagaaacgcgctgtacgccgcgctgcaggaattcggcacgaggggagtcgttagtgaggatgacgcggcatggcaggaaactggcaccgcaggggccgtctacacctaccacgagaagaagaaggacacagcggcctcgggctatgggacccagaacattcgactgagccgggatgccgtgaaagactttcgactgctgttgtctctccctgcagccttgccacgatcctgttgtcaccccagatggctacctgtatgagcgtgaggccatcctggaagtacattctggcaccagaagaagggagattgcccggcagatgaagggccttacgaggaaggcaggcgggggcacccggccgccgaaggagcagaaggagcttcagcggcgcggcctcgcagggaccatgtgcggggcttcctgggagaaggagtcggctatcgtgagccggcccctcaaccctttcacagccaagggccctctcgggcaaccagcccaggtgactcagatgatgttccaacctgggcccagtgtgggtcctccaagtaaggacaaggacaaagtgctgcccagcttctggatccccttcgctacgccccgagccaaggccaccaaggctggaagaagccgtcccgcacggtgacctgcccccatgtcaagggaagccccctgcggcatgtcggaacctgaacgccccgtgcactttcacaaccgctaaaacagctcccgtggaaccccgtggggcttcaatcaccccgcaagcgagcgcctacgtgtgtgcccgtgacccgcgaacagcctgagcaaacgccaaccccctgtcgctgtgctgcggccctctggggctgtggtcaccctcgaatgcgtggaagaagctgattcggaaggacatggttggaccctgtgactggaagacaaactcacagaccgcgacatcatcgtgcttgcaagcggggcggtaaccggcttcgcgggctccggagttaaagctgcaagcggagaaatcacggccgggtgatgcaggccttgaggtgtgcggggggacccaataaacccggcttggggccgc

SEQ ID NO: 145705 - DNA, 689 bp, Homo sapiens
ctagtccagagtggtggaattcgcgaagatggcggagaacagcggtcgcgccggcaagattattcgggacgacagcggcgtgaagggggcggtgtcccatgagcaggtgattgctggccttcaaaccaccttcggcaggaaccagcgaggcctggcatcccaaagccagctgagttgggagattggaagttgaatgaagccacagccttagtgatcgataccactggaagggaggtaggatgaaactccgtaagtgctaccgcatggtttggaaggagttcttggtggaagccaacttgtcaaaagaggttgcttgccccgcttttggaagaacaacaaaggagcaagatacagaagatcatttgagacacttgacacagcagctttcaggcaaagggaaaagaactaaaatgaatttccgggaaaaagcacaacattccgtcctcatgggagaagatgagaagcccagccagcccaaggaaaactccagaagggggcttggggcttaaggccagcttcagctggagttgtttggtctcctagggaccaaggcctttgcatttttttcttaccctgactcccacttcttaatttctctttatttgttattattattattttctcttgctatttgttaatattttttttgtttaatttaaatgttttgggtccaggatctttaaaaaaaa

SEQ ID NO: 145706 - DNA, 3812 bp, Homo sapiens
  misc_feature (1)...(3812): n = a,t,c or g
tccctnccccaacccctcaccctaaatgttttgaaagggcaanccccccaatcccttcaancctaaataccccaataatatcaacgcccttcctgcaaacccaaacccgactgaatgacctggagaggatggcctacctattttcacccaatctggtgaagtaagtgaagttcttggcgttgtggagaaggacctaggaaggtggtggttttggggatgtgataggtcactcaggccccatgacaggtgaatgcttctgtgtgagaaggcagcacggctgaggaagctcactttgcatcagggagcacaaggacccaggccgtacagacactccgcctcccagcacttgatcagagattgtgtttatcctacagaaacagatgacatgtgttgggcatcactccccacggtcctgggtagaagagtccttcacttggcagggctttttcaaccaatgaataaggcaaattatatataagttaataatgccatttcgaaccgagacagatggcagctaaatgaagtttaattaaagaatgagtgctggggcccttttcatttggggtactgccatcctacttcgaccgcaaaaagacggaggtgacccccaactttcaagaaccaggcttccgagaacgaagaaagaaacagaagcttgcccaaggagagaagctgggctttcccaagtttacctgacccttaaagatgctgaagctgttcagaagttcttcctttgaagaaataccagcttgggtgaagagttacctagctcaaaggtgaatatgagaaggggcgtagacccatctgaccaaaccggaattgcctgtgtgtggacagcccacagccagtttactgcaggtccttaacaggcaaacttcttcccaccaccagtggttcccagatgcttctggactaaagctccccaacaattagtcagagaattgtaaagtgctcagagcttggctgaaagatgatgttggaatgagaaacaaatgtttacattaataaaatctccagttaaaaatattttaaaaattcttggtagttgagcagctctgggggaataagggcaaatatgcttgttatgaactacacttgaaatctacccaaggtaatggttaactttgtgtaggtccatttgtctattttatttatttttcccagtgaaaagtgtattttgatagagaacttttcattttataaatacactatgagttactgaaaattcatatcatggattttgtttattcctgaaacatagttacatagttaaactgtacatatgacatggcttatggttaaaattcccaatgtgctcagttttgaaagataggcaaaaaaaaaaaaaagtataggagaaactgaagaatgtacacttttttagagggcacattttgctgtaaatctggaaatttgatagacttgactgtgtttgtgaaaactgagcattaaaggttttgattgatcctttctttccatttaatctctgagacgtaaatatgtgaggtgtgctgctgtgctgggttaacagcttccttccctttctgtgtagcagtcttgaaatgttctgtttaaatcagtaggcttaatgtgttctgggtatttatctccttgtattttaaatatatgtagttgcaaatagcaccaggaattagatttctgtacacccctaatctagccttgtgagcttcgctagttaatgtgtgctcactttccctccatttgttacgtgagagaatgcgtctgctgatcactgaagtgtcccttttagcttctgattcattgggttctgttgggcatctttaaatccaccttaacctgaggaatgtatgtgggcaaccaggccctgcatttttttatattctgaattttgcatgcttgcctgacttagtatttctgaattgatgttttttttaatggtataactatcttgattttcactgaaattatatggttctgtcactactctgtaaattaatccgaaacttttaaggtaactgggatgatctgcttgtaaaaatgcttgttgccttttgctttatcttcagtgtacctccttaatcctgcttcaacttgattatcttgtgaaacgatggaggagtaagttgcaaccttgtgactgaaaacttgaaaagagtgggagcagggtgggacctcttattctcaaatagtgacatattcttcggaggcgcagattcagaactgagtaaggatccttggtacttggcggcatctgttgaactgaggagcatttctcattgtaaagattgcctttgttctgtgctaaaaggctggagaaatcccaaagacttgtcctatgtactaggcattttattttgattgacttacagactcttcttaatcattatcaatcacggtttttttgtggtgcagtggaaggagaaataggtctagtttctgcctctgattagccgcacagccttgaacaaatcacatttcatctgtgaacttacctctactgttagactaggcgactcacatttgaggacttttctcgggtatcttgagggtttgtgatcctgaacccttaaacagtgcttttttgttacacaggagggctttttttggggggatgaccagtacagacatgccagttagttttactaagtgggatcccaaatccaaagcagtgtagtggtgattggtcagtgactaaccaggcagctaagaagtcttaggcagcagcccagacatgtatagaggggcagttagagggagaacaggggtgggaaagggagcaaggggcagatagctcagcaaggaaagaatgggctcagaaaaaggagggctggctggaggagtgaggggcagcttaagtttggggagggtagaaacgccgtttccttgggaactggagtgcagtatgagctgggtgtcacttggctctgaacatactggctttgctgtaatgcttgaaaaggcgttgggtttcttcattttacagttccattaaccccaagtacgttttccttatttaaatgacaactttggtgctttaaaatgaggtaccactttttaaagctagctgtgttcgagttaaagaaaaaatccaggcagttttttctccccaggaaatgtaattgcccaaacacttatttcatcccccatctttaagtttttacaagggtgatgttattcagcttgttgtagtgatgctggccaaatgggtgctcagcaggtgagaacgaaaaaaccccagattttcaggtgaattaatacacagctttgagcgtttccatgtgctaatgttgcaccacttacctaaaaaaacttttgggaaatggaaaataatgtattagngcaaccaggttgatgtgcttctttggggcaaagatataagtttggtccccaaatttgtaccttaaaaggcgaaaggaacattggaaaacataggacttactgggctgtaggcaatgcctgggcctgtttaactggattaactaggaacttagggttcacgttttatggtaaagtgtgtaaaaccctagtagagcttgcatagtcgggcacctcagtaaatggtttggttcccttttgcccccttggtaagtttattttacccatcctcccacctgcccattctgactttattaaatcaaccatggtggaccagaagtgttaaatgaagatgttaattgcagaagagattgagaaaattggtatatcatgcagataacatacaaaatctttttgtaacgtaaaaaatgcagttttattattgcttgtgcctcaactgtttaagtgaatataaaaagggcttggagaaaactttaaaaaaaaaaaaaaaaaaa

SEQ ID NO: 145707 - DNA, 942 bp, Homo sapiens
atccttaattaaattaatcttcccccccccggccgtgtggcactcggcggtcgaaaggggagttcaaggagacgggggcgacgcggctgagggcttctcgtcggggtcggggctgcagccgtcatgccggggatagtggagctgcccactctagaggagctgaaagtagatgaggtgaaaattagttctgctgtgcttaaagctgccagcccatcactatggagctcgaatgtgataagccccaacaaggaagtttatgctctgccgctgggaagagaaagatccagaggcggtgtttagagggaaggcaaactggtcaacaaagtgtgctttggacttctttaaggcatgataaaaccgtcactgtgcagagcgctttttttacaggaatattggggactttgcattgattatactaggcccagcaagttatttccgtccactgtccgcaaacaagcaggcaaaagttttgacgagtgtcgtgctggacaaactgcggctgggtgcggccctgacctggggagaactgtcaaaaggtcaccgaaagtgaaaacagatcgacctttaccggagaatccctatcacttcaagaccaagaccggatcccagcccctgagattcgaggggagatcttgcagccctgccacacatggcagcccgcttttatttttggaccaagttaaagatgggtcccgtggcccacactcggtcatgtgctcagacaacgactgatgaaaacgcccatgcgggtttgcatccgactgatagtggtgttctttccgggattcaccaacatttaacaaaaaagttaacttatgatgacttggcagttattctataccatttcctgtccattaaaatttttaaaggagaagcacctcctctacaacactatccccagagtcaccaaactaccctctgttccccacaaaaccccggggg

SEQ ID NO: 145708 - DNA, 898 bp, Homo sapiens
ggaaagattgtcccctctgctgttctctggggccgctcagcacagaagaaggatgagggggctcagcggggggagctggcgccttcctggagcctccagccagtcctgtcctccctcgccctaccaagagggcacctgaggagactttggggacagggcaggggcagggagggaaactgaggaaatcttccattcctcccaacagctcaaaattaggccttgggcaggggcagggagagctgctgagcctaaagactggagaatctgggggactggggagtgggggtcagagagacagattccttcccctcccgtcccctcacgctcaaacccccacttcctgccccaggctggcgcggggcactttgtacaaaatccttgtaaataccccacaccctcccctctgcaaaggtctcttgaggagctgccgctgtcacctacggtttttaagttattacaccccgaccctcctccctgtaaagcccccctaaccctgcagcctgttgccccaaaataaatttaggagagtccccccctccccccaatgctggaccctagggattttccttcccctgcccctcaccctgcaaatgagttaaagaagaggcgtgggaatcccaggcagtggtttttcctttcggagcctcggttatctcatctgcagaatgggaccgggtgggggtggaaaggtaaggatggtcgtggaagaaggacaggaatggaactcggcctcatcccagaggccccagttcctatatcgggccccccattcatccactcacactcccagccaccatgttacactggactctaagccacttcttacatccagtagtaaagtttaattcaataaacaatcattgacccatgaaaaaaaaaaaaaaaaagggcggccgct

SEQ ID NO: 145709 - DNA, 2857 bp, Homo sapiens
  misc_feature (1)...(2857): n = a,t,c or g
gggagaaacgttctcactcgctctctgctcgctgcgggcgctccccgccctctgctgccagaaccttggggatgtgcctagacccggcgcagcacacgtccgggccaaccgcgagcagaacaaacctttggcgggcggccaggaggctccctcccagccaccgcccccctccagcgcctttttttccccccatacaatacaagatcttccttcctcagttcccttaaagcacagcccagggaaacctcctcacagttttcatccagccacgggccagcatgtctgggggcaaatacggtagactcggagggacatctctacaccgttcccatccgggaacaggggcaacatctacaagcccaacaacaaggccatgggcagacgagctgagcgagtaagcaagtgtacgacgcgcacaccaaggagatcgacctggtcaacccgcgacccctaaacatcttcaacggatgaccgtggtcaaagattgactttaaagatgtgattgcagaaccagaagggacacacaggttttgacgggcatttgggaaggccagctttcaccacctttcactgtgacggaaatactggtttttaccgctttgctggtctgccctctttgggcatccccgatgggcactcatctgggggcattttacttcggccaattctcttcttttcctggcacatctggggcagttgtaccatggcattaaggagcttcctgatttgaggatttcagtgcatcagccggggtcctattccatcctacggtccaccaccggtctggtgaccccactctttgaagctgttggggaaaatattccagcaattgtccgcatccaacttgcagaaagaaatataaatgacatttccaaggatagaagtatacctgatttttttttccttttaattttcctcgatgccaatttcaagttccaagttgctaatacagcaacgaatttatgaaattgaattatcttggttgaaaataaaaagatccactttctcagttttcataagtatgtatgtctcttctgagctatttcatctatttttggcagtctgagatttttaaaacccatttaaatgtttttccctacccattttaagtggcatgtggatcaaccatcgctttattggctgagatatgaacatattgttgaaaggtaatttgagagaaatatgaagaactgaggaggaaaaaaaaaaaaaaagaaaagaaccaacaacctcaactgcctactccaaaatgttggtcattttatgttaagggaagaattccagggtatggccatggagtgtacaagtatgtggggcagattttcagcaaactcttttcccactgtttaaggagttagtggattactgccattcacttcataatccagtaggatccagtgatccttacaagttagaaaacataatcttctgccttctcatgatccaactaatgccttactcttcttgaaatttttaacctatgatattttctgtgcctggaatatttggttaatgtaggtaacaagacctcagtggccttcccggttttttcacaatttcccttttcaaataggggtctaacttcaggcaacttcgctttagggttcagcagcctccctggaaggaccaaaattaggaatatcccatggacctagttttccatgcgtgtttctggactctgagctacaggagtctgggtgaagctccacttctggggntttcatctgggcaacatctttatccgtagtggggtatggggttggacactagccccaatggaaaatggaattaaagtgggaccaataggggcttgaggttcttctgtggggctgggcagtcctggggaaggccagcttttccctggcctcttcatccaacttgaattgagggtcagccatgtcttatttcaggctttcgttttatttttcaagaattaattcacggttttcctggaatccaaactaatccattcaccggggttggttttagttgggctcaacattgtgttacccattttcagctgatccagtggggcctccaaggagggggctgttaaaatgggagggccattgtgtgagcctatcagagttgctgcaaacctgacccctgctcagtaaagcacttgcaaccgtctgttatgctgtgacacatggcccctccccctgccaggagctttggacctaatccaagcatctctttgcccagaaagaagatgggggaggaggcagtaataaaaagattgaagtattttgctggaataagttcaaattcttctgaactcaaactgaggaatttcacctgtaaacctgagtcgtacagaaagctgcctggtatatccaaaagctttttattcctcctgctcatattgtgattctgcctttggggacttttcttaaaccttcagttatgatttttttttcatacacttattggaactctgcttgatttttgcctcttccagtcttcctgacactttaattaccaacctgttacctactttgactttttgcatttaaaacagacactggcatggatatagttttacttttaaactgtgtacataactgaaaatgtgctatactgcatactttttaaatgtaaagatatttttatctttatatgaagaaaatcacttaggaaatggctttgtgattcaatctgtaaactgtgtattccaagacatgtctgttctacatagatgcttagtccctcatgcaaatcaattactggtccaaaagattgctgaaattttatatgcttactgatatattttacaattttttatcatgcatgtcctgtaaaggttacaagcctgcacaataaaaatgtttaacggttaaaaaaaaaaaaaaaaaaa

SEQ ID NO: 145710 - DNA, 1479 bp, Homo sapiens; identical to SEQ ID NO: 117895

SEQ ID NO: 145711 - DNA, 2259 bp, Homo sapiens
atggaggttgcagtgaaccaagatcgcgccactacactacagcctgggcaacacagtgagactccgtctcaaacaaccaaacaaacaaaaaaagaaaaagaaaagaaagagcggtcgtttcctgaagccggcaaccgcctcagttgtcaaaccggtgctagcgacacgggagtggctaacgcatcctcttgccgttcccggtgtttggaccttgcctgtgacggtgggaaaagaaaatggccttgctgtgctacaaccggggctgcggtcagcgcttcgatcctgagaccaattccgacgatgcttgcacataccacccaggtgttccggtctttcacgatgcattaaaggggtggtcttgctgtaagagaagaacaactgatttttctgatttcttaagcattggaggctgtacaaaaggtagacataatagtgagaaagccacctgagccagtcaaacctgaagtcaagactactgagaacgaaggagctatgtgaattaaaacccaaatttcaggaacacatcatttcaagccccttaagccagtagaagcaattaaaaagaccaagcccagatgaacccatgacaaatttgggaattaaaaatatctggcctcccctaaaacaagcacttgataaacttaaactgtcatcagggaatgaagaaaataagaaagaagaagacaatgatgaaattaagattgggacctcatgtaagaatggagggtgttcaaagacataccagggtctagagagtctagaagaagtctgtgtatatcattctggagtacctattttccatgaggggatgaaatactggagctgttgtagaagaaaaacttctgattttaatacattcttaagcccaagagggctgtacaaaagggaaacacatgtggactaaaaaagatgctgggaaaaaagttgttccatgtagacatgacttgcatcagactggaggtgaagttaccatttcagtatatgctaaaaactcacttccagaacttagccgagtagaagcaaatagcacattgttaaatgtgcatattgtatttgaaggagagaaggaatttgatcaaaatgtgaaattatggggtgtgattgatgtaaagcgaagttatgtaactatgactgcaacaaagattgaaatcactatgagaaaagctgaaccgatgcagtgggcaagccttgaactgcctgcagctaaaaagcaggaaaaacaaaaagatgacacaacagattgagtgggagatggaaggaaggctattacattatttccgaatttttaatactgtgtgaagtggtggcttgctgctggtaatcttttgttttgttgttgtgttactgaatgtggcatttcagggttaaccattaggttcttaaaaagccaaagtccagtttggccttttttgtgcctctcatcctttccttttggtgttatgtaagattggattattccatttctccctactgggtaggaaccatagttgtgtcccaaaccttgaagaggctggaaagtagcccataaccataattgcagtatttctttgtatttctctgttaagcaaagaaatattaaggaacattttttttatgtttttgtattattcccataattagtaaagcaagatgaaatgtcaaattttaatcagttttttcatgggatttgtgttcttacagtacttgaaaatatttaaggaagagatgaagctctgcagttttttctatgtgggatgattaccttttttaaggggggattaattctgaggtagtatagtaacctaaggggggaatatatggaatggtttaaccaaattaggaatttgtttaccaacctacttggaattttttaaattatgtcaaaacttacattaccttgcccaagccagtatgatgttaataggaaacataaataagattaccagaggtatccaatttggttaaaattccacccattttaataagacctaagcaataatccttaacaacctctttccctgaatatttaaatgtgtttgtatggtgttatgacctaattgttacctgatttagagacctaagccctcttaaaacctttagttaaatataaaaagaaattatatatatcttgcctccctgatggaaaactatataaaattgtagacttaaaaggtttgtggaaatacattaggatatcagaaaactaaatatatggagttgctttatgactattacatgttaaataaaaatagcttaattgttaaaaaaaaaaaaaaaaaa

SEQ ID NO: 145712 - DNA, 500 bp, Homo sapiens
  misc_feature (1)...(500): n = a,t,c or g
ntatcatcaagcctactttattcaaccgtgtttccccagaatttagcacagtttccgattggtatttatagtagcatattggttgaataagccaggaaagaggttaaaggagggataaggagcgtttagcacagagggagataaaggaagaagggaaagggaaaaggaaggtaagaagagaggattgataaaaaaagggaggcaaaaagggagaaaagagaagggaaaggaaaatcccggaggaaagggaggaggaaaggaaaaagggaatatttgttttcatttggtttaacccaatgagtgttccgcattaacagatcatttttgccctggggattttacttattccccagcaggttcctcagttttaaaagcccctttttaattaaaaaaccagggatttcnnnnnnnnnnnnnnnnnncagggatccaagaagagagccccgctagctgtctatttaattggcacaggaaagagttacaggaactgtatgccaggg

SEQ ID NO: 145713 - DNA, 739 bp, Homo sapiens
  misc_feature (1)...(739): n = a,t,c or g
ggtgcaattcctaggacaccccacttgccctgctgaccccagctgtcccggtgtagatccgagtgtatgtatgtaaaccccacagtggtgatgacgtccatgggccaggccacctggagtgacccccacaaggccaagactatgctgaaccgaatcccacttggcaagtttgctggtgagtcaggtgggagcccagccagcgtggtgccagcagtccctgtgtgtgccctgggtaggggtgggagggaaagatgggcggcagcctccttcctctatgcccctgacccccgccctgcccacagaggtagagcacgtggtgaacgccatcctctttctgctgagtgaccgaagtggcatgaccacgggttccactttgccggtggaagggggcttctgggcctgctgagctccctccacacacctcaagccccatgccgtgctcatcctacccccaatccctccaataaacctgattctgctgcccnnnnnnnnnnnnnnnnnnnnnnnnnncccaaaatatccctataattggttaaaggaaattcttttaaattttaaaaccttaatttaggtaaaaggggttgggaaaaaatatttttggaaaacccttgttaaaaaaagcgcggaaccatttttttaaatataaaaaaaggttgccccgtttttttttcgggaataaagggggcctttttgaatggaaaaaggggaaatttttaaaaaaacaggggactttaaaaag

SEQ ID NO: 145714 - DNA, 1031 bp, Homo sapiens
atagcccgcaaacactaggcagtgtggtggaattcggagctgttcctcgcgggccgccgggtgctggtcaccggggcaggcaaaggtgggcggcggggaaaggtgggcaaaggccggcggcgggcagaggcgggcaggggacgccttcactgagcccgctcccggcaggtatagggcgcggcacggtccaggcgctgcacgcgacgggcgcgcgggtggtggctcgtgagccggactcaggcggatcttgacagccttgtccgcgagtgcccggggatagaacccgtgtgcgtggacctgggtgactgggaggccaccgagcgggcgctgggcagcgtggggccccgtggacctgctggtgaacaacgccgctgtcgccctgcttgcagcccttcctgggaggtcaccaaggaggccttttgacagggtctgtccctcggcctctagatcctttgagggtgaacctgcgtgcggtcatccaggtgtcgcagattgtggccaggggttttaataagcccggggagtcccaggggccattcgtgaaatgtctccagccagtgctcccagcgggcagtaaactaaccatagcgtctacttgcttcccaccaaaggggtgcccttggacatgcttgaccaagggtgatgggcccttagagctcgggccccacaagctgtcccggtgtagatccgagttgaatgcaagtaaacccccacagttggtgattgacgttccatggggccagggccaccttggagtgacccccacaagggccaagattatgctgaaccgaatcccaacttggcaagtttgctgaggtagagcacgtggtgaacgccaatcctctttctgctgagtgaccgaagtggcatgaccacgggttccaactttgccggtggaagggggcttctgggcctgctgagctccctccacacacctcaagccccatgccgtgcttcatccttacccccaatccctccaataaaacctgattgctgctgcccaaaaaaaaaaaaaaaaaaagtcgacgcgg

SEQ ID NO: 145715 - DNA, 449 bp, Homo sapiens
ttttcatgacttttaatgctttattgggattgcaagcgttacaaggttaaagacaaaacccaagcatgggattttgccggaaatattagcgttaaaggagctgagttgagtcaaacacgggccgcaagtggaccgaggcggcaggcacaggtgacattcagtgtttggcgtgggggtcttcaggtgatggcagaggaggggacccaagaggccgagtccctgccgcagccctaggcgccgcggtggtggctgctatggcatcaccagacccgtgggctccggggcccaagcaacctggtcgatgggcagacctggcagctctcctgctctgtgggctcagacccgcctgacctccctactccccggcctcaccccaccttgcccccaagaggtcccacagagcttcggacctcctggagacaaggcagggtgctgaggggcgggcaaga

SEQ ID NO: 145716 - DNA, 4038 bp, Homo sapiens
gacaacttccccagataccccgtgggcaagttcttccaatatgacacctggaagcagtccacccagcgcctgcgcaggggcctgcctgccctcctgcgtgcccgccggggtcacgtgctcgccaaggagctcgaggcgttcagggaggccaaacgtcaccgtcccctgattgctctacccacccaagaccccgcccacgggggcgcccccccagagatggccagcaatcggaagtgagcaaaactgccgcaagtctgcagcccggcgccaccatcctgcagcctcctcctgaccacggacgtttccatcaggttccatcccgaaaatctctcggttccacgtccccctggggcttctcctgacccagtccccgtgccccgcctccccgaaacaggctactctcctcggccccctccatcgggctgaggaagcacagcagcatcttcaaacatgtacaaaatcgattggctttaaacacccttcacataccctccccccaaattatccccaattatccccacacataaaaaatcaaaacattaaactaacccccttcccccccccccacaacaaccctcttaaaactaattggctttttagaaacaccccacaaaagctcagaaattggctttaaaaaaaacaaccaccaaaaaaaatcaattggctaaaaaaaaaaagtattaaaaacgaattggctgagaaacaattggcaaaataaaggaatttggcactccccacccccctctttctcttctcccttggactttgagtcaaattggcctggacttgagtccctgaaccagcaaagagaaaagaagggccccagaaatcacaggtgggcacgtcgctcgtaccgccatctcccttctcacgggaattttcagggtaaactggccatccgaaaatagcaacaacccagactggctcctcactcccttttccatcactaaaaatcacagagcagtcagagggacccagtaagaccaaaggaggggaggacagagcatgaaaaccaaaatccatgcaaatgaaatgtaattggcacgaccctcacccccaaatcttacatctcaattcccatcctaaaaagcactcatactttatgcatccccgcagctacacacacacaacacacagcacacgcatgaacacagcacacacacgagcacagcacacacacgagcatacagcacacacacaaacgcacagcacacacagcacacagatgagcacacagcacacacacaaacgcacagcacacacacgcacacacatgcacacacagcacacaaacgcacggcacacacacgcacacacagtgcacacacagcacacacgcaaacgcacacgcacacacaaacgcacagcacacacgcacacacagcacacacacgagcacacagcacacaaacgcacagcacacgcacacacatgcacacacagcacactagcacacagcacacacacaaagacacagcacacacatgcacacacagcacacacacgcgaacacagcacacacgaacacagcacacacagcacacacacaaacacagcacacacatgcacacagcacatgcacacacagcacacacatgaacacagcacacagcacacacatgcacacagcacacacgcatgcacagcacacatgaacacagcacacacaaacacacagcacacacatgcacacacagcacacacactcatgcgcagcacatacatgaacacagctcacagcacacaaacacgcagcacacacgttgcacacgcaagcacccacctgcacacacacatgcgcacacacacgcacacccccacaaaattagatgaaaacaataagcatatctaagcaactacgatatctgtatggatcaggccaaagtcccgctaagattctccaatgttttcatggtctgagcccccctcctgttcccatctccactgcccctcggccctgtctgtgccctgcctctcagaggagggggctcagatggtgcggcctgagtgtgcggccggcggcatttgggatacacccgtaggtgggcggggtgtgtcccaggcctaattccatctttccaccatgacagagatgcccttgtgaggctggcctccttggcgcctgtccccacggcccccgcagcgtgagccacgatgctccccataccccacccattcccgatacaccttacttactgtgtgttggcccagccagagtgaggaaggagtttggccacattggagatggccggtagctgagcagacatgcccccacgagtagcctgactccctggtgtgctcctggaaggaagatcttggggacccccccaccggagcacacctagggatcatctttgcccgtctcctggggaccccccaagaaatgtggagtcctcgggggccgtgcactgatgcggggagtgtgggaagtctggcggttggaggggtgggtggggggcagtgggggctgggcggggggagttctggggtaggaagtggtcccgggagattttggatggaaaagtcaggaggattgacagcagacttgcagaattacatagagaaattaggaacccccaaatttcatgtcaattgatctattccccctctttgtttcttggggcatttttccttttttttttttttttgttttttttttacccctccttagctttatgcgctcagaaaccaaattaaaccccccccccatgtaacaggggggcagtgacaaaagcaagaacgcacgaagccagcctggagaccaccacgtcctgccccccgccatttatcgccctgattggattttgtttttcatctgtccctgttgcttgggttgagttgagggtggagcctcctggggggcatggccatgagcccccttggagaagtcagaggggagtggagaaggcatgtccggcctggcttctggggacagtggctggtccccagaagtcctgagggcggaggggggggttgggcagggtctcctcaggtgtcaggagggtgctcggaggccacaggagggggctcctggctggcctgaggctggccggaggggaaggggctagcaggtgtgtaaacagagggttccatcagctggggcagggtggccgccttccgcacacttgaggaaccctcccctctccctcggtgacatcttgcccgcccctcagcaccctgccttgtctccaggaggtccgaagctctgtgggacctcttgggggcaaggtggggtgaggccggggagtagggaggtcaggcgggtctgagcccacagagcaggagagctgccaggtctgcccatcgaccaggttgcttgggccccggagcccacgggtctggtgatgccatagcagccaccaccgcggcgcctagggctgcggcagggactcggcctctgggaggtttacctcgcccccacttgtgcccccagctcagcccccctgcacgcagcccgactagcagtctagaggcctgaggcttctgggtcctggtgacggggctggcatgaccccgggggtcgtccatgccagtccgcctcagtcgcagagggtccctcggcaagcgccctgtgagtgggccattcggaacattggacagaagcccaaagagccaaattgtcacaattgtggaacccacattggcctgagatccaaaacgcttcgaggcaccccaaattacctgcccattcgtcaggacacccacccacccagtgttatattctgcctcgccggagtgggtgttcccgggctgcctgtctgacctccgtgcctagtcgtggctctccatcttgtctcctccccgtgtccccaatgtcttcagtggggggccccctcttgggtcccctcctctgccatcacctgaagacccccacgccaaacactgaatgtcacctgtgcctgccgcctcggtccaccttgcggcccgtgtttgactcaactcagctcctttaacgctaatatttccggcaaaatcccatgcttgggttttgtctttaaccttgtaacgcttgcaatcccaataaagcattaaaagtca

SEQ ID NO: 145717 - DNA, 1685 bp, Homo sapiens
ttcggcacgagtagagaaattaggaacccccaaatttcatgtcaattgatctattccccctctttgtttcttggggcatttttcctttttttttttttttggtttttttttacccctccttagctttatgcgctcagaaaccaaattaaaccccccccccccatgtaacaggggggcagtgacaaaagcaagaacgcacgaagccagcctggagaccaccacgtcctgccccccgccatttatcgccctgattggattttgtttttcatctgtccctgttgcttgggttgagttgagggtggagcctcctggggttgcactggccactgaacccccttggagaattcaaaggggagtggagaaggccactgtccggcgctggcttttggggacagtggctggtccccagaagtccttgagggcggaaggggggtgttaagcaaggtctcctcaggtgtcaggagggtgctcggaggccacaggaagggggctccttggcttgcctgaggctggccggaagggaaaggggctagcaggtgtgtaaacaagagggttccatcaggctggggcagggtggccgccttccgcacactttgaggaaccctcccctctccctcggtgacaatcttgcccgcccctcagcaccctgccttgtctccaggaggtccgaagctctgtgggacctcttggggacaaggttggggtgaggccggggcaattaggaagttcaggcgggttctaagcccacagagcagaagagctgccaggtctgcccatcgaccaggttggcttgggccccggaagcccacgggtctggtgatgccatagcagccaaccaccgcggcggcctaggggttggggcagggactcggcctctgggaggtttaactcgccccccactttgtgccccaaggctcagcccccttgcaacgcagcccggactagcaagtctagaggccctgaagctttttgggtcctggtgacaggggctgggcattgacccccgggggtcgtccatgcccagttcgccctaagtcccagagggtctccctcgacaagcgccctttgaattgggccatttcggaacatttggacagaaagcccaaaagagcccaaattgtcacaatttgtggaacccaacattgggcctgaagatccaaaaacggcttcgaggcacccccaaattaccctgccccattcgtcagaaaacccaacccaacccagtggttatattcttgcctcgccgggagtgggtgttccccggggggcacttgccggaccaagcccccttgcgtccccccagggtttgcaagctctccccctggggccacttaaccatcctggggcccgggcttgcctgtcttgaccttccgttgccttagttcgtgggctcttccatcttgtctccctccccggtgcccccaatgtcttcagtggggggccccctttttgggtccccctcctctggccattcacctggaaggacccccacgccaaacacttgaatgtcaccttgtgcctgccgcctcggtccacattgcggcccgtgtttgactcaactcagctcctttaacgctaatatttccaggcaaaatcccatgcttgggttttgtcttttaaccttggtaacgcttgcaatcccaataaagcattaaaagtcatgaaaaaaaaaaaaaaaaaaaggg

SEQ ID NO: 145718 - DNA, 471 bp, Homo sapiens
gaaggaggtcccccacggcccttcaggatgaaagctgcggtgctgaccttggccgtgctcttcctgacggggagccaggctcggcatttctggcagcaagatgaacccccccagagcccctgggatcgagtgaaggacctggccactgtgtacgtggatgtgctcaaagacagcggcaaagacagcgtgacctccaccttcagcaagctgcgcgaacagctcggccctgtgacccaggagttctgggataacctggaaaaggagacagagggcctgaggcaggagatgagcaaggatctggaggaggtgaaggccaaggtgcagccctacctggacgacttccagaagaagtggcaggaggagatggagctctaccgccagaaggtggagccgctgcgcgcagagctccaagagggcgcgcgccataagctgcacgagctgcaagagatgctgacccactgggcgaggaag

SEQ ID NO: 145719 - DNA, 1009 bp, Homo sapiens
  misc_feature (1)...(1009): n = a,t,c or g
gggagttgccgaattgaaacccatcgtagacactagtcagngcggtggaattcgagaaggaggtcccccacggcccttcaggatgaaagctgcggtgctgaccttggccgtgctcttcctgacggggagccaggcgtcggcatttctggcagggaggatgaagcccccccagagccgcctgggatcgagtagaaggaacctggccactcgtgtaccgtggactgtgctcaaagaacagcggacagagacttatgtgtcccagtttgaagggctccgccttggggaaaacagctaaaccttaaagctcctttgacaactggggacagcgttgaccttccacctttcagccaagctgcgccaaacagctcgggccctttgacccaggagttctggtataacctggaaaaggagacagagggcttcaggcaggagatgagcaaggatctgggaggaggtgaaggccaaggtgcagcccttaccttggacgacttccaagaaagaagttggcaggaggagattggagctctaccgccagaaggttggagccgcttgcgcgcaagaacttccaagaagggcgcgcgcccagaaagcttgcacgagcttgcaagaagaagcttgagcccactgggcgaggcagtatcgcgaccgcgcgcgcgccccatgtgggacgcgctgcgcacgccatttggccccctacagcgacgagatgatgccagcgcttgggcgcgcgccccttggggctttaagggaaaacgggggggccagaatgggccagtaccacgccccaggccaccgagcatctgagcacgctcagcgagaaagccaagcccgcgctcgaggaccatccgccaaggcctgctgcccgtgctggagagcttcaaggtcagcttcctgagcgctctcgaggagtacactaagaagctcaacacccagttgaggcgcccgccgccgcccccctacccggtgctcagaataaacgtttccaaagtggaaaaaaaaaaaaaaaaaa

SEQ ID NO: 145720 - DNA, 615 bp, Homo sapiens
ctgacattagaatcataagatttttgtttaagacttgcttaagatgtttttcagatcctgaattccagcaaaacagccgacaccaaccagtttgaagacccccacagaggaatgtgatcagcatgaaaatacagcttcgtctccctctcccatgactccaccctgcacacttcgaccaatcaaccatctcccaaactcccagtctcccactccccaaacccttaaaaacccccagcccccaaactcctcagggagatggatttgacgtttcctccccatttccctccttcggtggcccctacgatgaaacctctttcttctgctacaacccctatgcctcggcgtatttcactttctgggtcccattccaggcgatgggacccattcgtgggttaaccgtgggctgggcaaggcttgctgtggtttcacagaccccactcaggatcatcatcacttcgttccactgtttggagatgccatgtttgcttatcccttcatcagctgatgagcatttgtgctgttttcactttttggctattacgaaaatgttgctacgagcatccgtgatattcgcccatttaaaaaagtgtttttccccaaaaaaaaaaaaaaaaa

SEQ ID NO: 145721 - DNA, 552 bp, Homo sapiens
cacagactcagagagaacccaccatggtgctgtctcctgccgacaagaccaacgtcaaggccgcctggggtaaggtcggcgcgcacgctggcgagtatggtgcggaggccctggagagggatgttcctgtccttccccaccaccaagacctacttcccgcacttcgacctgagccacggctctgcccaggttaagggccacggcaagaaggtggccgacgcgctgaccaacgccgtggcgcacgtggacgacatgcccaacgcgctgtccgccctgagcgacctgcacgcgcacaagcttcgggtggacccggtcaacttcaagctcctaagccactgcctgctggtgaccctggccgcccacctccccgccgagttcacccctgcggtgcacgcctccctggacaagttcctggcttctgtgagcaccgtgctgacctccaaataccgttaagctggagcctcggtggccatgcttcttgccccttgggcctccccccagcccctcctccccttcctgcacccgtacccccgtggtctttgaataaagtct

SEQ ID NO: 145722 - DNA, 705 bp, Homo sapiens
  misc_feature (1)...(705): n = a,t,c or g
aggcctagaattcggcacgagccacagactcagagagaacccaccatggtgctcgtctcctgcccgacaagaccaacgtcaaggccggcttggggtaaggtcggcgcgcacgctggcgagtatggtgcggaggccctggagaggatgttcctgtccttccccaccaaccaagacctacttcccgcacttcgaccttgagccacggtttctgcccaaggttaaagggcccacggcaaagaaggtggccgaacgcgctgaccaaacgccgtggcgcaacgtggacggacatgccccaaacggcgctgtccgccctgagcggacctgcaacggcgcacaagctttcgggtggacccggttcaactttcaagctcctaaagccacttgccttgctggtggaccctgggccggcccacttccccgtccgagttcaacccctggcggttgcacgccttccctggaacaaagtttcctgggcttcttgttgaagcaccgttgcttgaaccttccaaattaccgttaaagcttggaagccttcgggttggccatgctttctttgcccctttggggcttccccccagggccctccttccctttcctggaacccgtaaccccgtgggtcttttgaataaaattttgaattgggggggcaaaaaaaaaaaaaaaaaaaagatctttnaatttaagggggcggaaagtttatttcaa

SEQ ID NO: 145723 - DNA, 641 bp, Homo sapiens
  misc_feature (1)...(641): n = a,t,c or g
tggagttgctatggcctctaggcatcccagcccacccacgtcaacgtccacatccaccaggagtcagctttgacacaactgctgaaagctggaggttctctgaagaagtttctttttcaccctggggacactgtgccttccacagccaggattggttatgagcagctggctctaggggtgatcgcagcaggagctggggccattgtccatgagaagcacccgggcaaacttgctggctatatatccagcctgctcaccctggcaggctttgctacagctatggctgctgttgtcctctgcgtgaatagcttcatctggcaaactgaaccctttttatacatcgacactgtgtgtgatcgctcagaccctgtcttccctaccactgggtacagatggatgcggcgaagtcaaagagaaccaatggcagaaggagggagtgtagagcttacatgcagatgctgaggaagttgttcacagcaatccgtgcccttgttccctgggatgtctgtggctttgaaggtcattgtgtccttggtttcctttnggagtagggtcttcgnaaactttgtgtggccagagnttccnaagcccctgaattagggaaggancaagaggaagagggtnntnggggggagaaattg

SEQ ID NO: 145724 - DNA, 497 bp, Homo sapiens
gtgcctcagctgtgccttctgggcggggtctgtggtgatcgcagcaggagctggggccattgtccatgagaagcacccgggcaaacttgctggctatatatccagcctgctcaccctgacaggctttgctacagctatggctgctgttgtcctctgcgtgaatagcttcatctggcaaactgaacccttttttatacatcgacactgtgtgtgatcgctcagaccctgtcttccctaccactgccattgtcctgtgagccgccaaagaccccacggggtgcccgcatgtccctgtctagggcagcccagggcccccactcctggctcctcacacttgcctcccctatggccgctctccagaccctcctcctttcttctccccacatccgcacctgctgttcccactctggggttctcaagtccatgaacagatattgttgcattttccacaatgctgattaaacataataaacaatccagaaaagcagttttgccca

SEQ ID NO: 145725 - DNA, 495 bp, Homo sapiens
ctgctgttgtcctctgcgtgaatagcttcatctggcaaactgaccctttttatacatcgacactgtgtgtgatcgctccgtgccctgttcctggctgtctgtgtcttgaaggtcattgtgtccttggtttccttgggagtaggtcttcgaaacttgtgtggccagagctcccagcccctgaatgaggaaggatcagagaagaggctactgggggagaattcagtgcccccttcgccctctagggagcagacctccactgccattgtcctgtgagccgccaaagaccccacggggtgcccgcatgtccctgtctagggcagcccagggcccccactcctggctcctcacacttgcctcccctatggccgctctccagaccctcctcctttcttctccccacatccgcacctgctgttcccactctggggttctcaagtccatgaacagatattgatgcattttccacaatgctgattaaacatataacacaatcca

SEQ ID NO: 145726 - DNA, 645 bp, Homo sapiens
atgacgcaaaacacggtgattgtgaatggagttgctatggcctctaggccatcccagcccacccacgtcaacgtccacatccaccaggagtcagctttgacacaactgctgaaagctggaggttctctgaagaagtttctttttcaccctggggacactgtgccttccacagccaggattggttatgagcagctggctctagggggctatatatccagcctgctcaccctggcaggctttgctacagctatggctgctgttgtcctctgcgtgaatagcttcatctggcaaactgaaccctttttatacatcgacactgtgtgtgatcgctcagaccctgtcttccctaccactgggtacagatggatgcggcgaagtcaagagaaccaatggcagaaggaggagtgtagagcttacatgcagatgctgaggaagttgttcacagcaatccgtgccctgttcctggctgtctgtgtcttgaaggtcattgtgtccttggtttccttgggagtaggtcttcgaaacttgtgtggccagagctcccagcccctgaatgaggaaggatcagagaagaggctactgggggagaattcagtgcccccttcgccctctagggagcagacctccactgccattgtcctgtga

SEQ ID NO: 145727 - DNA, 1347 bp, Homo sapiens
  misc_feature (1)...(1347): n = a,t,c or g
caacaccccatctctctctctctaaaaaaagagaactggccgtgagctattgtgcccagctgggatcttgacaaagacactatttctctcctttcacctgtgctgtgtatttttccctcgcctagttcccagacctcactgctatatgtcttctccctggcaggcaggatgacgcaaaacacggtgattgtgaatggagttgctatggcctctaggccaacccagcccacccacgtcaacgtccacatccaccaggagtcagctttgacacaactgctgaaagctgggaggttctctgaagaagtttctttttcaccctggggacactgtgccttccacagccaggattggttatgagcagctggctcttaggggtgactcagatatttgctggggcgttgagaggcgtgatcttggagtgtgtgctgatcttggggccctgggactgtgctgcgtgcctcaggctgtgccttctgggcggggtctgtggtgatcgcagcaggagctggggccattgtccatgagaagcacccgggcaaacttgctgggctatatatccagcctgctcaccctggcgaggctttgctacagctatggctgctgttgtcctctgcgtgaatagcttcatctggcaaactgaaccctttttatacatcgacactgtgtgtgatcgctcagaccctgtcttccctaccactgggtacagatgggatgcggcgaagtcaaggaggaaccaatggcagaaggaggagtgtagagcttacatggcagatgctgaggaagttgtttcacagcaatccgtgccctgttcctggctgtctgtgtcttgaaggtcattgtgtccttggtttccttgggagtaggtcttcgaaacttgtgtggccagagctcccagcccctgaatgagggaagggatcagagaagaggctactgggggagaattcaagtgcccccttcggccctctagggagcagacctccactgccattgtcctgtgagccgccaagaggaccccangggggtgcccgcatgtccctgtgctagggcagcccagggcccccaattcttggctcctcacacttgcctcccctatggccgctctccagaccctcctcctttcttctccccacatccgcacctgctgttcccactctggggttctcaagtccatgaacagatattgttgcattttccacaatgctggattaaacataaattaaacaatccagaaaagcagtttttgcccaggaaaggttatggtttccttttgtttattacaccttgtggcggccatggaaagggcttttntttgtgttcggtatgtatggaggttaaanggggagctga

SEQ ID NO: 145728 - DNA, 1430 bp, Homo sapiens
ttcctggacagatcaaagtagagtcatagattttatttaattaaaatagattaaaaacagactgtgtaaaagaattagaattctcaataatttactattatttacattagcaaatgtcgggtcgttagtagacactgagcagagaagcttgaagaacggggatcctctcctgtgggcaaggggagccccagcttccctcagtgattcccgtcctttcaagttcattattggcagctctgtcaatgaggcaccccagggtgggtgtgggccgcagcaaccaggaccccgcgctggaaggcccagagaccctggcaggccggggaagaaattccttttcctttggggaaggaaccaccaacgcttcagtccaaggcttcacacggttatcttagttcgggcaatggcctttccctggccctgcaggcccaattaccccccattgttgctggggccttctgcaaaatacttcctgggggttgacccaaacccagttttccagataaaagataaaaagaaaaaaaaaaaggccacatatcccagttctcagagaaatccctggattactaaacatcccctgcctgtggcacctggaatgggtgacattgtcaaaatctccctcaaaacggttttgtgcgtttgccgtgggagggaatggtggggagtcagggtggctggggggcactaggccacttcaccaagagggatgcacctcccaggaagcagtagcagtgagagcgagccccacaggaactgtccctgccctggcagtgcgcagccctgtgggcaccaagcagggagtgaagaccctcagaacacaggccctgtggcctccggctgtgacctccagcttgctggagactctgcggtcagcctggcccacttaggagcccctgctgctccacttgcaggacaccccaggcctccctggcgtcaagtggggcctgggacgtctgggagttcccagagctgggtcagcagctgtgaccatgggggccagcacagtggacagcatcagagctggcagtgaacaagctaaggcgggggaaggcttgatagagaggttcagtcccaaatgtctgtctcgaaggggaccaggtggtaatatgacaggttggtgacgtaggctgctgggtcgtccccgtcctccagctctgagggaaactcactgccattctcaaataaatgctctgttgggtccacgcccaggtgctggtctcttccatttggtatactgtggtcaataactattgtttcggtatttgctaaacaaaatccattggacctcatgatttctgatattttgactggactttgaaagctgggttgaattttatgcacattatcattttttaacacctgatccagaggagatctttcgaagaaggtgagcacaacttccgatctagaatatttacagggcatgcttatga

SEQ ID NO: 145729 - DNA, 1862 bp, Homo sapiens
  misc_feature (1)...(1862): n = a,t,c or g
cttttccagaaagacccatgacttcaccacatttntcgagttacgatgaaggtgccgtggtttccttctgctctctcctgggaggcgcacacccctctgcacccagagccaaggagggcaggcagccctgggaccctcttcaggcaccgcagccagggtctgtnttacccacaggtcctctggatgtcagcatggcagccacaaacctggagaaccagctgcacagcgcacagaagaacctcctgttccttcagcgggacaatgccagcacgctcaagggggctgcactccgagatcaggcggctgcagcagcactgcacagatttaacatatgagctgacagtcaaatgttcggaacagacaggagacgggacttctaaaagcagtgaattaaagaaaagatgtgaagagctggaagcccaactgaaagtgaaagagaacgaaaatgctgagttgttgaaagaacttggagcagaaaaacgcgatgattcacagtgctggagaacaccatcaaggagccgagagaagaagtacctgggaggagcttgaaggcccaagagtcacaagcttgaccctgcttgtctagcgagcttggagcagcgggccagcaccatcgcctacctgacctcccagctgcacgccgccaagaagaagctcatgagctccagcgggaccttcagatgccagcccgtcaaggaggccccgtgcttgccagcttcaaggcaagcggcccccaaagacaagctacccgaaacgcctcgccgccgcattgaaaaagagcctctcaggcccctttgcacccgggatttttgaagaggttttacagtttcggggggcagagagcaggaaactccttttgcgggaaccagtggatgctatgcccgaccccaccccatttttgctggctagggagtccgccgaggtccacctcatccaaagnaggaggcccctcgtcatcccccccatcgcctccgaccgaagcggagagcagcacagcccggcccgcgaaaagtcgcacaatgcccacgtcggggtggcacatcggatccaccaggccaccccgccgcaggcccagcccgaggtgaagaacctggcggtcgaccaggttaaacggaggcaaggtggttaggaaagcacttagggacggacagaactgtgtgaaagcccgccgtgccccaccccgcgctgtccatgcactgttgagcaccactgggaaatctcagccacaccttttctgtttaatcccatgcatgccaaaacacttttcacacctaccggacccattctccttctgcttctcttgcccatcttcttcacaccaaaatatgatcgtgtccctgccgcagaatatgtatttcctaattgctgtggccaaaacgcctgtgtgccgaatcgcttgcttctgatcccggctccgtgtaacctaaagtgcgcttgcaggcaaagccccaggccacggcttgcgtcaactactgatgtttcacggatgccacacagtcacacaacctaaattcaattcttcaaagtcggaggcaaacacatacccaacctttgaccttatcctcaagcttccaggggcagccttggccgagcaagcccctgctccctccctggagacccttgtcacctcccgagctcctccctggagacccctgtcacctcctgaccaacctttcccagggcggcaccgaatcaccgagcagccgtgcgtggtatctcaaggaactaaataagatgacgctactcctcatagcaccacaacctgaatgtgtgttcatatttttttgttagttttatccaaaatgtttaagatccgcaacaaactttaaaattctaaacctgaaataaaaaaaaaaaaaaaa

SEQ ID NO: 145730 - DNA, 458 bp, Homo sapiens
ataatttgctcaggagtcaaagtgataaactagtttaatgaattaaagcatggttttccatgacaatttttaattacatcctttgccaagacctctagaaaattacacctgctgagcagatatcccaaggagcatgtgctattttaagatccccttggttttctttgacagaagagaaatcagcaggaggacgactgatgagcgtgctggaactggagaagaggaggccccgccccaccgctccgggagctgctcatcagccgcaacttcctgccgaccctgatgcgggtgggccgagcagtgtggacatcagccgctttttatattcatgtacattcacctggggaaaaaaacggagggactttgctacttgtaaaaataacataataaatagatcttaaacataggaaaaccatactgttctgataataaaatgctttctatgaaataaaaaaaaa

SEQ ID NO: 145731 - DNA, 2663 bp, Homo sapiens
tttctgttctgtgcttttattttacgaaaaagctaatggcaaatctaccattaaactaagttgaataccaaagtcttagtgaagaagggcctggtggtctcgtttacaaaaaatggccagtgtcatatttgggcttaaaatttcaagaagggcacttcaaatggctttgcatttgcatgtttcaagcgctagagcgtaggaatagaccctggcgtccactgtgagatgttcttcagctaccagagcatcaagtctctgcagcaggtcattcttgggtaaagaaatgacttccacaaactctccatcccctggctttggcttcggccttgcgttttcggcatcatctccgttaatggtgactgtcacgatgtgtatagtacagtttgacaagcctgggtccataccagaccgctggagaacattcggcaaatgtcccctttgtagccaagtttcttcttcaagctcccggagagcagctgctttctggggttttaaccaatcatctatgagaccctgcagggaactctatgcaagtagcccccccattggtgggtcgggaacttttttcaccagaaaggttaccactcatagtgaaagtgttcttctgcagcacggggattgaccgcgacaccattcggcagtctgctctttcctggttgtacgtttcactgattcccaagttctagttttaccagtaggatccatgtacggttgttttttcaagcttgacccattttccttcatgaaattaactcctctgaaatgatatactgtttgccattctgagaagattccgttggttcttggctctccattttcaaacggagtctttacagccctcaggtgagaagttcacctccaaggtgtaggggtgaagaacggaagaggacgaaatatctagctggaggcagcagtgtcagccgatgccggtgccgcggctcgaaacaccggcgcctctcgcggtgctaaaaggatgggcgcgcaccctccttccggcatccgtagaacccccgcctttgacctagcttcaggagattactttccgggtcagcgtgcgtttagggcgaagacggagttgtaaacttcttaaaattcctctctcgacacttcggtaattcctctttcgagactaaagctctttttgtatgcgtgtgtgtcaagcgtatgccccgggattctcctccgcttccttttctcggtcttccttcttgctttagggaccggaagagtccttgaaccaaaatagctcggcgggcacttccggggccggcgcccagagttccgggagggtgcaggcaggagagggaaaggcagcagcggcggcagctgtgacggatgaagaaggagcatgtgcttcactgccagttctccgcgtggtacccgttcttccgaggcgttaccatcaagagtgtcattcttccacttcctcagaatgtgaaggattatttactcgatgatggaactctggtggtttcaggaagggatgatccaccaacacattctcagccagacagtgatgatgaagcagaagaaatacagtggtctgatgatgagaacacaagccacgcttaccggcaccagaatttccctgaagtttgccacttaaagtccagggaagctatcaaattcccctcggggggcaagtgtcttttcctaaggtttaatttgggagttgccccaagggattgcgtattggatagcaatgaatagttctctgaaatgtaaaaccctcagcgacatctttctgcttttcaagagttccgatttcatcactcgtgacttcactcagccgtttattcattgtactgatgattctccagatcccatgtatagaatatgagctcgttctcgaaaaatggtgtgaaatgattcctgggggttgagtttcgatgttttgtcaaggaaaacaagcttattggtatttctcaaagagactacacacaatactatgatcatatttctaaacaaaaaggaagaaattcgcagatgcatacaagactttttcaaagaaacacataccagtacaaattctttagatgaaagatttggtgttcgatatatacagaggacagtaggggggaaggtgtggctcattgacttttaatccatttggtgaagtcacagattcactgctgttcacctgggaagaactgataatctgagaacaactttaaacggcgatttttagtgaaagttgacgctcaagagcaggattcccccagcttttccgttgcacaaaccagtgaagtgacagtccagccccagcccctaatttgcagttaccggcttacccaaggactttgtagacctctcctactggggaggacgctcacaagctaatagacttccttaagctgaagagaaatcagccggagggccgctgattgagcgtgctggagctggagaagaggaggccccgcccctaccgctccgggagctgctcatcagccgcaacttcctgctgaccctgatgcgggtgggccgagcagtgtggacatcagccactttttatattcatgtacattcaccctggggaaaaaaaacggagggactttgctacttgtaaaaataacataataaatagatcttaaacataggaaaaccatactgttctgataataaaaagctttctatgaaataaaaaaaaaaaaaaaaaaaaacgt

SEQ ID NO: 145732 - DNA, 422 bp, Homo sapiens
ggttggaggggaaggttgggaaaggaagcggtgcggaggtcccttgtggagcgagactgcatattcagggtgtagtggggtgggtgggcaccaaatcctgttttaggctgtagtggtggacaggagaaggcctctgctgtcccagggctcaccttctatagggagccgatggacaaataaaccaacagaccttggatgatcgctcaggcgatgagtgcttggatgaatgcccagggcctccaaggaggggaaaaggcccacaaagagaagtccaaccagccagtccccaggccagtccgccagggacccaccaatgaggctcagatggcagctcgtgcacgcctagcccggtggagcataggcagcccgggccttgggcccccaatttggagaccccatccgaaacccgggtgaaaaagaac

SEQ ID NO: 145733 - DNA, 438 bp, Homo sapiens
  misc_feature (1)...(438): n = a,t,c or g
gggggggccccgaaataaagaaccttacccccaaggcccaaaaaatagggcccaaagtccgaaaaatctggtccactctttaacatcgatgtaatcttcccccccccatttaaaccaagtaaaagtaccataattgacaactgccctttaacccatcaatgaaatcccttgaaaccttagcccctttttccgccctccccaaatattcccccagggtttaaaaaaccctaattttccatttttaacccattccttttgccctttnnnnnnnnnnnnnngaaatcctttggttcaggttaagaaattctatgctgggaaaggcctgttatatttaccatttcaccctatacctactcaaatacataatcattttgaccacagaaagatcaatgnnnnnnnnnnnnnnnnnnnnnnnnnnnnnnnnnnnnnnnnnnnnnn

SEQ ID NO: 145734 - DNA, 488 bp, Homo sapiens
agatgatatgctgagagctgggagtacagaatgttgtcccccattccctgctcccgaggaacttagtctgatgggatagacagataagtaaaataataaataataatagcaatgaatagcttctgtttattggactaccctactatgtttcaatcgcaatataatatcctatttcctattaattcaactacttcatgaaatgtaagtgttgtcccctatttttccaatgaggaaaccagggctctaagaagttaagtaatttgtccaagattgcatagctaatagaaaacccaggatttgatccccaatctgcctaacaccaaagtcttccttaacccattcttcagatgattacaaatacagtgtttggcagagggcagtggctcacacctgtaatcccagcactttgggggctgaggcaggagggtcacttgagccgaggagtttaagaccagcctacacaacatagtgagaccttgtctctaccc

SEQ ID NO: 145735 - DNA, 1209 bp, Homo sapiens
cccccccgagcgccgctccggctgcaccgcgctcgctccgagtttcagggctcgtgctaagctagcgccgtcgtcgtctcccttcagtcgccatcatgattatcctaccgggaccctcatcaagccacgatgagatgtttctccgacatctacaaagatccggggagatcgcggacggggtttgtgcctggaaggtggaaggggaagatgggtcagtaggacagaaaggtaccattgattgactcgctcattggtggcaaatgccctccgctgaaagcccccgaggggcgaagggtaccgaaaggcacaagtaatccactggtgttcgatattgtcatgaaccatcacctgccaggaaacaagttttcacaaaaggaggcctccaagaaggtacatcaaaggattaccatgaaatcaatccaaagggaaaccttgaaagaacaggagaccaagaaagagtaaaacctttttatgacagggcgctgcagaacaaatcaagcacatccttgctaatttcaaaaaactacagttttctttattggtgaaaacatgaatcccagatgggcatgggtgcttctattggactacgtgaagggatggtgtgccccccatatatgattttctttaaagaatggttttagaaatggaaaaaatgttaacaaatgtggcaattattttggatctatcaccctgtcatccataactgggcttctgccttgtcatcccacacaaccacccgggacttaggaccaaatgggactgatgtcatcttggagctcttcatttattttgactgtggatttatttgggagtggaggcattgtttttaaggaaaaacatgtccatgtaaggttgtctaaaaataaaatgcatttaaactcatttgagagaatgccttttagtttaatgcatatttaaactaaattgatcctgtagtgttcctggagaagctagagcctgattgtagggttctacttcaccaattaacttctacagtggagactacttctgggactggaatataaaaaagaatcaaaggttctgattttgagttgcaataaagggaaagaccatgctcatagcagtgccaacatctgaagtgtggagccttacccatttcatcacctacaacggaagtagttaactggaagtgattaccaagagaataaaaagagactcattcagtggaagcaaaaaaaaaaaaaaaaa

SEQ ID NO: 145736 - DNA, 1403 bp, Homo sapiens
ctactactactaggccacgcgtcgactagtacggggggggggggaaagcgcgcgagcaagatggccaccaccaagcgcgtcttgtacgtgggtggactggcagaggaagtggacgacaaagttcttcatgctgcgttcattcctgtggggagacatcacagatattcatgattcctctggattatgaaacaggtgaaaaagcaccgaggatttgcttttgttgaatttgagttggcagaggatgctgcagcagctatcgacaacatgaatgaatctgagctttttggacgtacaattcgtgtcaatttggccaaaccaatgaggaattaaggaaggctctctccaggccagcttgctcagacaatgactggttgaagaagtttttctgggaagacgctttaagaggattaaagaggaagaagggtcagagcctcccaaagcagagaccccgggagggaagagcccatttgctaaaaaggcgccggtcaaatcctcaggtgtacatgggacatcaagattgggaacaagccggctggcccgcatccagatgctcctgcgttctgatgtcgtgcccatgacagcagagaatttccgctgcctgtgcactcatgaaaagggctttggctttaagggaagcagcttccaccgcatcatcccccagttcatgtgccaggggcggtgatttcacaaaccacaatgggcactggggggcaagtccatctatggggaagaagtttcgatgatggaaaactttatcctcaaggcatacggggaccagggtctactatccagttggcatgtggtgacccaaacaccaatggctctcaattccttcctgacatgttgacaagacagactggctgggatgggcaagccatgtggtgtttggagaggttcaccgaaaggccttaggatgtctttgcgggcaaattgaggcccagggcagcaaggacgggaagccaaagcagaaggtgatcatcgccggactgtgggggagtacgtgttgagggcggcactctctctgctttccccctccgctctttgaccctgcattatccaaggaaggaactgcccagccttcagagggaggcagccccaaggggtccctgtttgaatgcaagcagcatttgggatatgtgcccttcctcagggttctgcttggagcagcttccttcttgcaggcacagcctggaactattcccaggcacagcttgttgggcccaaggagcccagcttcaaggtgctccccttccaccattggggcaaggcttgttgcaaaaaagccactggcttttctcagcatttgctgctgggcctctcctgggactaccagtgtggctcttacgtgttttctttgctaaaataaaccctagttcttaaaaaaaaaaaaaaaaaaggcggcc

SEQ ID NO: 145737 - DNA, 742 bp, Homo sapiens
gacactcgctttttggaacgtctgaggttatcaattagcttcctagtccagacgcccattggtcattcaacagaggaggaccaaggcttactatccacaagcctgtggggcaaaggttaaatgtggaaaaaatgctggaaggaaaaaacccctgggaaaggcccccctggttgtcctacccccatgggaccccaaaaggttcctttgaaaaagctttgggcaaaccctgtccctctgccctctgccccatccatggggcaaaccccccaaaagtcaaaggcaccatggcaaagaaaggtgcctgaccttcccttggggagatgcccataaagcacccctggatgatcctcaaagggcaccttttgcccaagcctgagtgaacctgcacctgtgacaagcctgcaatgtgggatcctgagaactttcaagctcctggggaaatgttgctggtgaccgttttgggcaatcccattttcgggcaaagaatttcacccctggaggttgcagggcttcctgggcagaaagatgggtgacttggagttggccagtgcccttgttccttccagataccactgagctcactggcccatgattgcagagcttttcaaggataaggcttttattcttgcaagcaattacaaataataaatctatttctgctaagagatcacacatgattttcttcagctcttttttttacatctttttaaatatatgagccacaaagggtttatattgagaa

SEQ ID NO: 145738 - DNA, 893 bp, Homo sapiens
  misc_feature (1)...(893): n = a,t,c or g
atgaggaacgcctttgctctaaggcgaccaccctggcagctcttcactgaggggcctcggtttccacatctgtcgctctccggtcccaagaccaccaggaccgacggggctctccgggaggagcagggcgcgggaggaggcggctcgggctggctcggagagctgaggggcgcacacccgcttcgcagggccagggtgacacggaagcatgcgacggctgctgatccctctggccctgtggctcgggtgcggtgggcgtgggcgtctcccagatctaggaaaaccccagccccgggggcctgcaggtggccctggaggaatttcacaagcaccccgcccgtgcagtgggctttccagcacaagcagtgttggagagcgccgtggacacgcccttcccaagctggaatatttgtgaggctggaaatttaagctgcaacaagacaagctgcccggaagaggggacttggaagaaaccccgagtgcaaaagtccaggccccaatgggacggaaaccggaaactgccctggccctgcattcaaacttgggctcttgaggacaaaagttcttgggcccggttggtcccccccccccccataaagacccaagttcttgcgggaggctggaggagcacccaggaagaccccagttgcctcagggtgcagcgggcttgttgaaggaccccccccagtttttacttccccggacagttcgccttctccaaaggccctgccccgcagctaagccagcacttgagatgcgtggtgcctccaggaccgctgcgggtggtaaccaagtnggaagaccccaagcccccaagggaagaaggaacccgttctatccccaagccatgataataaaagctgctctcccagctgccaaaaaaaaaaaaaaaa

SEQ ID NO: 145739 - DNA, 1251 bp, Homo sapiens
ccgagttctggagaacgccatcagctcgctgcttaaactggaaacaaaagtctcaacttccaacctctttgcagctaggagtggccaagtagcatagatctggtgaatgaactgcaggtgggaatttctgagaaggtttccttcttaaatagaaagattaaaccacaggttccattatggtatcgacttgatgggaaagtcatcatcctgacggccgctgctcaggggattggccaagcagctgccttagcttttgcaagagaaggtgccaaagtcatagccacagacattaatgagtccaaacttcaggaactggaaaagtaccccgggtattcaaaactcgtgtccttgatgtcacaaagaagaaacaaatttgatccagtttgccaatgaagttgagagactttgatgttctctttaatgttgctggtttttgtccctccatgggaacttgtcctgggattgtgaggaagaaaagactggggacttctccgatgaatctcaatgtggcgcagcacgtacctgatggattcaagggctttccttcctaaaatgcttgcttcagaaatctgggcaatattatcaacatgtcttgctgtgggcttcccagcgtcaaaggagttgtggaacaggatgtgtgtacagcacaacccaaggccagccgtggattggcctccacaaaatctgtgggctgcagatttcattccaggcaggggcattcaggtgccaacttgtgtgtggcccggggaacagttgatacgcccatctcctacaagaaagaatacaacgccacgaggaaatcctgaacgacggcacgggaatgatttccctgaagagacaaaaagccggggaagattccgcaactgccagaagaaataagccatgctctgcgtcgtatttcggcttctgattgaatctgcttatgtaacctggtaacccctgtccatccattgatggaggctggagccttgtgattttaggatctcccatgggtgggaaggaaggcaggcccttccctatcccacagtgaacctggttacgaagaaaactcaccaatcatctccttcctgttaatcacatgttaatgaaaataagctctttttaatgatgtcactgtttgcaagagtctgattcctttaaagtatattaatctcttttgtaatctcttctgaaatcattgctaaagaaataaaaatattgaactcatagcaggagaatagtttttaaaataaatctcgatttgttagcatc

SEQ ID NO: 145740 - DNA, 1808 bp, Homo sapiens
ctttgggctgtagtcagtattggattatgatcaatattatcaccatttattttgttgctccagttcttccagctgtggccaatccttcagttggattcttgtgccccatcaacattctccatcctggctttttgttttgagcacttccttccttcctagcaccaccagggctcttgtattatccctgtccctgcccgggaatcgactcctcctccagagagcccgggtttcttttgttagaggatggtatatagaatccaacatgcagacacttgggtgggacttattgttactggggttttgttatactaggggtttcagtggtcagtgctagtatttatgtatgttaacccacgctgtgcttttgggattcagggtaatttcaaattttagataatatggtacatatattattaataccactagttactacattggtacttttcagcaaaatatatctaagtgggatcaaatgagactgtaaatagctttacatcagttcaggtcagttatgttgctaaattacttttggcattaagtttagggaaaaaaaattgggtttgggattttttgttttccaaacatttgtgattgagagcctatggaccctgtaataagtccaagaacagcagttgcagtgtaacaggactgttaatggaatcgggtcatttagaaacagtcaagacttcgctgttgtgcatgtggttaggagccagtgcacacgtcagttcttaggaaatgtacagtcttagcaatagcatttgaaatccaagactcttcccattgtgttgctgttgagtgtagaaaataaaatgtgtgaatttcttttatcttgagtattgaggattctccccttgagaattaaaacaagaatttttgctcttcagtgtaaaaatgttcaagttttattcttgaaatgaatagcaaagttaagcttaaaacgcgtgaagagcttcagaactataaatgggtatgtatacctttctgctgtctaagggcagagaagggaaagaaagtgtggtgcttatcagaggagacagcagcaagacacattgttgacagaaaaccaagggtatcctgtggtcacagtgaaatggtaatgagggcacctctcctttcaagagacgaagattgaatacatgggaagcacactctccgctgtgtgttgtctaggagaggtgcaccctgtatggaaatatttgggaaggttaagattaagacagggtaaaataaagcaaaggcaaatcacaaagcaagggctaatgttaatatgaaaagtgcagaattcaaggaaaaagcatggggacaaagaagatttttcctctttttggttgctgttcatgtgtagcctacaacagaactataagacctatagacatttatatgaatatttatttgaaaacgtataatatcaaacaatgtaaaagccaatagaaatctcagataattgaatgtatagaaactagcagtttgaaagtgattagttcattatttgctgatcaagcagaaaaataagcatatgaaagatatttaaaatgggattaataaagttgatttaacagatcctattccatgtcctttgaatatttatagaaattaaatggaacaaattagggcatcaggaaaactatacaaaagtctttaccaaaaaagggaaatatatatatatatgtgtagtactacctatatatatacataatatatagtactgcttatatatatatatgcctatatgtacacatatatatatacatgtataggcagtactatgttttctgatcataatatgttaaattagtaaaaaaaaa

SEQ ID NO: 145741 - DNA, 394 bp, Homo sapiens
  misc_feature (1)...(394): n = a,t,c or g
gcaacaaaggtgacagcatttaacaaagcttagagaaacctccaggagactgctaccatggcagagaagcccaagctccactactccaatatacggggcagaatggagtccatccggtggctcctggctgcagctggagtagagtttgaagagaaatttataaaatctgcagaagatttggacaagttaagaaatgatggatatttgatgtnccagcaagtgccaatggttgagattgatgggatgaagctggtgcagaccagagccattctcaactacattgccagcaaatacaacctctatgggaaagnccttaagggggaaagccccttcaacctgagggaacaagatgccaagctntgccttgatccaagagggaacccaaaaatcgngt

SEQ ID NO: 145742 - DNA, 1213 bp, Homo sapiens
gtgctttttccctaacttgacccttctttcagtgggagggaactattgagaggaacaaagagcttataaatacattaggacctggaattcggttgtccagccacaaaggtgacagcatttaacaaagcttagagaaacctccgggggattgctatccttgccgggaagccccaggttcaattctttcattcaaggggccagaatggagtccacccaggtggctcctgggctgcagctggagtagagtttgaagagaaatttatgaaaatcttgcagaagatttggacaagtttagaaaatgatggatattttgatgtttccagcaagtgcccaatggtttgagatttgatggggttgaagctgggtgcagaccagagccattctcaacttacatttgccagcaaattacaaccttcttatgggggaaaggacattaaagggagagagcccttgatttgatattgtattttaggaaggtattagccagattttggggttgaaattgttccctcctttcttgcccgtattgttccaccttgagggaacaagattgccaagctttgccttggatcaaagagaaaaattaaaaaaatcggcctaccttcccctgccctttggaaaaagtccttaaaagagcccatgggacaaagacctacccttgttggcaaaaaaagctgagcccgggctggaccatttcaccctggtggaactttcttctactacggtcgaggagcttgacttccagtctttatctcccagcttccctctgcctgaaaggcccctggaaaccccagaatccaggcaaccctgcccccacagtgaaagaaagtttccctacagccccgggcagccccaagggaagccctccccatgggatgaggaaatctttaggaaggaaggcaagggaaggatttttcagggtttttaattaacggcagtccatgggagggcccaaggaacttggcaattaacccaatggtttcttaaagttttggcaacaataaagtacttttacctaagtgttagattgtggcctgttgtgaagctaatgaactctttcgaaattatatgctaattaaataatacaactcctattcggctgacttagttaaaattgatttgttttcattaggatctggatggtgaattcagatttccaatcttctcctagccaaccattttcctggaattaaaaatttcagtaaaaaaggaa

SEQ ID NO: 145743 - DNA, 417 bp, Homo sapiens; identical to SEQ ID NO: 113167
  misc_feature (1)...(417): n = a,t,c or g

SEQ ID NO: 145744 - DNA, 1173 bp, Homo sapiens
tcacacccattcctggactggccgcttatagtaggtgacaggctgagggcctgtcttgttcttgaactggaagatggtgtagaccagcaccaggatgcagagggacaggatgcaggggatgaccacggccacggcgttcacggagcccggcacatcgttgatggtcaccatgatgtccacgtcgtcctggggcagccgccgctccttccgccgctccacctccttctggttgcagcccatccagtcacgcaggatgttgcgcgggtagcctggctccacgctcagtttctggttgtcaaacttccagtagtcccggcccttgtagaaataggtgtaatctgcagaaatacagcccagcatcaccactcccagacacttccggcacctgctctggggcagtgtgaaaaggagggcacaggcagtacatccttccttgctgatgaaggctccttggggagcctgtgggatgcccttccacacggtgatgggcttagggtagccagggtccgtggcccgccgctcctcgctgtagcgccagtaccgctcgcctttgaaaaagtaggtcttgcccacaggttcccagcgcagagctgtgtcaatgccttcacggggcaaacagctgcccagctcccccaggctgtgggggtacccaggctccaccgtcacctccttaaacacccaatacttgtcacctttgaagaagacaaatctcccatcggccctttcataggctgcgtcgatgcgggcaggcaggcccttccagaactgctcgatctgcatggggtagccctcctgcactcggttattgcgcagacgccagaaccagcgatccttaaagacaaacatctcgccccggaagagggccactgtgttgaagttgccgtcacagatgttgggtttggtgcctggtgtggatggccggtccccgaggggcggccgagggggcctgggctggcgctcgtgtttcctctccgatggtgagtggatcctgcggacggggagtgtagggagtggccttgtgggctccagaggctcggctgggggtccgcggcttgaaatggaccccaactgctcctgcaccactggtggctcctgcacgtgcgccggctcctgcaagtgcaaagagtgcaaatgcacctcctgcaagaagagctgctgctcctgctgccccat

SEQ ID NO: 145745 - DNA, 696 bp, Homo sapiens
ctgaaggaaaaggccaaggcaccttgtcggtggtgacaatgtaccatgctaaggccaaagatcaactcacctgtaataaattcgacctctgcctcccaggttcaagacagaaagtcgaagtcttcctgggccatgtctgcagcctgggactttcctttggagtagaaataggagggtgcttggttttcccagcatgaatggagaggacatggggcttctcttcctctgctctgagtgggaaaggagctctgagggctggctctgcacagagaagggggaagtggacactcaattgaaccccactgctgtaccttcctgcatctcactcactgcccactgcgttttcctcttccttgtaggtggctcctgcacgtgcgccggctcctgcaagtgcaaagaagtgcaaatgcacctcctgcaagaagagtgagtgcggggccatctccaggaatctggggctgtggctaaggttgggagggaacccaaggctgtccctgagtgcgtgcttctggggaaccggccttcctttgtccctgtaggttgtcactgcctgtctagtcttctgcactttccagggcttatgtgaggtggggcagctttctcaaaggaagacccaccccagatatttcccagttgtctcctgacaaagccataccctcctgaactgagggtcctttgtggctggaggctctgttg

SEQ ID NO: 145746 - DNA, 477 bp, Homo sapiens
ttttttttttttttttcaagtctaaagtgtttaaattatcaactcaacatatttccacaggaaaaaggaatgtaagcaaaatgggtccaaggtggtataaaaaaaaaaaatccaggtttgtaacatgtctctctgtttacatctgggagaaaggttgtccctggcatcagttcgcagcagctgcactttctctgacgcccctttgcaaacacaacccctggggcacacttgctaacaacccacggggaggcagggagcaggcagctctttcttgcaggagggtgcatttgcactcatttgcacttgcagggaaccagcgcagggtgcagggaggacacccagcgggcgcagggagcagttggggggtccatttgcaagcccgagggagagactgggacttttcccaaggagaggaagcgaagaagcatgtggggcaggtggaaggcgtggtggacccaaacagccggccgctgcttt

SEQ ID NO: 145747 - DNA, 1284 bp, Homo sapiens
gacctcaggtgatccgcctgcctcagcctctcaaagtgctgggattacaggcgtgagccaccacgcctggcctagcaactctcatttctgtgtcctcctttgctctcccgctgggctgtagctggaaacggatgccagcaggttgccactgttggctcgggcagcctgcttttattctcttatctggccccacccatatcctgctgattggtccattttacagagagccgattggtccactttacagagagctgattggtccgttttgagctagatacagagtgcccattggtgtatttacaatccctaagctagacgtaaaggttctccaagtccccaccagactcaggagcccagctggtttcacccagtggatcccgcaccaggcagcaggtggagctggctgccactcccacgcagtgctccacactcctcagcccttgggcctccgatgggactgggtgccatggagcagcggggcggcgctcatcggggaggctccgccccacaggagccctacgctgggttccactccacttcccctcccccgcgcggggcgatagccaggcgcggtcccttcccacgcgggccgcggcgagtgcggacagctcccttccgggctgcggaaggcgggaagtctgcggttcgcgggctccggctggcgggcgcccctcgcgcccgcgccccccgccgcccccgtccccgccagcgccgctgcgcagccccccgccccagcctgggcgtacgaacaggtctgggccgggcggggagccctccgctcgccctcggccagctcgggggaggcggctgatgactcctacggggtggtcgcgggtaggtgggggcgcccggtgcaggattcgcgcctggggacggcgggtgaaggaatagctgggcgggagtcgtggggctccgtcacctcttgggtcctgggctctcacatggtgaagtttgggctcgtggctgaactcgggatctgtgagacccaggattggcgccgggggtccgaagggggcgccggagagtttggggcagtggcgatccattgtattggaacctgggtggccgacaatgcggtaacatgtcctttgctgaacaccacgcagttggaaataccttttggggtgcagttttggatgttgtaaatacctttgcatgagttggcctggaaacctaagcatcattaatatccttatttaagtgttctttgtcaccgttgaccattacctagttgaaatacattccttttcacttccatagcactgtacttgcctggttttcctc

SEQ ID NO: 145748 - DNA, 541 bp, Homo sapiens
actgcacagtggggtgggggctggcaaccctcgccactgtgttgttcaagagtaaaatgtaattcctttccttttatcagaggtagagaccaacaagaatttacaacttttctttgtacctacccatactgcacatcagtagttccccaaccttagctacagagtaatgtcacctgaggagcttttcccaaaaaatactaatgctaaggccttactttcagaacaaataaatcagaatctctagttaaagcatcaataatttttaaaagttcctcagacaaacctgtaccgggggttaagaatgggtgctctagattaaggagtttactattcactaaaatggctgacggtagaactggagaaatgggaacaggaacatgaattccagttaataattcaactgaaaatctgcccctaggccaggcgtggtggctcacacctgtaatcccagcactttggcaggccgaggcggtggatcacctgaggtcaggagtttgagaacagtctggctaacatagtgaaatgctgtttctactaagaa

SEQ ID NO: 145749 - DNA, 2142 bp, Homo sapiens
  misc_feature (1)...(2142): n = a,t,c or g
gtacatggtggtggcaaagagaaaatgaagaanaagcaaaaagtgnaaacccctgataaacccatcagatctcatgagaccttacctatccatgagaaatagccacggggaaagactggccccccccctgattccgatgaccctccccccgggtccccctccccacaacatgtggggaattcccagaagataaattccaagttgccaatttccagtggggaccatagcccaaacccatatcactggtgatgcccacttccttcagtattagggattcctcagtcagaagagaccccctgtgtggccctgagtcccctcaggaggaaggtggacaacagagaaatgagagttttgatattttctgaaagaggaacatgtgttagagatgaagaatcttccaaggctcattcagttgcttagaataatcattactgttatatgagaaacattttagtaatttaataaaaggataatgtttatttaaaaaacctgacttttccagagtaattttgttttgcacattcatgtttattgaaggggactaatttctataatgcaaatcagagttaaatattaaaaattgtgtaaatacaattgacataggaattacattaaaatattaggaagaaacaaggacaaatttagaccttgaatccgaagagataaagcttacttgactttcaaatggagagatgatgaaaacccactcattcagtctttcagaacaaaaagacagtcatctgataagagtatgacatggatgaaatgccctacaggggccttggacatctttaatttctgcgattatgtgaaagaggtggactttacagataatggagcagaagccaacattagtaaaaggaatcccaacttcttcccatagaattagaaacatgtgaaagtacaataaacttcttgttcaaattaccagcatcagagagcttcccatttgcatctagaccttgaatttatatttattgatcaagttctaatttgtatgtatattttggtgcatattcaccaataacagttaaaattaattatgtggttatagttaatatatggcacctaccttcttccggtagtgcatcagtaaatggtgttattttgtcatttttccaaagagagtgttgtacggttttccctgtagttcttcctttatagcttttcttctgataaccatgacttcaggagctttaaaactatctatcttgcatttgtgtctgggcggaggaactagccatcagcctcctgaagcctgccatcattgttaaatttgagggactggggctgtcttggggggcttcaggaagggtaaaggaactattttgaggcaggatgtgtgtggggtgggcactgggatttccacccaactgccaagttaagtattgttagagatttcattttacaacacaaaaataagccctgtgtcaaagattttaaaatcatgggaaagttaaaatctaggaaagaccttagagaaccagccaaccaactctctcattttaaaagtgaagggttcataggcacagattacttgcctaaggtcatccggggacgaaggacaaggatccaaatgtacttggggaccaggaattagtcccccaaatttcagtgttcttcctagtatttaaacattggcccctttcggacaaattttgtgatttcattcttgttatatttcaggtactcttgctggatttattttaggtttaactggttaaagaatgaaccatttccagaaagtgttagggattaagtccagtgtccatccgcctatgtatatgaatccaccttgcccaaagacactggctctccctcctctgtaacccagcatgtccaaatgtggaaggttattgtgtggggtcctttgggttttcattgttatggatgtattactataaactgactacttatatccttgtttatgtatttttgctgatctttcataaagcagaatggtatgtatcggattgttttaatgttatatattggattgtattcgatgttacaaaaccaatactctatggagacatgaaaaaaataaaggactaaattaactggagatttttggtactcttataaagcaaaattgtttgttatacatacagatgaaataagaaaataatgtaatctttctgt

SEQ ID NO: 145750 - DNA, 654 bp, Homo sapiens; identical to SEQ ID NO: 144884
  misc_feature (1)...(654): n = a,t,c or g

SEQ ID NO: 145751 - DNA, 703 bp, Homo sapiens
  misc_feature (1)...(703): n = a,t,c or g
aggcctagaattcggcacgagccacagactcagagagaacccaccatggtgcttgtctcctgcccgacaagaccaacgtcaaggccggcttggggtaaggtcggcgcgcacgctggcgagtatggtgcggaggccctggagaggatgttcctgtccttccccaccaccaaagacttacttcccgcacttcgaccttgagccacggtttctgcccaaggttaaagggcccacggcaaagaaggtggccgaacgcgctgaccaaacgccgtggcgcaacgtgggacgacatgcccaaacggcgctgtccgccctgagcgacctgcacggcgcacaagctttcgggtgggacccggttcaactttcaagctcctaaagccaattgccttgcttgggtgaaccttgggccgcccacctccccgcccgagtttcaacccctggcggttgcacgccttccctggaacaaagtttcctggggtttttgttgaagcaaccttgttgaactttcaaataacctttaaaggttggaagccttcgggttggccatgcttctttgcccctttgggcctttcccccagggccctccttccctttcctggaacccgtaacccccgtgggtcttttgaataaaattttgaattgggggggcaaaaaaaaaaaaaaaaaaaagatctttnaatttaagggggcggaaagtttatttcaa

SEQ ID NO: 145752 - DNA, 2260 bp, Homo sapiens
  misc_feature (1)...(2260): n = a,t,c or g
tgggtctggtgatggaagatgcagtctctgctgatcacatgtgccctctgccagggcacctactgagaggtgcggtcctgggggtggaggcctgcctggcaggtgtgcgtgcctcgtacgtgtgttatgggcactggtctaggccaggtatgacacccactctcctgtgagatttcactttagtttttaaaaggtccagttctacagagtgagacctatctatctgagtactacatatgttttaagacttggttctttttttgagggatccttgaccctgggaagtctggagcaccctgagaagggggcaccatgtgtgcctttgcccacgtgtcctgaggggctgcttgtctgggagggagggagagaacattcagcagcaggtgcttttttatggccttttcttaaaataacctaagggggacacatccatcttgcagagaagtttacagaactccccttgaaaactgctgctgaggctcctgttaaattttctgtggcatcttttatgcgttggtaaaaactgcagtgtctttggacctgagagtggctactccgtggttttgtgacctgtaagcgtggggttcaggggtgtgtggccctgcagggtcccacgcctccctgagcactgactggaagtttcactggctggtggctgtcccttctcccatcagggtccccagcaaagttaactacacagaggacccaggggaaacgagctgtgtagccactgacttgctcgcgcggccgtggcctctgaggggcactcgccggttaagacagggtgggagtagtgctttccagttcagactctaacttctcccaaagtgtcctaagaaaatactggatcggctcatagatttatgctccttatgatgccctaacttgggaaggttgttctaggggacaggccgggcagtgttcccacaaacaactttagagttcgaaggccccagggccccgctgtctcttggccattagatacctttcggcaggtaagggactaccaatgcttacgtcaaaacagcagaatcggctttgcagagcactttggggagcagatattaacttatttttgtgttggacagaaatgaaatcttgcgatttttaatcgctatgataatacttccaaattttatgatttttctgaaggaaataatgcaaacattttaaatatgtttctccccctttccaaaaactgttaaactaatgagcaagtaacactaactttgaatgtctctacaatacccgttgataactcagtggagccaggctttggggtagcggccctggagcttgcagggtttctcgccactgggggctggaccacgcccccagctgtgaccgtgggtgtggctggctctcggccctgcccagctttttttctgaggacgtggtgacttcctgaacatcagcttcaatcctccatcattaatgtgaagcaaaacacaaaaaccgccccaattanaaaaggattccttgggcatccgaaaccagcatcttgcaccttaaacccataccccacccgtgttgcgcccacagggggggatggtcccaatgggccagcttaaaaatgtggtcacctgtgggggaaactcttcaggcaccttgaagtgagaacccagctgtccgtcctcaggccggcctttcttccggcgacacccgtccatggctggctgggtcccccttcgcagtgttggtctgtcttgacatctaaaccccccggcgtgtgcaagtgccccatcttccagggacttaccttattttcccagaatttaaaccctgttttttataattcaagttaaatgcaaatgactgtccagttgcccaaatatccttgatcctatgagtgtaagttgatgactgtttgtttagtccagtaggagtaaaaatgcctgtgtcccccacggggtgtccacagcccctcaccccatacccctgttgaggtgtgaaatgccccccgtcagaaattaaatacaaaccttaaatgtgccctattgggtgtcctaaaccttccatacaatgttaaggtcagattcccttttaggaatacctgggtgctgtcccccaggtttgatagttagacttaaaaacttgaaattcactttttggggggagggattttcctgaaatagagagttgagacttgccagttgggggaaaatagcatttaaaatggaaagctgtgtttggaaaattgtgtatgagtatttttgtattaaaaacattttaaaggcttttttcttaacttaaaaaaaaa

SEQ ID NO: 145753 - DNA, 903 bp, Homo sapiens; identical to SEQ ID NO: 144896

SEQ ID NO: 145754 - DNA, 1134 bp, Homo sapiens; identical to SEQ ID NO: 144898

SEQ ID NO: 145755 - DNA, 1376 bp, Homo sapiens
tgggctctaccggcgggatttgatggcgtgatgtctcacagaaagttctccgctcccagacatgggtccctcggcttcctgcctcggaagcgcagcagcaggcatcgtgggaaggtgaagagcttccctaaggatgacccgtccaagccggtccacctcacagccttcctgggatacaccccttgcttgggctcacatcgtgcgggaagtcgacaggccgggatccaaggtgaacaagaaggaggtggtggaggctgtgaccattgtagagacaccacccatggtggttgtgggcattgtgggctacgtggaaacccctcgaggcctccggaccttcaagactgtctttgctgagcacatcagtgatgaatgcaagaggcgtttctataagaattggcataaatctaagaagaagtcctttaccaagtactgcaagaaatggcaggatgaggatggcaagaagcagctggagaaggacttcagcagcatgaagaagtactgccaagtcatccgtgtcattgcccacacccagatgcgcctgcttcctctgcgccagaagaagggcccacttgatgggagatccaggtggaacgaggggcacctgtgcccgagaaagctgggactggcccccgcgagagggcttgaagcagcaggtacctgtgaaaccaagtgttttgggcaggatgagaatgatcgaacttcatcgggggtgacccaagggccaaaaggcttacaaagggggtcacccagtcgtttggcacacccaagaaagctgcccccgcaaagacccacccgagggcctgcgcaagggtggcctgtattggggccatggccatccctgctcgtgtagcccttcctctgtggcaacgcgctgggcaagaaaaggctacccatcacccgcactgagatcaacaagaagattttataagatttggcccagggctacccttatcaagggcgggaagcttgatcaaagaacaatgcctcccactgacctatgaccctatctgacaagagcatcaaaccctctgggtggctttgtccactaatggtaagtgaacaaatgattttgtcacatttaaaagtcttgtgtggttgggacccaaaaagcgggtgctcacccctccgcaaagtctttgctggtgcagacgaaagcggcggggctctggagaagaattacccttaagttccattgacaccacctccaagtttggccatggccgcttccagaccatggaggagaagaaagcattcatgggaccactgaagaaagaccgaattgcaaaggaagaaaggagcttaatgccaggaacagattttgcaagttggtggggtctcaataaaagttattttcccctgaaaaaaaaaaaaaaaaa

SEQ ID NO: 145756 - DNA, 697 bp, Homo sapiens
  misc_feature (1)...(697): n = a,t,c or g
ccccgactcttctggtccccacagactcagagagaacccacccatggttgctgtctcctgccgacaaagaccaacgtcaaggcccgcctgggggtaaggtcggcgcgcacgctggcgagtatggtgcggaggccctggagaggatgttcctgtccttccccaccaccaagacctacttcccgcacttcgaacctgagccacggtttctgcccaggtttaagggccacgggcaaggaaggtggccgacgcgcttgaccaacgccgtggcgcaacgtgggacggacattgcccaacgcgcttgtccgcccttgagcgacctgcacggcgcacaagctttcgggtgggacccggttcaactttcaagctcctaaaggccacttgccttgcttgggtgaaccttgggccgcccacctccccggccgagtttcaacccctggcggttgcaaggcttccttggggacaaagtttcctgggtttcttgttgaagcaacgttgttgaacttccaaataacgtttaaagttgggagccttcggtgggccattgtttttttgcccctttgggcctccccccagccccttcctccctttcctgaaccgtaacccccgtggtcttttgaataaaattttgaattgggggggcaaaaaaaaaaaaaaaaaaaagatctttnaatttaagggggcggaaagtttatttcaa

SEQ ID NO: 145757 - DNA, 704 bp, Homo sapiens
  misc_feature (1)...(704): n = a,t,c or g
atcgagaccatattccatgtggnggaattccacagactcagagagaacccacccatggttgctgtctcctgccgacaaagaccaacgtcaagggcccgcctgggggtaaggtcggcgcgcacgctgtgcgcagtatgtgtgcggaggccctggagaggatgttcctgtccttccccaccaccaagacctacttcccgcacttcgacctgagccacgggttttgcccaggtttaagggccacgggcaaggaaggtggccgacgcgcttgaccaacgccgtggcgcaacgtgggacggacattgcccaacgcgctgttccgcccttgagcgacctgcacgcgcacaagctttcgggtgggacccggttcaacttcaaagctcctaaagccacttgcctgcttggttgaccctggcccgcccacctccccggccgagtttcaccccttgcggttgcaaggcttccctggggacaaatttcctgggctttctgtgggcaaatttaaaatttgaactccaaatacccgttaagcttggagccttcggtgggccatgcttctttgcccctttgggcctccccccagcccctcctcccctttcctgcacccgtacccccgtggtcttttgaataaaattttgaattgggggggcaaaaaaaaaaaaaaaaaaaagatctttnaatttaagggggcggaaagtttatttcaa

SEQ ID NO: 145758 - DNA, 738 bp, Homo sapiens
  misc_feature (1)...(738): n = a,t,c or g
gggcaaagaagcatggccaccgaggctccagcttaacggtatttggaggtccccacagactcagagagaacccaccatggtgctcgtctcctgccgacaagaccaacgtcataggccgcctggggtaaggtcggcgcgcacgctgtgcgcagtatgtgtgcggaggccctggagagggatgttcctgtccttccccaccaccaagacctacttcccgcacttcgacctgagccacgggttttgcccaggttaaagggccacggcaaagaaggtggccgaacgcgctgaccaaacgccgtggcgcaacgtgggacgacatgccccaaacggcgctgtccggccctgaagcgaccctgcacggcgcacaaagctttcggggtggaacccggttcaactttaaagctcctaaagccacttgccttgctggtgacccctggcccgcccaccttccccggccgagttcgacccctggcgggtggaacgccttccctgggacaagtttccttgggtttcttgttgaagaaccgttgcttgaaccttccaaaatacccgttaaagcttggaagccttcgggttggccatgctttctttgcccctttggggcttccccccagcccctcctcccctttcctgcacccgtacccccgtggtcttttgaataaaattttgaattgggggggcaaaaaaaaaaaaaaaaaaaagatctttnaatttaagggggcggaaagtttatttcaa

SEQ ID NO: 145759 - DNA, 1346 bp, Homo sapiens
tttcgtgcggccggatcgcatctcagctggttggctttggttagagctcccgtcagactttcgttcggccctaggatttggtagccccgaagtgtgggctctctccagtaccagactcatttcagtatccatcctttgggaagtcgtgtgaatacctcggtctcttatctcacagggatagaatggcggcctgacggagccgcggcgccggcgaagtcgcctgaggcgscgacttgtaacccccagaccagctcaaacgggagccaaaactcgaagcttggaagaattagcaggaaatggcggatgaggcgttgtttttgcttctccataacgagatggtgtctggagtgtacaagtccgcggagcagggggaggtggaaaacggacgatgtattactaaagctggaaaacatgggggtttccgagttgggacaaaggatttgattagaaaggtttacaaaagatactgcaaggttcaaggatgagttagatatcatgaagttcatttgtaaagatttttggactacggtattcaagaaacaaatcgacaatctaaggacaaatcatcagggcatctatgtactttcagggcaacaaatttcgcctgcttactcagatgtctgcaggaaaacagtatttagaacatgcatcctaagtatttagcatttaccgtgtggcttaatcagaggtggcttatcaaaccttgggaataaaaagtattgtaacagctgaagtgtcttcaatgcctgcttgcaaatttcaggtgatgatacagaagctgtagaacatactgaaatgcaaggcttcaacagtgtaaaagagataaattattcatgtaaaagtatttccaagtagtgatgatttaattacattgttccgatgttttgtacaggagtaagcatgtatttttatcaatttaaccacagatcaaaggagatgaagggacattctgccatgacatacacttaaccaaaactattcaaaatgaaaaccggatttcaaataaccagacaccaagatgcagggcccttattttaaacctttttatttggttagagtgatatgtatttagccatagatggagaaacaaagctcagggtttgttgaattagcatgagagaaaattatgtaccaacagaattatttgtgagaagaatgaacaaattttgataaagtatgaatttgttttattttaaaaagcaaacatactaaatttttttttattttattgcttataatttattaagaatgtttacacctgtataaggatttcatatatacattggatgtgtgtatatataaatacatatatgactgcctaaattggtttataaatttaatttttc

SEQ ID NO: 145760 - DNA, 553 bp, Homo sapiens
  misc_feature (1)...(553): n = a,t,c or g
cgagtatggtgcggagncctggagaggatgttcctgtccttccccaccaccaagacctacttcccgcacttcgacctgagccacggctctgccaggttaagggccacggcaagaaggtggcgacgcgctgaccaacgccgtgggcacgtggacgacatgcccaacgcgctgtccgccctgagcgacctgcacgcgcacaagcttcgggtggacccggtcaacttcaagctcctaagccactgcctgctggtgaccntggccgcccaccaccgaggctccagcttaacggtatttggaggtcagcacggtgctcacagaagccaggaacttgtccagggaggcgtgcaccgcangggtgaactcggcggggaggtgggcggccagggtcaccagcaggcagtggcttaaggagcttgaagttgaccgggtccacccgaagcttntgcgcnttgcaggtcgctcagggcgganaacgcgttgggcatgtcgtccacgtncgccanggctttggtcancgcgtcggccancttcttgccgtggcccttaacctggg

SEQ ID NO: 145761 - DNA, 530 bp, Homo sapiens
  misc_feature (1)...(530): n = a,t,c or g
ccgacaagaccaacgtcaaggccgcctggggtaaggtcggcgcgcacnctggcgaagtatggtgcggacncctggagaggatgttcctgtccttccccaccaccaagacctacttcccgcacttcgacctgagccacggctctgcccaggttaagggccacggcaagaatgtggccgacgcgctgaccaacgccgtgggcacgtggacgacatgcccaacgcgctgtccgccctgagcgacctgcacgcgcacaagcttcgggtggacccggtcaacttcaagctcctaagccactgcctgctggtgaccctggccgcccacctccccgccgagttcaccccttgcggttgcacggccttccctgggacaagtttcctgggctttcttgtgaagcaaccgttgctggaccttccaaataccnctccccgncgagttcacccctgcggtgcacgcctccctggacaagttcctggcttctgtgagcaccgtgctgacctccaaatacggttaagctggagctcggtggcat

SEQ ID NO: 145762 - DNA, 392 bp, Homo sapiens
  misc_feature (1)...(392): n = a,t,c or g
tcctgccgacaagaccaacgtcaaggccgcctggggtaaggtcggcgcgcacntggcgagtatggtgcggaggcctggagaggatgttcctgtccttccccaccaccaagacctacttcccgcacttcgacctgagccacggctctgcccaggttaagggccacggcaagaaggtggccgacgcgctgacgcagggtgaactcggcggggaggtgggcggccagggtcaccagcaggcagtggcttaggagcttgaagttgaccgggtccacccgaagcttgtgcgcgtgcaggtcgctcagggcggacacgcgttgggcatgtcgtccacgtgcgccacggcgttggtcagcgcgtcggccacttttgccgtgnccttaacctgggcagac

SEQ ID NO: 145763 - DNA, 419 bp, Homo sapiens
  misc_feature (1)...(419): n = a,t,c or g
ggcacgaggtcaaggccgcctggggtaaggtcggcgcgcacgtggcgagtatggtgcggaggccctggagaggatgttcctgtccttccccaccaccaagacctacttcccgcacttcgacctgagccacggctctgcccaggttaagggccacggcaagaaggtggccgacgcgctgaccaacgccgtggncacgtggacccggtcaacttcaagctcctaagccactgcctgctggtgaccctggccgcccaccttcccgccgagttcacccctgcggtgcacgcctccctggacaagttcctggctttgtgagcaccgtgctgacctccaaataccgttaagctggancctcggtggcatgttttgcccttggctccccccagagctcttcttntgtaccagtatacgnggtgttt

SEQ ID NO: 145764 - DNA, 333 bp, Homo sapiens
ccttccgacaagaccaaggtcaaggccgcttgggtaaggtcggcggacagatggagagtatggtgcagcttcgggtggacccggtcaacttcaagctcctaagccactgcctgctggtgaccctggccgcccacctccccgccgagttcacccctgcggtgcacgcctccctggacaagttcctggcttctgtgagcaccgtgctgacctccaaataccgttaagctggagcctcggtggccatgcttcttgccccttgggcctccccccagcccctcctccccttcctgcacccgtacccccgtggtctttgaataaagtctgagtgggcgg

SEQ ID NO: 145765 - DNA, 158 bp, Homo sapiens
ccttccccaccaccaagacctacttcccgcacttcgacctgagccacggctctgcccaggttaagggccacggcaagaaggtggcctccccccagcccctcctccccttcctgcacccgtacccccgtggtctttgaataaagtctgagtgggcggca

SEQ ID NO: 145766 - DNA, 389 bp, Homo sapiens
actcagagagaacccaccatggtgctgtctcctgccgacaagaccaacgtcaaggccgcctggggatgttcctgtccttccccaccaccaagacctacttcccgcacttcgacctgagccacggctctgcccaggttaagggccacggcaagaaggtggccgacgcgctgaccaacgccgtggccagcgtggacgacatgcccaacgcgctgtccgccctgagcgacctgcacgcgcacaagcttcgggtggacccggtcaacttcaagctcctaagccactgcctgctggtgaccctgggccgcccacctccccgccgagtttacccttgcggtgcacgccttcctgggacaatttcctgggtttttttgaagcaccttgttgaactt

SEQ ID NO: 145767 - DNA, 156 bp, Homo sapiens
  misc_feature (1)...(156): n = a,t,c or g
atggtgcggaggccctggagaggatgttcctgtccttccccccctggccgnccacctccccgccgagttcacccctgcggtgcacgnctccctggacaagtttctggnttctgtgagcaacgtgctgaacttcaaatanccttaaggttggagctt

SEQ ID NO: 145768 - DNA, 660 bp, Homo sapiens
  misc_feature (1)...(660): n = a,t,c or g
gccgcctggggtaaggtcggcgcgcacgctggcgagtatggtgcggaggccctggagaggatgttcctgtccttccccaccaccaagacctacttcccgcacttcgacctgagccacggctctgcccaggttaagggccacggcaagaaggtggccgacgcgctgaccaacgccgtggcgcacgtggacgacatgcccaacgcgctgtccgccctgagcgacctgcacgcgcacaagcttcgggtggacccggtcaacttcaaaccaccaagacctacttcccgcacttcgacctgagccacggctctgcccaggttaagggccacggcaagaaggtggccgacgcgctgaccaacgccgtggccacgtggacgacatgcccaacgcgctgtccgccctgagcgacctgcacgcgcacaagcttcgggtggacccggtcaacttcaagctcctaagccactgcctgctggtgaccctggccgcccacctccccgccgagttcacccctgcggtgcacgcctccctggacaagttcctggcttctgtgagcaccgtgctgacctccaaataccgttaagctggagcctcggtagccatgcttcttgccccttgggcttccccccagcccctncttcccctttcctgcaaccgtaaccccgt

SEQ ID NO: 145769 - DNA, 811 bp, Homo sapiens
gagagaaccaccatggtgctgtctcctgccgacaagaccaacgtcaaggccgcctggggtaaggtcggcgcgcacgctggcgagtatggtgcggaggccctggagaggatgttcctgtccttccccaccaccaagacctacttcccgcacttcgacctgagccacggctctgcccaggttaagggccacggaggatgttcctgtccttccccaccaccaagacctacttcccgcacttcgacctgagccacggctctgcccaggttaagggccacggcaagaaggtggccgacgcgctgaccaacgccgtggcgcacgtggacgacatgcccaacgcgctgtccgccctgagcgacctgcacgcgcacaagcttcgggtggacccggtcaacttcaagctcctaagccactgcctgctggtgaccctggccgcccacctccccgccgagttcacccctgcggtgcacgcctccctggacaagttcctggcttctgtgagcaccgtgctgacctccaaataccgttaattcgggtggacccggtcaacttcaagctcctaagccactgcctgctggtgaccctggccgcccacctccccgccgagttcacccctgcggtgcacgcctccctggacaagttcctggcttctgtgagcaccgtgctgacctccaaataccgttaagctggagcctcggtggccatgcttcttgccccttgggcctccccccagcccctcctccccttcctgcacccgtacccccgtggtctttgaataaagtttgagtgggcggcaaaaaaaaaaaaaaaaaaa

SEQ ID NO: 145770 - DNA, 1872 bp, Homo sapiens
  misc_feature (1)...(1872): n = a,t,c or g
caccatggtgctgtctcctgcgacaagaccacgtcaaggccgcctggggtaaggtcggcgcgcacgctggcgagtatggtgcggaggccctggagaggatgttcctgtccttccccaccaccaagacctacttcccgcacttcgacctgagccacggctctgcccaggttaagggccacggcaagaaggtggccgacgcgctgaccaacgccgtggcgcacgtggacgacatgcccaacgcgctgtccgccctgagcgacctgcacgcgcacaagctacttcccgcacttcgacctgagccacggctctgccccaggttaagggccangggcaagaaggtggccgacgcgttgaccaacgccgtggcgcacgtggacgacatgcccaacgcgctgtccgccctgagcgacctgcactgcgcaacaagctttgggtggacccggtcaacttcaagctcctaagccactgcctgctggtgaccctggccgcccacctccccgccgagttcacccctgcggtgcacgcctccctggacaagttcctggcttctgtgagcaccgtgctgacctccaaataccgttaagctggagcctcggtggccatgcttcnatgccttggccctggagaggatgttcctgtccttccccaaccaaccaaaaacctacttcccgaaacttcgaacccttgagcccaaggctctgccccaaggttaaagggccacggcaaaaaaaggtggcccgacgcgcggccgaacgcgcttgacccaaagccgtggcggcacgtggacggacatgcccaaacggcgctgtccgcccttgagcgacctgcacggcgcacaagctttcgggtggacccggtcaacttcaagcttcctaagccactgcctgctggtgaccctggccgcccacctccccgccgagttccaaccctgcggtgcacgcctcccttggacaagttcctggcttctgtgagcaccgtgctgacctccaaaataccgttaagctggagcctcggtggccatgcttccttgcccttgggcctcccaacgggccctcctcccctccttgcaccggcccttcctggtggaggccctggagaggaatggtcctgttccctccccccacacccaagccttacttcccggcacttcgaaccttgagcccaacggctctgccccaggtttaaggggccacgggcaaagaaggtggccggacgcgcttgacccaaaagccgtggcggcaacgtggacggacatgcccaaacggcgctgttccgcccctgaagcgaccctgcaacggcgcaacaagctttcgggtggacccggtcaactttcaagcttcttaagccacttgcctgctgggtggcccctgggccggcccacctccccggccgagtttcaccccttgcggttgcacggccttccctgggacaagtttcctgggctttcttgtgaagcaaccgttgctggaccttccaaattaccgttaaagcttggaagccttcggtgggccatgcttcttgccccttgggcctcccatgcttnnttncccttgggcctccccccagcccctcctccccttcctgcacccggcacgcgcacaagcttcgggtggacccggtcaacttcaagctcctaagccactgcctgctggtgaccctggccgcccacctccccgccgagttccaacccctgcggtgcacgcctccctggacaagttcctggcttctgtgagcaccgtgctgacctccaaataccgttaagctggagcctcggtggccatgcttcnttgcccttgggcctccccccagcccctcctccccttcctgcacccgtacccccgtggtctttgaataaagtctgagtgggcggca

SEQ ID NO: 145771 - DNA, 521 bp, Homo sapiens
aaaggtgagattaataccccagggaggaggattgagttagccagtcctgagggctcaggaggaagaggggagcactgcccattaagcaaatgtctgtgtaacaaaaggtgtcatcaataaagttttaacaagttttttaaaaaagcaaaagctgtatctcagaagaaaatacctgcaacaaagcttagggacaaaggattacagacgaagtattcatgtttatattattatttttatttgagacatggtcttgctttgtcgcccaggctggcgtgcagtggcacaatcacagctcactgcatcctcaaacatcggggctcaagcgatccaccccacctgagcctcccatgtattaaaactgcaatacttttgcaccagctaatagctggggattacaggtgcatgccaccatgccagtctccttttaaaattttttgtagagacagatctcactgtgttgcccaggttggtttcaaacttctggccatcttcctgccccagccttctgaagtgctgggatt

SEQ ID NO: 145772 - DNA, 552 bp, Homo sapiens
ggaattccccaaagtgctgggattgaacccttctaattttaaagaaccttgttattagaaaatctcagcctaatacaatctgaagttaagagttttagcagcattgtttttctaagtagatttagctatagattttcttctggccaaacaaggaagagtatatgcccttgtaaatgagtcttgttttgtttatttaaatagtcagtcaaaacgtagaaatcagtatacgtaaaataaaatgcatgagactattaaatcttttcatatactctacaaataaaatgaaatctgtgtgtggtcctggttgactgggcatctaaagggaatcagaaaagagattgtgaaaaggtatatatatatcctcttccttattttagttttgctttttcctattttccataattaagtgccgtttacaaagtggcatcaaaaaattgaagcaggccaggcatggtggctcatgcctgtaatcccagcagtttgggaggctgagggcaggtggatcacttgagatcaggagttcgtgaccagcctgggcaacatggtgaaagc

SEQ ID NO: 145773 - DNA, 670 bp, Homo sapiens
  misc_feature (1)...(670): n = a,t,c or g
atcgagaccatattccatgtggnggaattccacagactcagagagaacccaccatggtgcttgtctcctgccgacaagaccaacgtcaagggcccgcctggggtaaggtcggcgcgcacgctggcgagtatggcttcggaggccctggagaggaatggtcctgttccctccccccacacccaagccttacttcccgcacttcgaacctgagccacggtttctgcccaggtttaagggccacgggcaaggaaggtggccgacgcgcttgaccaacgccgtggcgcaacgtgggacggacattgcccaacgcgctgttccgcccttgagcgacctgcacggcgcacaagctttcgggtgggacccggttcaactttcaagctcctaaaggccacttgccttgcttgggtgaaccttgggccgcccacctccccggccgagtttcaacccctggcggttgcaacgtcttccctggggacaaagtttcctgggtttcttgttgaagcaccgttgctgaccttccaaataacctttaaaggttggaagctttggttggccattgtttttttgccctttgggcttccccccagcccctcctcccctttcctgcacccgtacccccgtggtctttgaaataaagtcttgagtgggcggcaaaaaaaaaaaaaaaaaa

SEQ ID NO: 145774 - DNA, 600 bp, Homo sapiens
gacctttgtgaggctaggtacactgtccacacctctttggggaagttacgattttttttttccatcataattcagtctcttcttattctacagtgtgcactttatgcctctcgccttttgataatagttgttcagtgaaggaagtcagctgccagaatattaagaagggtctccctttatgtcagtacaactgttagggcggccttcccatttactttaggtttcaagaggattcaccggaagcacatgccccggtctagtcccatttgaaacagttctgctttactgagaccctaggccggtctccttgctgaccctagcgctgctgcctaggtgccatttcctttcctcctcagtcaaatacaggctgcacattttgtcacttaatgcaaaatcaggggcatcattatccggtgcttgaacaaggagctccgctctacaactggtttttttaggacttgtgaggaacacagcaacggaaatccatccacaaaggatgcagtgccccaacttgtactgcgcctgaatagtcatgtgataatttactgaagaaatctagtgtactttaaatttttttcataaaagtttacattgtattgt

SEQ ID NO: 145775 - DNA, 585 bp, Homo sapiens
atgccaaaagggagcttcgctttcttttggtttatcttcatggagatgatcaccaggactctgatgagttttgtcgtctcacaggctttacgagagaacacctatccattcctggccatgattatgctgaaggatcgaaggatgactgtggtgggacggctagaaggcctcattcaacctgatgacctcattaaccaactgacatttatcatggatgctaaccagacttacctggtgtcagaacgcctagaaagggaagaaagaaaccagacccaagtgctgagacaacagcaggatgaggcctacctggcctctctcagagctgaccaggagaaagaaagaaagaaacgggaggagcgggagcgtaagcggcggaaggaggaggaggtgcaacagcaaaagttggcagaggagagacggcggcagaatttacaggaggaaaaggaaaggaagttggaatgcctgccccctgaaccttcccctgatgaccctgaaagtgtcaagatcatcttcaaattacctaatgattctcgagtagagagacgattccacttttcacagtctctaacagtaaggaccacctaa

SEQ ID NO: 145776 - DNA, 443 bp, Homo sapiens
  misc_feature (1)...(443): n = a,t,c or g
cccgcctgcaggaattcggcacgagctagcaaatacttctttctccttgcttgcctccaccatgatatttgaataagagatggccagaggataacacttgtctcttaaaaactaagctaaaaagaacctagaaccttcaattgagcagttgtgaaaattgctaatggtgccaaggccaagcannnnnnnnnnnnnnnnnnnnnnnaaggagcgataacccccagaatgcaaaatcaggggcatcattatccggtgcttgaacaaggagctccgctctacaactggtttttttaggacttgtgaggaacacagcaacggaaatccatccacaaaggatgcagtgccccaacttgtactgcgcctgaatagtcatgtgataatttactgaagaaatctagtgtactttaaatttttttcataaaagtttacattgtattgtaagg

SEQ ID NO: 145777 - DNA, 4639 bp, Homo sapiens
cggaattgccggaccgacgatttcgtgtagaggcggcggcaaaatggcggcgcctgaggagcgggatctaacccaggagcagacagagaagctgctgcagtttcaggatctcactggcatcgaatctatggatcagtgtcgccataccttggaacagcataactggaacatagaggctgctgtacaggacagattgaatgaacaagagggcgtacctagtgttttcaacccacctccatcacgacccctgcaggttaatacagctgaccacaggatctacagctatgttgtctcaagacctcaaccaagggggctgcttggatggggttattacttgataatgcttccattcccggtttacctattacacgatacttgatatatttaaggtttgctcctcggtttatacgggcctgaaccttcgaagccggggtcacttgaccccgtttggggacaattgtttcaatttatggcactccttttgaagagaaatatgggagggcacaccctgtcttctaccagggaacgtacagccaggcacttaacgatgccaaaagggagcttcgctttcttttggtttatcttcatggagatgatcaccaggactctgatgagttttgtcgcaacacactctgtgcacctgaagttatttcacctaataaacactaggatgctcttctgggcatgctctacaaacaaacctgagggatacagggtctcacaggctttacgagagaacacctatccattcctgggccatgattatgctgaaggatcgaagggaatgacctgtgggtgggacggctagaaggcctcattgcaacctgatgacctcattaaccaactgacatttatcatggatgctaaccagacttacctgggtgtcaggaacgcctagaaagggaagaaagaaaccagacccaagtgctgagacaacagcaggatgaggcctacctggcctctctcagagctgaccaggagaaagaaagaaagaaacgggaggagcgggagcgtaagcggcggaaggaggaggaggtgcaaccagcaaaagttggcagaggagagacggcggcagaaatttacagggaggaaaaggaaaggaagttggaatgcctgccccctggaaccttcccctgatgacccttgaaaagtgtcaaagatcatcttcgaaattacctaatgattctcgagtagagagacggattccactttttcacaggtctctaacagtaatccacgacttcttattctccttgaaggaaagcccagaaaagtttcagattgaagccaattttcccaggcgagtgctgccctgcatcccttcagaggaggtggcccaatccccctacgctacaggagggccggactcagccacacagaagttctttttgttcaggacctaactgacgaatgacatttttttcttcctgtcccctcctaccccagtccctaaaagaaatggggaaaaaagaaaacaacagcaagtcagaaaaaaaaaacaagagagagaaattcatattattattattattataatacaatattttttttaaaagactgctgcatccttaggaaggatcaggaaaccatgctgcccgtaagagtcacaacctgtgtgtgcgcgcaaggttagcaacaaacgtacccgcttggcaagcccacccttcctgtggcctctgtgcacgcaccttccagtgaacagagactcttcaccttcgaccccatccattgtcccagctgggaaggggacattcccactgagttctcattcattcttgcttttatgaaaaataaaagtgaaaaacctccatcaaccagctacttgcagcatcttcctgaggacttgcttctcctgcctctggggaagagagggaagagaaagcacagagcagagaagcagagatgttccttgaactgcccacaagttttcaataacttttatttctgttttgtaatgaccaaaggaatgaggctgacataggtatatatatatatttttttcctttatttgataaagagccaattctttaaacccatgagtttatgccctgggctccttagcccacaatagtgtaataaaagtgccccgggctggtttgtgcttatttctgccattgtccctctcacgttcccagagaggtcattctttttggtccaactcttgctgtcctttcttaccacctgtgcaccccacttggagcagtgggaggaaatctgggtttgtggccccacaaaggctgtatatgtaaagatacacctatgtatgtggtggaactcacctttacacacaactgcagcttttccttggagtctgtaccaaggtggtgggttatggggtctgaaccaaaggatagcagctcttcattcctcttctgacatgtgcatgctgctccccccaagccctggggttttcctgaattggccaagcctggggcctttccaaaggactagcacggcctgtggtggagccagcagaaccacaggagagtgccctgcctgtctcagtggaagagtattattgttttaaggatagaaccacaggccttgaagggagccaagacagaactcccagcctgtgtaatctattggaaggcacattttcatttgtgacgcagccaccttctggaggcagcttttatcctttctctctattgctatggtgaagtaatagggctttttttaacctctggatgtctcgtctgtggttgagtttatggtaatgggtacatgggtcaggccatgtattaacagatgccagtgcgctctgacaagtattccaaagtgttccgtagctcagtatggtgcaggctcgttgtaccactgtcaaccgactgacgttactgtagttcctagaatgctgtgagggcggggggttcagatcaacataaagcctaacttgctggagttgtagtctcaaggctttctctcttgcttaactaaaacctaaggaccactgtttttggtagcaattatatggttactatccactgcagtcctcagttgttggggtaaatcccacatggcagagtaaggcaccccacagaaattaacttggagagcctgagaaattcccagtggccttggcatagctgtctagaacaccatctctaggaaaatttaattctgtccctggccagctattgttcttccacttcgttttctgctgtcccaaggccagatgagtggaatcaccatctgactgttgtcagtaaaatgtatctggcgtgaacagcaggataacccatgttctccacataaggataaccttacgtgaaaccttcctgcttgacaaccatgcagaggaattttttccactttaagtcagagccttcctcccccatctgggaatttcacagctgttcccggggcaggcacacaggagggtatttaagggacctttgtgaggctagggtacactgtccacacctctttggggaagttacgaattgtttttttccatccataattccagtctcttcttattctacagtgtgcactttatgcctctcgccttttgataatagttgttcagtgaaggaagtcagctgccagaatattaagaaggggtctcccctttatgtcaagtacaactgttagggcgggccttcccatttaatttaggtttcaagaggattcaccggaagcacatgccccggtctaagtcccatttgaaacagttctgctttactgagaccctaggccggtctccttgctgaccctaagcgctgctgcctaggtgccatttccctttcctcctccagtcaaatacaggctgcacattttgtcaacttaatgccagtacaatctgtgttactcctaaaggacttttggggattttgatggaggacctttcggaggggaggaaggacactggaggaagccagtggatctcgcaaagcattttgctcattgttttccacattcacctctggggatattttcagctgttgtttccaaatggcaaatcatcaactaaaaagcacctttgtttcaaagtttttgttctgcactcccacgactgaagttgtagattgagctgaataaccatgggaagtgaccaaggcaaagacacttcgattgggagtcagttgaatatttgtaccctcagtgggagcccttccgggccttttcttcccacttcttgccagaattttccttcttggcaaatacttcctttcctccctggctggccctcccaccctggatatttgaaataagaagatggccccagaggataacaccttgtcctccttaaaaacctaagcctaaaaagaaccctagaacccttcaattgagccagttgtgaaaaattgcctaatgggtccccaaggccaagccaaagagtttccagaaaatgactgagaaggagcgataaccccccagaatgcaaaattcaggggcgatcattattccggtgctttgaaccaaggagcttccgctctacaactggtttttttaggacttgtgaggaacacgagcaacggaaatccatccacaaaggatgcagtgccccaacttgtactgcgcctgaatagtcatgtgataatttactgaagaaatctagtgtactttaaatttttttcataaaagtttacattgtattgtaggttaacattaaatgttttatagcaaaaacttc

SEQ ID NO: 145778 - DNA, 438 bp, Homo sapiens
gatagcgctcctccaattgtgataaccaaacatgacttcatccccagttgaaaaccactaccttatgccagaggaaaagattatctggactggagtagatcaatcatgattcatcccccgggcctggggaaggggggaagggaactttccttcctaaactcagaaaattttcacaggctacaaaatctggattctggtaacaagaagaggggtaaaatggctgatgggtgatccaccaagatcagtcacacgaagaaaacagctcggatcaataaaaccaaaggtggtagaggccaggcatggtggctctcacctataatcccaacactttgggagatcaaagtgggaggattgtttgagcccaggaggtcaaggctgcagtgagctgtgttcatgccagtgtactccatcctgggcaacacagtgagatcctgtctg

SEQ ID NO: 145779 - DNA, 438 bp, Homo sapiens
gatagcgctactccagttgcgataacctgacttgacttcatgcccagatgagatccattaccttaggccagaggataatatgatctggactggatgagacctgacatgtcccatggccctggcctggggaaggggggaagggaactttccttcctaaactcaaaagattttcacaggctacaaaatctggattctgttatcaagatgagtgggaaaatggctggtgggtaatccaccagtatcagtcacacgaagaaaacagctcggatcaataaaaccaaaggtggtagaggccaggcatggtggctctcacctataatcccaacactttgggagatcaaagtgggaggattgtttgagcccaggaggtcaaggctgcagtgagctgtgttcatgccagtgtactccatcctgggcaacacagtgagatcctgtctg

SEQ ID NO: 145780 - DNA, 2510 bp, Homo sapiens
  misc_feature (1)...(2510): n = a,t,c or g
ggcaggaaagctccacacacacaggccagcagggagcagcacgctgctgaaaaaaagactcagaggagagagataaggaaggaaagtagtgatggatctcatcccaaacttggccgtggaaacctggcttctcctggctgtcagcctggatactcctctatctatatggaacccgtacacatggactttttaagaagcttggaattgcagggggcacacctctgccttttttggtaaatgctttgtacttccgtaagggctattggacgtttgacatggaatgttataaaaagtatagaaaagtctggggtatttatgactgctaacagcctatgctggctatcacagatcccgacatgattcaaaacagtgctagtgaaagaatgctattctgtcttcacaaaccgcgaggcctttcgggccaggtgggatttatgaaaaatgccatctctatagctgaggatgaagaatggaagagaatacgatcattgctgtctccaacattcacccagcggaaaacttcaaggagatggtcccctatcattgccccagtatggagatgtgtttggtgagaaatctgaggcgggaagcaagagacaggcaagcctgtcaccttgaaagacgtctttggggcctacagcatggatgtgatcactagctcatcatttgggagtgagcatcgactctctcaacaatccacaagacccctttgtgggaaaacaccaaggaagcttttaaggatttaatccattagatccattcgttcttctgcaattaaaagtctttccattccttaccccaattcttgaaggcattaaatattcactgtgttttccaaggaaaagttattaagtttttcttaacaaaatctgttaaaacaggttaaaggagggtcgcctcaaagagacacaaaagcaccgagtgggatttccttcagctgatgattgactctcataagaattcaaaagactctgagaccccacaaagctctgtctgatctggagctcatggcccaatcaattatctttatttttgctggctatgaaaccacgagcagtgttctctccttcattatatatgaactggccactcaccctgatgtccagcagaaagagcagaacgaaatcgatactatttttacccaataagggcaccacccacctatgatactgtgctacagttggagtatcttgacatggtggtgaatgaaacactcaaattattcccagttgctatgagacttgagagggtctgcaaaaaagatgttgaaatcaatgggatgtttattcccaaaggggtgggggtgatgattccaagctatgttcttcatcatgacccaaagtactggagagagcctgagaagttcctccctgaaaggttcagtaaaaagaacaaggacaacatagatccttacatatacacaccctttggaagtggacccagaaactgcattggcatgaggtttgctctcatgaacatgaaacttgctctaatcagagtccttcagaacttctccttcaaaccttgtaaagaaacacagatccccctagaaattacgctgttggaggacttcttctaacagaaaaacccattgttctaaaggctgagtcaagggatgagaccgtaagtgggagcctgaattttcctaaggacattctggtttgctctttaagaaagctggtgccccagaaacaccagagaccttcaaattactttacaaatagacccctgaaacgaagacggggcttcatccccaatgtggctgccataaaataatccaggggattcctggtaccgtgcattggtgctcctcctcatgggtctgtatagagtgttaataccttgggtaatatagaggagatgacccaaatcagtgctggggaagtagatttgggcttctctgcttctcataggactatctccaccacccccagttagcaccattaactcctcctgagctctgataagataattaacatttctcaataatttcaaccacaatcattaataaaaataggaattattttgatggctctaacagtgacatttatatcatgtgttatatctgtagtattctatagtaagctttatattaagcaaatcaataaaaacctctttacaaaagtattattggatgtttcctgcacattaaggagaaatctatagaactgaatgactgagaaccaacaactaaatattttgatcattgtaatcactgttggtgtgggannnnnnnnnnnnnnnnnnnnnnnnnnnnnnnnnnnnnnnnnnnnnnnnnnnnnnnnnnnnnnnnnnnnnnnnnnnnnnnnnnnnnnnnnnnnnnnnnnnnnnnnaggaaaactcctgtctaatgtatggagatgataagaccttaggagtgagagcagacgtgcccaggcttgtgtagcgtagtgaatgtgctagaggctctttcagacttaggctgttagggcgctgagacgcggcgagagatggtctgaggtatagtgtggggtgggtacaggtgtacg

SEQ ID NO: 145781 - DNA, 403 bp, Homo sapiens
tttcgtggtccgggtcggcggctgcactgcggatgagaccggtgcgactcatgaaggtgttcgtcacccgcaggatacccgccgagggggccaatctcaaagtcatcagcaccatgtctgtgggcatcgaccacttggctttggatgaaatcaagaagcgtgggatccgagttggctacaccccagatgtcctgacagataccaccgccgaactcgcagtctccctgctacttaccacctgccgccggttgccggaggccatcgaggaagtgaagaatggtggctggacctcgtggaagcccctctggctgtgtggctatggactcacgcagagcactgtcggcatcatcgggctggggcgcataggccaggccattgctcggcgtctgaaaccattcggtgt

SEQ ID NO: 145782 - DNA, 497 bp, Homo sapiens
ggatgctgcaggggccaatctcaaagtcatcagcaccatgtctgtgggcatcgaccacttggctttggatgaaatcaataagcgtgggatccgagttggctacaccccagatgtcctgacagataccaccgccgaactcgcagtctccctgctacttaccacctgccgccggttgccggaggccatcgaggaagtgaagaatggtggctggacctcgtggaagcccctctggctgtgtggctatggactcacgcagagcactgtcggcatcatcgggctggggcgcataggtgaggctcccaccggcccgcttgcccgccccggctctcacagcgtggtttgcatccctggcaccacgtgtctgaaggctgagaagacccacatgctgtcagggcactttgcttgcagtagagatatctctaatgagggatacagctttgtaaaacacaggcaaatacataaataaaccaaagcagccttccttaagaactcaaaaa

SEQ ID NO: 145783 - DNA, 1335 bp, Homo sapiens
gcgggggaattcccgggccagctacattcccgggccagcttctgtactgccaggtccgggtcggcggctgcactgcggatgagaccggtgcgactcatgaaggtgttcgtcacccgcaagataccccgcccgaggtgtagggtcgcgctcgcccgggcggcagactgtgaggtggagcagtgggactcggatgagcccatccctgccaaggagctagagcgaaggtgtggcgggggcccacggcctgctcttgcctcctctccgaccacgtggacaagaggatcctggatgctgcaggggccaatctcaaaagtcatcagcaccatgtctgtgggcatcgaccacttggctttggatgaaatcaaagaagcgtgggatccgagttggctacaccccaagattgtccttgacaagataccaccgccgaactcgcagtctcccctgttcttaccaacctggcggccgttggccggaggccttctagggaagtgaagaatggtggctggacctcgtggaagcccctctggctgtgtggctatggactcacgcagagcactgtcggcatcatcgggctggggccgcattaggcccaggccattgctcggcgtctgaaaccattcggtgtccagagatttctgtacacagggcgccagccccaggcctgaggaagcagcaagaattcccaggcagagtttgtgtctacccctgaagctggctggcccaatttgattttaatcgtcgtggcctgctccttaacacctgcaacccgagggactctgcaaaaaggacttcttccagaagatgaaggaaacagctgtgttcatcaacatcagcaggggcgacggtcgtaaaccagggacgaccttgtaccagggccttggccagtggtaagatttgcagctgctgggactgggatgtgaacggagcccagaaccactgccttacaaaccacccttttccttgaccctggaaagaattgttgtgattctgccccacattgggcagtgccaccccacaggaacccggcaacaccatgttccttgtttgggcagttaacaacttgctggatggcctgagaggggagcccaatgcctagtgaactcaagctgtaggccaaacagtagatacgtagggcaggcaagcggtcggagccatggtaattgtcaagcgctcccgggcttgatttggatccacagccagagccaagggaaggtggtattctgatagcagagagttattgctgatatatgtacttgtcacattggtgttggacacatttgcgccaaaagtatggtaattctattattaaataattctctgagaaaaaaaaaaaaa

SEQ ID NO: 145784 - DNA, 780 bp, Homo sapiens
tcaacactgcccttccggctgaggtccgctttgctcaaacattgcgccttccatttcctgaactccgcgctgcgatccatgggtgacggactcagggtctgcgctcggctccttcatggtagcctcgtctctccctgggggcagccatattgaagcgagcggtggccgaaaaggtccaaacttcctcttcgttcttaatttgggaaattctagtgccttcgcatcctgggtggagcctgcaaaagttggagaaggtgtggcagtcctcatttctgtggaatctgaagaagcccacgcagattttaattcccactctagattctggtaagtggttttaaaaactctccttagtagttcagacagcgaatctccccactgctcgtccaagtggaaccgagtttgattttggctgcacccctttcctgccctctgtcctcccagagaactagtgcgtagagctccagaccgaagccattcccctccaggggctgcaagttcccatccataaatcaggtaggaagttttgccttctggtcctgggctcctagccctggtcctgcgtttaggctctgagtttaagctaccacaccatgaggtgtccgttggcactacccctgccaaacctccggggcgcccgctcgccacaggagcacacgagacccagttttccccctctccagaggacacaacaacccagtgccatcttggaagcacagagcagccctcaccagacaccaaaccttcctgtactgtgagcggggactcccagcctgcattcat

SEQ ID NO: 145785 - DNA, 2019 bp, Homo sapiens
gtgtggcagtcctcatttctgtggaatctgaagaagcccacgcagattttaattcccactctagattctggcttcatcgttatgaagcatatgatgatcccgtggatagtatctagatcaccatggcgactggacagaagttgatgagagctgttagagtttttaaatttggtgggccagaagtcctgaaattgcgatcagatattgcagtaccgattccaaaagaccatcaggttctaatcaaggtccatgcatgtgggtgtcaaccccgtggagacatacattcgctctggtacttatagtagaaaaccactcttaccctatactcctgggctcagatgtggcttggggtgatataagctggttggagataatgcatctgctttcaagaaaggtgacagagttttcactaggcaggcacgatcttctggggggttatggcagagtatggcttctttgcaggcaggaccacactgttttacaaactacctggaaaaactgggacttttaaacaagggagcttgccatcggattttccatatttttactgctttattcgaggtttggatccacagtggcctgtgtggaaagctggagagagtgttctggttcatggggcaagtggaggagttggattagcagcatgccaaattgcctagagcttatggcttagaggttttgggcactgctggtactgaggaaggaccaaaagatttgtttttgcaaaaatggagcccatgaagtggttcaatcacagagaagtgaattacattgataaaattaagaagtatgttggtgaagaaaggaattgatataattaattgaaatgttagctaatgtaaatccttagtaaagacttgaagtcttctgtcacatgggaggacgagtgatagttgtttggcagcagaggtactattgaaataaacccacgagacaccatgggccaaaggagtccgagtataattggagttactctcttttcctcggccaaggagtgaatttcagcaatatgcagcagcccttcgaagctggaatgggaattggctggggtggacctgtgattaggtctcaatatccgttggagagggtggccgaggctcatgaagatatcattcatgggtagtggggctactggaaaaatggattcttctcttatggatgattaattctttccatgggatttcctatgtaattagaggtactggtctttcccccagtttgtacttaccctatctttttctttaattaacattccgattccatgagcttctttatgtgaaaaaaataagatttttctttagagagcagaagcagaagagtaaaatttattgtatagctagcaatatttttttatgccatcctgtctcaaatcaaagagtcatcatagtaggaaatagcatgttagttgtcatttggcatgagtgtgcattccagtaattcttaattgatatttggattaaatcccataccttggattaaaccatgctaagttcaaaataagactgctccagtttccaaggggttttccaagcctacttacctttaataaaggttctctagtctctggattagcccatggactgtattgggactttggaacattttctggaactaaaaacctctattctaaactaatctcatttggatgtgtaaagtcctttgtaaaggccaagaattaattaaatatccaggacaatttaattagttttcctcagtattttccccaaatattagaatatttacttccattattggttggctgcccaatgaccccccatatgttcctgtgagaatagtagctttatcttttgatataatacatagtcccccaaataggtaatacttcgcaattgattagatttttcagagtagatttagagttatctgtttttctggtgagggtcaaatatttttgttaattaagctcacaaatttgataaattaagaattatctgcatttgtctcgtaacataataatgtgtaataaagtctatagaaaattaaaacctgaaaaaaaaa

SEQ ID NO: 145786 - DNA, 647 bp, Homo sapiens
aacaagagaagtgaactttttatttagtattccctgccaacccctccaaaaaaagtggcattggtaactcaaaggataaatgctagaggggatgggcaccattccccatgatgagcttatttcacattgcatgcctgtttcacaacagttcatataccccgtaaatatatacgctcactagataccccacaaaatccttaaaggtttttaagaaagtagcttttgctgttccagtttcacaaacacttagagctttggcctagaacttgggtacttgcccttttcccgtccctgccctccaatgccttctattagtggaaacggtctctcggggcagtctccttcctgtatccccattactgtttcagctcctctacccaagcccgccagccctccagctactctataaacagtcttcttccaccttaaccttgccctgcaagtctgcctttttatgactccttgtacatttgaaggccagctttcccctaaagccatccctccccttcaactcccagaacagagggtggggtcaccttctcagtcacatcctccatgttgcccccaagccccagctcctccgccatccctccctgcttccctctctcaaagacatctccttccaccactctctcaccattcatgtc

SEQ ID NO: 145787 - DNA, 727 bp, Homo sapiens
aattttgccctcgaggccaagaattcggcgagggcaataagctccgtagtccagacgcccattggtcattcaacagaggaggaccaaggcttactatccacaagcctgtggggcaaaggttaaatgtggaaaaaatgctggaaggaaaaaacccctgggaaaggcccccctggttgtcctaccccatgggaccccaagggttcctttgaacaagctttgggcaaccctgtccctcctgccctctgcccatcatggggcaaccccccaaagtcaagggcacatggcaaagaaggtgctgaccttcccttggggagatgcccataaagcaccctggatgatcctcaaagggcacctttgcccagcctgacgtgaactgcacttgtgacaaagctgcatgtggatcctgagaacttcaagctcctggggaaatgtgctggtgaccgttttgggcaatcccattttcggcaaagaattcacccctgaaggttgcagggcttcctgggcagaaagatgggtgacttggagttggccagtgccctgttcctccaggataccactgaagcctcttggcccatgaattcagaagctttcaaggataaggcttttattcttgcaagcaattacaaataataaatctatttctgctaagagatcacacatgattttcttcagctcttttttttacatctttttaaatatatgagccacaaagggtttatattgagaa

SEQ ID NO: 145788 - DNA, 892 bp, Homo sapiens
  misc_feature (1)...(892): n = a,t,c or g
tttcgtgccggtcggaggcggtcggcggaggtgtctaccccgccggtgatggcgttgaacgccactggcttcccggccttccgtccgctgcctccgtccgattctgcgtctgcttgctgaggaggcggattaggggggcgcggagtctcttcccttgagtgcataggtcccggttggtagagggtttgagtccgcatcgccacagctgaaggctgcgagggactaagagcagaatattaccttaggaattgagtggaccatttgggaagggcattttccgagcgctaaagctcttgttgaaagattaagagatcatgacgattgcagcagaatctcctgattgagcaaaccacagctcctcaacaagccgaggtagaagccatgaaacagtatcatggaagaaattcaagaacttaatgaagtcgcgagacatcggccacggtccaccgttagttattgggaatccagcaagaaaacagacaaatcagagagttgcaacaagaaaacaaagaattacgtacatctctgggaagaacatcagtccggccttgggaacttataatgagcaagtaccgagaacaaatggttaagattgctaatggctagcaaaaaaagatgatccgggtataataatgaagttaaaaggagcagcactcccangattgacattggtacatcgtaacaagtccgaaggattcttccttgatgcatctcgacacatccttgaagcacctcaacatggactggagagaaggcacttggaagcaaatcagaatgtacactaaataaacagtcaacttttggggtgtggatggaaggggggtccattttaaaagtgcttttacattgaatttccctcccagattagatcagcaaataaatgaaatttatt

SEQ ID NO: 145789 - DNA, 899 bp, Homo sapiens
atcagaaaatagaaattatttaaccaccataatatttgtgaatttaaaaaaatgtcagtgatagctaacgtaagttggtattgcttttcttttctgtcttcctggaattaagagttatcattgtgtgggaatggtaattgacatcttttaacttactctgaaatgtttttggggggagtaaggtactttttacagtctactctaccagctgagctgtcaaagtttgcatataagttacttttttaaaagtgcatagctccatgacattttacatataaatacactgcggggaccactatcaagagcaagaacatatgcataacccccaaaagttactcatgtacctttctagtcataaatacccttactacacccctgagtaatcattattctggcttttctctccttaggttagttttgattgttcttgaattttttctgttttggagatggagtcttgccctgtcaccgaggctggagtgcagtggcatgatctcagctcactgcaacctctgcctcctggattaaagcgattctcctgcatcagcctcccaagtaggctgggattacaggcacacgccaccaagcctgcctaatttttgtatttttagtagagacggggtatccccatgttggctaggctcgtctcgaactcctgacctcaggtgatccctcccctccctggcctcccaaagtgctaggattacagacgtgagccaccacacccatccttgaatttaatttaaatgcatttatacagtcacacagcacgtgctcatttgtatctcacttctttcgttcatctattttgagagtgtatcagtagcttgttttttgttgtctttttaaaaaaattgtttagagtattccattatatgaataaattacactttaaaaat

SEQ ID NO: 145790 - DNA, 1187 bp, Homo sapiens
  misc_feature (1)...(1187): n = a,t,c or g
ggcagtaggctctcggctcctggtcccactgctgctcagcccagtggcctcacaggacaccagcttcccaggaggcagtctgacacagtatgatgatgaagatcccatggggcagcatcccagtactgatgttgctcctgctcctgggcctaatcgatatctcccaggcccagctcagctgcaccgggcccccagccatccctggcatcccgggtatccctgggacacctgggccccgatggccaacctggggaccccaggggataaaaggagagaaagggcttccaggggctggctggagaccatggtgagtttcggagagaaggggagacccaggggattcctgggtaattccagggaaaaagttcggccccaagggccaccatgggcccaaaagttggcccaggggcccctgggaccccccaggccccaaagggtgattcgggagactacaaggccacccagaaaatcgccttctctgccacaagaaccatcaacgtccccccttgcgccggagccagacccatccgctttggaccacggtgattcaccaacatgaacacccaattatgaggccccgcagtggcaagttcaccctgcaagggtgccccggtctctactaattcaacctatccacgccagtttctcgaggggaacctgtgcgtgaaccctcatgcgtggccgggagcgtgcacaggaaggtgggtcaccttctgtgaattattgccttacaaacacctttccaggtccaccaccggtgggcatgggtcctcagctgaagaaggncccaaaaggagggggggggggggaaaagaaaaccgttcttcctgcaggcccaccgacaagaacttcacttactggggcatgggagggtgcccaacagcatcttttcccgggttcctggcttttttccagatatgggagggcctgacctgtgggctggcttcacatccaccccgggctccccctgcccagcaacgctcactatacccccaacaacaaccatatgaccaagccaaatgcacacaatagggattggtgaatgatgactgagtgaatgagtaaataaactcttcaaggccaagggacagtggtttaattcaactttgtgtcccagcacctggcacaccaaaagtgccatgctcgagaaatgttggttacatgaatgaatgaaccatgaatgaatg

SEQ ID NO: 145791 - DNA, 440 bp, Homo sapiens
ttgttaataagccatagcctcttatgtacagcttgtcagttttatttcatagcgtttcttttttatatgtacatgtgcacgttattcagtgtttctgttcagcgttggcgttagggttggcgaggccttccccactgtgtgcctggcaggaactgttgctctgtgctcctcatgggaagctctgcctgtgaggaccccacgctctctgaaaacccagctgcagtgttaggtgctgttggccagaagcacctctccattctaagactgatcccagactaagcgctgcctagcctcctttctgctaggtgcgttaaatgagatatggcttacgtacagtatgtgcacaaatcttaagtgtatagttggtgagcttgacaaatgtgtacacctgtgcaactaccatctccctagaggtacagaacattttcaccacctgacag

SEQ ID NO: 145792 - DNA, 1776 bp, Homo sapiens
  misc_feature (1)...(1776): n = a,t,c or g
gcggcggaagcagggagcgcgcccgccccagccccgagtcccgccgccttccctcccgccgcagcgcgcctcaccggccgccgccccagccatgtgagcaagacaacagcccccgaaagatccagttcacggtcccgctgctggagccgcaccttgaccccgaggcggcggagcagatttcggaggcgccgcccccacccttgccacccatcgtgctgaccagtgacccagtcatcacccagagactgctgaagaccggatccccaacccacatctcaagtccactttgggcaatgtctccacggcaacggaagaagatgacaaggatcacacccacaatgaaagagctccagatgatggttgaacattcacctgggggcaacaggnagcaaggagaggaaccctgaagggggccgcttgagagcacaggatttgcaggagtccccgcccacctgggatcccagacacagaagtggagtgcaagtgctgggcaccttttgggacagcaaaaaaaaactgcagaatgcattccctaaaactcacgagagaggcagtaaggaacccagcacaaaagaaccctcaacccatatgaccaccactgggattccaagggagccaactgcggttctgagagaggaggaggtatcttgggatcaagactgcagtttgggaatgcatggacaccggatttgtttcttattccttcacttttggggaaaatctcttgtttttaaaaagtggataaatttggtgttaggtccttggcactttccttcttttccaactgggagaatcctttctccctgccttcttgccctgccctctctgtagcccccaccctcctgccaagctgcctctgggaaggaagaaacaggagctaggcagaagccttgagcagggaagagttcttcccttagccctgactttacttgctgtgggaagagagatgagggtcagataggtgggaggactaacttccagggtgccaagaaggaagaaaagccccaaggttctcttttcttattgaggaacgatccgaccacctcacaggcctgccctgcagctgggagaattcgcgctcttaaggcctgtgccgtgtccagctgtgactgtgcggtgggctccatctgctggacaaaaggggaactgcaccatggcacttggcccatgggaaagagggtgtggtggtgtgccgatacctcctcgcctgccctccaagccccagctgccttccttttggattcccaagcttcaggatgtgttccctcttccagctgtgggaccgctgtcccttatttcaacccgttagcaacaatggatagagaacacagtggctattaatgaagaggcccatgctggaaaactggaagggttcccttgtcctaagacattgaggggcccaagataagaccaaaaccaagcataagagaagaaactgtctcagatctcacggccaggcctctctcctgctgctgtttttgattttcccaggtagtgggagagaggaaaggagggaaggcaagattctttccccctccctgctgaagcatgtggtacagaggcaagagcagagcctgagaagcgtcagggtcccacttctgccatgcagctactatgagccctcggggcctcctcctgggcctcagcttgcccagatacatacctaaatatatatatatatatatgagggagaacgcctcacccagattttatcatgctggaaagagtgtatgtatgtgaagatgcttggtcnacttgtacccagtgaacacacac

SEQ ID NO: 145793 - DNA, 2020 bp, Homo sapiens
gggggccccagagacgtgaactgtcgttgcaggagattgcgggcggctgagacgccgcctgcctggcacctatgtatgcgcagcggagccccgacaccgccagccgccgccatggagtccgagaccgaacccgagcccgtcacgctcctggtgaagagccccaaccatcgccaccgcgacttggagctgagtggctgaccgcggctggagtgtgggccacctcaaggcccacctgagccgcgtcttaccccgagcgtccgcatccagaggaccagaggttaatttattctgggaagctgttgttggatcaccaatgtctcagggacttgcttccaaagcaggaaaaacggcatgtttttgcatctggtgtgcaatgtgaagagtcctttcaaaaattgccagaaatcaacgccaaggtggcttgaattccacagagggagcctgttggttctaattcggggacagtattcctgaggattcctcaagtgatggttttaagggcaaagggaagttctttcgggaacctttctttcccctggggatggggaaaacatcttcaagggcctggaagcttgccccagcaggcatttccaaggcctggggtcctgggtttcttcccgtttacacaccctatggggtgggcttcagctttcctggttccagcagatatatgcacgacagtactacatgcaatatttagcagccactgctgcatcaggggcttttgttccaccaccaagtgcacaagagatacctgtggtctctgcacctgctccagcccctatttcacaaccagtttccagctggaaaaccagcctgccaattcaggaatgcttgctccttcaagtgggttgtttaatccggggagccaatcaaaattttgcgggatgaattgcacaaggtggccctattgtggaagaagatgatgaaataaatccgagattggttggattggacctattcagcagctacattttctgtttttctcagtatcctctacttctactcctccctgagcagattcctcatggtcatgggggccaccgttgttatgtacctgcatcacgttggggtggtttccatttagaccgaggccggttccgaacttccccaatgattgttcctcctcctgacgttgtaaattcagacccccaccaataactttacgggaaggcactgattcctgaactgaaagacccccaaccacctccctccaagacagggatgttactaggatgggcgaggcaggaccaggccccttcctttatggaggcacagcatgggtttgttctttcaaggacttttctttggcctcttctttctttccagaagggccccccagcccatcggcaaactgatgatggtgtttgtgctgtagctgttggaggctttgacaggaatggactggatcaccctgactccagctagattgccctccccctggacctggcaatgatgaggttttaaaaaaacagggtggatgatggatatgccttttgtgagccaagccaaaagccagaaaacgtgaagccccgtgataccaaaatgggtgaaccaaaaaaaatgccccaaggcctcctcatgcccttaaatcctgaaagagcctttaaaaataaaactcccatgtagtttaaataaagcacctgtaccgtaggaaggcccttagggtgttggcatgtcctatgccttgagggaacttttcccaaatgtgtgtgtcctgcatgtgtgtttgtacaatagaagtccatagatgcagaagtggttcctgcctggtacagatttggattccctggttggaatggtttaaatttaccactaagtggtactactttatataatcaatgaaattgctagacgatgttttagcaggacttttctaggaaagacttatgtataattgctttttaaaatgcagtgctttactttaaactaaggggaactttgcggaggtgaaaacctttgctgggttttctgttcaataaagttttactatgaatgaccctgaaaaaaaaaaaaaaaa

SEQ ID NO: 145794 - DNA, 1826 bp, Homo sapiens
tacctgaccccagccatttcccttctagaaattgttctacagacatatgtaataacatatacaaaaggttattctttcagcagtgtttgtcagagcgagaacattccagagagctgttgcgcagccattggtacctgtattggggaaacatagcatacaatcaagaagcttacagcctcagtggcgaaaattttttcatgtcagagaccgagaactcttgcagtcgtttatgtcatcccttcttctccagacagaagataccaaaaagttgcaatcaaagatctcttcatcttattgataaagccactaataagccaaaatgtctgtcaatgtcaaccgcagcgtgtcagaccagttctatcgctacaagatgccccgtctgattgccaaggttgagggcaaaggcaatggaatcaagacagttatagtcaacatggttgacgttgcaaaggcgcttaatcggcctccaacgtatcccaccaaatattttggttgtgagctgggagcacagacccagtttgatgttaagaatgaccgttacattgtcaatggatctcatgaggcgaataagctgcaagacatgttggatggattcattaaaaaatttgttctctgtcctgaatgtgagaatcctgaaacagatttgcatgtcaatccaaagaagcaaacaataggtaattcttgtaaagcctgtggctatcgaggcatgcttgacacacatcataaactctgcacattcattctcaaaaacccacctgagaatagtgacagtggtacaggaaagaaagaaaaagaaaagaaaaacagaaagggcaaagacaaggaaaatggctccgtatccagcagtgagacaccaccaccaccaccaccaccaaatgaaattaatcctcctccacatacaatggaagaagaggaggatgatgactcgggagaagatacaactgaggaagctcaaaggcgtcgaatggatgaaatcagtgaccatgcaaaagttctgacactcagtgatgatttggaaagaacaattgaggagagggtcaatatcctctttgattttgttaagaaaaagaaagaagagggtgttattgattcatctgacaaagaaatcgttgctgaagcagaaagactggatgtaaaagccatgggccctcttgttctaactgaagttctttttaatgagaagattagagaacagattaagaaatacaggcgccatttcctacgattttgtcacaacaacaaaaaagcccaacggtaccttcttcatggtttggagtgtgtggtagcaatgcatcaagctcagcttatctccaagattccacatatcttgaaggagatgtacgatgcagaccttttagaagaagaggtcatcatcagctggtcggaaaaggcctctaagaaatatgtctccaaagaacttgccaaagagattcgtgtcaaagcagaaccatttataaaatggttgaaggaggcagaggaagaatcttctggtggcgaagaagaagatgaagatgagaacattgaggtggtgtattcgaaggctgccagtgtaccgaaagttgagactgtaaagtcagacaacaaggatgacgacatcgatattgatgccatttaaagggatggatgcaacctagcttaacagtataatgctgcaaattttcctccattatcagccagaagtgcaacatgtatgtgcaaaagctaaaatggcttaacatcatgctacactttacactaaaaatctattactgtgagtgtgaaaaactagtggtggacacatttggatcacatttatacagttataaaaataaaggtttgattttggt

SEQ ID NO: 145795 - DNA, 3121 bp, Homo sapiens
cccattactaatctttgaagacagtcttcaattaactggccaaagaagaatataaagaagtcaggtgtggtgcaaaatgatagtcagagcgagaacattccagaggtcgcccagctccggcgcctgacgggttgtggaccgcggacgtcgctgggacagcccctccccgctgctcggcggcggcacctggcccggccgctcctcgctgcgcttcgcctccgcctcctcggactcggactcggactcgggtttatatcgcgcctcacttcatcccagtcccgggcgagcagcgttgggtttatgtctttatttgacgaaaacgagctgttgcgcagccattggtaccctgtattggggaaacatagcatacaagcaagaagcttacagcctcagtggcgaaaattttttcatgtcagagaccgagaactcttgcagtccgtttatgtcatcccttcttctccagacagaagataccaaaaagttgcaatcaaagaatctcttcatcttattgataaagcccactaataagcccaaaatgtctgtcaatgtcaacccgcagcggtgtcagacccagttcctatcgcctacaagatgccccccgtctgattgcccaaggttgaggggcaaaaggcaatgggaatccaagaccagttataagtccaacatggttgacgttggcaaaggcagcttaatcgggcctcccaacgtatccccaccaaatatccctatacccgagctgggagcacagacccagtttgatgttaagaatgaccgttacattgtcaatgggatctcatggaggcgaattaagctgccaagacatgttgggatgggttccattaaaaaaattttgttctctgtcctggaatgtggaggattcctggaaacagatttgcatggtcaatcccaaagaagcaaacaataggtaattccttggtaaagcctgtgggtaatcgaggcatgcttgacacacatcataaactctgcacattcattctcaaaaacccacctgagaatagtgacagtggtacaggaaagaaagaaaaagaaaagaaaaacagaaagggcaaagacaaggaaaatggctccgtatccagcagtgagacaccaccaccaccaccaccaccaaatgaaattaatcctcctccacatacaatggaagaagaggaggatgatgactggggagaagatacaactgaggaagctcaaaggcgtcgaatggatgaaatcagtgaccatgcaaaagttctgacactcagtgatgatttggaaagaacaattgaggagagggtcaataccctcttctttctttttcttaacaaaatcaaagaggagggtgttattgattcatctgacaaagaaatcgttgctgaagcagaaagactggatgtaaaagccatgggccctcttgttctaactgaagttctttttaatgagaagattagagaacagatttaagaaatacaggcgccatttcctacgattttgtcacaacaacaaaaaagcccaacggtaccttcttcatggtttggagtgtgtggtagcaatgcatcaagcttcagcttatctcaaagatttccacatatcttgaaggagatgtacgatgcagacctttttggaggaggggttcttcatcagctggtcggaaaaggcctctaagaaatatgtctccaaagaacttgccaaagagattcgtgtcaaagcagaaccatttataaaatggttgaaggaggcagaggaagaatcttctggtggcgaagaagaagatgaagatgagaacattgaggtggtgtattccgaaggctgccagtgtaccgaatgttgatgtttgttaagtcagacaacaaggatgacgacatcggatattgatgcccatttaaagggatggatgcaacctagcttaacagtataatgctgcaaattttcctccattatcagccagaagtgcaacatgtatgtgcaaaagctaaaatggcttaacatccatgctacactttacactaaaaatctattactgtgagtgggtctgttattaagcccaattgagacctctaggggagtccatacacatcagtgagcagatggtagtttgcttatttatagcaaggtttttttttaaaaaactagtggtggacacattttgggatcacatttatacaagttataaaaataaaggtttggattttggtccgttcttcagatgtttggcttctgaatgacttaagctgataaaactcggctccttactttaaatgttctgccatcatttcacctgatgagcattcttggagcctgccagatattgttagggtcctgggggctgcaaagaggtcctcaacaggatgtaaaagccaaccttaattggtaattaatttaattcagcccattaagaaaggtactaaagttttatctctgtagttcctcaaattgggcatctgggtaatgtacattgtgaggtagactgataatggaaatgacagtggcaacatgcttaaccaagaagttaatttggacctcagtgtcctattaaataatgtaagggccagggatttggaaacttggagagctgttttctcattttcatgtacactttgccccaaatttgtctttggaagtcgtgtggcattgcagtttggatgagccagggaaattattacattaacaagcattttgtgtgtgcgtagtagttactttgtactgagagaacttgctttggggtgcaattaaacaataaactgattttatttgggagaaacaaggaagggtgcacttaactagcaacctaagcatgatttttcagcttttgcccttagggtttaaattacaattccaaaatgttagacatactgtattttttcgttcagtgtgggctttaattttcccctcttggcagtttgttctgttaatgccttttacatttgggacacatatgtttatgcctttttagaattttgggtggtcttcttgccaaaataagtgttaactgtgttttcaaacttgattttctttcctttttctttttttttccttccaaaaggtcttatttaaaaagaaggctaaaagcatacttttaagtcaaagcctctattttggggaaaaacttggaatattttttacttcc

SEQ ID NO: 145796 - DNA, 551 bp, Homo sapiens
  misc_feature (1)...(551): n = a,t,c or g
gaaaaatcagagatggtgccaagttgcccctttatctatatcatccgtaaggattaagatgtttactctcaaatcttgagaaaactcttcaatgaatcccatggaatctttctgggcctccagagaattgacgaagagttgactggaaaatccagaaaatctcaattggttcgagtgagtaaaaactaccgatcagtcatcagagcatgtatggaggaaatgcaccaggttgcaattgctgctaaagatccagccaatggccgccagttcagcagccaggtctccattttgtcagcaatggagctcatctggaacctgtgtgagattctttttattgaagtggccccagctggccctctcctnctccatctccttgactgggtccggctccatgtgtgcgaggtggacagtttgtcggcagatgttctnggcagtgagaatccaagcaaacatgacagcttctggaacttgcctgggaacanccagacactgacagagcttggagctgaagtggcagcactggcacgaggaatgtgagcggtacctccagg

SEQ ID NO: 145797 - DNA, 443 bp, Homo sapiens
acatttgcaaaacaacatttattcttttaaaaaaatctatatacattgccatacaaagataccacattgaagcagttctcaggaaccttccagtgagccttctcttataattgcccgagcaagatttcgtgccagagaaagtctcagcatttccaccttggtggtctctatgtcatcatcctgtttctgttccaaaaggggcaaggcgtctgtcagcagagtcatccagaaagaccggagggcaatccgagacgtcatcaaggacagaaggagagaagctgcgtcggcaaaacgcttctccccgtacatacggtggaactcgcgatactttcccaggaatgtcagtcggtcactgagcatcatggctggccccaggttgtcaatgagatccaaatcagaaaagcagcctcgctcacagtaatccctgaggaacctgtctgaca

SEQ ID NO: 145798 - DNA, 474 bp, Homo sapiens
tgggtgtgggctatgcgggtgctcttcagcatgcgggtgccattggagcttggactgttctctcccagttggctccttgaaggcttcggaagggtcagtgaaagggagctgtaggtgccagtcctcggagccatgaggcagcacctcatgtctgtcctcctcgaacctttgcagcctgtggcagctgggggtcgattactttgattactgccccgagctgggccgagtctccctggagctgcacattgagcggatacctctgaacaccgagcagaaagccctgaaggtgctgcggatctgtgagcagcggcagatgactgaacaagttcgcagcatttgtaagatcttagccatgaaagccgtccgcaacaatcgcctgggttctgccctctcttggagcatccgtgctaaggatgccgcctttgccacgctcgtgtcagacaggttcctcatggattactgtgagcgaggctg

SEQ ID NO: 145799 - DNA, 583 bp, Homo sapiens
  misc_feature (1)...(583): n = a,t,c or g
cccgcatcnactcataagtctgttctgctgagaaaatcacctagggaagagagcctgccttgcttggctgcccccagccctggcctgcattggttggggcaggggcccatgttcggacgttcttcctttcatacccttcgcaatagtgtgctttgtatacgaatacctcatttcaaatcaagcagtgtttgtttcctgtgtgagtctggaatcccagagagggcgctaaggggaatacacgcgcacaggcagaacgacaaaggaggaaacacgcacatcggcaacagctatacaactaagctctagcagggactgacaagcaaagaaaaccactgctgctgcaaccttcacctgtttctgttccaaaaggggcaaggcatctgtcagcagagtcatccagaaagaccgaggggcaatccgagacgtcatcaaggacagaaggagagaagctgcgtcggcaaaacgcttctccccgtacatacggtggaactcgcgatactttcccaggaatgtcagtcggtcactgagcatcatggctggccccaggttgtcaatgagatccaaatcagaaaagcagcctcgc

SEQ ID NO: 145800 - DNA, 969 bp, Homo sapiens; identical to SEQ ID NO: 129377

SEQ ID NO: 145801 - DNA, 2350 bp, Homo sapiens
ccaggaaggaaggacgcgtgcagaggaccgcaaaggggtggccgtggctgaaaggagacagcgccgcagcactgagggtttgggcttgcaggcgctgcaggagacgcccaggcggagtcttgtctcgcagccagctctgagcgggaggcctgagcgggaagcattggcgtccgagcgacttctaggagcctggggttcggcgctatggaggagctcgatggcgagccaacagtcactttgattccaggcgtgaattccaagaagaaccaaatgtattttgactggggtccaggggagatgctggtatgtgaaacctccttcaacaaaaaagaaaaatcagagatggtgccaagttgcccctttatctatatcatccgtaaggatgtaggatgtttactctcaaatcttgagaaaactcttcaatgaatcccatggaaatctttctgggcctccagagaattgacgaagagttgactggaaaatccagaaaatctcaattggttcgagtgagtaaaaactaccgatcagtcatcagagcatgtatggaggaaatgcaccaggttgcaattgctgctaaaggatccagccaatggccgccaagttcagcagccaggtctcccattttgtcaagcaatggagcttcatctgggaacctgtgtgaagattcctttttaattgaaggtgggccccaagctgggccctctccctccttccatctcctttggactggggtccgggctcccatgtgttgcgaaggtggacaagttttggtcggcagatgttcttgggcagtgagaatccaagcaaacatgacagcttctggaacttggtgaccatcttggtgctgcagggccggctggatgaagcccgacaagatgctttccaaggaagccgatgccagccccgcctctgcaggcatatgccgagatcatgggggacctgatgaggacaatgcccattcttagtcctgggaacacccagacactgacagagctggagctgcaagtggcagcactggcacgaggaatgttgagcggtacctccaggacagcacattcgccaccagccctcacctgggagtctctcttgaagattatgctgggagacgaagctgccttgttagagcagaaggaacttctgagtaattggtatcatttcctagtgactcggctcttgtactccaatcccacagtaaaacccattgatctgcactactatgcccagtccagcctggacctgtttctgggaggtgagagcagcccagcaacccctggacaacatcttgttggcagcctttgagtttgacatccatcaagtaatcaaagagtgcagcatcgccctgagcaactggtggtttgtggcccacctgacagacctgctggaccactgcaagctcctccagtcacacaacctctatttcggttccaacatgagagagttcctcctgctggagtacgcctcgggactgtttgctcatcccagcctgtggcaggctgggggtcgattactttgattactgccccgagctgggccgagtctccctgggagctgcacatttgagcggatacctttgaacaccgaggcagaaagccctggaaggtgctgcggatctgtgaggcagcggcagatgactgaacaagttcgcagcatttgtaagatcttagccatgaaagcccgtccgcaacaatcgcctgggttcttgcctctttttggagcatccgtgttaaaggatgccgcctttgcccacgctcgtgtcagacaggttcctcagggattactgtgagcgaggctgcttttctgatttggatctcattggcaacctggggccagccatgatgcctcagtgaccgactgacattcctgggaaagtatcgcgagttcccaccgtatgtacggggagaagcgttttggcccgacgcaagcttcctctccctctgtcccttgatgacgtctcggattgccccttcggtctttctgggatgaactctgctgacagatgccttgccccttttggaccagaaacaggtgaattttcctcagccagaacagaccttaatgagttgaatgccggtgtcctggaaggacttgacgtccaagaagacgctgtgccatggagaatcctgatacgcgagcgagctcgcgggatgatgacgatagagacgcgcgaaggtggaaatgctgagactttcgtctggcgggaaatcttgctcgggcaattataagagaaggctcactggaaggttcctgagaactgcttcaatgtggtatctttgtatggcaatgtatatagatttttttaaaagaataaatgttgttttgcaaatgtaaaaaaaaagtcgacgcggcccgg

SEQ ID NO: 145802 - DNA, 393 bp, Homo sapiens
cacaaaggtgacagcatttaacaaagcttagagaaacctccaggagactgctaccatggcagagaagcccaagctccactactccaatatacggggcagaatggagtccatccggtggctcctggctgcagctggagtagagtttgaagagaaatttataaaatctgcagaagatttggacaagttaagaaatgatggatatatgatgttccagcaagtgccaatggttgagattgatgggatgaagctggtgcagaccagagccattctcaactacattgccagcaaatacaacctctatgggaaagacataaaggagaaagcccttcaacctgaggaacaagatgccaagcttgccttgatccaagagaaaacaaaaaatcgctacttccg

SEQ ID NO: 145803 - DNA, 1166 bp, Homo sapiens
ggcacgaggagctattgagaggaacaaagagcttataaatacattaggacctggaattcagttgtcgagccaggacggtgacagcgtttaacaaagcttagagaaacctccaggagactgctatcatggcagagaagcctcaagctccactacttcaatgcacggcgcagaatggagtccacccaggtggctcctgggctgcagctgggagtagagtttgaagagaaatttattaaaatctggcagaagatttgggacaagtttaaggaaatgatgggatattttgatgtttcccagcaagtgcccaatgggtttgagattgatggggatggaagctggtgcagaccagagccatttctcaacttacatttgccagcaaattacaaccttcttatgggggaaaggacattaaagggaggagagcccttgatttgattatgtattttaggaaggttttagccagattttggggttgaaattgttccctcccttcttgcccgttatgtcccaccctgaggaaaaaagatgcccaagcttggcccttggatcaaagagaaaaattaaaaaaatcggctaccttcccctgccctttgaaaaaagtcttaaagagcccatgggacaagactacccttgttgggccaacaagcttgagccggggctggacattcacctgggtgggaactttcttctactacgtcgagggagcttggactcttaggccttatttccagcttccctctgcttgaaggcccctggaaaaccaggattcagttaacctgccccacagtggaagaagtttccctacagccccgggcagccccaagggaagccccccccagggatgagaaaccctttagaagaagccaaggaagattttccagggttttaataaccgcagtcatgggaggcccaagaacttggcaatacccaatgttcctaaagttttggcaacaataaagtacttttacctaagtgttagattgtggcctgttgtgaagctaatgaactctttcgaaattatatgctaattaaataatacaactcctattcggctgacttagttaaaattgatttgttttcattaggatctggatggtgaattcagatttccaatcttctcctagccaaccattttcctggaattaaaaatttcagtaaaaaaggaa

SEQ ID NO: 145804 - DNA, 512 bp, Homo sapiens
ggctctcgcagtcctctttcgtcagtgtcttttgcttcgactcccggcggagcgcgcaacgtggagtgacgtgcaggggccaagtgcaacccaggcagccacggctgtttcggagctcaggactctaaaatggcagagcagctttctccaggaaaggcggtggatcaggtgtgcaccttccttttcaaaaagcctgggcggaaaggggctgctggacgcagaaagcgcccggcctgcgacccagagcccggagaaagcggcagcagtagcgacgaaggctgcactgtggttcgaccggaaaagaagcgggtgacccacaatccaatgatacagaagacccgtgacagtggtaaacagaaggcggcttacggcgacttgagcagcgaagaggaagaggaaaatgagcccgagagtctcggcgtggtttataaatccacccgttcggcgaaacccgtgggaccagaggatatgggagcgacagctgaggggcaaggaggatgacaagatctatc

SEQ ID NO: 145805 - DNA, 1398 bp, Homo sapiens
  misc_feature (1)...(1398): n = a,t,c or g
gcggccgcccgcgagcggggcggtgccacgtacggctccggaagaagcgacggaatctgctagggcacaagagagacgggcgctcgggctctcgcagtcctcttccgtcagtgtcttttgcttcgactcccggcggagcgcgcaacgtggagtgacgtgcaggggccaagttgtttcccatgcagccacggctgtttcggagctcaggactctaaaatggcagagcaggggtctccaggaaaggcggtggatcaggtgtgcaccttccttttcaaaaagcctgggcggaaaggggctgctggacacagaaagcgcccggcctgcgacccagagcccggagaaagcggcagcagtaagcgaccgaaggcctgcacctgtggttcgaccggaaaagaagcgggtgacccacaatccaatgatacagaagaccccgtgacagtggtaaacagaaggcggcttacggcgacttgagcagcgaagaaggaaagaggaaaatgagcccgagagtctccgccgtggtttataaatccacccgttcggcgaaacccgtgggaccagaggatatgggagcgacagctgtctatgagcttgacaccagagaaagagcgcgatgcacaagccatctttgagcgcagccagaagatccaggcaggagctgaggggcaaggaggatgacaagatctatcggggaatcaacaattatcagaaatacatgaagcccaaggatacgtctatgggcaatgccttcttccgggatggtgaggaagggccccatccgagcgcccgagcatctacgtgccaccgtgcgctggggattaccagccccgacatctgtaaggactacaaaagagacttggcttctgcgggcttcggagacagctgcaaattcctcccatgaccgttcagattacaagcatgggtggcaagatcgaacgtgagcttgatgagggtcgctatggtgtctatgaggatgaaaacttatgaaagtgggaagcgatgatgaggaaataccaattcaaagtgtttcatctgtcgccaagagctttccaaaacccaagttgtcacccaagtgcaaggcattattttctgcgagaacttgtgcacttgcaagcatttcccgcaccacccccgcgctgctaatgtctgtgncaagtctgtgaccagcagaccaatgggcgtcttcaatccaagcggaaagaattgattgctaaactagagaagcatcgagctacaggagagggtggtgcttccgacttgccagaagaccccgatgaggatgcaattcccattacttaggtttcccataattcttaaatttaaaaaataaacgttttgttcttttggaagtcaaaaaaaaaagtcgacgcggccgcgaatttagtagtagtaggcggccgc

SEQ ID NO: 145806 - DNA, 400 bp, Homo sapiens
  misc_feature (1)...(400): n = a,t,c or g
nnnnnnnnnnnnnnnnnnnnnnnnnnnnnnnnggccatttattaaccgggaagcaaatatgacaaaacagccatactagtaagtcatctgaattttttaaatctcttaataaaacaaccaaatcccacgcaaatcagtccacaagggatgttcaaaagaggaggggcccgacactgctaaaaactggtcctttccttcccacctggggtaaggatagtttctgctacggcaagcactcaaactcaggctggtttgaagctaaaggattcagacgacttccaagtttcaagaatgaaagaaaaagaaacataatagggagcccaccaccaagacttgtagttatttcctcagaaagcccccatgccccatttgggacaaaatccattcctgaagactgatt

SEQ ID NO: 145807 - DNA, 490 bp, Homo sapiens
tttttttttttttttttcatttttgtcatttattaacctggaagcaaatatgacaaaacagtcatactagtaagtcatctgaattttttaaatctcttaataaaacaaccaaatcccacgcaaatcagtccacaagggaggcccccgcctccacagtgcagggtgactgagtggacaactacggcaagcactcaaactcaggctggtttgaagctaaaggattcagacgacttccaagtatcaagaatgaaagaaaaagaaacataataaggagcccaccaccaagacttgtagttatttcctcagaaagcccccatgccccatttgtgacaaaatccattcctgaagactgattctagaagaaaccaagtaagatctagaactttccccaccagcatcactttccaaaatgtaggcagaagtttaccaaatacaatttattcaggaaaaaaataaattttaagaacttatttttattttcctcgtgccg

SEQ ID NO: 145808 - DNA, 523 bp, Homo sapiens
  misc_feature (1)...(523): n = a,t,c or g
aaggtgatgttctctgttgggtggattaatttcagagcttcctganttgagacttcaccaaagtcaanccatttagaaactgcctcctctccatctaatatggcaggccatcctgtggtggatgtcactcaagcctttgcaggaatccactgtgatgatggtataggaatacaggacatctcctccctctgggggctcccagcagtcaaaagatcccggccattgtcaagcaagcctccagttgtcccagactttctcccagttctcaggactatctgcagcaccaatgctacctgacttctcaaagtgcagtcgagacagaagcactgggctgttggattgaggactcttgttgtaagaggggcagtacttatcagggtccctccactccgggagccgctgctggccccgccgatcctggtaggcgcaagctctcgtgagaacatctctaggtaagtgacaggatgttcgcccacacattcttcaacaccgcccctcgcaacctcgccccggcagcgcgcgt

SEQ ID NO: 145809 - DNA, 2633 bp, Homo sapiens
  misc_feature (1)...(2633): n = a,t,c or g
ttttttttttttttcatttttgtcatttattaacctggaagcaaatatgacaaaacagtcatactagtaagtcatctgaatttttttaaatctcttaataaaacaaccaaatcccacgcaaatcagtccacaagggaggcccccgcctccacatgtgcagggtgactgagtgtacaactacgggccaacccccgcctctcaaccggaacggagggcactcaaaagaggaatttagagaaaaggcggagagggcggacctcgggaaagggtctgggcgggagccccacctgggctccccacccccttccccgaaaaccagggggaaaaagcctgtggcgtgggcgctgcttgtctcccattagcagtttacaggggccgaggtttcccgctgattggtgggaaattccgattcttctgatcccctgatttgcatagagactgggggcctgcacccccgccccccaccagcagcaatcggccaacgccaacggtgctgcgccaggagcgttctgggctcggcgccgcccagtcctcctggtcatctcggaaagcttgttttcttccagcttgcttgggacagctttttgtgaatgcctcccttggggatgttcgaaagagggagtgcccgacactgctagaaacttggtcctttccttcccacctgtggtaaggatagtttctgctacggcaagcactcaaactcaggctggtttgaagctaaaggattcagacgacttccaagtatcaagaatgaaagaaaaagaaacataataaggagcccaccaccaagacttgtagttatttcctcagaaagcccccatgcccccanttgtgacaaaatccattcctgaagactgattctagaagaaaccaagtaagatctagaactttccccacccagcatcactttccaaaaatgtaggcagaagtttaccaaatacaatttattcagggaaaaaattaaattttaagaacttatttttattttattttagaacttaaaaataaatttttaagaactaaaaaagtgaaagagcccagtggctgaagcagaaaacagcttactacaaggagtaccagatcagggcagagacttcccagctgggtaaggcatgctttgagggaagactccaccagccctgccagggaaagggcagcaggcgcagtgccccctatggggccccacatgggctgggtaacagcaggcaggacacctcttcccaaagctgtcccacccaagcccactaggggctccctacttcatgggcaaaaaaagactacatggagcccacaactgtcaactaacacagtgccacctcctcccaaaggcaaacacatattacatacaaatgtttaagaaccctattattcagaacagcagtgcagcagaccctgggccttgggtctctgaaagtcctgtgtcactggctgtaaggacgcttggccacaggttccatcctccttctcccgcttcagccattgctctaggagtcctgcagtgcctctcttggtggggagtggactcttctgcaggaactgactggaccactggggaacatctgactcttccttttgaggtgtttttgagtcttcctttttgggtgactttgtggccaaccactgcaacatcctctggctactgccacttgcaatagaaaacctttttgaccaccaaggtcgacagggagcccagacactcaggagtgttgtttcgcgagttgttcaaccacagaagagactgcatggaaggtgatgttctctgttgggtggattaatttcagagcttccctgaagttgaagacttcacccaaagtcaaagcccatttaagaaactgcctccctctcccatctaaatatggcaggcatcctgtggtggatgtcaactcaaagcctttgccaggaatccactgtgaatgatggtaataggaaatacaggacatctcctccctctgggggctccccagcaagtcaaagatcccggccattgtcagcagcctccagttgtcccagactttctcccagttctcaggactatctgcagcaccaatgctacctgacttctctgtcttgatttgaggaaaatagatgaagtatggctgcctctggttttgttcccctgaacatcgctgcccactccataagaatcccatctggctaaaaacgaacacagcgtcttcccctttccccagaggcaccttaaatgaccgtttcctcccattacggtatcactacgacagttggtaagtattgaactgcagcttggaaggatcactttctttgaaccaagaagggaccaagccccagcgcatgggagcaatgatacgctcagatgagtctgcatccttctcaaaagtgcagtcgagacagaagcactgggctgttggatttgaggactcttgttgtaagaggggcagtacttatcagggtccctccactccgggagccgctgctggccccgccgatcctggtacgccgcaagctctcgtgagaacatctctaggtaagtgacaggatgttcgcccacacattcttcaacaccgcccctcgcaacctcgccgccggcagcgcgcgtcacctccctcgactctccatcacccccgctccgctccgctttggccacccgcgtcacgaaa

SEQ ID NO: 145810 - DNA, 1409 bp, Homo sapiens
  misc_feature (1)...(1409): n = a,t,c or g
tttcgtggaggcggaccgggggctggcagtcggcagcctccgccccctcaaccttcgcggggcgcgggccgcagcttttcggttcgcagcgggcagggaaagccgcgggaagggtactccaggcgagaggcggacgcgagtcgccgtggcaggaaaagtgactagcgtccccttcgttgtcagccagggacgagaacacagccacgctcccacccggctgccaacgatccctccggcggcgatgtcggccgccggttgcccgaggcctgcgggcagcctgaccaccggctcctcgataaagtggaagctgatgctgcccgagaaattgaggcccgttgtacaaccaatccagacaggtccccagaacagttttcttctgggctccaattatgaaatggggggtgggtgtgtgctggattggcctgatatggcccagaccctgccagaaaaaccttaggcacagctccaatctgcctgttttggatggcttaccaggggtttaatttgggtccaggatactccacttgtaaattattcccaacacaaattgggagcctgtttggctggtaatttccttttgtgggggcagcaggagcctctcagctttttccgtacttgggagatataacccaagaactaagaagctaaaagcacacaaataaaagaggttctggatcccctgaacaatctagatgtggacaaaaccattgggacctagtttattatttggtctattgataaagcaaaagctaactgttgtgttttagaagggcactgtaactggtagctagttgcttgattcaatagaaaaaattccagccaacttttaattaacagtctctctacattgacttaagggaacttatcttatggatattagtaacatttttctaccatttgtccggtaataaaccgatacttgctcgtatataccccctgcctccttctgttccagtcagccaacatatgtacataaaagaacacacaaattcaagaagttggaagattaaattatctgcttatttagtgtaggatggtcaggtagctagctataagtgaaaggaaattttgctgaagagactgagaaatgggtagtggaatgactatcaagatgacctcaaactatttaaaaacattttaacttgccatgaagaatcttgatgatttttgtataaatgttgtataaaattcttttacagctacagatttttaaataggatcattgtaaagattaatgagataatgttttaacatagtgcctggtccatgataagtgttaaatttttcaattaccctcagtaactgataatgtagcagaaaatactctatattcagacagacctgaatttgaatcccagctctatgacttatctgttgtgactttttcnnnnnnnnnnngacacggggcc

SEQ ID NO: 145811 - DNA, 400 bp, Homo sapiens
ggcacgaggttatcaataagctcctagtccagacgccatgggtcatttcacagaggaggacaaggctactatcacaagcctgtggggcaaggtgaatgtggaagatgctggaggagaaaccctgggaaggctcctggttgtctacccatggacccagaggttctttgacagctttggcaacctgtcctctgcctctgccatcatgggcaaccccaaagtcaaggcacatggcaagaaggtgctgacttccttgggagatgccataaagcacctggatgatctcaagggcacctttgcccagctgagtgaactgcactgtgacaagcttgatgtggatcctgagaacttcaaactccttgggaatgtgctggtgacccgtttggccatccatttcggcaaa

SEQ ID NO: 145812 - DNA, 1205 bp, Homo sapiens
  misc_feature (1)...(1205): n = a,t,c or g
gaattccactactgaccttctccaacaccttctccacagagtgaacaatcatctttaagaaatcaatgagcttcagtcactcaccctcttaaaatccttcaataatgtctactgctctcagaaggaaaactaaacttcaaaccaagtctttccttgatttggttcctgcctccatctccaattttatctcctaattatgttccacacaagtaacaatactccagccatactagcttccttcctgtgccttgaacatggcaacactatgatcacgtccaagacatctcccttgtttttccttccccaggaaaatcttcctctacaattcctgtgaatgccccatttgtattcttcagttcaaaggaaacctttagaagctctatcctgcctcctctttatttccttcatgactaacactcgcttctggaacgtctgaggttatcaataagctcctagtccagacgcccatggggtcatttcacagaggaggaccaaggcttactatcacaaagcctgtgggggcaaggtgaaatgtggaaaaaatgctgggaaggaagaaacccctgggaaaggcccccctggttgtcctacccccatggacccccagaggttcctttgaaaaagctttgggcaaccttgtccttctgccttcttgcccatccatgggcaacccccaaaagtcaagggcaccatgggcaagaagggtgctgaccttcccttggggagatgcccataaaagcacccctggatgatcctcaaagggcaccttttgcccagcctgaagtgaacctgcacctgtgacaagctgcattgttggatcctgagaactttcaagctcctggggaaatgtgctggtgacccgttttgggcaatccattttcggcaaagaatttcaccccctgaggtgcaaggcttcctcggcagaagatgggtgaactgcaagtgggccatttccctgtcctccagataccactgagctcacttgcccatgatgcagagctttcaaggatagagctttattctgcaagcaaatcaaaataataaatctattctgcaaaagagatcaccaaannnnnatnntnnnnnnncccccggattttttatttagcgggccgcacctttttccccttttagggggggtaaatttatattgggccttgggccggggttttcaaaagcggggggannnnnnnnnnaaagagccc

SEQ ID NO: 145813 - DNA, 654 bp, Homo sapiens; identical to SEQ ID NO: 144884
  misc_feature (1)...(654): n = a,t,c or g

SEQ ID NO: 145814 - DNA, 709 bp, Homo sapiens
  misc_feature (1)...(709): n = a,t,c or g
aggcctagaattcggcacgagccacagactcagagagaacccaccatggtgctcgtctcctgcccgacaagaccaacgtcaaggccggcttggggtaaggtcggcgcgcacgctggcgagtatggtgcggaggccctggagaggatgttcctgtccttccccaccaaccaagacctacttcccgcacttcgaccttgagccacggtttctgcccaaggttaaagggcccacggcaaagaaggtggcccgacgcgctgaccaaacgccgtggcgcaacgtggacggacatgcccaaacggcgctgtccggccctgaagcgaccctgcacggcgcacaaagcttcggggtggacccggttcaactttcaagctcctaaagccacttgccttgttggttgaccctgggccgtccaccttccccggccgagttcaacccctgtcgggtggcacgccttccctggaacaagtttccttgggtttcttgttgaagaaccgttgcttgaaccttccaaaatacccgttaaagcttggaagccttcgggttggccatgctttctttgcccctttggggcttccccccagggccctccttccctttcctggaacccgtaacccccgtgggtcttttgaataaaattttgaattgggggggcaaaaaaaaaaaaaaaaaaaagatctttnaatttaagggggcggaaagtttatttcaa

SEQ ID NO: 145815 - DNA, 465 bp, Homo sapiens
agcggccgcccttttttttttttttttagtttttaaagacagggtctccctctgtcgcccaggctggagtgccatgacaggatcatagctcactgcaacctcgaagtgctgggctcaagcagtcctcccaccccagcatctccaattgcttgaaactacaggcgtgggccaccacacccagctaccttttaagttgccatattttttccactcaggattgttcttttttttaaaaaaaatcttgtatcaattctgtgatacttatagggcaagaatatcatctgatttttgtagataagataactaaggtacagtagtcttcccttatgcatgggagatacattccaagaccctggtcaatgcctgaaaccatgggtagcactgaaccctatgtatactgtacatacatacctatcatacatacatacttacttttcccatgcatatatacctatgaataggtta

SEQ ID NO: 145816 - DNA, 801 bp, Homo sapiens
  misc_feature (1)...(801): n = a,t,c or g
aattttgccctcgaggccaagaattcggcgagggcaataagctcctagtcccagacgcccatgggtcatttcacagaggaggaccaaggctactatcgacaagcctgtggggcaaaggtaaatgtggaaaaaatgctggaaggaaaaaacccctgggaaaggctccctggttgtcctacccccatggacccccagaggttcctttgaacagctttgggcaaacctgtccctctgccctctgcccatccatgggcaaacccccaaagtcaagggcaccatggccaagaagggtgctgacttcccttgggagatgccaacaaagcacctgggatgatcctcaaggggcaccttttgcccaagcctgaagtgaactgcactgttgacaagcctgcaatgtgggatcctgaagaacttcaaagctcctggggaaatgttgctggtgacccgttttgggcaattccattttcgggcaaagaatttcacccctgaaggttgcagggcttcctgggcagaaagatgggtgacttggagttggccagtgcccttgttccttccagataccactgaagcctcttggcccatgaattcagaagctttcaaggataaggcttttattcttgcaagcaattacaaataataaatctatttctgctaagagatcaccaaannnnnatnntnnnnnnncccccggattttttatttagcgggccgcacctttttccccttttagggggggtaaatttatattgggccttgggccggggttttcaaaagcggggggannnnnnnnnnaaagagccc

SEQ ID NO: 145817 - DNA, 868 bp, Homo sapiens
  misc_feature (1)...(868): n = a,t,c or g
cctttgaacaccttgacaaggatcccagattcactggacgccgtattacaacgtcgggactggaagaccagaattcggcacgaggaggttatcaataagcttcctagtccagacgcccatgggtcatcttacncagaggaggaccaaggctactatcacaaagcctgtggggcaaaggtgaaatgtggaaagatgctggaggagaaaacccctgggaaaggctccctggttgtctaccccatggacccagaaggttctttgaccagctttggcaaacctgtcctctgccttctgcccatccatgggcaaacccccaaagtcaaggctacatggcaaagaaggtgctgacttccttggggagatgcccataaaagcacctggaatgatctcaatgggcaccttttgcccaagcctgacgtgaacttgcactgttgacaagcctgcaatgtgggatcctggaggaactttcaagcttcctggggaaaatgttgctgggttgacccgtttttgggcaatcccattttcgggcaaagaatttcacccctggaggttgcaaggcttccctggcagaagatggcagaagatggtgactggcagtgggccagttgccctgttcctcccagaataccacttgaagctcactggcccatgatttcagagcttttcaaaggataaggctttattcttgcaagcaatacaaataataaatctattcttgcttagagatcaccaaannnnnatnntnnnnnnncccccggattttttatttagcgggccgcacctttttccccttttagggggggtaaatttatattgggccttgggccggggttttcaaaagcggggggannnnnnnnnnaaagagccc

SEQ ID NO: 145818 - DNA, 427 bp, Homo sapiens
  misc_feature (1)...(427): n = a,t,c or g
cagtctggtggaattccctgggtcagcagccaggaggcggtccataagaatggggacagtgggctctgcttgggctgccgcacctgtccagacacacatgttctgttcctcctcctcatgcatttccagcctttcaaccctccccgactctgcggctcccctcagcccccttgcaagttcatggcctgtccctcccagacccctgctccactggcccttcgaccagtcctcccttctgttctctctttccccgtccttcnnnnnnnnnnnnnnnnnnnnnnnnnnnnnnnnnnnnnnnnnnnnnnnnnnnnnnnnnnnnnnnnnnnnnnnnnnnnnnnnnnnncgtgcgctcacacacacctctctcgcttgagagcgggggggcctgttctctatatctctgcgaacctgtgtgcgtgtgtctcta

SEQ ID NO: 145819 - DNA, 424 bp, Homo sapiens
  misc_feature (1)...(424): n = a,t,c or g
ccgtctgtggaattccctgggccagcagccaggaggcggtccatatgaatggggacagngggctttgtttggctgccgcacctgaccagacacacatgttgggttcctcctcctcatgcatttccagcctttcaaccctccccgactctgcggctcccctcagcccccttgcaagttcatggcctgtccctcccagacccctgctccactggcccttcgaccagtcctcccttctgttctctctttccccgtccttcnnnnnnnnnnnnnnnnnnnnnnnnnnnnnnnnnnnnnnnnnnnnnnnnnnnnnnnnnnnnnnnnnnnnnnnnnnnnnnnnnnnnnnnnnnctcacacacacctttctctctttagagcgggggggcgtgctctctatatctatccgaatgtgggttcgtctgtctct

SEQ ID NO: 145820 - DNA, 2472 bp, Homo sapiens
  misc_feature (1)...(2472): n = a,t,c or g
tttcgtgcccaggagtgagtagctgccttcggtccgccggacacacctgtactatatagacgtgcggacggcccaccaccccagcccgccaactagtcagcctgcgcctggcgcctcccctctccaggtccatccgccatgtggcccctgtggcgcctcgtgtctctgctggccctgagccaggccctgccctttgagcagagaggcttctgggacttcaccctggacgatgggccattcatgatgaacgatgaggaagcttcgggcgctgacacctcgggcgtcctgggacccggactctgtcacacccacctaacagcgccatgtgtccttttcggctgcccantggccacctgcgggtggttcaagtgctccgaccctgggtctgaagtctgtgcccaaagagatctcccctgacaccacgctgctggacctgcagaacaacgacatctccgagctccgcaaggatgacttcaagggtctccagcacctctacgccctcgtcctggttgaacaacaagatctccaagatccatgaaaaagccttcagcccactgcggaagctgcagaaactctacatctcccagaaccacctggtggagatcccgcccaacctacccaagctccctggtgggagctccgcatccacgacaaccgcatccgcaaggtgcccaagggagtgttcagtgggctccggaacatgaactgcatcgaagatgggcgggaacccactggagaacagtggcttttgaacctggagaccttcgatggcctgaagctcaactaacctgacgacatctgcagaggtccaagctgactggacattccccaaagtacctccctgagaccctgaatgaactccacctagaccacaacaaaatccagggccatcgaactgggagggacctgcttcgctactccaagctgtacaggctgggcctaggccacaacccagatcaggatgatcgaaaacgggaagcctgagcttcctgcccaccctccgggaggttccacttgggacaacaacaagttggccaggggtgccctcagggttcccaggacctcaagctcctccaggtggtcttatcttgcactccaacaacattcaccaaagtggggtgttcaacgaatttctgttcccatggggtttcgggggtgaagcggggccttattacaacgggcattcagctttttcaacaaccccgttgccttattggggaggttgcagccggccactttccgccgtcgtcactgaccgcctggccatccagtttgggcaactacaaaaagtagaggcagctgcagccactttggtttctcagtgggggtctctggggaacagagccagacatcctgatggggaggcagagccaggaagctaagccagggcccagctggcgtccaacccagccccccaccttcgggttccctggaccccagcttcgatgccccattcaccgccttttccctgggttcccaaggggtgcaggttgggcgagaaggcccggcccccatgacatgttacgcttgggctcatgagctacgccctgctctccctccacagccacccagaggcaccccatgaagcttttttctcgttcactcccaaacccaagtgtccaagtctccagtcctaggagaacagtccctgggtcagcagccaggaggcggtccataagaatggggacagtggggctctgcaggggcttgccgcacctgtccagacacacatgttctgtttcctcctccttcatggcatttccagccttttcaaccctccccgactctgcggctcccctcagccccctttgcaagttcatgggcctgtccctcccagacccctgctccactgggcccttcgacccagtcctcccttctgttctctctttccccgtccttcctctctctctctctctctctctctctctctttctgtgtgtgtgtgtgtgtgtgtgtgtgtgtgtgtgtgtgtgtgtgtctttgtggctttctcagacctttctcgcttctgaagcttggtgggcctgttccctcccaatctctccgaaaaccctgtcgcctgttccctttcactccaacaccctctgggcctttctggccttggagctggggactggcttttctgtctgtgacggcctgcacccagccccctgccccanaaaaccccaagggacagcggtcttccccaggctggcctggtcagggccttgccccccaaacctgtactgtcccggaggaggttgggaggttggaggcccagcatcccgcgcaagatgacaccatcaaccgccagagtcccagacaccggttttcctagacagcccctcacccccactggcccactggtggctaggtctccccttatccttctgggccagcgcaaggaggggctgcttctgaggtcggtggctgtctttccattaaagaaacaccgtgcaacgtgtttttttctattttaaaaaaaaaaaaaaa

SEQ ID NO: 145821 - DNA, 3365 bp, Homo sapiens
  misc_feature (1)...(3365): n = a,t,c or g
ctcagtttccccattagttaaatgacagcataacactagagagcagagggcccatttcagctctgttgttctgggattcttgctggccggtgctgagtcctgagagctttatttggggagtttcacccagaatggtgggagaaacctcccaggtgccaggtaccccgcatcgtgacccttcacttggtgtcttaggaagtcaagctgaagggatgctgagtcctcccctgctggcccctgcagccccagccctgcttttcatcccccacccctgcaaacatggaggagccccctccttctcacctcggtctcctagcccctgacatggagaaccctgagacaagccacagaacccctcttttctaaaatggagacaataatttcctacctccaaagggagcagagaggcctcgtggcacgtccgtggccagggagcccactgtcctggctggcggcgggatcgtgcactcctctgtctcccggatgagaagccccgtttccatggtcttgacccttcctttctcccggctgtcagaactgggtctcttgattttgcccctacattatgcctctgtgggaaaaaaaaaaaaatcagaccaagaaatgagcctgaaattcagtgtttaccatggctcaaggatgcccatctggtgtccagttgccttttgtattcaaatgaaaaagctttgtacaactgaggagttacagtgaagggttaaccaggggtccagggagcgagttgaaaagatggagtgagggtatttgcagccagggagctgcacggtggatttgaggggccataccctctgagcacttaaaaaaggtatttgctccaggccaggcagcaggctgtggacacccttgccaccactggggactgccactgaggactccccgagcacgttgttcccccgtcttctccaaggtgttgaggtgagctggggttgggcccgacccaggctttttgttccaggggatagttgccaatgacagtcatcctaccgcactgctaaagagaatgttcgcaagtggtgggcggcgttcctggtgccaacccttccaagggaccccggccatggggggaccttgggccaaaggatgcctggggcctgccagctgtgctgcaaaggtggggggcccacaccctaaaactaacccagggcccaaacccactggaggccagggcttccctgcaacggggctaaggggagttgggatatcacccccaaagtgaccttgccagtgagctgttcagccaggtagccactgccctgccacctgtgcagagcccagcccaccttgggggctggggtcccccgctttgaggccccacctccccaaactcccccttgacctcggctctggcctgaaactggggaacctccccttggggtccagcaaaagcccccccgcccatgccaggcccaggtgccccattggagaattaaagtgcctcaggaggccccaggagccccaggggatgggaaagtgtgtggttttagtacggttcaaaagggacaatcgcttgcagttgggtagatctagcgatctagttgggagataatggtgtttaccccatatgaagtattcaatagttctacttgtgaatttgtatttattttgagttatacttgacacagaattcctttttttaaaaaaatatgtgtgtattttggaaaaaaaaattcatagatgttaaaatttcctgcatggttaccagtttttctcacaacactgaattgtggtagcttgttcccgaaaaaatcttcccgagtaattttttgtctcgtatatatttgagggccttttttttaaaaaaaaaaaaaagaaaagaaaaatataattgtttgatttttgagattaaaacaaacaaaaagagaggcattttcaaaatttcagaactttcaggagggcaagagaatatcaaacaaagatttctggaagtattttgccaaccttctggttgagctgcaagaaaatatttatggtgagaacttttctgtttcccgttattgggtttttggttggtttttgtttgttttttactatgctttggtctgtaaaaatatgcaactgaactacattcagaaggaaatattgtctacatagaatattatatgaagttggtacataattctgatgaggaaaaaaaatctttgcaattctttaagccatattgttgtttttctgtgttgttttccctgggatgaaaatatcagtattaagtagacaggcatattattccaagtgtttaggacttattaatatgttcttgtcctgtatttatacatatgtgtattttgggaaagtattgccttttttaaggggaagctataattcgatactatagtgaaaaaggggaatgggtgacccctttgtgcctttcccactgagggataacaaacaggcattgtaatccattctctttgcaacttcttctttcttatcttgttattacggttttattaattttgtagagggacagggagtggggcaaggggaaggaaggcagcttatttgactaaccagcccctctgtgggtccaccagcgtcttggcttggtgggagggctctcaatcagcagggccccaggagggaagaagaagtggggcaaagcctggcctcgccgctcgggagctttgccaatctgagccacgcttcctccagggccatgcttccttgaaacttggaaatgtcaaccggagcccttacaccagccctccagcatctaatagacttgaaacctactcctaaaacgaatatttaatccaaccctcactacattgtagcctcagtcccaacgaactaacccctgaaaatggggggtgtttccagcctttcagcgaggatgggccaaggcggttcccctgggggcttttgggcagcgggcttatccttctctgttgcccaaccttgccgtccgacctccttcggcccccatgcggtgaccccgtccgtgtctgtgtctgtccatacgtgtgagtccagctaaaaagacaaaacagaacccgtgggcccgagctcggaaggttgcgtggagaaggcttccgacgtcttccgaagtgcagcccttgggatgggcatttccgttgtgtgccttattcctggagaatcttgtatacggcttcgcctatagaaatattagcctctttcatggtggttattaaaaagggacttttaaaagcacnnnnnnnnnnnnnnnnnngggggggcccttttaaaagaatcaagttttaagacccgggggggggaaaggaaaaattttttttagggggccccaaaaataaattcccgggccggggttttaaaaacgggggaaagggaaaaacccgggggttacccaatttaaaccccttggagaaaag

SEQ ID NO: 145822 - DNA, 3324 bp, Homo sapiens
  misc_feature (1)...(3324): n = a,t,c or g
aacatccaaanccagtgtgaacaaggttttccccaacaagtaattttgaaggcccatactttcaggaaaacaagatttaaatgtgtgtgtggactttaacagtatcctacgttcctaactgaaaaattaaacaaaagcagtccaaaggaaataacatgtagtattaacaaatgtgttcaatcaaacactaatgaagcaccccactcctggccaaaccactgggcctacccattttaacaagttgagtttaaacgtccttttatcaaagcatgacccttagtgtgaggtcaaaatacattaaatttagcgtcaacgcgttagtctgcttgcggcccatgtacggaaaccccctggggcaagctggctttcccctggtgccaacggtcacccgggtttcctcagggtcttcctcaattccactcaggacaaaataccgtgcacactgactgtgtgtccagaacagtgtgcccgggtccactcggaacacccacaatctggtataggttccaaagaatgtaaaatttaatccattttaaccctatgccagaacaattaagaaaggcagattatttttcccaaaatgaggtcccaaagcaaactataaggtgtttcctattggtcatacccacaccagagaccggtaagtgcctttatagactgagaactaacgtggaagtttcatgctgtcgtctaaatagcccagggtcaattctgggtcctcatagggtcctattttgtggagcacctgaccccatataaatcattccatacttaaatgggtttgtaaactaaacctgaacataaacaaagagcccaaaaatgaaggcagtttacaatgtaatgttcttcaacagcattactctccccatgagaaatgaataatacataagtaattcacaattggttcaacatttttttttctttttttttttccttttttttttttttgaaactgagtcttgccctgtcgctcaggctggaacgcagtggtgcgatctcggctcactgcagcctccacctcccaggttgaagcaattctcctgcctcagcctcccgagtagctgggattacaggcgtgcaccaccacgccggggctaattttttatatctttagcagagatggggtttcactatgttggcccaggctggtctcgaactcctgacctcatgatccacccgcctcggcctcccaaagtgctggggattacagacgtgaggccaccgcgcccagccgggtttcaacattttttcaaagcactaaccctaccccaaattcatggtaatacttaacttgacttttatacaagttgcacagaatgcagagggcagaatttgaccccaaaaccttccacagaatatcagaggtgattggtccttccactcttgagtagaacctaagaattccaagagtctcctaataggatactggccctctggagaaatggccctgctggatcccattagttaggactctagttagctgctgtagaagggtgacctactacgacccttttggggaaggcagagagctgggagactggctgtccacttagtgaatccaacactggcttaaagctatgcactgaaataaagtgcctcggtaacatccctgcttttcaccctggaatgaaaatacacacttatccttaggaattcaccctacttacaggtttgggggacaagaatgtcaagggctaaaagaatccccaagaaaaagtatgaagcattgactaggaggggaaaaaatgcttctagtagtgttccttagaaatcttaggatctgaaatgtcagaatgagtcacacgctggtcatgctccatacaatgaaagcaatcctgcttgatactattcacacggtgcatgaattaacttccacgggggtggaacggaacagtctgtcgcccatttgatagtatggttcccagaatgaaaacaaaaccactgaataaatcagggtaagcagtgtgtaacactccttcctgtccatcggttttccacagggtgatttgcactgcctgagagaaaggaggcaagatacctatcccttctgatacacacaggcacgaccactaccgcctccaattgccaattcagaagctaacacacaagccctccagttcgtaccctgaatatggtaattaagactaggaatggagcagttcagtctaaaaaatatcacaggtaacagaatgcttatataaactagactgcttttgacatctgtaagaaaattgtatagatggcagttggaaaaaaaaaaaaaaaagattgttcccatctgtcagcaaaactgttgaactatactcagctgaagtcctcatcgggattctgttgatccagcagacggacatgtgtgaatgggaagtgacctcgtttgccattacaccccccttcccactgaccactcacattaatcttcgtaacctttaccagctcaccgacctccaaagccaaggctgtcttgtcgtaggcattggggactcgcttctggataaccctggcatatatgggcccattctggaggttagggagcggagtgttgacgctgggttgggcataggggccaggctccggggggcccagtggctgtgggtgggaaccctcctggttacctccaatcagagccgatactgaggcggaggcaggtctatacttctcgacgtaagggactggaatcatccctctcttgccttcgctgtcctccgcattccaccactgctcttcaggcttgtcccggattctcaagatgtctcctttcttaaagggaagatcttcctcatcattcccattaaagtcaaagagggctcgcacatactccgcctcctcctgcctgagaatcactccactaccctgcctggatctggaaactggttctatcaacgttgtagtgtcccaatagtgtattttgtagaattccagtaaagcaggcaatgaatcaaactcttgatctcctattcggagtctggaggggctcaccccgggcggaggctgggcgggcgacggtggcaccggcgggcgcgggccgctgctgttgatgatgtagtgggagacgcgcgagttctctgagacgctgagcacatagtccccggggctggtgctcgagtcccgcaccaggaacaccccgtgccgctggccctgcagcagcgccaccgcctcctgccgactcaaccgcccccagtaccagctactccgctcctccgagtcgaagttgcccgccatggctgcctccgcgcctaaacgctggggtgccgccgccgcgcgcgcccctccggcccccggcgcccgccgcccagcggaccggctccggtttcagcttcggaattc

SEQ ID NO: 145823 - DNA, 964 bp, Homo sapiens
cagacgttctttctttgctgcgtctactgcgaggctgggacacactggggcccgctgtcggtctcccgtcctccgacatcttgtctggaacttccgcctggcagtctccagtaggagtggagctctgtgcggcgtagtttggtggaaaaacgggccttgcgtcggcctcacccccagtgtttgtgtttcagaatgaagactttttcacagcaatcagactgtcgaccattcccagaaaaatgtcgacattactctgaaagggacgccccagtaatcgtgtaagggccccaaagggaaccctgcggaagggacttcaatccacatcaaatgtagaactcagcccttcttgggaaagaacaacaaagaggcttccgggttgaccaaatggtgggggtaccagaaagggaactggcctacccgttcgggactatttggtagtcatgtacaggaccatgatcaaagggtggttaccactggggcttccggttacaaagatgagggtctgtgtatgctcacttcccccatccaacgttgttatccagggagaatggggtctctttgttgaaatcccgaaatttccttgggtgaaaaatacatcccgcagggtttccggatgaagaccagggtgttgctttgtcagtatctcaaagcccagaaaagatgaaattaatccttggaaggaaatgacacttgggcttgtttccaaatttcagccggcttttgattccagcaagccccaccaggttaaaaacaaagggtatcaggaaaatttttggatggtatcttttgtctcttggaaaagggactgttccgccaggcttgattgaataagatctaagaagttacctgggctacagaaaaaaagatgccacgatgacacttcacgacctacttgtgatatattaaaagatgcaaaaaaaaacacatattagatttggaaaaaaaaaaaaaaaaaaagtcgagc

SEQ ID NO: 145824 - DNA, 581 bp, Homo sapiens
  misc_feature (1)...(581): n = a,t,c or g
cgtcgactttttttttttaaacatataagaaagccttttaattttgtcaccataaacattatactctgattgctcacttacagtataaaatattcaccccgctaaataaataagacgacattattgcaaacggcacttaaaccccccctgagagataagacctcccttagctcacggcagggggtgctcctgagatttctgtgtgagattccccaagcacagatatactctgggggctgagatggacaaaggcttgggaaaccgcactttgtgcttctggtcctgcagtagctccaaacagggttgtggagctggtggggaaagttgggggtaggggaaagttgggggtaggggaaattttgggcagtgccttcatcagcccagtcctagagagagtagaggggagtggaagtggggggaaccaggctgggccaagagaagaggggtggttagggaagccgttgagacctgaagccccaccctctaccttcattcaacaccatacccttgggtaacagcatttggaattatcatttgggatgagtagaatttccaaggtcctgggttacctcgttcngaat

SEQ ID NO: 145825 - DNA, 528 bp, Homo sapiens
cgtcatctggccttttcactcagcaatctcctgaagcatggttctgtgtcagtaaatgttcttatccagcatggcaaaatgttaaggtaattgtagactcacataagttgcaggaaataatacagagatcccttataccctttgcccagtttcccgcaatggtaacagtgtgcaaagctccaggacgattttgccacccatgttggcatgtgtaaccgccccccacagtcacgacactgaacatggccaccaccacaagtgcctagtgttgtgctacccttttacagccagcgcccctccctcctgcccggcccccctgcgttgtatttatggctgcattttgtcctgtcttgtggatgttccatggcggacagacaggctgaacaaacaaagggtgtgcaaagaagcccagagcaggagagaaggctccccagcctggctcattggtcagcacagtcacaggctggctctgcctctcttggctgcactgtcctgaagcaggaaatatgagaaaaacaagttaagggg

SEQ ID NO: 145826 - DNA, 2063 bp, Homo sapiens
  misc_feature (1)...(2063): n = a,t,c or g
tacagtgcggtggaattcagttgatagtgataagctcctaaggatttttaacttgtacttttgtgaacgattagattgcataaataatgttggtgaggataaaggacagatatttcatgtagaattaattgctagttatgatgcttgtggatagttaactgtttttttttttagtcaaaatgatcatgctacgaaaagatgcttctgagagaatgtaatgagtaactgatttttcttcctgagtcgcccttgccaaatatgttacctgtattaattaatgctaatattgagtgattatttgtaaaattatgaatatgggaaatccatctatcctacagcctaaggttacacataagtttcagaaagtctgattaggactaaagagatatttcttcctggggacagccttgcttcttggggaattttggaagttgtttttacaagttcccttcctcaggggtcagttcctttccagtggtggttgtagctcactggtcactcactggaatagagaaacgtgtgccctatacttccnggtggacaatcattttgctgacagaatgatgggatgtttaaaatattgcacaaagtactttaaaggaaaggtctgttagggaccaggaagcagaggacaccacttttccaaagggacttcttgggttttcagccataacctaagacagggaattgggagccatcatatgtcacagtgttcagaattcaagcatatttaaggggcattttctttgattctcaaagttcagcattcattttggaatttgagaagcctatacattttaagctggacaaagtgccttatagaatttccttaacaactggaaccattccaaaaggatttttttatgtttaaaactgggatttcaatgtaagcaagatgaagaaaaaaatatagatttcatttccatagcttcttatccctgtattgaggtaataaattgttttactgacaatttttcctttttctacactaaaacaatatgtgatatatttcccctcttgaagaggcaattcattaaactctcaaattttctatagaatcaagatagaacctttagatactccaactcacccaaaatgtaaaaaaaactaacaaaaatatttggtcttcaataatgctaaatatctacatttttagaatttatcaacatttaactaggataattggggcatgtcttaattatggcatgtacttatccatactaataaaattgacaatgctagtggcatacttattgggtttaggtcctattatcagggatataattcatctgtgaggaggatattttaaagactgtaaatgataacagttaatgatatacacatttaggactgagttggcacactggccgggagaccaaaaacattacttccatacttgtgtcatgattcttttttttttgagacagagtctcgctctgttgcccaggctgggagtacagtggcatgatctcggctcactgcaacctgcaacctccacctcccgggttcaggctattctcctgccttagcctcccaagtagctaggactacaggcacgtgccacctctcccagctaatttttttttttgtacttttagtagagacggggtttcccccatgttgggcaggatggtctcaatctcttgacctcagatgatccgcccacctcggcctcccaaagtgctcggattacaggtgtgagccactcttgggtcaatagctgtgatttgcctctgaaaaacttttttttttttttggaagagtctcactctgtctcccaggctggagtgcagtggcatgatctcggctcactgcaacctccacttcccgggttcaagctattctgcctctgcctcctaaatagctgggactacaggcatgcaccaccatgcccagctaatttttgtatttttagtagagacggggtttcaccatgttggccagcatggtctccatctcttcaccttgtgatccgcccaccttggcctcccgaagtgctgggattacaggcgtgagccacccgcgcccggccttcctctgaaaaactttctaatggaacatct

SEQ ID NO: 145827 - DNA, 488 bp, Homo sapiens
  misc_feature (1)...(488): n = a,t,c or g
ggaggtgggncaggcagactcatgtcagaaggcccctcagtgagaagcgaagaagcaatctgtctttattatgaggaactaggaggtggggccaggcagactcatgtcagaaggcccctcagtgagtgcagcccaggagactggtcacattctggggttgcggaagggccttgntgcattcagtttctccacatcacttctcatggggccaaggaagctctgtccacgtggcttgggctcctgacttcaggtccagccaccacagccgccgtcctgccatgatatgggagccgagaagacccagggcagataaaggccgcatccacagagtccagggntaatcccatgaggggtcccgactttccttcttccagccgntttcggataaccgtttactagggtatagcctnccttttttcaggaagacattttacctggggtgccttgggaccagatagantttttttttncccggggaaaaggcagca

SEQ ID NO: 145828 - DNA, 2060 bp, Homo sapiens
  misc_feature (1)...(2060): n = a,t,c or g
gcctctgcagctcagcatggctagggtactgggagcacccgttgcactggggttgtggagcctatgctggtctctggccattgccacccctcttcctccgtgagtaaagctgggactagaagcgaaggattgagttctgggctagggactagtgcccatgggaatgttgctgaaggcgagaccaagccagacccagacgtgactgaacgctgctcagatggctggagctttgatgctaccaccctgggatgacaatggaaccatgctgttttttaaaggggagtttgtgtgggaagagtcacaaatggggaccgggagtttaatcttcagagagatgggaaggattttcccccagcccttgtgggatgcttgcatttccgttcaaggttcacaacagtgttctttcttgatccaaggggggggacaaagtcttggggtattaaccttccttgaaaaagaaagggagaaaaggattacccaaagtttgttccaagattgattttcctgggattccccattccccaattggattgcagctgtggaatgtcaccgtggaagaatgtcaagctgaagcgcgttcctcttcttccaaggtgaccgcgaagtggttctgggactttgcctaccgggaaccatggaagggagcgttcctgggccagctgtttggggaacttgctcctcttgccctgagatgggctgggccgcttacttactggctttccaggggtaaccaatttcctgcgctttcgaccctgtcaaggggaagaagtgcctcccaggtgacccgcgggatgtccgagaataatttcatgccctgccctgggaaaggccattgggacacaggaatggggattgggccatgggaacagtaaccaccatggcccttgaatatatgcggcttgtagcccaacatcttagtctttgtcttgcactgacgtctgacaaccattggtgccaacttttgcctttcagttgggacccactactggcgttttggacaccagcccgggatggctggcatagcttggccccattgcttatcaagtggccccagggtccttcagcagtggatgctgccttttcctggggaagaaaaactctatctggtccaggggcacccagggtattatgtcttcctgacaaagggaggctattacccttagttaaggcggttatccgaagcggctgggagaaagggaagttcggggacccttcatggggatttatcctgggactctgtggatgcggcctttatcttgccctggggtctttcttcggctccattattcatgggcaggacggcggctgtgggtgggctgggaccctgaaagtcaggaagcccaaagcccacgtggaacagagctttcctttggcccccatgaagaaggtagacggagccttgtgtatggaaaaaagtccctttggccctaaattcatgtttccgccaaatggtcccggccttgtaccctcatccatggtcccaattttacactctaacagtgttgtggagaaaactgaatgccagccaaggcccttccgcaaccccagaatgtgacccagtctcctggggcttgcactcactgaggggccttcttgacatgaagtctgccctgggccccacctcctagttcctcataataaagacagattgcttcttcgcttctcactgaggggccttctgacatgaagtcttgcctggccccacctccccagtttctcataataaagacagattgcttcttcacttgnnnnnnnnnnnnnnnnncgggggggccgttttaaagaacccgtagggggcccaacgttaacccggggaggcaacgaaaaaattgtttccttatagcgagtgggattagaccccacctggggattttgacaacggaaccttacttggggggggtgactaacttggacaaccgccctacgaaacctaagctcttaagggaacaaatgaaaatctaacgtgcatgaggagggaaactgacagcaaaacccggctggttgcaagttcggcttctggaggtgctttaaagaacaatgttaacacggggagtcgtgtt

SEQ ID NO: 145829 - DNA, 459 bp, Homo sapiens
atcgagatccatattaagtgcggtggaattcccgctgtccttgccgcccccgccatgggcctagagctgtttcttgacctggtgtcccagcccagccgcgccgtctacatcttcgccaagaagaatggcatccccttagagctgcgcaccgtggatttggtcaaagggcagcacaagagcaaggagttcttgcagatcaacagcctggggaaactgccgacgctcaaggatggtgatttcatcttgaccgaaaggctaacaggagtgtctacctccagggcggctgctggcatatcacagagatgaggttctcaaaatgcaaagcagaaggtccagccaagagtcgctcggccatcctgatttacctgagctgtaagtaccagacgccggaccactggtatccatctgacctgcaggctcgtgcccgtgttcatgagtacctgggctggcatgccgact

SEQ ID NO: 145830 - DNA, 310 bp, Homo sapiens
gcacgagcagacgccggaccactggtatccatctgacctgcaggctcgtgcccgtgttcatgagtacctgggctggcatgccgactgcatccgtggcacctttggtatacccctgtgggtccaggtgttggggccactcattggggtccaggtgcccgaggagaaggtggaacgcaacaggactgccatggaccaggccctgcaatggctggaggacaagttcctgggggacaggcccttcctcgctggccagcagccggtggctctcggctacgaactgtttgagggacggccacgactggcagcatgg

SEQ ID NO: 145831 - DNA, 454 bp, Homo sapiens
  misc_feature (1)...(454): n = a,t,c or g
atagagcccatagtagacattaggccangcggaggaattcgatcaacagcctgcggaaactgccgacgctcaaggatggtgatttcattttgaccgaaagggcggctgctggcatatcacagagatgaggttctcaaaatgcaaagcagaaggtccagccaagagtcggtgcccaaggcaacaaagacaggaggagactcgtaggaggagggggtggtgttggggagctggagatggagggcgaggctggagggcagtccttcaaatgcagagaagcccccgggccccactggcagatgggagcagttaggggtaaatgcctggagccagtgtccttatagccactgcccatttgttcccagctcggccatcctgatttacctgagctgtaagtaccagacgccggaccactggtatccatctgacctgcaagctcgtgcccgtgttcatgagt

SEQ ID NO: 145832 - DNA, 384 bp, Homo sapiens
caccgcgctcagcgccttcactgccatccccgctgtccttgccgcccccgccatgggcctagagctgtttcttgacctggtgtcccagcccagccgcgccgtctacatcttcgccaagaagaatggcatccccttagagctgcgcaccgtggatttggtcaaaggtgggcccagcccgtttccccgcgtgtccacaaacccagtgcacccccaggcccccgccctgctctgccctgagcgtctcgccgcccgcacagccccctcacctcctcctgcagcgtctgccaccagagaatgctgtggactgagtggccttggagggatcacagcctctctgaaccttagcttgccttctgaaaaggaggataatgttaccttctgctc

SEQ ID NO: 145833 - DNA, 1410 bp, Homo sapiens
atgccagggctgggattcagggagaagaaaggaggttcccggacagtcattcctgcctcccgcggctgcgggctccctgcccccatcctgtgcacgaagtgggagctcccgctgtctggcagctcccgctgtctggcagcagctgctctgcaggggacagtctggacggcagaaagttcatccttgaccccagccttccagtcaagggggtggggcctgatcccctatttcccggcgcgccgggatcctgccacagctgctgcccacaccgcgctcagcgccttcactgccatccccgctgtccttgccgcccccgccatgggcctagagctgtttcttgagcctggtgtcccagcccagccgcgccgtctacatcttcgccaagaagaatggcatccccttagagctgcgcaccgtggatttggtcaaagggcagcacaagagcaaggagttcttgcagatcaacagcctggggaaactgccgacgctcaaggatggtgatttcatcttgaccgaaagcttggccatcctgatttacctgagctgtaatgtaccagacagccggaccacttggtatccaatctgacctgcaaggcttcggtgcccgtgttcatgaagtaccctgggcctgggcatgccgacttgcatcccgtgggcaccttttggtattacccctggggggtccaaggtgtttgggggcactcattgggggtccaggtgcccgaggagaaggttggaacgcaaacaaggactgccatggaccaggccctgcaatggctggaggacaagttcctgggggacaggcccttcctcgctggccagcaggtgacactggctgatctcatggccctggaaggaagctgatgcaagccggtggctctcggctatgaactgtttgagggacggccacgactcggcagcatggcgtcggacgagtggaggctttcctgggttgctgaactatgccaggaggcccacaagcatcatcttgagcatcctggaacaggcggcccaagaaaaccctcccaacacccttcaccaggaggcctatcaggctatgctgcttcggaatcgcccaggatcccctgaagggtctgggatgggggccaaggagattagcaacaaggattcattctgttacttacttgcccctttttatctttccctcttgccccagtcccttctctccaagcttcaatgtgaagctctgcacagacaaagacactcaagtgtcctttggcaagtgctgctactcctcaggtgcaagcatacataaccagtaagagactaaatctgcaatatataaagagctcctacaaatcagtaacatgaagaacactcaaaaattggcaaatgtcatcagtgttttaaacagaataaagattccaaacactttgaatagaaaaaaaa

SEQ ID NO: 145834 - DNA, 392 bp, Homo sapiens
gccattcgttcatcaaatactttttaagcgcctaccatgtgcctgacaggggagatgtaacggtgagaaaaactaggtgtggtccaggcccttcaggggctcaggtgctcgtggaagaagtggacattgaagtacttatcacacaaatgaggataaaagtacgatagcgatatctaccacgaagctgttgttccccaccagaaccaaatgagcgcaagatctgacaaagaaaaaaaaaggttcatcttttattcctcctactacattcctttttgctgaaataatgaagataataatcaataaaaactgagggaattcagagacctgtgccagtgcaggtccttagcatgctaagcgcaggtcccctgggcccgctgttgtttctctataaa

SEQ ID NO: 145835 - DNA, 690 bp, Homo sapiens
atggcctcgtgggatgagaaagacctgaccgtcccccagcccgacactcgtaaagggtctgtgctgaggtgtggactcagcagccgggctctgcgctgggccgggcggggtcacgtggccgcgggctggcgccccctggcgccggagagcgcgggcggctggggaatggctgctgccatggtgccggggcgcagcgagagctgggagcgcggggagcctggccgcccggccctgtacttctgcgggagcattcgcggcggacgcgaggacaggacgctgtacgagcggatcgtgtctcggctgcggcgattcgggacagtgctcaccgagcacgtggcggccgccgagctgggcgcgcgcggggaagaggctgctgggggtgacaggctcatccatgagcaggacctggagtggctgcagcaggcggacgtggtcgtggcagaagtgacacagccatccttgggtgtaggctatgagctgggccgggccgtggcctttaacaagcggatcctgtgcctgttccgcccgcagtctggccgcgtgctttcggccatgatccggggagcagcagatggctctcggttccaggtgtgggactatgaggagggagaggtggaggccctgctggatcgatacttcgaggctgatcctccagggcaggtggctgcctcccctgacccaaccacttga

SEQ ID NO: 145836 - DNA, 975 bp, Homo sapiens; identical to SEQ ID NO: 135593

SEQ ID NO: 145837 - DNA, 424 bp, Homo sapiens; identical to SEQ ID NO: 126010

SEQ ID NO: 145838 - DNA, 1578 bp, Homo sapiens; identical to SEQ ID NO: 126968

SEQ ID NO: 145839 - DNA, 1048 bp, Homo sapiens
ttcaatgtaaatgctgtgtcagtagttgtctagggaataatgacaagaagaaaattttgtacatgttcagtacgtaggaaaaagaaagagagatcagactgtcactgtgtctatgtagaaagggaagacataagagattccattttgaaaaagacctgtactttaaacaattgctttgctgagatgttgttaatctgtagttttgccccagccactttgccccaaccactttgacccaatctggagctcacaaaaacatgtgttgtatgaaatcaaggtttaaggcatgtaaggctgtgcaggatgtgccttgttaaccaaatgtttgcaagcagtatacttggtaaaagtcatcaccattctcttgtcccaataaaccaggggcacaatgcactgtggaaagccgcagggacctctgcccttgaaagcgggatattgtccaaggtttctccccatgtcatagcctgaaatatggcctcgtgggatgagaaagacctgacggtcccccagcgtgacacccataaaagatctgtgcctgaaggtggaattagtccaaagaggaaaaaacttgccagttgaagatggaggaaaggcccactgtctccctgaactgccccctggggaacttgaatgtcccgggtattaaaacacggattgtaccattggtccagttctgagatgggagaaaaacccgcccctatggtgggaggtgagacatgttttgcagcaatgctgcccttgttatccctttactcccactgagatgtttgggtggagagaaacataaatctgggcttacatgcacgtccagtcataagtaccttcccttgaacttaatcatgacacagattcttttgctcacatgttttttgctgaccttctccttattatcaccctgccctcgctactacattcctttttgctgaaataatgaaaataataatcaataaaaactgagggaactcagaggccggtgccagtgcaggtccttggtgtgctgtgtgtcggtgcccctgggcccgctggttggttctctataaaaaaaaaa

SEQ ID NO: 145840 - DNA, 1275 bp, Homo sapiens
ttcgagatccctagtccagtgtggaggaactccttgcctgggagaggggaagcagatctgaggacatctctgtgccaggccagaaacctccctcctgcaggtgaggcccggacccctgcccagttccttctccgggatggacgtggggcccagctccctgccccaccttgggctgaagctgctgctgctcctgctgctgctgcccctcaggggccaagccaacacaggctgctacgggatcccagggatgcccggcctgcccggggcaccagggtaaggatgggtacgacggactgccggggcccaagggggagccagggaattccagccatttcctggatccgaggacccaaagggcagaagggagaacccggctttacccggccattcctggggaaaaatgggccccatgggaccccctggggattgccaagggttgcccgggccccttggcgatttccctgggagagccaggttgaggagtgcagatacaagcagaaatttcaattcagtttttcacggttaattcggcagacccaccagccccctcgcacccaacagcctgatcagattcaacgcggtccttcacaaaccccacgtagatttataacacatgcactggctagttcacctcaaaagtccccggcctctacttactttgtctaccacgcgtcacataacagccaactggtgcgttgtgctgtaccgcagcggcgtcaaaagtggtcaccttctgtgggccacacgttccaaaaccaatcagttcaaactcgggcgggtgtgcttgcttgaggttgcaggttgggcgagggaggtgtggctggctgtcaaatgacttactacggacatgggtggggcatccaggggctctgaaaaagcgtcttctccgggcttccctggctccttccccgaactaagggcggggcaagatgcggttcgagacccacggggccttccccctcccctcagcttccggcatggacccaaccttactggccagtctgcatccttgccctagaccattctccccaccagatggacttctcccctccagggagcccacccctgacccacccccactgcacccccctccccatgggttctctccttcctctgaacttctttaggagtcactgcttgtgtggttcctgggacacttaaccaatgccttctggtactgccattctttttttttttttttctttttttcaagtattgccaggggtggggagatatataaataaatcatgaaatcaatacaaaaaaaaaaaaaaa

SEQ ID NO: 145841 - DNA, 2126 bp, Homo sapiens
agccgtcgccttcggagcgaagggtaccgacccggcagaagctcggagctctcggggtatcgaggaggcaggcccgcgggcgcacgggcgagcgggccgggagccggagcggcggaggagccggcagcagcggcgcggcgggctccaggcgaggcggtcgacgctcctgaaaacttgcgcgcgcgctcgcgccactgcgcccggagcgatgaagatggtcgcgccctggacgcggttctactccaacagctgctgcttgtgctgccatgtccgcaccggcaccatcctgctcggcgtctggtatctgatcatcaatgctgtggtacttgttgattttattgagtgccctggctgatccggatcaagtataacttttcaagttctggaactgggaggtgactttgagttcatggatgatgccaacatggtgcatttgccattgcgatttctcttctcatgatcctgatatgtgctatggctacttacggagcgtacaagcaacgcgcagcctggatcatcccattcttctgttaccagatctttgactttgccctgaacatgttaggttgcaatctctgggcttatttatgccaactccatccaggaaaacatacgggaactgcctcctaaatttccctacagagatgatgccatgtccgtgaatcctaacctgtttggtttttattattcttctgtttattagcattagcttgacttttaagggttacttgattagctgcgtttggaactgctaccgatacatcaatggtaggaactccgcgtgatgtccatggtttatgttaccagcaatgacactacggtgctgctaccccccgtatgatgatgccactgtgaatggtgctgccaaggagccaccgccaccttaccgtgtctgcctaagcctttaagtgggcggcgtgaaggggcagcagcttgactttgcagacatctgagcaatagttctgttatttcactttttgccatgagcctctctgagcttgtttgttgctgaaatgctagctttttaaaaatgtaagatgttagattgaaaactgtgagttttcaacatatgctttgctgggaacactgtgataagattaactgtagaattcttcctgtaagattggggggatataatggggctttcacttaaccttccctagggcattggaaacttcccccaaatctgatgggacctagaagtctggcctttggtaacctggctggggccccaaagtggggcatttttctctctgttccctctcttttgaaaatgtgaaatagaaaccagaaatagacaactttttcttcagccattccagcatagagaacaaaaccttatggaaacaggaatgtcaattgtgtaatcattgttctaattaggtaaataggaagtccttatgtatgtgttacaagaatttcccccacaacatcctttatggactgaagttcaatgacagtttgtgtttgggtggtaaaggattttctccatggcctgaattaagaccattagaaaagcaccagggccgtggggagcagtggaccatctggttgactgttcttgtggaatcttgtgtcccagggaccatgggggtgacatgcctcgtatgtgttagaggggtgggatgggatgtgtttgggcgctgccatggggatctgggtgcccctcttctcctggggattcacatcccccaccccagggcccgcttttaacttaagtgttctgccctaagaattggttcaaggaggtcatccaacttgacttttatcaaagtggaattggggatatatttgaatatacttccttgcctaacaaccatggaaaaaggggttttcctttccctgcaagctaacatcctactgctttgaaactttcccaagtatggtctaagtcaactttttaaaatttaaaacatttttcagaaaaatgaggattgccttccttgtatgcgctttttaccttgactacctgaattgccaagggatttttatatattcatatgttacaaagtcagcaactctcctgttggttcattattgaatgtgctgtaaattcacgtcgtcttgcaattaaaacaaggtttgcccacatccaaaaaaaaaaaaaaaaaaaaagggcggccgct

SEQ ID NO: 145842 - DNA, 2602 bp, Homo sapiens
tgtcattccttattgctggcccctttcttcaggccggaggccaagtggtggagaaggaaaggaaatgatcgaacgggcatgttgtcaagtgggcatgccactgggaaataccaccagtttaccctgaaacattgtcctcagaggagtaggaaagtggattttgaatctctattttgctcaaaagttcagttcctgagatactgatgactgagagtgctgctgggaaattttcaggattgtgtggtcttttggggttttttgtttttttttttttaagacaaagttgaccgctgttcactgtcccacgtgatcagttgtaagattacaatgctgcatgctagttggttacataagatacaattccagtgatggaaggcggttataatggatggtggtgtgtacaagatggcactgccatctttgagcagagcccagctctgcagcgccacttcatctttttaaacaccctagaggtctgtttgttgttgctgttgtcctttattttgaaagagttgcaagagaaggttaccagtgccaggtgaacttggagattgtggggattggttttggtttccggtttggttttggtttatccattttaccctggtagtgcctattgctgctgatactatcacctataccctgtttcctagtggagtgcctgaatacagtatggtacaatgcacagtaaacagcccgccgtggtgcctgccccggacctgcccttggggcatattcagtgacagccccaaatgtggggtggagcgaaaccttgtaatttccctccttaacatgtgtttgaaatacccaagtgaataatactgttctgggaaaaaaatgataaactagtgggaaattaaagaaattaagggttttatataataggcaggccccacctctcaaaatatttttagaagtctttttgtaaactaaatttcttttggatcactattttgcatcagtaaaatgatttttttaaaaccaataaatcatcaattattagaaatagttgtctcacagcgatactggtttttcttttgtgctgttatgatttaacattgacaggaacactattttaaatccttacgttcaggtggttgtaacttggccttataattaggctgaattatggcttcaaggtctacaatttatgtgtatggttcacagcctagctttctatttacatttgaaaatacagatttttaccaactttggattctttttttagttatatgtttgcctttcctttttaaattgttcaaaactatttttttatggccaaagttactaacacttgaaaatcagatactgcaccaaatacagtgtttttccgtagtgtttttaatgagtgcacctattactactgtgcgaggaattcatgttttaccagtcattgttatattacaaacagacttggcatggattaaccagttgttacacttactcttttccaagttgggagtatatgatgactcagtgcaggactgggtctctcttatgtggaatggaacacatggcaggaaatgcaggagtcaattttacatgcccattaaaggacatttgtaaaggatttcaggctcttatggtctgttggtataaatgtggtatctaggcactttattataacttggaatttgacctcacagatgttacaacttgatcagtcgtttgacctaatttgtgggtagctatctgtatgttttgcaatcttaatacaggacatgctttccaaaaaggttaatacaggaaccatcctgccgttttggataagtctatccagctgtggaaagggcaacctgtggtttctctgtactggtgtttaatgggggaagaatatgaacagctttaaagagctgtgtattgtggttactactattagaaaataagatctgcacagagtctgactggcctttgggtggcctttgtggacggctcgtagctggaaagtgttgatctgggttttctggcattcttttaagttaaaaagttaacatcgggacatgggtttgatcttttgttgtacctgatgacagtgcagagattctccacagctggataaaaatgtcacaaagctacttactgtacatgggcagtattcagattttcaaatcctaattattttcagctgtgctttttaattacttcaaaatatttagggggatgggggtgttgaagccttcccccttttggccttttaaccaatttatagaatttaaccagatgtacctgtcctttccatgtggccctcacatttaaagttatgagaacatacacatggtttacaacttttactatataaccttccctgggccaccaagtattttaaaagtgtgccaccttttaacctttactttttttaagttgaaaggtgatactttttctatatatggatggaaactccatgttcaactggaagtggaggtgttaatctccaggatatccaacattattatattttaaaatcgacgctatgaaaaatatcacctgaattcttgttcatttgtcagatttacagtaccttttttttctttaacttttagcattaaataaaaataaaattgggagcactgaaaaaaaaaaaaaaaaaaaaaaaagtcgacgc

SEQ ID NO: 145843 - DNA, 450 bp, Homo sapiens
acaggctttgatgaagcaggtgagcatgttggggaggccctcagttcaacgggctgcaaggactgaattcattcaactctgtggtcttgcaagtgggtccttctctagtcaaggcttgagataagattttgtggttaacactttgaattggtaggctttccaagagggggatcccatgtttaagccttcaagatgtccctgtccttatctccccaagccctgccccagtacatgcctgcctgttttgccttcagggctgttgtcacccaagttccttagtgctgtgtctgcaaatgccccggatgactttcactcttccctatgctttgcaaaatattggctgctttatgtagtgctctagggagggctgttctagctcctgcccaatgccctgtgtctataggtctttccctgctcagccagcaaaagccaaaggcagagttttgttgc

SEQ ID NO: 145844 - DNA, 1763 bp, Homo sapiens
agtacaagtgggttatttctcttccaggggaggccgcatgtatataagcaaaggtttgcccacctggttccttcaggaactccccgaggaatctgtttagtttccttcaggaactccccgaggaatctgtttagtttccatgcattaaaaacaaccctctagttgccaataatgaaactttaagaagcaacactttgacgtcgcagagttcctctctgcatgtgacgcggatataccaaagtgagtttatgggcatacggtatgcatgggttaatgtaggtgagacagggagtcccggctgccctgtggccccattctgttgtgggaggcttcgctggggagctgaggaacaccctgctgtccatgttttgatggacaggtgggttcttccaaaacaggaagcaccgagttcaccggcacggcccctgctttcagtgtgcgaaggccgtgggggctctggtgttgtgaactccaggttggcaggaggttagaagcaccaaagaccccatctctggtccctcaacagggcagtattggggggacattattccctcctgggccaataagctcctgtggcctgggacactgggtggggacaggtggtgggggtggggcagggcagaggcctatcctcctataaagacacagttgtagcactttgctaaaaccttttctggcaaacttacttggagacaacagggaggggacagctgatgtaggcatttggctagtcccctagaacagggaactctggctttccctcttggcttttttctcctcttaaagatcctccctctgtgggtgagatgaacccagatccccaccaaacagtagcttgggacaggatgcctcactgatccttatttaagaatcgactccttcccgtctcctccagatctgcagatctccagatcagtgccagcaaaatctgcaaaagtagtgacctaaccagggtaaggaatgagctgcaaatctgttgtaaaaactggatgtgctaggagtttcaattctttggataatcaacatgtttaaaacgctggagaaaagaaagacctaaagtcgtttcaaagtgtctgttcatacctgagaccattccctatctgcagctaacacattctgcagcattgattctggaataagaggcgaggcaaatggaggggttaagggagacaggcggaatgtggcaggctttcacctctgttcccaccggggttcaccagcctgtgatcccccagccccggagccaccagccccccactgcagagctttcctgatgcctcccctctgtggcccaggaagagcctgtctggcccttggaacctctgttttgggctgttctggggtcaccaggggtgcgaacttttaaaagagcatctcgtgatcagcccttctcatgttacctgcagggaacgaggacagggaccgaggacagaggggtcgtctgggctcttggctgggctgacaagaggcagagtcatcgttgtgggaccagagagaacacacagctctcttgatggtggtgcctgacctggccccctcctcactgccactcccctcctggcaagggcgaggcgtaggggtgagcagggccaggcagccagctcagggatggtacctctgaggcagccaagcacctgggggcatttctggtgtgcagagcagggcaaaagagagaggctggcccgcgtaataagtcttgtgcaccccgtggggctttggccgcgaattcttccgcctcgtgccaagcaaggcgtaagatggtc

SEQ ID NO: 145845 - DNA, 790 bp, Homo sapiens
  misc_feature (1)...(790): n = a,t,c or g
aattttgccctcgaggccaagaattcggcgagggcaataagctccttagtcccagacgcccatgggtcatttcacagaggaggaccaaggctactatcaacaagcctgtggggcaaaggtgaaatgtggaaagatgctggaggagaaacccctgggaaggctccctggttgtctaccccatggaccccagaggttctttgaccagctttggcaacctgtcctctgcctctgcccatccatgggcaacccccaaagtcaaggcacatggccaagaaggtgctgactttccttgggagatgccaacaaagcacctgggatgatctcaaagggcaccttttgcccaagcctgaagtgaacttgcacttgttgacaagcctgcaatgtgggatcctgaggaactttcaagcttcctggggaaattttgctggtgacccgtttttggcaatcccattttcggcaaaagaatttcacccctgaaggttgcaggctttcctgggcagaaagatgggtgacttggagttggccagtgcccttgttccttccagattaccactgaagcctcttggcccatgaattcagaagctttcaaggataaggcttttattcttgcaagcaattacaaataataaatctatttctgctaagagatcaccaaannnnnatnntnnnnnnncccccggattttttatttagcgggccgcacctttttccccttttagggggggtaaatttatattgggccttgggccggggttttcaaaagcggggggannnnnnnnnnaaagagccc

SEQ ID NO: 145846 - DNA, 454 bp, Homo sapiens
  misc_feature (1)...(454): n = a,t,c or g
nattggagtccgctaggccagtgcggnggaattccagttttccgtggtatacgcaaaatgtgattccagtccagactcagccgaggacgtgcgcaaggtgtgccaagactgccccctgctggccccgctgaacgacaccagggtggtgcacgccgcgaaagctgccctggccgccttcaacgctcagaacaacggctccaattttcagctggaggaaatttcccgggctcagcttgtgcccgtgacctcacagccccaaccagaaggtgccaatgaagcagtccccacccccgtggtggacccagatgcacctccgtcccctccacttggcgcacctggactccctccagctggctcacccccagactcccatgtgttactggcagctcctccaggacaccagttgcaccgggcgcactacgacctgcgccacaccttcatgggtgtggtctca

SEQ ID NO: 145847 - DNA, 1371 bp, Homo sapiens
atgaagtccctcgtcctgctcctttgtcttgctcagctctggggctgccactcagccccacatggcccagggctgatttatagacaaccgaactgcgatgatccagaaactgaggaagcagctctggtggctatagactacatcaatcaaaaccttccttggggatacaaacacaccttgaaccagattgatgaagtaaaggtgtggcctcaggctgtcgaaggagactgtgatttccagctgttgaaactagatggcaagttttccgtggtatacgcaaaatgtgattccagtccagactcagccgaggacgtgcgcaaggtgtgccaagactgccccctgctggccccgctgaacgacaccagggtggtgcacgccgcgaaagctgccctggccgccttcaacgctcagaacaacggctccaattttcagctggaggaaatttcccgggctcagcttgtggtaaagactgagattcttttgacaggtgagcctcacgtggatggggagcctggagatttacggttccgaatcaaagttgtcaagcacccaatatttgaaaggagaggagatgatttgtacacaaatgtgacaatctcattagttgagtcactggttggctttgagatggatattactcacttggatggtcacaaggtacatatttcccgggataagatcaccaggccaggagcgaagctatggaagaaaggggaagggctccccaactttgacaacaacaatatcaagggctctttgataatcacttttgatgtggattttccaaaagaacagttaacagaggaagcgagagaaggtatcaaacagctactgaaacaagggtcagtgcagaagattactttctatgaagacaaaaattttcaaggccgtcgctatgactgtgattgcgactgtgcagatttccacacatacctaagtcgctgcaactccattaaagtggaaggaggcacctgggctgtttatgaaaggcccaactttgctgggtacatgtacatcttaccacagggagagtaccctgaataccagcgttggatgggcctcaacgaccgcctcagctcctgcagagctgttcatctgcctagtggaggccagtataagattcagatctttgagaaaggggattttagtggtcagatgtatgaaaccaccgaagattgcccttccatcatggagcaatttcacatgcgagagatccactcctgtaaggtgctggagggtgtctggattttctatgagctacccaactaccgtggcaggcagtacctcctggacaagaaggagtaccggaagcccatcgattggggtgcagcctccccagctgtccagtctttccgccgcattgtggagtaa

SEQ ID NO: 145848 - DNA, 1678 bp, Homo sapiens
  misc_feature (1)...(1678): n = a,t,c or g
ctgtccagagtggcggaattcgagcacctgggttggtccccgaagcctccaaccacctgcacgcctgcctgccagggcctctctggggcagccatgaagtccctcgtcctgctcctttgtcttgctcagctctggggctgccactcagccccacatggcccagggctgatttatagacaaccgaactgcgatgatccagaaactgaggaagcagctctggtggctatagactacatcaatcaaaaccttccttggggatacaaacacaccttgaaccagattgattgaagtaaaggtgtggcctcagcagccctccgggagagctgttttgagatttgaaattaggacaccctggggaaccaccttgccatgttgttgggaccccacccttgttggccaagatgccagccttgagggcagcttgaaggagcatgctgtcgaaggagactgtgatttccagctgttgaaactagatggcaagtttttccgtggtatacgcaaaatgtgatttccagtcaagactcagccgaggacgttgcgcaaggtgtgccaacacttgccccctgctggccccgctggaacgacaccagggtggtgcacgccgcgaaaagctgccctgggccgcctttcaacgctcagaacaacgggttccaatttttcagcttggaggaaatttcccggcgctcagcttgtgcccctcccaccttctaacctatgtgggagtttacagtgtctgggcactgacttgttgtttgcttaaaagaaggccacagaggcagccaagtgtaacctgtctgggcagaaaagcaatatgggcttttgtaaaggcaacactcagtgagaagcttgggtnggggcagaggttgcagttgacctgcacggtgtttccaaacacagcccgtgaccttcacagcccaacccagaaggtgccaatgaagcagtccccacccccgttggtggacccaagatgcacctccgtcccctccacttggcgcacctggactccttccaagttggctcacccccaagactaccatggtgttactgggcagctcctccaggacaccagttgcaccggggcgcactacgacctgtgccacaccttcatgggtgtggtctcgattggggtcacccttcaggagaaagtgttcgcacccccggaaaaacacggcacagtggttgaagcctagtggttgggtgctgctgctggggccantgggttccttccattgttccggggaggaatcagacacttcaaggtctgaggcttagacatgggcagagatgaggaggtttggcaccagaaaacatagcccaccattttgttcccaancctggggcatggggtggggggcttgtctgctgggccacgcaagtgtcacatgcggttttacatttatatcaagtcttgactccctacttcccgtcattcctcacaggacagaagcagagtgggtggtggttatgtttgacagaaggcattaggttgacaacttgtcatgcattttgacggtaagcccccatgaatgtgttctctgcgtcaggttgaccttacaaaaaccattgggaactgtgactttgaaaggagctcttgctaagcttatatgtgcctgttaatgaaaattgcctgaaagaccttcctttaataaaaaaaggttctaagctgaaaaaaaaaaaa

SEQ ID NO: 145849 - DNA, 1452 bp, Homo sapiens
cggctgcctccacgtcggcttcctggcgcggggctggcgcggggctttttgcaccccgccgcgactgtcgaggatgcggcccagaggcggcaggtggctcattttactttccagccagatccggagccccgggagtacgggcaaactcagaaaatgaatcttttccagtctgtaacaagtgccttggataactcattggccaaagatcctactgcagtaatatttggtgaagatgttgcctttggtggagtctttagatgcactgttggcttgcgagacaaatatggaaaagatagagtttttaataccccattgtgtgaacaaggaattgttggatttggaatcggaattgcggtcactggagctactgccattgcggaaattcagtttgcagattatattttccctgcatttgatcagattgttaatgaagctgccaagtatcgctatcgctctggggatctttttaactgtggaagcctcactatccggtccccttggggctgtgttggtcatggggctctctatcattctcagagtcctgaagcattttttgcccattgcccaggaatcaaggtggttatacccagaagccctttccaggccaaaggacttcttttgtcatgcatagaggataaaaatccttgtatattttttgaacctaaaatactttacagggcagcagcggaagaagtccctatagaaccatacaacatcccactgtcccaggccgaagtcatacaggaagggagtgatgttactctagttgcctggggcactcaggttcatgtgatccgagaggtagctttccatggcaaaagaaaagcttggagtgtcttgtgaagtcattgatctgaggactataataccttgggatgtggacacaatttggtaagtctgtgatcaaaccagggcgactgctaatcagtcacgaggctcccttgacaggcggctttgcatcggaaatcagctctacagttcaggagaaatgtttcttgaacctagaggctcctatatcaagagtatgtggttatgacacaccatttcctcacatttctgaaccattctacatcccagacaaatggaagtgttatgatgcccttcgcaaaaatgatcaactattgaccatatagaaaagctgcaagattatgactagatatggaaatattttttctgaatttttttttatatttcctccgacttacctctttttgaaaagagagtttttattaaatgaaccatcatgatattggatgaaaagttctacattctattattgtattgtaacacacatgtattgatgattttcattaagagtttcagattaactttgaaaaatattccacatggtaatcaatataaattctgtttaattacatctgtaaatattatgtgtgtgatagtattcaataaagtaaaatcaaattgtcaaaaaaaaaaaaaaaaaaaaaa

SEQ ID NO: 145850 - DNA, 1702 bp, Homo sapiens
agtcccaaagcgctggaattacaggcatgagcaccgcgcctggcctgtatatgtgatttctaaaaaatagatgcatgcatatgttaacattgaatagtcaatcactagatgaagatgctctctaccatggtttagattgcaagtgtactttataccattgtttcaacttcaacctttatttttgtatatattttttcaactacttaaactgttcatgaataggcgtactttctgtatttaaaaatggcccctcaagcaccgttaatttacattccagttatttacatgataattcatgacattctgaaacttgcctgtatattatctgaaaaatgggatttcttgaggaaaagatctgtttattggtatgtaaggaaaaattttacctggaaaacaaacaaacaaaccctaaaactcagcaccactaccatttccagaagcttttttagcaagtgaatattttttacataatggataataaatgggtatttattcatcatgattttctaagtaatgcttatcagccccttcagtgggtgttattctaacaaaatggaatacattacaaattattaagttaggcttttcaggagttttaatatagggaggttactaggccactggacacactggattttggaaatgtttccaaaatgagtaggatacgattaggatccttttacctttttaatatctagtttttcccaaaatgatagtaatatcttttgaagaactatgctttttcaaaagcaaaatcaactctgtataatagcacattctctactttttaaagatcagaaatgctagaattcttgacttttgtgtatgggtagtaaatctagctcactgaaaatcagagtgaaacgcctttacatttgtgcggatagagaagttaactctccctcatatgtcactgtgctaccataatccctacattttctgtctgttctagtctaagaatattgttatagatggaagttaggaccaattagcccacagatgcgtgtattctctcagacataccggtgtagatgccatatttctgatgtcttcttaatgtctgtgaaagcaactggcatctacaataaatcacacttagaactggttagaggactccctcacttttgttgtccatgtggttcccttccgtggaccagccgtaataaagagccaaggtagtgatggtggccacgtgcctcgttgctatttttaaagtaatattcagatgtggttttaaatttagattatgtattccttttgaaacataagaaaaacatttaaacctatgctgaaaatacgataaaagaaaaacaactccaattatgctaaaagttaaatatggtatttaagaaaataagtcatggtatgcaattgagaaagtcctataatttattttaccagaaaagcgggaagattatgacctagatatgggaaatattttttcctgaatttttttttatatttcctccgacttaccctctttttgaaaagagagtttttattaaatgaaccatcatgatattggctgaaaagttctacattctattattgtattgtaacacacatgtattgatgattttcattaagagtttcagattaactttgaaaaatattccacatggtaatcttataaattctgtttaattacatctgtaaatattatgtgtgtgatagtattcacataaagtaaaatcaaattgtc

SEQ ID NO: 145851 - DNA, 486 bp, Homo sapiens
  misc_feature (1)...(486): n = a,t,c or g
nagctcnctnnaaattgagnacctgcagncgatgngcaacngcttnggaanttangggccgacccacgcgttcgcataaagctactaaaaggactggtgtaatttaaaattaactaaggcagaaggcttttggaagagggggacgattttggaaggccttatatatagtaacttagtttgaaaaatgtgaaggactttcgtaacggaagtaattcaagatcaagagtaattaccaacttaatgtttttgcattggactttgagttaagattattttttaaatcctgaggactagcattaattgacagctgacccaggtgctacacagaagtggattcagtgaatctaggaagacagcataagaaaaaagacaagctaggaaacaaaaagctaagggcaaaatgtacaaacttagaagaaaattgtgagattgaaaccagatagaaaatgataatattgtcaagagtttcagatagaaaatgatcan

SEQ ID NO: 145852 - DNA, 439 bp, Homo sapiens
  misc_feature (1)...(439): n = a,t,c or g
ctaagacaagtattggagaagtatagaagatagaaaaatataaagccaaaaattggataaaatagcactgaaaaaatgaggaaattattggtaaccaatttattttaaaagcccatcaatttaatttctggtggtgcagaaattagaagataaaaacatacttttagaagaaaaaagataaatttaaacctgaaaagtaggaagcagaagaaaaaagacaagctaggaaacaaaaagctaagggcaaaatgtacaaacttagaagaaaattggaagatagaaacaagatagaaaatgaaaatattgtcaagagtttcagatagaaaatgaaaaacaagctaagacaagtattgggaaagtaaagaagatagaanaatataaagccaaaaattggataaaatagcactgnnnnnnnnnnnnnnggggcggccgttctaag

SEQ ID NO: 145853 - DNA, 2337 bp, Homo sapiens
ctcaaattcgtgtaaaaaaaaaaaaacccacaaacttgccatctactatttctccaggacttggcagtctgccctcaaaagcttcagacaagattcatgagtataagcctccgagcgcgaatctctacatcacccggaaatcggcctacgtccccatataaatccctttacacctcagtacgaaactcccccattatattagaaaataaataaaaggttaccataagtaagttccagaaaaacaacatattgccgacctcacggatttttaccaaccactcgctttcccctgtggccttggcacactggcatgctggtctaggatcctctacgcacaacgcctgctcgcctcctccgtgtggttgccaagccaagccgcctgctaccttcatcaccaaattgcactcgctccttcctggaatccttttttcctkyagcttcaccaccdaaaatcgttagcgctccttccttcttcctagcttccttcaccaaattcggcactggcwtcctggactcttttcctatcttcaccacgaactgctgcttgctcgcttgctcctcagtcctagcttcatcaaacactggttcctggaatcctgtctgctgctgtcttcctagattcactgaatccacttctgtgtagcacctgggtcaagctgtcaattaatgctaagtcctcaggatttaaaaaataatcttaactcaaagtcccaatggcaaaaaacattaagttggtaattactcttggatcttgaattacttccgttacgaaagtccttcacatttttcaaactaagctactatatttaaggccttccaaattcttctaactcttccaaaagccttctgccttaggttttttttaaattacaccagtccttttagtagctttttgatgtgatttttaaccaacttccccttctagcttcaagtattcttcctaaattggttcttggtctacgtaaacaccctcatcttctcaagctttaccttcctaacttctgcaccaccagaaattaaattgcatgggcttttaaaataaattggttaccaataattttcctcattttttcagtgctattttatccaatttttggctttatatttttctatcttctatacttctccaatacttgtcttagcttgtttttccattttcatatctgaaactcttgacaatattttcattttctatcttgtttctatcttccaattttcttctaagtttgtacattttgcccttagctttttgtttcctagcttgtctttttttcttctgcttcctacttttcaggtttaaatttatcttttttcttcctaaaagtatgtttttatcttctaatttccctatcttctcatattctttttcttcgccttcccgtactcctgtcttccagttttccactgtcaaaccttctatcttctccaaattgttgtcatccttaccactcccaattaatctttccattttcgtctgcgtttagtaaatgcggttaacaaggcttttaaatgacgcaattctccctgcgtcatggatttcaagggcttttaatcaccttcggtttaatctctttttaaaagatcgccttcaaattattttaatcacctacaacttttaaactaaactttaagctgtttaagtcaccttcattttaatctaaaagcattgccctctctattgggattaaattcggggctcttgtagtcctttctcatcaattttcttttaaatacattttttactccatgaagaagcttcatctcaacctccgtcatgtattagaaaccgttttatcttttccttcctcatgctactcttctaagtttgtacattttgcccttagctttttgtttcctagcttgtcttttttcttctgcttcctacttttcaggtttaaatttatcttttttcttctaaaagtatgtttttatcttctaatttccctatcttctctattcttttctatcttccaattttcttctaagtttgtacattttgcccttagctttttgtttcctagcttgtcttttttcttctgcttccttcaccaaatcgcactggctcctggactcttttcctatcttcaccacgaactgctgcttgctcgcttgctcctcagtcctagcttcatcaaacactggttcctggaatcctgtctgctgctgtcttcctagattcactgaatccacttctgtgtagcacctgggtcagctgtcaattaatgctagtcctcaggatttaaaaaataatcttaactcaaagtccaatgcaaaaacattaagttggtaattactcttgatcttgaattacttccgttacgaaagtccttcacattt

SEQ ID NO: 145854 - DNA, 1776 bp, Homo sapiens
  misc_feature (1)...(1776): n = a,t,c or g
gatttgctctgccagcagctgtcggtgccgcgctcgacaccgagtcctagctaggcgctcacagaatacgcgctccctccctcccccttctctgtcccccgcctctcgctcaccccggcccactccagcggcgactttgagggattccctctctggcggcctctgcagcagcacagccggcctcattcggggcactgcgagtatggatctccaaggaagaggggtccccagcatcgacagacttcgagttctcctgatgttgttccatacaatggctcaaatcatggcagaacaagaagtggaaaatctctcaggcctttccactaaccctgaaaaagatatatttgtggtgcgggaaaatgggacgacgtgtctcatggcagagtttgcagccaaatttattgtaccttatgatgtgtgggccagcaactacgtagatctgatcacagaacaggccgatatcgcattgacccggggagctgaggtgaagggccgctgtggccacagccagtcggagctgcaagtgttctgggtggatcgcgcatatgcactcaaaatgctctttgtaaaggaaagccacaacatgtccaagggacctgagggcgactttggagggntgagcaaaagtgcagtttgtctacggattcctcgggagaaaacccactttcaaagacgcatcagttgctnggggaagccaacagccaacttgcaccacctctctgccttggtcacccccgctgggaagtcctatgagtgtcaagctcaacaaaccatttcactggcctctagtgatccgcagaagacggtcaccatgatcctgtctgcggtccacatccaaccttttgacattatctcagattttgtcttcagtgaagagcataaatgcccagtggatgagcgggagcaactggaagaaaccttgcccctgattttggggctcatcttgggcctcgtcatcatggtaacactcgcgatttaccacgtccaccacaaaatgactgccaaccaggtgcagatccctcgggacagatcccagtataagcacatgggctagaggccgttaggcaggcaccccctattcctgctcccccaactggatcaggtagaacaacaaaagcacttttccatcttgtacacgagatacaccaacatagctacaatcaaacaggcctgggtatctgaggcttgcttggcttgtgtccatgcttaaacccacggaagggggagactctttcggatttgtagggtgaaatggcaattattctctccatgctggggaggaggggaggagggtctcagacagctttcgtgctcatggtgggcttggctttgaactctcccaaagaagcnaatcaaaggccacttggagctgtaatctggccccccaaaagtttaggggattgaaaaacatgccatcttttgaagggaggaaacccctttaggttcagaagaatatggggtgctttgctcccttggacacagctggcttatcctatacagttgtcaatgcacacagaatacaacctcatgctccctgcagcaagacccctgaaagtgattcatgcttctggctggcattctgcatgtttagtgattgtcttgggaatgtttcactgctacccgcatccagcgactgcagcaccagaaaacgactaaatgtaactatgcagagttgtttggacttcttcctgtgccaggtccaagtcgggggacctgaagaatcaatctgtgtgagtctgtttttcaaaatggaattaaaccccactattctctggc

SEQ ID NO: 145855 - DNA, 1410 bp, Homo sapiens
cttttactacagacttggagattttagtttaatttggtttaattctctgtcctttccctttcactgtttcactccaaaacatgtaagaatggcaatgtttgaacatctgcgtttgggtctactgccaccttagcaagcctcattaaccattttataaaaattgcgttagtattgttgttgttgtttttgagacagggtcttgctctgtcacccaagctggagtacagtggcatgatttcagttcactgcggcctcgacctcccgggctcaagtgatcctcccacctcagcctccagagtagctgggactacaggcagtgtgccaccacatccagctaattttttaaagttttttcatagagacagggactcactatgttgtccaagctggtctcaaactcctgggttcaagccatcctcccaccttcagcctcccaaaatggctgggattacaggcatgagccactgtacccagccaaaattgttttcttttttaagtgaattcaacaatttctgtgagtggctctttgcatgaacactgtggcaagggtgttgggagaaattccaaagctgaccaaaaacatgggtccccaccttttgggagcttaacagtctgttctggggaacagagattcagccaaagtcaagaaacactggatgccagctagattatctgttctgtgctttggtgtctataagtacatatgtggatatgggttcattttatccctaaacttagtaccaaaccagcatttaatatctaattataaatctaatttggcctaaactttattattgcacactgcctgaacaaaacctatttgtctctatgtaaattttttcctcatggaacaagggtgtgaaatgaaaatattttaggatttattcaaaaacagactattctgttttcagcttcagaattgttctttgaatcctaaggaacctctgtcaaccagttaaggttgctgttgaaaagaaagaagaaggaggcggaaatctctcagggagaattatttcctttcttttctattttaggatacctgggaggggtgtgggagaagtaaggaattgtaaggggaggttcagtagtgggggaattctgtgacagctggatttgaaggatgatgatgaaggaacctcttgcattctagttaccccttttgcttccccttcaccctctttgttaaaatttggccttgggcaaccaatggaccattgtccatgccttattgtcccaaatatccatcctgtcgtagatcttaaatgtttttggatccgttgcgttaaagtggaagtgccacccacagtgaaaccagatcccatttaataaataagcttaaaggcaactgcagttttaaattccatagttattggaatatccagtgtgtgtaaggccctggaggggagccaa

SEQ ID NO: 145856 - DNA, 466 bp, Homo sapiens
ttttttttttttttcctgtttttgcaaataaagttttattggaacacagccataatccatcattcagatattgtttgtggctacttcccttttaaccagcagagttggtagttacgacagagacaatatggcctgcaaagcctgattctgtcaaatgactagactagatttcccatactagggagcatagcctagattttttttcttttctttttttttttgagacagaatctcactgacacgcaggctggagtacaatggtgggctctcagctcactgcaacctccaccttctgggctcaagtgatctcccaacctcagcctgctgagtagctgggaccacgagcatatggcaacatgtgcaactaacttttgtattttttttttttttgttaattattattttttgagaccgagtctcgctctgtcgcccaggctgcaatgaaagacctagcctcactgtcttt

SEQ ID NO: 145857 - DNA, 1123 bp, Homo sapiens
ttttttttttttttcctgtttttgcaaataaagttttattggaacacagccataatccatcattcagatattgtttgtggctacttcccttttaaccagcagagttggtagttacgacagagacaatatggcctgcaaagcctgattctgtcaaatgactagactagatttcccatactagggagcatagcctagattttttttcttttcttttttttttttgagacagaatctcactgacacgcaggctggagtacaatggtgggttctcagctcactgcaacctccaccttctgggctcaagtgatctcccaacctcagcctgctgagtagctgggaccacgagcatatggcaacatgtgcaactaacttttgtatttttttttttttgttaattattatttttttgagaccgagtctcaaaaaaaaaattttttttaaaaagacagtgtcatttgatggagttgctttcttgatcgttggctgcaaagaaaagacctagcctcactgtcttttgtgttgccttggaccggctcttaggttcctaatgccctaacaggcagtcggaggctggcctcgaagttggtagtcatccatcttgccctcttttcctaccctctacccccaacccgcgagctgctctcctgtcttcttccaacactgttctctttgggaatatgcatgtccaacttcccaagcagtctgggatctggagtaagatgactcttggtttaatgaagtttttccacagtgcttgcatgtgccccaagggtttggaaggttggagaactaacaaaaagcaaagagccatcctgtgtcgtttcggcaggtctgtgttctgttaaaatatggaagaattaacagaagaacgaagaaataagggcagaaactccacaggggagtacttgtctaaccctgaaaaagttcaaggctgttgttcaaggtctgaatttttcccttgagatttgcttgtagtccttaaagtcatcttcagatctatctgatcaaggcagcatccgcggaaaattataaggtgggtggctgcactggagcctgtcctggctcaggggagccggtgaagagtgatttttttcccttggcgttgggggatcagagggggtgc

SEQ ID NO: 145858 - DNA, 726 bp, Homo sapiens
cgccgtagtgggaggccacggcgattacccaggtgaaggtcttccagcccagccctggaaggtggaaaaagaaaagttgacatggaatgtttaggaagcaccattggtccaggtccaggatcggggcagccagcatgtcctctaatctggcttcactgttgaaatccagtcgagcaagcagggcccaaaccactgcgagaccagctcggtcgggcccaaaccaccgcccactgcgggaccagctcggtcgggcccaaaccaccgcccactgcgggaccagctcggtcgggcccaaaccactgcccactgcgggaccagctcggtcgtggagaccctaacccagcggcgctagaggaattaaagaaacacacacagaaatataggtacctcgcaagggttttttgcatgtctgatacctacggctccaacaggacccactgactgatgatggctccacctggacttgccaactactcctgcagccccacccagaagcggttcagcacacgggaggatcctgtctcacaccctacgatggccccccgcccccacaacccatcagcagcaagcacccactgccaagctaccccaccccttcccccaaactacctttggaacaccctagtccccaaattcttggggagactgatttcagtaatcatcaaattctggtctcccattcacttgtctctgtgtgaattaaaccctttctctattgcaaaaaaa

SEQ ID NO: 145859 - DNA, 348 bp, Homo sapiens
  misc_feature (1)...(348): n = a,t,c or g
gcaggattcaaaagaacatctttgcgttttctaccggctccccatcatcgtactagggaggaagaagcgggtgagaaacaaaacttctttccattgtcctgcccgtttctgcggacttgttctgaggccgaggcacctctaagatactgatggctctgcagaggacccatanattgcttctgcttttgctgctgaccctgctggggctggggctggtccagcntcctatggccaggatgnattgtaccagcgattcctgtggcaacacgtgcaccctgaggagacaggtggcaagtgatcgctactgaacttgatgatgcaaagacggaagatgacttttgtatcact

SEQ ID NO: 145860 - DNA, 470 bp, Homo sapiens
tcccaactacgcagaggctggcacgccgaccctccacacctcaccacgcccccatctccgtccgtgtacacacactcacacaaggacgccaaccccacctagatgcaaagcaggattcaaaagaacatctttgcgttttctaccggctccccatcatcgtactagggaggaagaagcgggcacctctaagatactgatggctctgcagaggacccattcattgcttctgcttttgctgctgaccctgctggggctggggctggtccagccctcctatggccaggatggcatgtaccagcgattcctgcggcaacacgtgcaccctgaggagacaggtggcagtgatcgctactgcaacttgatgatgcacagacggaagatgactttgtatcactgcaagcgcttcaacaccttcatccatgaagatatctggaacattcgtagtatctgcagcaccaccaatatccaat

SEQ ID NO: 145861 - DNA, 1245 bp, Homo sapiens
  misc_feature (1)...(1245): n = a,t,c or g
agcgaataagtacgtggcagatggtgctgtcgaccagtgtcaagaccaagtttcatgggttcctggacgctcagccaggggtagtctctgaagggccgcctggcaagggggagcagaagccagtgggccgccatctgctctccgtggaggcagtgctctcgcggctgctgcccgttggggtccagctgaggaaggagcgcggatcccaggctcgttctttgcctgggctgcccctgcggcccctggggcgggtgctgctgcggcgccagctccaagggcggatccaggcgggaggggcctcctcggagaagcggggcgcggtcccaactacgcagaggctggcacgccgaccctccacaccttaccacgcccccatctccgtccgtgtacacacactcacacaaggacgccaaccccacctagatgcaaagcaggattcaaaagaacatctttgcgttttctaccggctccccatcatcgtactagggaggaagaagcgggtgagaaacaaaacttctttccattgtcctgcccgtttctgcggacttgttctgaggccgaggagcctgtgttggaagagatggtgatgggcctgggcgttttgttgttggtcttcgtgctgggtctgggtctgaccccaccgaccctgggctcaggataactccagggtacacacacttcctgacccagcaccatattgcccaaaacaagggggcgggaatccattatcttgtaaaaccttcatgagaagccggggcctngacctcaccctgcaaagacattcaacacatttattcatgggcaagcaagcgcacactcaaaggccaatcctgtgaaaacaatgaatgggaaacccctcacagagaaaaaccttaaggaataaagcaagtccttcctttcccaggtcacccacttgcaagcctacatggaggttcccccctggcctcccatgcccagtaccgagccacagcggggttcagaaacgttgttgttgcttgtgaaaatggcttacctgtccacttggatcagtcaattttccgtcgtccgtaaccagcgggcccctgggtcaaagtgctggctctgctgttccttggcctttccatttcccctctgcacccagaacagtgggtgggcaacatttcattggccaaggggcccaaatgaaagagctacctggaccttttgttttctgtttgacaacatgtttaataaataaaaatgtctataaaatcagtaagaaaaaaa

SEQ ID NO: 145862 - DNA, 1006 bp, Homo sapiens
tttcgtcttatttgtgccataaaaacaatcgatcctaattgacagctatttggacttttacatctgccaaacccttttccttgaactgtggtcactaaatgaggggagtctggtctgggaagtcccatccattccttcaataggatggggagcggtgatagtgtctccggcgatctcaagaataggagggaatgttgaccagggagcaccgctgcggccgatcagaggagcaggaactggaaccctggccgagtccgaaaaaagccagatctggaaggtggctgcggaacggttttaagcggaagatggaggagccggaggaaccggcggacgagtgggcagtcgctggtcccggtttatatctatagtcccgagtatgtcagtatgtgtgactccctggccaagatccccaaacgggccagtatggtgcattctttgattgaagcatatgcactgcataagcaaatgaggatagttaagcctaaagtggcctccatggaggaggatggccaccttccacactggatgctttatctgcagcatctccagaaggtcagccaagagggcgatgatgatcatccggacttccttagaatatggggttaggtttattaacttcccagccactgaagggatatttacactatgcagcagctataggaggggctacgatcacagctgcccaatgcctgattgccggaatgtgcaaagtagcaattaactggtttggagggtggcatcatgcaaaaaaaaaaacgtgtgtgtatgtggccctttacaaggcattttgaagaaatccaagtgaaatagaaaaaagattccctaatatagtggaaagccccctgctcaaagtcaggacccctgggctctacccctagtttttctaacttggctaactgacttggactgattaccctccctaggcctcagttttttcatcaataaaatgaacaaaggatccacctaaaaaaaaaaaaaaaaaaaaaaaaaaaaaaaaaaaaaaaac

SEQ ID NO: 145863 - DNA, 2933 bp, Homo sapiens
cctcaggaagctgacattcttgtgagggtggccagtaaatactaagtcggtataggatatgatgtcagtgttacggcctttagggaaggaagcaggctaaggggacagagtgactgggatgctattttagataagggtggtcaggccaggcctcattgaggaggtgatatatgagcagcgatcttaatggagggagggagccgtttggggaaggacattcctggggacagcaaatgcgagggtcctggggcgaggtgtgctcttggccagctcaaggaagagctggtgtggctggagcacagtgagtgagagaaaggggtaggagatgttaggagatggtttgcaggtggctaggcgattgaagttaggaccttgtagcccatgagggggaaggtcagttgcagttcgaaatgtgtgagaaagccttgggtaacgtggagcagggagtggtgtgatttctcaattaaagaaagcccacaggacccaccagcagttcctgggctttccgactgagaaccccggtggccaaacagcagcaaggtcctgcccacaagggaggggaggctgggcgagtgtgtataccaaacaggttagggaagctgattaaaatctcctcagggcctaactgggaagggccagaggaagctggggatgggagtggagggtaggagcaaaaggacaaaggacatctgtaggttgtggagaaaaagggatggggtcggggccactgtggtcctaagagctcaaaagacttcaatgctcgatgcttcctccagcatgttctgagatcctcacctctccccttccgccaaaagcaggtggggggagggtcccgtccagactggacatagccgactctccttttctctggctgggaggcctgccacaaatgctcttggctgccccaccccctccccgcagcttccctgttccctccccagttcctcttgtctgtagggtgggcaaggcggctgactcctactcctgagttaccacaagtcagctgcctgcagatctccccaccccatgactgccttccatgtcttctcaccctgccctgagagtgctggagggaagagctgagcattgaggatttcacagcatatggcggtgtgtttggaaacaacgcaggacagcgccttttctaacgctagatgaatgccgcgtggacctggcccacctcctcactcggtgcttcctgccgtcgactggtatgcagtcagcacctctgaccacttacctgcaggagaagctcggggccagccccttgcatgtggacctggccaccctgcgggagctgaagctcaatgccagcctccctgctctgctgctcattcgcctgccctacacagccagctctggtctgatggcacccaaggcaagtcctcacaggcaacgatgaggtcatcgggcaggtcctgagcacactcaagtccgcagatgtcccatacacagcggccctcacagcggtccgcccttccagggtggcccgtgatagtatccgtggaggccggagggctaggtcgccagctgctacaaaaacagccagtatcacctgtgatccatcctcctgagagttacaatgacaccgctccccggatcctgttctgggcccaaaacttctctgtggcgttacaaggaccagtgggaggacctgactcccctcacctttggggtgcaggaactcaacctgactggctccttctggaatgactcctttgccaggctctcacctgacctatgaacgaatctttgcgaccacagcagacattctctttcattcccgcccaccagcgctacccaccgtctgcccggcactggtttaccatggagcgcctcgaagtccacagcaatggctccgtcgcctacttcaatgcttcccaggtcacagggcccagcatctactccttccactgcggagtatgtcagcagcctgagccaagaagggtagtctcctcggtgggcccgcacgcagccctcttcctggcagatgatgctttcagggatttccagatccagggttttcaacgttaatgggggagcagttctcctacgccaagcgactgtggccaggcttcttcttcccccggcatctggatggggctgctcacctccctgttcatgctcttcatcttcacctatggcctgcacatgatcctcagcctcaagaccatggatcgctttggatgaacacaaggggcccactatttctttgacccagattgtgtgaccctgtgccagtgggggggttgagggtgggacagtgtccgtgttgttgctttcccaccctgcaagcgcactggactgaagagcttccctcttcctactgcagcatgaactgcaagctcccctcagcccatcttgctccctcttcagccccgctgaggagctttcttggggctgcccccaactctccccaaacaaggtgtaacaaaattctccgtaaaagcctaaaaccaaccagcttcccccagggttccgtccgctgtgaagcccgtaaaggggaacaatgaaaatccaagggtcctccctttccccccttaatttaaatccttgtggcctaccatcatcccctggctgctgggatagtgctttttggtggtaggcaaatgctcccctccttaaaggttataggggctccctgagtttggggagtgtgggaagtactacttaactgtctgtcctgacttgggctgtcgttatcgtttttctggtgatgtttgtcgctaacaataagaagttacacggggtttatttctgtgggcctgagaagggaagggacctccacggacaggttgggctgggtgcgatcgcccgccggctgtttgggcatgtttcccaccggcaagtgccgggcaggagcatggggtgcttggttgtttccttcccaataaaataaaacgcgggtcgccatgaaaaaaaaaaaaaaaaaa

SEQ ID NO: 145864 - DNA, 707 bp, Homo sapiens
  misc_feature (1)...(707): n = a,t,c or g
ccccgactcttctggtccccacagactcagagagaacccaccatggtgcttgtctcctgcccgacaagaccaacgtcaagggcccgcctggggtaaggtcggcgcgcacgctgtgcgcagtatgtgtgcggaggccctggagaggaatggtcctgttccctccccccacacccaagccttacttcccgcacttcgaacctgagccacggtttctgcccaggtttaagggccacgggcaaggaaggtggccgacgcgcttgaccaaacgccgtggcgcaccgtgggacggacattgcccaaacggcgttgttccgcccttgagcgacctgcacggcgcacaagctttcgggtgggacccggttcaactttcaagctcctaaaggccacttgccttgcttgggtgaaccttgggccgcccacctccccggccgagtttcaacccctggcggttgcaacgtcttccctggggacaaagtttcctgggtttcttgttgaagcaccgttgctgaccttccaaataacctttaaaggttggaagcctcgggtgggccatgctttctttgccctttgggcttccccccagcccctcctcccctttcctgcacccgtacccccgtggtcttttgaataaaattttgaattgggggggcaaaaaaaaaaaaaaaaaaaagatctttnaatttaagggggcggaaagtttatttcaa

SEQ ID NO: 145865 - DNA, 679 bp, Homo sapiens
aaaaccctcagtctgagcctgagaaatcctggcatttgtagcccagggctgcgaggaagccacagggcggtccgcagggcggtatcgaggctctgggacccaaggaggggcaggacgtcgtgcacccctcgcgcacgcacctgtcgggaccggccgcctcctcctgcctacctgtcctgcctccttcgccccgaatttcaccttaaaccatgatgaaccaagcccagtggattctgaagcccgggacgatggcagacatcagcttggctgtgcggaagatcgcgctgctgctgaagccggacaaggagatcgaacaccagggcaaccacatgacggtgaggacgctcagcaccttccgaaactacactgtgcagtttgatgtgggagtggagtttgaggaggacctcaggagcgtggacggacgaaaatgccagaccatagtaacctgggaggaggagcacctggtgtgtgtgcagaaaggggaggtccccaaccggggctggagacactggctggagggagagatgctgtatctggaactgactgcaagggatgcagtgtgcgagcaggtcttcaggaaggtcagatagccggagaggagccaagatccctccagacagcaccagctcacagacgctcttgttgtgcccccttcaagcccagattgtgccaggtcagc

SEQ ID NO: 145866 - DNA, 578 bp, Homo sapiens
tggaatctctcagcctcacctgccagacaacaccccctccttcctcaccctgtctcctgcattctcctgaaaccttcatccaaaaaatgcctccccaacctcactggctactaccgctttgtctcgcagaagaacatggaggactacctgcaagccctaagcagcccccacagacatcagcttggctgtgcggaagatcgcgctgctgctgaagccggacaaggagatcgaacacccagggcaaccacatgacggtgaggacgctcagcaccttccgaaactacactgtgcagttttgactgtgggagtggagtttgaggaggacctcaggagcgttggacggacgaaaatgccaggggtgcccttggcattgtaatttttccagccagagccatctcctgagctccagggcaatgttttcaactgcctacaaaatacagttggccctccatattcatgggttctgcatccacagcttcagcaaactgcaaatggaaaaatatttgggaaaaataaaaataaaaaataacaatacaaaatgatacaaataaaaaacaatacagtatagcaactaaaaa

SEQ ID NO: 145867 - DNA, 549 bp, Homo sapiens
caatgtttatgtttcttcattgatctctagagacccataaacacggttatgaaacgaggcttgttagtgctgtgcttgccagcaggggccactgttttattctgtacctcctgatcccccctccaaccacaccgccctggagcagctctgtggaaaaagtggaatcagcttagaggttttggagaggaagatactgaaacgtaaacgatataagaaagtcacggtgcacaaatatacatacctcatttctgtgtcccttggagcagatgggggaatgtgcgcagatgcgaagctcttgctgtaatttatgtgacaaataataaaatatatgttttgtcggatccagaaatctcatgccttcagccaacatccataaactgacagtctaacttgttggcttgtaagtaaggtaaaaatctaaaactggccaggcgcggtgtcacgcctgtaatcccagcactttggagggccgaagcagacggattaactgaggtcgagaatttgagaccagcctgacagacatggagaaacctcatctctactaaaaaa

SEQ ID NO: 145868 - DNA, 468 bp, Homo sapiens
  misc_feature (1)...(468): n = a,t,c or g
gaaaagggaagaaggtggggaggaaaaggaggaggaaaaagaaggtgatggtgaggaagaggatggagatgaaaatgaggaagctgagtcagctacgggcaagcgggcagctgaagatgatgaggatgncgatgtcgataccaagaagcagaaggccgcgagggattgnctagcagccaaaaaaggaaaagttaaactaaaaaaaaaaaggccgccgtgacctattcaccctccacttcccgtctcagaatctaaacgtggtcaccttcgagtagagagggccgccctttttttttttttttttttttttttttttttttttttttttggtatatattgttagggtcagccatttttaatgatctcggatgaccaaaccagccttcggagcgttctctgtcctacttctgactttacttgtggtgtgaccatgttcattataatctcaaaggagaaaaaaaaccttgt

SEQ ID NO: 145869 - DNA, 440 bp, Homo sapiens
cccacgcgttcggagggaccgcaggggcattatgccttttttaacatgcgactcttaatttgggacggacagaacagccgtacagaccagtagttctcagcgcctttgcttaccctgggttgctcagaagacttactggttactggttccttcttcccttttgaaggacttaaaggagaagaaggaagttgtggaagaggcataaaatggaagagacgcccctgctaacgggaatgctgtgagtgtctgctttgctcctgagccctggcagctaccgccccacaaaatttttcctgttctactttaaacatacctatatatgtgtgtgcatgtgtatatgtatagctttgcacagtggcagtatcgtagccaatgagctttacccgaggcgcgattattgctagttaaatatttataaaaacctttcgagcagcgcctgg

SEQ ID NO: 145870 - DNA, 946 bp, Homo sapiens
gtagagacagggtcttgttatgttgcccaggctgatctggaactcctgggctcaagtgatcctcctgcctcggcctcccagtgcactgggattatgtaagccaccgtgcccaactgacatgcaggaaccttaaatgctggttgtgaagtggaagaagccagtctgaaaagccatctttgcattgttcctcatccgcctccttgctcgccgcagccgcctccggcgcgcgcctcctccgacgccgcggactccggcagctttatcgccagagtccctgaactctcgctgtctttttaatcccctgcatcggatcaccggcgtgccccaccatgtcagacgcagccggtagacaccagctccgaaatcaccaccaaggactttaaaggagaagaaggaagttgtggaagaggcaagaaaatggaagagacgcccctgctaacgggaatgctgttgaggaagaggatggagatgaagatgaggaagctgagtcagctacgggcaaagcgggccagcctgaagatggatgaggatgacgatgtcgattaccaaggaaagcagaagaccgacgaggattgaattagacagcaaaaaaggaaaaagttaaacctaaaaaaaaaaaggcccgcccaccgtgggcagtgccaccccgcagatgacacgcgctctccaccacccaacccaaaccatgagaatttgcaacaggggagggaaaaaaggaaccaaaacttccaaggccctgctttttttcttaaaagtactttaaaaaggaaatttgtttgtattttttatttacattttatatttttgtacatattgttaagggtcagccattttttaatgatctcggatgaccaaaccagccttccggagcgttctctgtcctacttctgactttacttgtggtgtgaccatgttcattataatctcaaaggagaaaaaaaacctt

SEQ ID NO: 145871 - DNA, 1177 bp, Homo sapiens
agtgcggtggaattctgaagatgaggaagctgagtcagctacgggcaagcgggcagctgaagatgatgaggtgggttctggcttgagaagaaggggggtttggcatctgggtctccccacctgcctttagctgaggtgctcaagctgcggagggactgtttctgactttgtaggtggccactgtgtggtcctgaatcttaagaacaggaaggaaacagggctgggctcaacttcccagaggccttgggctgtggagctgggggtccctggttcttgctctgccagcaggagctgaggcagtgggctggatagggctcctggggttggaggggcctttgacagtctttctctgcttaggatgacgatgtcgataccaagaagcagaagaccgacgaggatgactagacagcaaaaaagcgaaaagttaaactaaaaaaaaaaaaggccgccgtgacctattcaccctccacttcccgtctcagatatctatacgtgttcaccttcgagtagagaggcccgcccgcccacccgtgggcagtgcccaccccgcagatgacaacggcgctctccaccacccaaacccaaaccatgagaatttgcaaccgggggaggaaaaaagaaccaaaaacttcccagggccccggctttttttcttaaaaggtactttaaaaagggaaatttggtttgtatttttttatttacattttatattttggtaccatattggttaggggtccagcccatttttaatcgatctcgggatgacccaaaaccaagccttccggagcgtttctctggtcctactttctggactttaccttgtgggtggtgacccatgttccataataatctcaaaggagaaaaaaaaacctttgtaaaaaaaagcaaaaatggaccaacagaaaaaccaatctttattccggaggcattcccagtaactttatttgtgtatggtacttagccggtactataagtagttgggtttgtatggagatgggttaaaaaggccaaagataaaaggtttcttttttttttccttttttgtctatgaagttgctgtttatttttttttggcctgtttgatgtatgttttgaaacatatgttgtccaccaataaacaggaattttattttggctgaatttgttctaacaaaaaaaaaaaaaaagggcggccgct

SEQ ID NO: 145872 - DNA, 491 bp, Homo sapiens; identical to SEQ ID NO: 145491
  misc_feature (1)...(491): n = a,t,c or g

SEQ ID NO: 145873 - DNA, 576 bp, Homo sapiens; identical to SEQ ID NO: 134091

SEQ ID NO: 145874 - DNA, 1601 bp, Homo sapiens
tgtggtggaattccggagagagtgaggaggctgcgtctggctcccgctctcacagccattgcagtacattgagctccatagagacagcgccggggcaacgtgagagccggacgggcacatgggcgactctgtgcctcgctgaggaaaaataactaaacatggggcaaaggagatctaaagaagccgagagccaacatgtcatcatatgcattttttgtgcaaacttgtcggggaggagcataagaagaagcacccagatgcttcagtcaacttctcaagagtttttctaagaagtgctcagagaggtggaagaccatgtctgcttaaagaggaaaggaaaatttgaagatatggcaaaagcgggacaaggcccgttatgaaagaggaaatgaaaacctatatccctccccaaaggggaagacaaaaaagaaagttcaaggattcccaattgcacccaagagggcctccttcgggccttctttcctcttcttgctctgagtatcgcccaaaaatcaaaaggagaacatccttggcctgttccattggtgatgttgcgaagaaactggggagagatgtgggaattaacactgctgcagatggacaagcagccttattgaaagaagggctgcgaagctgaaggaaaaatacgaaaaggatattgctgcatatcgagctaaaggaaagcctgatgcagcaaaaaaagggagttgtcaaggctgaaaaaagcaagaaaaagaaggaagaggaggaaggtgaggaagatgaagaggatgaggaggatgaggagattgaagagagatgaagaagatgaagaagatgaagaagaagatgatggattgatgaataagttgggttctggcgcagttttttttttttcttgtctataaagcatttaaacgcccctgtacacaaactcactcccttttaaaggaaaaaaatggaaatgtaaggctgtgtaagatttgtttttaaactgtacagtgtctttttttgtatagttaacacactaccgaattgtgtctttaggatagccctgtcctggtggtattttcaatagccactaacctttgcctggtacagtatgggggttgtaaattggcatggaaatttaaagcaggttcttgttagtgcacagcacaaattagttgtatatgaggatggtagtttttttcatcttcagttgtctctgatgcagcttatacgaaataattgttgttctgttaactgaatacccctctgtaattgcaaaaaaaaaaaaaaaaaagaaaagaaaaagttgcagcgtgttttgttgacattctgaatgcttctaagtaaatacaattttttttattagtattgttgtccttttcataggtctgaaatttttcttcttgaggggaagctagtcttttgcttttgcccattttgaatcacatgaattattacagtgtttatcctttcatatagttagctaataaaaagcttttgtctacacaccctgccatatcataatggggggtaaagttaagtggaaatatttttcttccttacctgaccttccaaattttggatcggtaaaaaatatttccattcccccttaacttttacaaactgaaaag

SEQ ID NO: 145875 - DNA, 512 bp, Homo sapiens
acaaagatcaaactatacttgaaaataaacagcaatatgatattgagataacaagaataaaaattgaattggaggaagccctagtcaatgtgaaaagctcccagtttaagttagaaactgctgaaaaggaaaaccagatattggggataacattacgtcagcgtgatgctgaggtgactcgactaaaagaattaaccagactttttaaaactgtggacttaaatgttctgcaaagtcttacacaaaagcccaatacagtacatgaactacggaaaagcagaactgctctgaacaaggaagaggtgggagatctgagtcctggccccagcacccacttcaacttcagtcacctccttggaatctggggttctgcagcttgaaataatcagtttggattttaaacttatttgtaacataataataatcctaggaactttaaaataatattttgtactaaattttagaattattataataagtgatctaataaaacagtcttttcctgaaaaaaa

SEQ ID NO: 145876 - DNA, 2648 bp, Homo sapiens
tcagaaattcagaggttgattacagaaatggaggcatgtatatctgtacttccaacagtaagtggaaacacagatattcaagttgagatagcactggccatgcaaccattaagaagtgagaatgctcagttacgaaggcagttgagaattttgaaccagcaactcagagaacaacagaaaactcaaaaaccatctggtgctgtggattgcaaccttgaattgttttctcttcagtcattgaatatgtcactgcaaaatcaattggaggagtcactaaagagccaggaattactgcagagtaaaaatgaagagctgttaaaagtgattgaaaatcagaaagatgaaaacaaaaaatttagtagtatatttaaagacaaagatcaaactatacttgaaaataaacagcaatatgatattgagataacaagaataaaaattgaattggaggaagccctagccaatgtgaaaagctcccagtttaagttagaaaccgctgaaaaggaaaaccagatattggggataacattacgtcagcgtgatgctgaggtgactcgactaagagaattaaccagaactttacagactagcatggcaaagcttctctccgatcttagtgtggacagtgctcgctgcaagcctgggaataaccttaccaaatcactcttgaacattcatgataaacaacttcaacatgacccagctcctgctcacacttccataatgagctatctaaataagttagaaacaaattacagttttacacattcagagccactttctacaattaaaaatgaggaaaccatagagccagacaaaacctatgaaaatgttctgtcctccagaggccctcaaaatagtaacactaggggcatggaggaagcatctgcacctggaattatttctgccctttcaaaacaggattctgatgaagggagtgaaactatggctttaatagaagatgagcataatttggataatacaatttacattccttttgctagaagcactcctgaaaagaaatcaccactttctaagagactatcccctcagccacaaataagagcagctacaacacagctagtcagcaacagcggacttgctgtctctggaaaagaaaataaactgtgtacacctgtaatctgttcctcttcaacaaaggaaggcaggaaggatgcacctggaaaaacttttccagaggcatctggatatggaagggacacacagctccttcaaggaaattaaggggaggcattgggtaaggttcccttgctggccaccaagggagccagagggaaccaaacttgcatgttcatgggcccatcaggttgtttttaggcaacagcctttcaagttgaaagggcaatactgtctgtgatggtagtgtttttcacttcttgacttggtgttttgactgggaggctttttttcgtttttcaacgttcactttctcgtgatgaacaagacttcagaaaatgggcctttgcgggcaattaagatgccaacataagctaggctcccagaagtcttttaaaggacctggtcttcctgggagaaatgaattcccgaagaaaactccatccagggttgcctcctttttaaaactagaacttggctatattgaatgtgtatttttctttagtgaaatgatgttttatgttattatgtgtgaagtaatatattgtacaagtaataaatgtattgttgagatatattgacactgaggagcttataaaaacaagtcatcttaagttcacaattggctacaagaagaaagttgtggataactagggaaattattgtaagtaatgttttatttcagtacttaggcaattagagttcttttattaagatgtatctgctgggattaagggtacaggttgaaataagctctgtgggctgtcctaaggaaattaatggggaaaaggaatctctgggatgttaagtttttcctggtcgaaaactagaaggtttttttttttcctgtttccatatactttttttttaatagcaatgtgtttttattaaacatgctgtgtgccacaggccagtgttgttggtgaaatatataaacatttatttaaagagaaaagttaccagtatctacacctcttaaaaaacattgattggtctaaaaaatatatagataacatcctaagttaacatatggcttcttaaaacttgggcacttttatttgtttttatcccaaattcatgttttaaggcctttaaagaatagtcagactggataaagaagtgctaacaggataaagctatagttgggggaaaattggggggttttttttaaataaggaaatgtttaatttttgtccttatatttaaacatgatggaatttgtaaatcttggcattgattgtaattcctgcctttttggaagaattttttctcccagcatgttagctgagaatattctctattttataaataatatgaagtaggttggtctctccgctttctctaaacccaggacttcttagctcagtatcatctcccttcatgtaagcagcacgttttaactcttaggaagctgaatgttgtgttatcactaatactttgtacaggtcacctgcctactctaattgtccttagtacttggacaggctttatcattaaagagtgttctcctaaaa

SEQ ID NO: 145877 - DNA, 435 bp, Homo sapiens
catcattttctccgacatccttgttgtaccccaggcactgggcatggaggtgaccatggtacctggctatgaggtggttgggcttgactggacagtggccccaaagaaagcccgggagtgtgtggggaagacggtgacattgcagggcaacctggacccctgtgccttgtatgcatctgaggaggagatcgggcagttggtgaagcagatgctggatgactttggaccacatcgctacattgccaacctgggccatgggctttatcctgacatggacccagaacatgtgggcgcctttgtggatgctgtgcataaacactcacgtctgcttcgacagaactgagtgtatacctttaccctcaagtaccactaacacagatgattgatcgtttccaggacaataaaagtttcggagttgaaaaaaaaaaaaaaaaa

SEQ ID NO: 145878 - DNA, 647 bp, Homo sapiens
tttgcaaacacagccttgggcacacttgctacagcccacggggcagcagttacagacagctgaccatggaagcgaatgggttgggacctcagggttttccggagctgaagaatgacacattcctgcgagcagcctggggagaggaaacagactacactcccgtttggtgcatgcgccaggcaggccgttacttaccagagtttagggaaacccgggctgcccaggactttttcagcacgtgtcgctctcctgaggcctgctgtgaactgactctgcaggcactgggcatggaggtgaccatggtacctggcaaaggacccagcttcccagagccattaagagaagagcaggacctagaacgcctacgggatccagaagtggtagcctctgagctaggctatgtgttccaagccatcacccttacccgacaacgactggctggacgtgtgccgctgattggctttgctggtgccccatggaccctgatgacatacatggttgagggtggtggctcaagcaccatggctcaggccaagcgctggctctatcagagacctcaggctagtcaccagctgcttcgcatcctcactgatgctctggtcccgtatctggtaggacaagtggtggctggtgcccaggcattgcag

SEQ ID NO: 145879 - DNA, 1473 bp, Homo sapiens
  misc_feature (1)...(1473): n = a,t,c or g
gcccgtttgaacccctggaatatatagcctgcgaaaccccnncggaangtccgggtngaaccacgcgtccgttcaggttaaattgtggattttatctcgcagttacttacagctgaccatggaagcgaatgggttgtgacctcagggattaccggatctgaagaatgacacattcctgtgagcagcctgtggagaggaaacagactacactcccgtttggtgcatgcgccaggcaggccgttacttaccagagtttagggaaacccgggctgcccaggactttttcagcacgtgtcgctctcctgaggcctgctgtgaactgactctgcagccactgcgtcgcttccctctggatgctgccatcattttctccgacatccttgttgtaccccagatgttttctccccctccaggcactgggcaatggaaggtgaccatggtacctggcaaaggacccagcttcccagagccattaagagaagagcaggacctagaacgcctaccgggatccaggaagtggtagcctctgaagctaggctatgggttccaagccatcaccccttacccgacaaccgactggctgggacgtgtgccggctgattggcttttgctggtgcccccatggaaccctgaatgacatacatgggttgaagggtggtggctcaagcacccatggctcaggcccaagcgctggctctatcagagacctcagggctagtcacccagctgcttcgcatcctcactgatggctctggctcccatatctggttaggacaagtggtggctggtgccccaggcattgcagctgtttgagtccccatgcagggcatttttggccccacagctctttcaacaagttttgcactgccttaacatcccgtgatgtggcccaagccaagtgaaggcccaggttgccgggaagccaggccctggccaccaggtgcccatgtatcatctttgcctagggatgggcattttgcccctggaaggagcttggcccaagctggcttatgaaggtggttgggcttgactggacagtggccccgaaagaaagcccgggagtgtgtggggaagaccggtgacaattgcagggcaacctggaacccctgttgccttgtatgcaatctgaggaggagatcgggcaggttggtgaagcagatgctggatgactttggaccacatcgctacaattgcnccacacctgggccatgggctttatcctgacatggacccagaacatgtgggcgcctttgtggatgctgtgcataaacactcacgtctgcttcgacagaactgagtgtatacctttacccctcaagtaccactaacacagaatgattgatcgtttccaggacaataaaagtttcggagttgaacctattgtgtagttttgtttgtgaaagattgtcccatatcctcagttcttcttagcctctgtctccttccctgggaccctctcatatcctcttatag

SEQ ID NO: 145880 - DNA, 1050 bp, Homo sapiens
cggtgagcgcggcccgggccggacatggcggcgctctacgcctgcaccaagtgccaccagcgcttccccttcgaggcgctgtctcaggggcagcagctgtgcaaggaatgtcggattgcacaccctgttgtgaagtgcacctactgcaggactgagtaccagcaggagaggctagagtgcaatggcacgatctcggctcactgcaacctccacctcccaggttcaagcgattctcctgcctcatcctcccgagtagctgggattacaggcattaaaaccaatacaatatgcaagaaatgtgctcagaacgtgcagttgtatggaacgcccaaaccttgtcagtattgcaacataattgcagcatttattgggaataaatgccagcgctgcacaaattcagaaaagaagtatggaccaccctattcttgtgaacagtgcaagcagcagtgtgcatttgacaggaaagatgatagaaagaaggtagatgggaaattgctgtgctggctgtgcacactttcatacaaacgggtccttcagaagaccaaagagcagaggaaacacctgagtagctcttctcgtgctggccaccaggagaaggagcagtatagtcgcctgagtggtggtggccattataacagccagaaaacactttctacatcttcaattcaaaatgaaatcccaaagaaaaagtccaagtttgagtcaatcacaactaatggagacagcttctccccagacctggctctggactcaccaggcactgaccactttgtcatcattgcccaactgaaggaagaagtggctaccctgaagaagatgttgcatcaaaaggatcaaatgattttagagaaagagaagaagattacagagttgaaggctgattttcagtaccaggaatcgcagatgagagccaaaatgaaccagatggagaaaacccacaaagaagtcacagaacaactgcaggccaaaaaccgagagctcctgaagcaggcagctgctttgtccaagagcaagaagtcagagaagtcaggagctataacctctccatga

SEQ ID NO: 145881 - DNA, 963 bp, Homo sapiens
cggtgagcgcggcccgggccggacatggcggcgctctacgcctgcaccaagtgccaccagcgcttccccttcgaggcgctgtctcaggggcagcagctgtgcaaggaatgtcggattgcacaccctgttgtgaagtgcacctactgcaggactgagtaccagcaggagaggctagagtgcaatggcacgatctcggctcactgcaacctccacctcccaggttcaagcgattctcctgcctcatcctcccgagtagctgggattacaggcattaaaaccaatacaatatgcaagaaatgtgctcagaacgtgcagttgtatggaacgcccaaaccttgtcagtattgcaacataattgcagcatttattgggaataaatgccagcgctgcacaaattcagaaaagaagtatggaccaccctattcttgtgaacagtgcaagcagcagtgtgcatttgacaggaaagatgatagaaagaaggtagatgggaaattgctgtgctggctgtgcacactttcatacaaacgggtccttcagaagaccaaagagcagaggaaacacctgagtagctcttctcgtgctggccaccaggagaaggagcagtatagtcgcctgagtggtggtggccattataacagcttctccccagacctggctctggactcaccaggcactgaccactttgtcatcattgcccaactgaaggaagaagtggctaccctgaagaagatgttgcatcaaaaggatcaaatgattttagagaaagagaagaagattacagagttgaaggctgattttcagtaccaggaatcgcagatgagagccaaaatgaaccagatggagaaaacccacaaagaagtcacagaacaactgcaggccaaaaaccgagagctcctgaagcaggcagctgctttgtccaagagcaagaagtcagagaagtcaggagctataacctctccatga

SEQ ID NO: 145882 - DNA, 792 bp, Homo sapiens; identical to SEQ ID NO: 126056

SEQ ID NO: 145883 - DNA, 441 bp, Homo sapiens
cttgaaggacccgtttgtatgaaagtgtgcacagccagcacagcaatttcccatctaccttctttctatcatctttcctgtcaaatgcacactgctgcttgcactgttcacaagaatagggtggtccatacttcttttctgaatttgtgcagcgctggcatttattcccaataaatgctgcaattatgttgcaatactgacaaggtttgggcgttccatacaactgcacgttctgagcacatttcttgcatattgtattggttttactctcctgctggtactcagtcctgcagtaggtgcacttcacaacagggtgtgcaatccgacattccttgcacagctgctgcccctgagacagcgcctcgaaggggaagcgctggtggcacttggtgcaggcgtagagcgccgccatgtccggcccgggccgcggaattccaccgc

SEQ ID NO: 145884 - DNA, 1833 bp, Homo sapiens
gcgccgcctactactactagcctactactactatgctgcgagaagacgacagaaggggtatcgataagtttttttttttttttttttttttgagtcagagtctcactgtccctcaggctggagtgcaatggcgcaatcttgcctcactgcaacctccacctcccaggttcaagcgattctcctgcctcagcctcccaagtagctgggattacaggtgtgtgccaccacgccccaccgatttttgtacttttagtagagacaggatttcaccatgttggccaggctggtcttgaactcctgacctcaagtgatctgcccgcctgggcctcccaaagtgctgggattacaggcgggagccaccgtgcctggccaatgttaagtattttaaaagtcattttaaaatatttgtcattgatgaaacttggtttcagcacacgtaattgctttccctctcttcttgtgattaggtgtaaacctctatttaactcaagtcctagattagaatgtcctttgtcctgatgtttgcagtaattgcttccttggttaataaagatatttttgaaatatactctggactgttggtgaaagaggcaggcatggctttactggtactagtttggcactgaactgtttgggtgcccatgaggtaggcagaccttatgctttttttttttgagacggagtcttgctctgttgcccaggctggagtgcagtgatgtgatctcggctcactgcaacctctgcctcccaggttcaagtgattctcctgcctcagcttccccaatagctgggactacaggtgtgcgccaccactcccagctaatttttgtatttttagtagagacagggttttgccatgttggtcaggctggtctcggaactcctgacctcaggtgatccacccgcctctgcctcacaaagtgctgggattacaggcatgagctaccgtgcctggcctaaaccttacgcttttgaggttgagtgcaggccttgtgataactaagcgctacttttgacgaagccttcaacaagctgcccaagtcctctcctcaagcaagaccgcatcaggttgtaagttgcatctttacaagtggtctttccttttattaaatctataagcagtgaatatagatttgattcaacttttagttacgttctcttcaagaatcctaatcaactttcagttaggcctcttaaggaaaggggaaaaaaaggtggctggccagtcattccccaaattatgtttttgggctgtgcattctattttcttacataggcactggaattctgagtaacagttcatccggggtttattagttgggaacagaacagtaacaggacctaactggggactcagcccagcactaagcctcatcttagctgccccttttcctccgctttgcaggtttactgcttcccctgggctagcccataacggggttctggggcagggtcagactcttccagcaagaccagtgtattaaatagtgtgaaattagataacactgatgaccctgctctgccctagttaagaaactgaattaaatcagcagttacaaagccacatactttggttacgtgcctaggctttgcccccctggcctctagataattaagacggccccagggaataccagcagagaagtgctaattgtatttgggtgttacaaaagcagacctagacgagctgttcacttaactggtacctgttggtcagaaaaagaatttatttagagattatgatcatgtaaaattacagtactcaacccttctagcaaagtagtttttttgaaaaataaactaaatgcctttataaaaaaaaaaaaaaaaaaa

SEQ ID NO: 145885 - DNA, 5856 bp, Homo sapiens
ttaagcactggttccatcttcttcaataacccgattcatgctggtgccatgtgtgatatgagtcatgggattattactgagatctctgatgctgctatgtcgtgactgttcattgagccgatgagaactactatgcctggagtgatctgttagtcgtgacatgctgccatgaggtagtctctcctccattcctctgtaactgcagggcgtgtacctgccatcacgtgatctgtggaggctgccgtggtagctgctcactttgctgtggatgcttcctgctttgcttctttgatcatccaccatagccagctgagttgaagaagcatgggtggatgttccttgagtggaagttccccttgactttcttatgataggagtatttggatccctcaggagagactgagcaaaatcaggttcctggagtacctgtcggctctcattcactatctcttttttcctacgaccatgaaaaaaactggcccattcaaagcatgtctttttgcttccaacccaaaatacagagggaatgccaactatgagagccatcaggtatttcatcagaaagagaatcaagtctggacgactcatttgagtaacctgatatggacatggaatgtgatattctctgcagcgttcttgtatccacgttgtttcccagatgccccggtaagcttgctcataaaagtagcatccaattacaaccaagagtggtacgagataaagaatgctgaaaacaccgatccggatcataaacttcactaatttatcttggttctccttttctaatggaatctcaattcgaactctgtttagggatataatgccagctaagaggagagaaaccccaactaccacatacaggcagaggggagcaagaacaaaatatctcaatgcatcaacatcgtagaggccaacaaaacacacgccactaatattgtcaccttcaattttattcatcgctaaaaggatgatggttagagttccggggatgccccatgcactggcgtgaaacagcaatgctttcttctcaatagcttcactaccccactttggcacagctgctaaaaaccatgtgatggtaagaattacccaccatacactgccagccatagtaaaaaaatagagtatcataaaaagcatggtacaggctttattatgagatccttgtgtcactgtggaagccttatattgtgcagggatggatgcattgcaggctactcgatcttcaagcaaaaatccaatgaagaaaattaaggataccatcatgtagcagactgcataaaatataataggcctttcaggataacggaatcttgtgacatcaatcaaaaaagttaaaaaagtaaacaatgtggccgagaggcaaatgattgaaatcaatcctatgaaatagcgagcaaatgacagttcttctcttctgaagtacatatttggacaaggaggtgaacaatcacgcacatgcagaaaagaataacccagatcaggatcaatttttaactctcggggacaccaaaaaccatagtctctctgcactgccactggggctccttcagttggttctccagctaaattcagatccacaagtcgaggatatggctcatcacaatctgggaaccaaaaatgcaaaaattgggaattccacaccaccacgaccttgttcaggtaagggaggccattcagcctctctaaagagttcataagcacttcctcccgctcataagtcaacatcaccaccgtgaactgctctcggggaacattgcctccaagcgctgcctgaaattccttgccagaacccccagctccaccaccaataggccgaaagccagtccctgagcccaagaatttggcctctgagggcaacacagggtcaaagggagtgtgggggaaaagatggaaaggccctggagcacagttccagctgcggtaaaagtcagtgacagtcagagtgaaattgcggaggtatctgggtgaggcgtagggcggctccgtctccactggccccaggtccaggtccccgttgtcagccatgttggggtcagttccagccgccttgcctgaacggtgggggatctcagctgccgcctcttcccggatgggagcggctgggatctggatgcgagtcctaatcatagccagcacggtattaaaaatactgtcagcagtggagaagtaagtctcccagagaaagcggccttgccgcctcatagccaggaggtcactatcggagaggcttctgagcaggaaatgaacctcggtaacacgaggctttggcaccaccagggccgcctcgttccactgcagcatgtcctggtagggaagctggacctgctcccccagcaccaccgggacggcaccgacttccagggcttcgaagagccgtgttgcacacccagaggaaataaccaagcgagggtccccgggggtaatgatgagggcgaaggtggagagcttcagcaattccaagcggtcctcccgctctccacacagtgcccactcagtcggcaggctgggtttgggctggtttttgcaggtgaattccaccaggacctgatccagcttgctgtcctgcaccgccttcagggtggcaatgatccggtcatcgtagtcggcgggagggtcgccctccatttcctcttcgaaggagcgggcctcctgaaggctagacctcagagactcaatcttctcgccctggaaggtgaagagatatttccgcttcaccggcacctgtggtgggatttccatgaagttgggctcagacatggcatggaccagcggtgatacgaccaagtcaaagccaggtctgtactggacagtgtagaaggtggactgggccaccatggcacggccagtactgacgttatagagaaggttctgtgtatctgacttacgtgacagattgatgatgacatggttgtgtccatccgtccgccagtgtggcagggaatacaactgcttctccagctcagcaggccgcagcaccaccggctcctgcatctctcccactagtatcacgtaaaggcaggcgatgtctgcattttctgtaacataaacgttagctcgtgctgtcgcctgaaaagcctgcttgaccaagggatccaggtagctgccaaagacaaactggtcactgtcatagacgtagaccgggaagccagaggtgagagggcaacgagaataatcaaagcagttgtgtagccggcagccccgagtggccttcgggggagggaggccggcatcgtccttctctgggagcagtcggatgggcagggacagcttgggctggttctgggccatgagctccttgtaggaatgctcggtctggctgatgacattcttgagctggagcaggtcctgcttggcgttctcaatgctcttcttacaggcttcgatcttcagattcagcttggcgatctcgctgttcagctcttggcgcttggcctccagctgcaggagctcttcactcaccgactcccggatgcggcacagatccagcacgtgcttcacctcgcacagctcgttccccacccggggaccaaaaatccgcttgcctgcctcatcagcctcatccagagtggtgaggtaatagtgggcgatgagcgggaagaagaccaggatgacaaagagcgtgaagctgagccacgtgaggcggatgcggttggaccagcgcagcatgcaggtctgacctccgttccccgcgcccccattccgcagcatggtatagcctgtcatgagtcctctgcagccatgtgtttcaggacccttccttcctctgacttgtgtagcattacacctcagcacacgacttcttgaaagagtgaacctccagggcttgctctccatcccatcatcattaccatatttctgattcatcaggtcccctaacttcccaattcctcgttcttgactcataagctccttgtcctttgttaactcgtaaattaaggggttagaccggatgacctcaaagatccttttagactctaggccctcactgacaattgccttgctcccaggaagcacaaaaacatgttttgctggaccctcggacaggaagcggctcctctgactgtggctcctgaaaggaggcgagcccggcaaaaagagccagcggggagggcagcaggcgactgcgtgtagaagcggggggcagatgtgggaaggtgtgctcgggaaggggtgggggtagtccggagctgcgcctccgccgacagaagatgctccgggccagcagccagagaaacgccgcgggtcacagagggtggagggcttcagggagcagaggaagcccaacagctgcagccgagcgtccaaaaaaaggtggaggcgggtcccgagcagcccaaacggcttccagctcagggacccgccgccgccgccgccgccgcctgcgcgaaagtcggcgtcccagaagccgttctggctgccggccgcccgccttccaggccgcgcctgatccgccgctccccctgccggccggcagccatttccgacaggcgactgcggaacttgccgaagggcgccgcgccggaaatggccgaagccggcgttcgcgagcgggggcgcggacgcgggcgcgcgctcgccactttcccgaccgcgtccgaagaccgccgaggcctcccgcagctccgcggtgacacccgggtcaggggcgcggggccgggcgccggggattgtgggaggcgcgggggggcgcgccggccgccttcggagccccccaactcgcgtcctgcaaaggccgccgggccccactccttctaccattaatctattcctaaatgatccacccccattacccaagcatctctcattaggcttcacctccaacattgggaatcgaatttcaacatgagatttggaggggacagacatccaaactatctcagcatccatccttctctctgcgtactctgctgacttactcttccactcaggctgcctttgaattcctcttttgtagatgtctgcccacaggccacgtgccttcttctctcctccactcagcagcagatacagcagtttccggcgactatgccactgagggttgggaatgccactgttgctggggttgttgggaagcaaaggtgggagtgctccttcactgataaaggagacatcagaatttaggggctcaatgtcctcagctttatcaaagttttcccaaacatccccatcccaacttgcaagatcccattctttcccaattaatgctctcactttaactgcacatagcctgcaaagctgtgagttcaacttgcgttgtaattcagccacttgcaggatgaggttctgcatttgactttcagcaatttccgccctttttaccaagttccttgcattacttttccatccactggcccctgcaccttgtccattgtctacaaatccccagctgccactgttatattcagggttgagtcttgacccccaatgcaatagtcttgaaaaaagttttctttgcctacttaacttgttcagcgcaatttttctctgacaggtaaacaatgagggagctccattagcacaaccagagtctttcatccttgccgccccagaggatctggtgtctgggtcaacagactgaccagcacaggaagctcccacaccttcaagttgagtctgccagaggactctccaggttgcattgctgtggggacctttatgcaaggtaaggagacaaaccagggagtcgaaggcaggaggagaggacaagggaaggccacatgggcacacaatgacaggcagccacttattttcttcctcttttcccaggggtctattcacttcgtaacgcctgtctaactgagcatccaaatttagcctgccgccagcaacggcagcctcctcagcccatggcat

SEQ ID NO: 145886 - DNA, 1277 bp, Homo sapiens
ttaaatcagcttatgactcgggcattctccttcaccctttgtgggtgaattcagcttgagacgctttaccatcccatcatcattaccatatttctgattcatcaggtcccctaacttcccaattcctcgttcttgaactcataagctccttgtccttttggtaactcgtaaaattaaggggggtagaccggatgacctcaaagatccttttagactctaggccctcactgacaattgccttgctcccaggaagcacaaaaacatgttttgctggaccctcggacaggaagcggctcctctgactgtggctcctgaaaggaggcgagcccggcaaaaagagccagcggggagggcagcaggcgactgcgtgtagaagcggggggcagatgtgggaaggtgtgctcgggaaggggtgggggtagtccggagctgcgcctccgccgacagaagatgctccgggccagcagccagagaaacgccgcgggtcacagagggtggagggcttcagggagcagaggaagcccaacagctgcagccgagcgtccaaaaaaaggtggaggcgggtcccgagcagcccaaacggcttccagctcagggacccgccgccgccgccgccgccgcctgcgcgaaagtcggcgtcccagaagccgttctggctgccggccgcccgccttccaggccgcgcctgatccgccgctccccctgccggccggcagccatttccgacaggcgactgcggaacttgccgaagggcgccgcgccggaaatggccgaagccggcgttcgcgagcgggggcgcggacgcgggcgcgcgctcgccactttcccgaccgcgtccgaagaccgccgaggcctcccgcagctccgcggtgacacccgggtcaggggcgcggggccgggcgccggggattgtgggaggcgcgggggggcgcgccggccgccttcggagccccccaactcgcgtccactcaggctgcctttgaattcctcttttgtagatgtctgcccacaggccacgtgccttcttctctcctccattcagcagcagatacagcagtttccggcgactatgcctcatcttcaggggctgctggactgaagtcttgaatgaaggaggggccaacagtgactcctggtccttgaccaaacttgagtcaggctcctctgaatgctcttcttgaccaggcctcatccttggcctgctgaatctggttctgcaagaatcccccacccttgttactttaccaagttccttgcattacttttccctcgtgccg

SEQ ID NO: 145887 - DNA, 315 bp, Homo sapiens
ccctgctggcttctcttccccgcaggccacctcatgtcgaaagccccccccagggttctgtccttggcccctccccctctctctgctgacttccctggtgatctcatccgataccagctgtacactgggcaccttgggcttctctctggaactgcatcacctgtccagctgcttccctgccactcagcccaccagcctctgtcagccttcctccttatcctacagtacaatcagcagtctagttcttttcatttggaatgaatacagcattaagcttgttccactgcaaataaagccttttaaatcatcattcaa

SEQ ID NO: 145888 - DNA, 988 bp, Homo sapiens
agctaaaatccctcttcggatccacagtcaaccgccctgaacacatcctgcaaaaagcccagagaaagcacttatgattgaattagaaggaagtctgtaaaatttggctgtgatcatagggtaagatgttatctaacagaagccggaaacccaatgtctcctgctgagatgcttgagtgcctgtcaggatctaaaaattttcctcaagaattactgtatgtcattggaaagacgttcttttgagtggcttccaggagccagacagagggagcgccatggattacgtgcggaaaatatgcagctatctttctcggtcacattgtcggtgtttcctgcaatgttctccattccgctcctgatgtgcaggattgccccagaattcacgctaccgggaaaacccatttctctccccagcccgggtgcccccaatacttcagtgcatggggctgcctgcctcccctagagccataccccactcccactaaaggtccaaggaaggacggatgttgggtcccaaaagaaccgtcaccctcagagtccccaccttgcctgtggtagcctaaaatccatataaacaggggtccacagtaaatgggggggtttccaaaagtgggagaacccacacgggcgtgcccacttggcagttatttgtttatttatccacaaatctttaaaatgtttttaccccaagtgctgtcttggatggactggctggattttctggggattgggaaaatttaaggttgttttaggtgtttatgggcttttgtggaggttaaaacttctccttttccttaccataccgactttgaacacgctttcaagggtattactggcaggctttactgccttcctcctttattccccacaggtacattcagcagtctaagttctttttcatttgggaatgaaatacaggattttaggttgttcccattggcaaataaagcctttttaaaatcatcattcaaaaaaaaaaaaaaaaaaa

SEQ ID NO: 145889 - DNA, 532 bp, Homo sapiens
  misc_feature (1)...(532): n = a,t,c or g
ttcaccagctgcttcggtgatagcaccaatgtcgcgcaccaggctggtgtgccccagtctcattcccttttgcatctatgtggtggacgtgggctttagccccggcccccaaagctgcacaagtcatgagcccaaggacatccatgccaagtgcgaactggcctttctccaccatcagcgcttctacaagaacgagggaggtacatggtcagtggagaaggtgatccaggtgcccatgagctccgctaccctgggggcgattgtagctctgacatctggatttgaaccccaccctcatcacccacactccctattttgggccctcacttccttggggacctggcttcattntgctctctcttggcacccgacccttggcagcatgtaccacacagccaagctgagactgtggcaatgtgttgagtcatatacatttactgaccactgttgcttgttgctcactgtgctgcttttccatgagctcttggaggcaccaagaaataaactcgtaaccctgtccttcaaaaaaaaa

SEQ ID NO: 145890 - DNA, 2029 bp, Homo sapiens
  misc_feature (1)...(2029): n = a,t,c or g
ccgccgggatcaaagtgtaccagtcggcagcatgggtcatgtgtctccagctcttcccagcacaacctcaccctcctcagggctctgagggggcggagaggacaggccagagcgatgaggctggagtggggacctaggccagccgcactgccgtggcccgctgggaatgtgtgctgcagaacgtgcggagggagccttcaccctccagagcgtggcccagccaattgcgccccattgcttccacagctacgaaatgtcgggaattgtggacccggctactccacccctctggaggccatgaaaggacccagggaagagattcgtctacctggccctgcattttaccggaaacacagggcactgagggccccagattatcctgggccactgtggatgttgaccccaagtctccccagtattgccaggtcatccacccggctgcccatgcccaaccctgaaggacgagctgcatcactcaggatgggaacacctgcaggaagctgcttcgggtgattagcaccaagtcgcggaaccaaagctggtgctgcccagttttcatctcctcttcggcatctatgtgggtgggacgtggggctctgagccccgggccccaaagcttgcacaaggttcattgagcccaagggacatccatgccaagtgcgaactgggcctttctccacaccagccactgcctggccagcggggaagtgatgatcagctccctgggagacgtcaagggcaatggcaaagggggttttgtgctgctggatggggagacgttcgaggtgaaggggacatgggagagacctgggggtgctgcaccgttgggctatgacttctggtaccagcctcgacacaatgtcatgatcagcactgagtgggcagctcccaatgtcttacgagatggcttcaaccccgctgatgtggaggctggactgtacgggagccacttatatgtatgggactggcagcgcattgaagattgtgcagaccctgtctctaaaagatgggcttattcccttggagatccgcttcctgcacaacccagaccgctgccccaaggcttttgtggggctgcgcacttcaagctccaaacatccagcgcttcttacaaagaacgaggggaggtacattgttcagtgggagaaggtgattccaggttgcccccaagaaagttgaagggctggcctgctgccgaaaatgccagggcttgatcacgaccattctggcttctccctggaacgacggcttccctctacttcagcaaactggctggcatggggaccctgaggcaagtatgacatctctgacccacagagacccgccctcacaggacagctcttcctcggaggcagcattgtaaaggaaggcccctgtgcaagtgctggaggacgaggaactaagtcccccagcccagagcccctagtggtcaagggaaaacgggtgggtgaaggcccctcagatgatcccagctcagcctggatgggaagcgcctcaacaatcaccacggtcgctgtaccagtgccctgggacaaagcagtttttacccctgatctcaatcaggggaanggctcctggtgaatgctggcagggttgaatggtaagacaacagtaaaaaaggaggggcttgaaagttgaacccccaactttcctgggtggatttcggggaaggagcccctttgcccaagcccttgccccattgagcccgctacccctgggggcggattgtagctcctgacatctggattttgaactcccccccctctcacccacactccctattttgggcccttcacttccctgggggacctgggctttcattctgcatctctcttggcacccggacccttggcaagcatgtaccgacgacagccaagctgagactgtggcaatgtgttgagtcataatacaatttactgacccactgttgcttgttgctcactgtgctgcttttccatgagctcttggaggcaccaagaaataaactcgtaaccctgtccttcggaaaaaagagacctaaaaaaaaaga

SEQ ID NO: 145891 - DNA, 355 bp, Homo sapiens
acatagttctatgacatttcttacttttcttacttctgtccatcgtaaacaaatgcatcttcctcctgtccacacagtttagaatacatccctgtcatggagggcttaatcctgaagaagtcaatatcagagaccaccatcaaatccatgttgacatttcaaaattataaacagaggctgggcaccatggttcatgcctgttatcccagccctttgggaggctgagggaggatcatttgaagctgtagtaagctatgattgtaccactgcattctagcctgggagacacggtgagacttttaaaatatttatgtatttattcattaatattttaaataaataaatgttgtaaaag

SEQ ID NO: 145892 - DNA, 888 bp, Homo sapiens
gtcgtgagggagcctgccttttcactagctgagcccagttcaccgccaggtacttcagcacctccagtatcccaaatgtccaataaagcgccagtggagaatccggcggagcaagcatatgtagcagggtgttaccctgccagtaattgaaacattaccatgaaggaactgacagtttatgaactgcactggtttaggccagagttgggaaccagttggctaaattaaagaggaaattatgccaaagcagtggaactactggtgcaactagcttctctgcagacttcttttgttactctggatgaagctattaagataaccaacaggcgtgtaaatgccattgaacatgtcatcattccccggattgaacgtactcttgcttatatcatcacagagctggatgagagagagcgagaagagttctataggttaaagaaaatacaagagaagaaaaagattctaaaggaaaaatctgagaaggacttggagcaaaggagagcagctggagaggtgttggagcctgctaatcttctggctgaagagaaggacgaggatcttctatttgaataatctttcctgttctggttctttgagaaaccctaacactggcttcattttaattcacagtgtgttcctgtcttgtctgtcatgggagccattctgccaatttaaatgcgactgtggtataaacagtaaaatgatttaaaaagtctcactcattctgtagcccaggctagagtgcagtgagccaagatcacaccactgcactctaccctgggcaacagatggagattccatcttccaccttccaaaaaaaaaggtgcagagtttactaatttaaaacattgatatttcatatttatttaaataaaaatgattgaatttaaa

SEQ ID NO: 145893 - DNA, 1780 bp, Homo sapiens
ttttgacccccgctgcaggaattcggcacgaggtgaaaatgggtgtccctgctgcctcttagcaacaagaggggtcaagtgacacaaccagctgactcccgtagaggaagacactgtggagagccagttctggagctattgcagcctcggttgcccggccggggatccgagccgaaaagttatcgtcagaatgtcgggcaaagaccgaattgaaatctttccctcgcgaatggcacagaccatcatgaaggctcgtttaaagggagcacagacaggtcgaaacctccctgaaggaaaaaatctgatgccttaacttctttcgattttcgacagatcctaaagaaggtaataggagacttaaaatgtttgatgggccgaagtgatgagagaagctgcctttttcactagctggaagccaagtttcacagcaggtgactttcaggcacttacagttattccaaaatgttcaattaaaggcggcaagttgaaggtttcggaggcgaaggaaaggttattgttaggccggtgtttacttttgccagtaattttgaacattaccattgaaggaactgaccagttatggaactgactggtttagccagaggtggggaaccagttggctaaattaaagaggaattatgccaaagcagtggaactactggtggaactagcttctctgcagacttcttttgttactttggatgaagctattaagataacccaacaggcgtgttaaatgcccattgaacatgtcatcattcccccggattgaacgtactcttgcttattattcttcacagagctgggtgaggagagagcgagaagagttctataggttaaagaaaatacaagagaagaaaaagattctaaaggaaaaatctgagaaggacttggagcaaaggagagcagctggagaggtgttggagccctgctaatcttcttggctgaagagaaggaccgaggatccttcctattttgaattaatcctttccctgttcctggttcctttgagaaaccctaacactgggcttcattttaattcacagtgtgtaggttttgatttgtgtggctattggattttttggcctaagaattttcaccggttgtaaaatttaccctagatgtctattttatgggattaccttttggcagaatccataattttagcaacccatttatccatgggatgaaaggagatctgtaaaaccctgccccagggaactttacagaaatttacttttgcagaagcgtttattcatactcccatttaccatcctgtgttaccccgtgattctgcttacccaagccatattaggaaataccctcttaggaagccattagcgggtctcagggccaaattactgtggagccagccttttcattccctacccaacttgcaaaccttggcgctgttgtctgagattgctgcagccattcttgttaccatggtacttgctcaaactttgtgaaaacctgcacttttccttgcatgacaggttcctgtcttgtctgtcatgggagccattctgccaatttaaatgcgactgtggtataaacagtaaaatgatttataagtaaagtcattccgtttatattaatttactggtaagtcatgttctcatgctcagatcagtagtgtcagccagagctttctctgcagacatgtaggaagtgggtagctatttttcccactccatgtattagagttttacaaaaaggcttacttttgagacaactgttgcattttggggtactaataaatgattgccgatgagttaaa

SEQ ID NO: 145894 - DNA, 3252 bp, Homo sapiens; identical to SEQ ID NO: 118970

SEQ ID NO: 145895 - DNA, 1289 bp, Homo sapiens
gctacctaatcgcttgcttacttgtctctttcctctaatagactgtgagggctgtggtgacataaaccaagtgtaacctgtgtaccatttgattcccagcacctggcatagtgcctgaaatgtagtaggtatttattgatacttagatccatagatatgtgaaggacttattcctatgtcgaacacataatactcaataaatgatggtagcttttatcgattaccgccatatacaacagctgcaactatgattctatccattttttttactaactctctaagaagcaatgagatcaaaagctgggttatagtgatgtgaagagcaacttcaaggagaggaattggagaccaagcaaagatgaatttgctaaaatggttgactgaaaaaataccttcattgaaaaggtggtagtcagagaatcagtaaagtcaaaggaaggtatttgtcaatgatgaaggaatactggacatgtacatgggttgaagaagcgagtccaacctgaagatacaggtgtggagttggatcagttctccaagcaggaggattgatcttgcacctgaggaaagaaggcatcttacataataaggggaaaatcgaagggatggggttgctggaatatgtgcaggggtctctactacaaggatgggtcatgtttgtgtccgtgacagcgtttttcttttcgctcctctttctgggcatgttcctctctggcatggtggctcaaattgatgctaactggaacttcctggattttgcctaccattttacagtatttgtcttctattttggagccttttttattggaagcagcagccacatccctgcatgatttgcattgaaatacaaccataaccgggcagccactcctgagggataaccagtataacataaacgtagcagcctcaatttttgccttttatgacgacagctagttatggttgcagtttggggtctgggctttacggaaggatgggcgaccgtaaacactccttaggaaactgggcagtcgtatgttagttttcacttgtctaactttatatgtctgatcaatttggataccattttgtccagatgcaaaaacattccaaaagtaatgtgtttagtagagagagactctaagctcaagttctggtttatttcatggatggaatgttaattttattatgatattaaagaaatggccttttattttacatctctcccctttttccctttccccctttattttcctccttttctttctgaaagtttccttttatgtccataaaatacaaatatattgttcata

SEQ ID NO: 145896 - DNA, 1364 bp, Homo sapiens
cttctctcgccaggcgtcctcgtggaagtgacatcgtctttaaaccccctcgtggcaatccctgacgcaccgccgtgatgcccagggaagacagggcgacctggaagtccaactacttccttaagatcatccaactattggatgattatccgaaatgtttcattgtgggagcagacaatgtgggctccaagcagatgcagcagatccgcatgtcccttcgcgggaaggctgtggtgctgatgggcaagaacaccatgcatgcgcaagccccattcgagggcaccctgtaaaacaaccccagcctctggagaaaactgctgccttcatatccggggagaatttgggcttttgtttcacccagggaggaccctcactgagatcaagggacatgtttgctggcccaataaggttgccaactgctgcccgttgttggtgccaattgcccccatgtgaagtcactgtgccagccccagaacactggtctcggggcccgagaagacttctttttttccagggctttaggtatcacccactaaaaatctcccagggggcacccattgaaaatcctgaagtgaatgtgccagctgaatcaagaactggagacaaaagtgggaagcccagcgaaagccacgctgctgaaacatgctcaaacatctcccccttctccctttggggctggtcatccagccaggtgttcgaccaatgccagcatctacaaaccctgaaagtgcttgatatcaccagaggaaactctgcattctcggcttcctgggagggtgtccgcaaatgttgcccagtgtctgtctgcaagattggttacccaactgttgcatcagtaccccattctatcatcaacgggtacaaacgagtcctggccttggtctgtggagacggattacaccttcccacttgctgaaaaggtcaaggcttttcttggctgatccatctgcctttgtggctgctgccccctgtgggttgttgcccccccagctgctcctgctgctgctgcagccccagctaaggttgaagccaaggaagagtcggaggagtcggacgaggatatgggatttgcggccgccgtcctgcccgggggcaccaagcccggggccctgcccccgctggctcccggcctcgccctgccgcgtgggccacgctgtgacccggaagcgttccggaagcggttccggagtcagccccggcaggatggcggcggacacgcagagttgcagaagttcactttaccgagcctctacttcttttctccaaagccctccggctgtgagccccgggccaacgccaagtcttccttaaactttgtattcagcaaatattctttgagcacctactatgagcagggactttga

SEQ ID NO: 145897 - DNA, 460 bp, Homo sapiens
gttgttcctcttctacttctccttcatcagaatattgcccttcctggggaacagaattccgatcaggagaaatgggctcaaagtaatcttctctatgaggagcatcctcttccttgtcaccagacactggcagaggcacaggatcatcttcatcatcatcaggtggagggggtcctggaggagttcttggtccccttggctgtggtcttggagggcttccattaaactgatcttctttctccccatcagctttgagttaggtctaaagatgatggaagtattctcatcatattccaggcttcccaacctatcgaaaacaggggcacttggtttgcttacattgttgaagaataagtctaattgaaatgtatggggagatgtctctccatatgctctattgtctggcagactgctatgggctcttactcctgtgggtatgactcggacttcattgatataa

SEQ ID NO: 145898 - DNA, 987 bp, Homo sapiens
atggcggtggactcggcgatggagctgttatttttagatacttttaaacacccgagcgctgagacggttagggattctaagtcacaggataagataggaggtcagcacaagatacagatcataaagaccttgctgataaaacgggttgcagtaaagaagccggctaaaacccaccaataccaagatggatatcaggaagaccaaggaagatggcagataggagacagggctgatgtgcagctcccccttggatggacagaacagcgtgtgaagactcacaccatggacacttgctccaggaaccactgcagaagtgaaccaggaagaccaaaagaaatcacagatcctttgaaagaagtggcaggccgctgccaattcttcaagactggtgaaaaactcctaaatgccccacttaaaagatacagaatggtagaatggataaaaattcaccaaccaagtatctgctatcttcaagagactcatccaacacataaggaatcacataaacttaaggacattgcacttatcttaccaagctcttctgaaggttctatttctgaactggagcagctctccaattctctaccaaataaagaattgatgacctcaatctgtgactgtctgttggctacgctagctaactctgagagcagttacaactgtttactgacatgtgtcagaacaatgatgtttcttgcagagcatgattatggattatttcatttaaaaagttctttaaggaaaaacagtagtgctctgcatagtttactgaaacgagtggtcagcacatttagtaaggacacaggagagcttgcatcttcatttttagaatttatgagacaaattcttaactctgacacaattgccccagtgtgtgttgctgccctctctgtgtccatgtgttctcaccgttcagctcccacttggttccccccaaagggattaaagggtgctcggaccacaagcaggaacagctcagaagcataa

SEQ ID NO: 145899 - DNA, 2050 bp, Homo sapiens
ttacctaaagagaacagggtatggatcatccctctctggaggtccagtaattcgtgccatcgttgggaaagacttaacaggttgttggatcattgtatgaggggcagtttccattaaatgaaaaacttcttctaggaggttaataagcctttctatttccccttcacttatatttgaggattccaaaagatccatatccatagaagcttccacctcattttcatattctgggtttgttctctcaagtccagcatctgtgtcgtgatcaggttcactgtggttaggaagagatgaagtcttctctgctaaatggtcaccaagtcttttaatctctgacaagacttcatagaaatggcatttttggagaatagctgaaccagcagtaacaaccctcacagtctgatctaaaagtatgagttccagaagcttttgataaccacttttttcattctgcctacctcttaaaaaagcttccattccttctgtcatactaatgacactgtccaaagctttaaaagcatttaacttaagagaagatgatacgtgatcagcaaacagaagttcaaataatccactgatcactcctgcttgtagcagtcctgtaactccttgagccccacattctgctagtgaggacactaatttggtcccagctttgagctgtcgaacatttaaggcgataggttggcgaagcgctacttgtaaatttaaagcttgcatggtccagtctaccaactggccaagggagtcttgttttgtgtttttcaattgcaaatagcttaacccttttattattaaacttggaatttcttctaaagctgttacccattttgcacctctatcttctctatacaaatctaagagttctgttaacttcactgaggcttcgattgcccctgaattttctttatctggaccttgatccttcattctactgatttcaatttcaaaagtagtcttgtatggacaactgaagtataagagtggtacaagctccctgtcatatggatcatatgtcataggaggaactgaagctaagtcttcagcagtgtattcaacatcaaagtttggatacttaaatgtttcacgttccaagtcagcaattccatcttcatcactggaaatttgttcataaccatcatccccttcaccttcttcatcctcttcaccttcttcctcttcatcttcctcttcctcctcaggaatactgtctactgttcgtcgatcatcctcatcctcatcctcttcttcctctacatccacatcatcttcatcttcttctccttcttcttgttgttcctcttctacttctccttcatcagaatattgcccttcctggggaacagaattccgatcaggagaaatgggctcaaagtaatcttctctatgaggagcatcctcttccttgtcaccagacactggcagaggcacaggatcatcttcatcatcatcaggtggagggggtcctgggaggagttcttggtccccttggctgtggtcttggagggcttccattaaactgatcttctttctccccatcagcatgttttgggattccttttcaaacttgggttgtgggctgggggagggtgggtggcggtgggagggtggtggtggtgggagagtctctgtcatgactttatcactctacccactggatccatatattgccagtgtcagacagttataccagcctcttagcaccagaccatcagtattcacctttgagttaggtctaaagatgatggaagtattctcatcatattccaggcttcccaacctatcgaaaacaggggcacttggtttgccttacattgttgaagaataagtctaattgaaatgtatggggagatgtctctccatatgctctattgtctggcagactgctatgggctcttactcctgggggtatgactcggacttcattgatataaaccacacatggaaaacgaaccacatctatatgagaactttgctcagcgctcgggtgtttaaaagtatctaaaaataacagctccatcgccgagtccaccgccatgttttccgcggg

SEQ ID NO: 145900 - DNA, 1574 bp, Homo sapiens
gtgcgtgggtccggctttcggtgactagacggtccgcaggggacatcccgtccttggggcctccccagtctccctccccctcgcgccggggcaggtctctcccagggcttcggctcgagcctgcgacctgcacggacacccccctcctcaggatctaaaatgtccactgaggcacaaagagttgatgacagtccaagcactagggcacgagagttccgatggagatcaacgtgaaagtgttcagcaagaaccagaaagagaacaagttcagcccaagaaaaaggagggaaaaatatccagcaaaaccgctgctaaattgtcaactagtgctaaaagaattcagaaggaacttgcagaaatcacattggaccctcctcccaacttgtaagttgctggacccaaaggagacaacatttatgaatggaggtcaactatattgggacccccaggatctgtctatgaaggaggggtgttctttcttgacattaccttttcaccagactatccgtttaaaccccctaagggttaccttccgaacaagaatctatcactgtaatattaacatccaaggtgtgatctgtctggacatcttaaaggacaactggagtccggctttaactatttctaaagttctcctctccatctgctcacttcttacagattgcaaccctgctgaccctctggtgggcagcatcgccacacagtacatgaccaacagagcagagcatgaccggatgggccagacagtgggaccaagcggtacgcaacataggggcctgctgcctgccgccccggggaacctgtgcaaggcacattcaccaagtgcatcgggtagccctgcccacccctccaggacctcggttctttattttcctatttttatttaaatttgggaaccattttgtggatgggtattgttgttccatctttcccatcccagttcttccttgccccccttcctctctcccacgctctcttttatctctcattttaattcccttggttgatttctgttaacttgaaagatttgggatttttttcccacctcatcataagatgggaactttttgttttcaagtgcaaacaaatgttggagctgtaaatagtaagagctttcttgacaaagctttgtaattactgtggtgttttgttttttttgttgttgttaatttgattttgattttttttttcttttatgtgatctttgggaaaacacattccagaattaataactcgtttctacttaaatgtagtgcttacgggttaatttttttgtactgaaagtctttattggtgggtgcatgcctactgggaacaagttttttgtacaaaagcttcaactaaaaatccctgtgcattactgagactctgtttatcactaggccttctgtccctcccgcaggaaggactgttgggattgaacaaaataatatgtattttggatttacttaaagtgcttgtaaatttcttagggggacctgcccacttttggactgtggggatccagttggatgtacacttggtatttatttaaaggcactccaataaatcactgatggctgataactgcaaaa

SEQ ID NO: 145901 - DNA, 1379 bp, Homo sapiens
ggaaattgtttttacttacatatgaagaattctaatcttcaaaaaattttagaactcagtcagaacttgagaacttctttcagtaggtgctgtgattcaataaccagaattctgctttactttatagttacacaagtatttctgtcattttcctactaaattacgtgaagggggttgtctgcttatgagctgcaccaccgagcagcatgcctatcagtgagaaggtgcctgacaattctcagttgaaatgtcctgaccaagttcccccagaaatttgtgagtattcaactgtattaaaactaaatatattgtttttaatgacaaatagtcactatttagtaaaatgattactgtgctaataaatagaacaagtcctttagcccaaaattaaatggccacagattgacatatgcataaagcttatcaactatcacataacacattttaacaaaaatcaagaagactaatagatgatctcttcttctttttcttttgtgagacagggtcttgctctgtcacccaggctggagtacagtggcacaatcatggttcactgcagcctccacctcctgggtccaaatgatcctccaacctcagcctcccaggtagctggggtctcagtcgcatgccaccattcccgcttcgtgtgcgcgcgtgtgtgtgtgtgtgtgtgtgtgtgtgtgtgtgtgtgtgtagagtctggtctcaaactcctgggctcaagcaattctccctctttggcctcccaaaatgctaggattataggcatgagctaaatcgtaccaaagaaattatattttaaaagtaaagtcaaaggtagaatttaagaacaaaggaattctatttctatacttactagtcccaggtagacaaacaacacggccttcctcagcctctacccgagtcgtttcagaagagtgtgagccatgagaaatcagagctgttattttctggttgaaactggacactttaggctactgttttcatttgctttcaaatgattcagagaagaaagtacttatgggaaagagaaagaaactgcaaaaggtgggcaaatgctagccactggttgatgtgaatgaagaatatgtagatgtccattgttttgccttttaattttctgtaggcaagggaaagataggaaggagggaaggtgcaggcatttcttatcaattcatacctgactaggatcccctgtaggtaacttaaagtactttttctggaggttccagtccttttacttcatatgttttattccatcattcgtggaatcgccaccccctcaaaataaacctgtaaatgatcatggtaaaacatttcatcatcaatatcatcccttaataaacttaagaaccaataccgcaggcgaattccacctc

SEQ ID NO: 145902 - DNA, 727 bp, Homo sapiens
aacaccgaggaccagcgcaacgaggagaaggcgcagcgtgaggccaacaaaaagatcgagaagcagctgcagaaggacaagcaggtctaccgggccacgcaccgcctgctgctgctgggtgctggagaatctggtaaaagcaccattgtgaagcagatgaggatcctgcatgttaatgggtttaatggagatgagaaggcaaccaaagtgcaggacatcaaaaacaacctgaaagaggcgattgaaaccattgtggccgccatgagcaacctggtgccccccgtggagctggccaaccccgagaaccagttcagagtggaccacattctgagtgtgatgaacgtgcctgactttgacttccctcccgaattctatgagcatgccaaggctctgtgggaggatgaaggagtgcgtgcctgctacgaacgctccaacgagtaccagctgattgactgtgcccagtacttcctggacaagatcgacgtgatcaagcaggctgactatgtgccgagcgatcaggacctgcttcgcttgccgtgtcctgactttctggaatcttttgagaccaagttccaggtgggacaaaagtcaacttccacattgtttgacgtggggtgggccagcgcgatgaacgccgcaagtggatccagtgcttcaacgatgtgactgccatcatcttcgtggtggccagcagcagctacaacatggtcatccgggaagacaacca

SEQ ID NO: 145903 - DNA, 1641 bp, Homo sapiens
gccggttagaagctctgctccccggcggggacactcagtcgcgtcggcaccgcggagcgggctgcgtcaggtggctggccggcgcggcgcggcgctcccctgctctctggctccgggctgcggcgcggcggctggagcgagcccctgtcccggcgcggggcggcggcgggcggccggcgggcgctgccttgcgtgtgagtgcacctcactcacatgtgctggagaatctggtaaaagcaccattgtgaagcagatgaggatcctgcatgttaatgggtttaatggagagggcggcgaagaggacccgcaggctgcaaggagcaacagcgatggtgagaaggcaaccaaagtgcaggacatcaaaaacaacctgaaagaggcgattgaaaccattgtggccgccatgagcaacctggtgccccccgtggagctggccaaccccgagaaccagttcagagtggactacattctgagtgtgatgaacgtgcctgactttgacttccctcccgaattctatgagcatgccaaggctctgtgggaggatgaaggagtgcgtgcctgctacgaacgctccaacgagtaccagctgattgactgtgcccagtacttcctggacaagatcgacgtgatcaagcaggctgactatgtgccgagcgatcaggacctgcttcgctgccgtgtcctgacttctggaatctttgagaccaagttccaggtggacaaagtcaacttccacatgtttgacgtgggtggccagcgcgatgaacgccgcaagtggatccagtgcttcaacgatgtgactgccatcatcttcgtggtggccagcagcagctacaacatggtcatccgggaggacaaccagaccaaccgcctgcaggaggctctgaacctcttcaagagcatctggaacaacagatggctgcgcagccatctctgtgatcctgttcctcaacaagcaaagatctgctcgctgagaaagtccttgctgggaaatcgaagattgaggaactactttccagaaatttgctcggctacactactcctgagggatgctactcccgagccccggagaggacccaagcgtgaacccgggccaagtaacttcattcggagatgagtttctgaggatcagcactgccagtggagatgggggtcactactgctaccctcatttcacctgcgctgtggacactgagaacatccgccgtgtgttcaacgactgccgtgacatcattcagcgcatgcaccttcgtcagtacgagctgctctaagaagggaacccccaaatttaattaaagccttaagcacaattaattaaaagtgaaacgtaattgtacaagcagttaatcacccaccatagggcatgattaacaaagcaacctttcccttcccccgagtgattttgcgaaacccccttttcccttcagcttggtttagatgttccaaatttagaaagcttaaggcggcctacagaaaaaggaaaaaaggccacaaaagttccctctcactttcagtaaaaataaataaaacagcagcagcaaacaaataaaatgaaataaaagaaacaaatgaaataaatattgtgttgtgcagcattaaaaaaaatcaaaataaaaattaaatgtgagcaaagaaaaaaaa

SEQ ID NO: 145904 - DNA, 2008 bp, Homo sapiens
ctcctgctctggtccgcctcggcccggcggcggccatcagccccctcggcctcggctcgaggggcggggagctgcgcgcgcccctcggtccgaccgacaccctccccttcccgcccgtccgcgcgccccgcggcccgcggcccgcagtccgccccgcgcgctccttgccgaggagccgagcccgcgcccgggcccgcccgcccggcgctgccccggccctcccggcccgcgtgaggccggccgcgcccgccgccgccgcagcccggccgcgccccgccgccgccgccgccgcgcatgggctgcctcgggaacagtaagaccgaggaccagcgcaacgaggagaaggcgcagcgtgaggccaacaaaaagatcgagaagcagctgcagaaggacaagcaggtctaccgggccacgcaccgcctgctgctgctgggtgctggagaatctggtaaaagcaccattgtgaagcagatgaggatcctgcatgttaatgggtttaatggagagggcggcgaagaggacccgcaggctgcaaggagcaacagcgatggcagtgagaaggcaaccaaagtgcaggacatcaaaaacaacctgaaagaggcgattgaaaccattgtggccgccatgagcaacctggtgccccccgtggagctggccaaccccgagaaccagttcagagtggactacatcctgagtgtgatgaacgtgcctgactttgacttccctcccgaattctatgagcatgccaaggttctgtgggaggatgaaggagtgcgtgcctgctacgtaacgctccaacgtagtaccagctgattgactgtgcccagtactttctgggacaaagatcgacgtgatcaagcaggctgacttatgtgccgagcgatcaggacctgcttcgcttgcccgtgtcctgacttcttggaatcttttgagaccaagttccaggtggacaaagtcaactttccacatgttttgacgtgggtggccagccgcgatgaacgccgcaagtggatccagtgcttcaaacgatgtgactggccatcatcttcgtggttggcagcagcagctacaacattggtcatccgggaggacacgggacacaacggccttgcaggaaggctctgaacttctccaaaaggcatctgggacaacagatgggctgcggcaccatctcttgtgatcctgttcctcacaaagcaaagatcctgctcgcttgagaaagtcccctggcgggaaattcgaagaattaaggactactttccagaaatttgctcggctacactactcctgagggatgctactcgcgaaggcccggagaaggaccccacggcgtgtaccggggccaagttactccattcgaagatgagtttctgagatcaagcaactgcccagtggaagatgggcgtcactactgctaccctcattttcacctgcgctgtggacactgagaacattccgccgtgtgttcaacggacttgccgtggacattcatttcagcggcatgcacctttcgttcagttacggagctggttttaaggaaggggaaccccccaaatttaatttaaaggcttaaagcacaatttaattaaaagtgaaacgttaattgttacaagcagttaattcacccaccctaggggcatgattaacaaaacaaaccttttcccttccccggagtgattttgcgaaaccccccttttcccttcagcttgctttagatgttccaaattttagaaaagcttaaggcggcctacagaaaaagggaaaaaaggccacaaaagttccctctcactttcagtgaaaataaataaaacaggcagcagcaaaccaataaaatggaattacaggaaacaaatggaataaatattggtgttgttgcagcattaaaaaaaaatcaaaaataaaaattaaatgtgagcaaagaaaaaaaaaaaaaaaaaaagggcggccgctctagagtatccctcgaggggcccaagcttacgcgtacccagctttcttgtacaaagtg

SEQ ID NO: 145905 - DNA, 956 bp, Homo sapiens
  misc_feature (1)...(956): n = a,t,c or g
gatataaatgttccacagcatggaacattttataaactgcttgtgttacttaatgctgtatcatgaggtcttcctacaattaagaaagtttctcctacctcaatttctgaaatatttttctttttattttctgctctttctttccctgacttttcttcctctaattttctcttaaatcttgaagtttccttggattgacatttttctctactcattcaacctagtctttttaatttttgagacaagacctcacttcatactgtcgcccaggctggagtgcagtggcatgacctcagctcattgcaacctctgcctcccatgctcaagtgatccacccacctcagcctcctgagtagctgggactacaggtacacagcaccatgcctggctaatttaactttttggagagagggagcttcaccatgttacccaggctggtctcaaactcctcagctcaagtaatcctctcgccacagcctcccaaagtgctgggattacaggcatgagccacggtgcccagccagaaataattcctacttcaagaacaagccatgtccaagtaagccctgcttggtatctcggcaccctcataccacccccttcattcatccataagataagaacactcccctaagtctggtccagactatcctttttactgtctttgagaacagaagactacaggaaattcaagtctcaaatgactgagatcccttttagcaaattatggtaatcctgtggaggagactactgatgtccttcttataatcatcactaccagctaacatgtaagaacttttctggtaacnnnnnnnnnnnnnnnnnnnnnnnggattctcaccacccacagttaactgtttaatattctaaactgtaaaacagataaaaatgaagttttctagaaaaaactcatgaaagtggccgcaattacatccgtcatagaacctaaaacccat

SEQ ID NO: 145906 - DNA, 464 bp, Homo sapiens
  misc_feature (1)...(464): n = a,t,c or g
acaattttaaccattttattatttatttgttaattattattattattttttgagatggaatctcactctgtcactcaggctggagtgcagtggcaccatcttggctcattgcaacctctgcctcccaggttcaagtgatcctcccaccccagcctcctgagtagctgggcccacaggcatacacaaccatgcctggctaattntttgtatttttagtagagacgaggtttcctcatgttgcccaggttggtcttgaactcctgagttcaggctatgcacccgcctcagcttcccaaagtgctgggattacaggcttgagccactgcgcctggccttctttaactgatttaaagtgtccagtttggctgggagcatttctaaataaataaataaatgaagtgtacaggtcagtggcattaagtaccttcacatttttgtgcaaccctgttttcacttgacctata

SEQ ID NO: 145907 - DNA, 671 bp, Homo sapiens
tcttcaccagcatccggagaaggactatgatgagcctgtgctgacgtacatcacgacgaagatctcaaagtcagtggtggctcgctttgatgctgcagaagttatcactcagagagagctggtctccaggcaggtgagcaacgaccttacggagcaagcagccacatttgggctcatcctggacgacgtgtccttgacatatctgacctttggaaaggagttcacagaagcagtggaagccaaacaggtggctcagcaggaagcagagagggccagatttgtgaaggaaaaggctgagcagcagaaaaaggctgagcagcagaaaaaggttgagcagcagaaaaaggcagccgtgatctctgctgagggcgactccaaggcaaccgagctgattgcaaactcactggcccaccgcgggggaccgccctgatggagctgtgcaagttggaagccgcggaggctctcggaacatgacctacctgccggcggggcagtccgctcctccggctgccccatgagggcccaccctgcctgcacctccgcaggctgactgggccacagccccaatgattcttaacactgccttacccccctaccccagaaatcactgaaatttcataattggcttaaagtgaaggaaataaaagtaaaatcacttcagaactcttaaa

SEQ ID NO: 145908 - DNA, 1021 bp, Homo sapiens
  misc_feature (1)...(1021): n = a,t,c or g
atagactaattagagatctgaagtgattttacctttatttccttcactttaagccaatcatgaaatttcagagtggaagcaggtgtgagaggtgttcagcagaaggaaacatgtgctttcaaagtgctagagtccattggcaagttgggccgtggccttatctgttgcaggaggcgcggagaactctgccttatataatgtggatgctgggcacagagctgtcatctttgaccngattccaggacaaaaatgacaggacattgtggtaggggaagggactcattttcgtcatcccggtgggtacagaaaccccaattatctaatgactgccgttctcgaccacgtaactgttgccagtcaatcactggtagcaaaagatttacagaatgtccaacatcacactgcggcatccctcttccgggcctgttcgccagcccagctttcctcgcatcttcaccagcatcggagaggacttatgatgagcgtgtgcttgccgtcccatcacaactggagaacctcaagtcagtggtggctccgtttgatgctgggagaactaatcacccagaggagagctggtctccaggcaggttgagcgacgacctttacagagcgagccggccacctttgggctcatcctggatgacgtgtccttgacacatctgaccttcgggaagttggctcacagaagcggtgggaagccaaacaggtggctcagcaaggtaagcagagaagggccagatttgttggttggaaaaggctgagcaacagaaaaaggcggccatcatctctgctgagggcgactccaaggcagctgagctgattgccaactcactggccactgcaggggatggcctgatcgagctgcgcaagctggaagctgcagaggacatcgcgtaccagctctcacgctctcggaacatcacctacctgccagcggggcagtccgtgctcctccagctgccccagtgagggcccaccctgcctgcacctncgcgggctgactgggccacagccccgatga

SEQ ID NO: 145909 - DNA, 1606 bp, Homo sapiens
  misc_feature (1)...(1606): n = a,t,c or g
nnnnnnnnnnnnnnnnnnnnnnnnnnnnnnnnnnnnnnnnnnnnnnnnnnnnnnnnnnnnnnnnnnnnnnnnnnnnnnnnnnnnnnnnnnnnnnnnnnnnnnnnnnnatagagacagggtctcaccatgtaggccagattagtcttgaactcctgggctcaagcaatccgcccatcttggcctcccaaagtgctgggattataggtgtgagccaccgcgcccggcaacccagaagtggttttgacagcaccagcgctttctgtgtccacaatctagtgagtagagggcacaaaacctgacaccacggaggcagacaggcaggggctctgccggggaagggtgttggagtcccaaaggaggcgtctgagtcaccttcgcaacctgggaagccttcttgcataagatgcctgagcagtgccttgaatgaccaaggggagatccgcatctgcaaaggaagggcagggagggatagggattgggggtgggcatcctaggtcttggagactgtgtgggcaaatgtgcagagacataaagggactatggctgagggaaatcaagccctgccctctcaccaatagggctggcgctggtcccagctaacactccttttggagagcaaagctcctcacttctgagtagtgagattgattgcggatcactctccatgttgctgcctgctgtgtgtcatcccactgtcatcctccctttgtggctgttctgtggagcccctctccctcaatctgcactcacctctatgccccagccccattggcagctcctaatgcactcccggtaaaaaaaaaaaaacaaaaaccagatgttagtgatagtggtggtagttcttctctccacctccaaatcttgcccttgcctcctaataagacccctatgtggtttaacctcattttttttttttttttttttttttgagatggagtttcactctgtcacccaggctggagtgaagtggtgtgatggggcttcaccatgtgatggggcttcaccatgttggccaggctggtatcaaactcctgacctctagtgatccgcccgcctcagcctcccaaagtgctgggattaccggcatgaggcaccgtgcccagcctatcctccttctcttatcagctcccaactagaggtccacccaggacccagagacctggatttgaggctgctgggcggcagatggagcgatcagaagaccagggtaagggtgtggcagatactgccactaacacttctcagcctttccttctcctgccttttccaccccaccctgtgtttgtctactcccagccaggtgtacctttccaggggaagacctggccaacctgtccagctcaattatccagcagttctttgacctcactgagatctcgagtccattgttcatcacctcagctattgacctgtgtcattagccttatagagttcagcgccacggaaactccctgccctgttctttttctttttctttttttttttttttttgagacagagccttgctctgtcgcccaggctggagtgcagtggcgcgatctcggctcactgcaagctctgcctcccaggttcacaccattctcctgactcagcctcccgagtagcc

SEQ ID NO: 145910 - DNA, 429 bp, Homo sapiens
tgtccatcaagcccagtgtgaaggagttcacggaaacctcagctgtgtttgaggatgggaccatgtttgaggctatcgactctgtcatctttgcaacaggctatgattattcctaccccttccttgatgagaccatcatgaaaagcagaaacaatgaggttaccttgtttaaaggcatcttccccccactaatggagaagccaaccttggctgtgattggcttggttcagtcccttggagctgccatccccacagcagacctgcaagcctggtgggctgctaaagtatttgcaagtaggtgggccattctgtctttcattcattttatcaatgaacatttactgaacacctgctataaactcaagtggtaagcagctaactgtacttgctaatagagcaagtcctaaaatgtgcctttatgtgtagaaa

SEQ ID NO: 145911 - DNA, 1599 bp, Homo sapiens
  misc_feature (1)...(1599): n = a,t,c or g
atgagcaagagggttggcatcatcggagctggagtcagtggcttggctgccatatggtgctgtctggaggaggggctggagcccacttgctttgaaaggagcgatgatgttggaggcctgtggaaattctcagaccacacagaagaaggcagagccagcatttaccagtctgtattcacaaactcttccaaagaaatgatgtgctttccagacttcccttatccggatgattacccaaactatatacaccacagcaagctccaggaatatataaagacatatgctcaaaagaaggaacttttaagatacatanagtttgagaccctggtttccggtataaagaaatgtcccagcttcttagtcacgggccaatgggttgttgttactgaaaaggatgggaaacaggaatctactatttttgatgctgtaatgatttgttcaggacatcacgtataccccaatctgccaacggattcctttcctggcctggaccagtttcgaggcaactacctccatagccgggattataagaatccagaagccttcaaggggaagagggtcctcgtgattggtctggggaattcgggatctgacattgctgttgagctcagccgtctggctacacaggtcattatcagtaccagaagtgcttcctgggtcatgagtcgggtctgggatgatggctatccttgggatatgatgtatgttacccgctttgcatcctttctccggaatgtccttccttcattcatctctgactggttatatgtccagaagatgaacacgtggtttaagcatgagaactatggcctgatgcctttaaatggttccctgagaaaagagcctgtgttcaatgatgagctcccatcccgcatcctgtgtggcactctgtccatcaagcccagtgtgaaggagttcacggaaacctcagctgtgtttgaggatgggaccatgtttgaggctatcgactctgtcatctttgcaacaggctatgattattcctaccccttccttgatgagaccatcatgaaaagcagaaacaatgaggttaccttgtttaaaggcatcttccccccactaatggagaagccaaccttggctgtgattggcttggttcagtcccttggagctgccatccccacagcagacctgcaagcctggtgggctgctaaagtatttgcaaactcatgtaccctgccaaccacgaatgaaatgatggatgacactgatgagaaaatggggaaaaaactcaagtggtttggccagagccagactttgcagacagattacatcacatatgtggatgagctgggctctttcataggggccaagcctaacataccatggctcttcctgacagatccccgcctggccctggaggtgtactttggcccttgcagcccataccagtttcgactgatgggaccagggaagtgggatggggccagaaatgccatcctgacccagtggaaccggacagtgaagccaaccaggacaagagttgtcagtgaagttcagcgaccccatcccttttacaatttgcttaaaatgctttcattcccattactccttctggctgttacacttacattttattaa

SEQ ID NO: 145912 - DNA, 556 bp, Homo sapiens
ttgggatatgatgtatgttacccgctttgcatcctttctccggaatgtccttccttcattcatctctgactggttatatgtccagaagatgaacacgtggtttaagcatgagaactatggcctgatgcctttaaatgggtacttaaaaatggaaattttttttattcaaaaaaggggggcactcatttaatgaatttatttgtccatcaagcccagtgtgaaggagttcacggaaacctcagctgtgtttgaggatgggaccatgtttgaggctatcgactctgtcatctttgcaacaggctatgattattcctaccccttccttgatgagaccatcatgaaaagcagaaacaatgaggttaccttgtttaaaggcatcttccccccactaatggagaagccaaccttggctgtgattggcttggttcagtcccttggagctgccatccccacagcagacctgcaagcctggtgggctgctaaagtatttgcaagtaggtgggccattctgtctttcattcattttatcaatgaacatttactgaacacctgctat

SEQ ID NO: 145913 - DNA, 2714 bp, Homo sapiens
tcagaatttcatcttcatgttgaatttcccttttaacttccgttcatagacatatatgtgacttccaattcgaccctctggcaagtgagtgtggaagaaaacagcagttcttttataattgcttgaaattaggaaagcgcttatttcctcttccaaaatgctgaaggtgatcaagtgagtaggcaatgatgcatcatcatgaaactctctatgtaaccagtttaagggatttaggtaaaatacatctgcttcatcaagataatgactttttccagtcaggtctggcgggcactggagaaatctcatgggaagtgggcagtgaacatggctgtaataaggagtagagtggcaaggcatcattataaatattgaagctgaagatttattgggattgttgtaacaaactttttgaatatgactcatgacatcaagagtacctcgttgatgaactaaaccagtataaagggcgaggaacaaatttgataaaaacaggaaacttagagctggtttcttccatgttttcaggtgggttaatgagtatccacagaacaccatacagaatggtaaaactggataaataaacctgaattctttgtggctcaacatgctataaacaagcagtgtccacagcacagtcaccaaaagtatccggtatctctttggtgctagatagcagccatgaataaagaagggtaagtgagtacccaagataactggaaatccttgactgaagtaccagtgccatggatgagaaccataaaatgttccccagttctgcagcacgttaaatttcaaaaaattaaattgaaccagagtcccctggccccgttgaaggaaaaataaataaaaatgtgttagtgccaagtagtaatttttggcattaggggattgatacaattttgcccttaaatcagaattgaagtttaaaaaccaggccatagtttcccttaataaattttttttttttttttttttaagatggagtcttgccctttcgcccaggctggagtgcagtggtgcgatctcggctcactgcaagctctgcctcccgggttcacaccattctcctgcctcagcctcctgagtagctgggactacaggcgcccgccaccacacctggctaattttttgtatttttagtagacatgggttttcaccgtgttagccaggatggtctcgatctcctgacctcatgatccgcccgccttggcctcccaaagtgctgggattacaggcgtaagccaccatgcccagcctataatgtttttaaagatgatgggtaacataaaaatactatgtggtaataacttagaatactaggtctggaggaggagaacaggcctagcccatgtgaaagaataagcagtagctaatctatgtggtcttgaggtatagtataaacctggaaagttctctgaacctcttcagatactgagggttgcccaattaaaacaacaacaacaacaacaacaacaaaactttatcagatgtactgaatgacttcattctctgataaatttcaaagcttccagaacagaggatcaactattgtaactattgcccatttctggtccaggaaatacctttctgataaagagtgctcataaaacgcttgtgttgttttcattcattctatctagaagtgggcaaataccaaaacctttatcccagattaaggtcggataataagtgaacctgatgacctactttagaatgacaattcaaacagctatccctgaaaccagacaactacacgagttatgccttgaagcagatctttcaaagtgcaacgaaacattactcctgtttttcacttgaggagactaaattatggtcatatcttttccatgatactgattttttatttaacataaaccaaatactgactgaatcaaagactaaaaccccacaaaatttcatcctttaaaacaaaaagcaataaaatcccacccctaaatcaggcctcaaagttcaaagaaatgtttaaaaatcccccatatgggatctgacatgaatgtctattattgtcccccccaagtcttctcaaaaatcactttaaaatcttgctttgagaccctaagttttcttggaaataaaatacatttatagattgttttaaacctactgaattttactatttctgcttgctttcttcccatttaataaaatcaaaataaaaaattttgaccaaataaatatttattgaaaggtcctgccaccaaaaaagcttcaggtttttaaaaacatataatcaaacaacaatgttcttctgattaaaaaaaaaaaaagtacttatttaaatctgaggatccttatatgttcaatagaggattgtggtgatcctttgtattttaaaaatattatttgtggggcctactttacgtatctcctgtataaaaaccagctttcactccacatgaatagagaagatgctgaatacgcaggaatctgattatccctcacgtgattattaccggcccctctggggcaatctgcttgctcactcattctgccaccattctcttcattcaagtgtttaacagcacatttatcaaaggcagctctccgatgcaatgtttaacgagtgtcttctcaggagtgtatccgtgtcatttattcttctcatccaggtaagcacgaacttcacagtactactaaaaatcttcttcaaattatattgataatggacttatttctgaccgtttttggatttg

SEQ ID NO: 145914 - DNA, 23287 bp, Homo sapiens
ttaataaaatgtaagtgtaacagccagaaggagtaatgggaatgaaagcattttaagcaaattgtaaaagggatggggtcgctgaacttcactgacaactcttgtcctggttggcttcactgtccggttccactgggtcaggatggcatttctggccccatcccacttccctggtcccatcagtcgaaactggtatgggctgcaagggccaaagtacacctccagggccaggcggggatctgtcaggaagagccatggtatgttaggcttggcccctatgaaagagcccagctcatccacatatgtgatgtaatctgtctgcaaagtctggctctggccaaacatgaagaaagaagagaacatactggaataagtgttacagttgcaaataggagcattaatttcttattttttctttcagaaaaataacattttagatagcacctccatttatgccctccttttccacaaaattgaatttattgttttttctttagctaagtgagctgcttttctcctccttcctaatctctatttgagtttgatgtaatgttggacttttgcctttgaccatgtggcctggagtaaactgaccctctggtttaaggagactaattaacttagtttactcattaacacataattattctttataagacattgcttagaatctgccccaatgttagactttcagattggtttgtttaaaagtgagatcatggatggttttaatactcctgtaatctaataatataaattgtttcatactaaagaaaacaaaaaatattttactgcaaaatatacacttcgttgacagattttgagatggctattcagagggcctgcagacagaaacagccctgaaaagctgccttttgtgaaggagatttttatctgtggagaaaataaaaggaagtaaacagaagatggaaactaggctttctcggaggcctcccttgcccactctaggaaagattaacttgcaggagagagagactgagagtcaggcactgctgaatgtctgacagagaaactttcatcataggctactgactctgagagttgctttctgtgaggtttcgtctgcagaacaggacagcctttgtttgacatactttcctccctttagtctcccatgtcctgtgatgttacctctgaaatcacctttaaaaaaattgtgacagtgaaaaaaatgtgaaaaaaaaatgtaattactccatctttcttctaatctccaagctgccattattcattcctgagcataggccaagctaactatgggagacatttagtttacagtttaactttgaaacaaagatggtaacagccctttcccaaaacaaaccccctccttgcttggagatcagactgcttttgtagaactaacaaattagccacaagataagaaattagggctcaggagtcatgcagtcagaagtccccaattgctcctatggataacatcaccattataaaacctaccattggtgctcaagatatttttcagaccctgcattctgatgggccggctggcactacccagactggtaaactggttcatcttgtcatgtggtctcctcccaggaagaccagaagacaagctttgactccctatggtttcatccctgacccaaccaatcagcattccccattccctagcccctgactaccaaactatccttaaaaaaatctagcctctgaattttcatggaggctgatttgagtagtaataaactcctgtccttccgtttagctggccagaccccaaaagagggttcttggacctctcacaagaaagaattcagggccagtccataaagtgaaagcgagtttattaagaaagtaaaggaataaaagaatggctacttcataggcagagcagtggcatgggctgctcaactgagtatacttatagttacttcttgattacatgttaaacaaggggtggattattcataagttttacaggaaagaaatgggcagttcccagaactgagggttcctcccctttttagactatatagggtaacttcctgatattgccatggcatttgtaaactatcacagtgctggtgggagtgtcttctagcatgctaattcattataatcagcatataatgagtagtgaggacgaccagaggtcacttttttcatcatcttggttttggtgggttttggccagcttcgttactgaatcctgttttatcagccaggtctttgtgacctgaatcttgtgctggcctcttttctcatcctgtgactaagaatgcctaacctcctgggaatgcagcctagtgggtctcagcctcattttacccagcccctattcaagatggagtcactctggttcaaatgcctctgacagctgtgtgtttattaaactctctctattggaaaaacctgctgttctcagggcatcagcttttctgggcagtgagcaagatgaatctgttgggtgattacacctcccccaaagcccagagaaacttggtctaatctgtgttctttggacttattaatttcctctgaaaaatcatttacttttacacttccatctcccctaaccccagtgaagagaatatttaaacatgaatgatctggccctcctttgagttcatgttttgtaaggctctcatgcacacatgtgcacgtaataaatctgtcacgttttctcttgttaacctgtcttttgttataggggtgttggccattaccttttatgacagagagaaaagagatcacctcctttccgcctctatagttcttttagttggaatatggtgtaatttgctttttgaaactctgaagagcagcttatcatttaagcaataagatgaacattttaacctctctatttcctcatttttatttctactgggctctaaaggaaagggtatcaagctgcatgaattgttagcacataaaagtgcccaactctgcaagttgttcgtcaactggctgaagttgtgcaggagaggttttgttgaatctgagggttccatttcttttcttctctaggccctgaatgggtgactacattgtggcattcaatgtgagagaagaaaaatagctcagagtagtttgcactatgtgaggtatgcaaaatttatcaagctgagagagccacgtgtatgggacttgtcatgctgccctctaccaagcctggcggcaattgttaaaaggcatttttattcctgactagctgtctcactcatcatcttcatgttcgtagaatttgtgatacgaagaacagtatatagccaatcaatagcttatataattttaatgtaagttcttggtaaacaacttagaagttgactcttttgtatttcctttaaaaaacctacttgtaactgctgccaacggagtgcatattcagggcaatttgactctgtgctcctgggttgcagtcctcaaacttggcccaaatcaattctctttttatattaaatttgcctcagtgttttcctttaggttgacatatcaatgcaatgttaaatgcttgaaaaagtaaagaaacttcctatatcagttgactttggaagaactgaggggttaggggcattgagccctcttgcagtcaaaaatccatgtataacttttgactccccaaatacttaactcttaataacctgttgactggaagccttaccaataatgcaaacagttgattaacacatattttatatgtcatacgtattaaatactattcttacaataaagtaatatggagaaaagaaaatgttattaagaaaattatgaggaagaaaaaatatgtttactattcattaagtggaagtggtttatcataaatgtcttcatccttatcatctttatgttgagtaggctgaggagtaggaggagaaacagaaggggttggtcttgctgtttcaggcctggcagaagcggaagagatggaggaggtagaattgggggcaggagaggcaggcccattggtgtaattatggaaatatattataatttctgtctgactttgcttttttatttctctaaaaattttctatatagtagtaatccttcctctatcatttgctttagtttcagtgcctgtatcatagaagggtccatgttatataaaagaagtcaaaagaagtcttaaataactggaacctgtctgccagatgatctaatgtcaatttatttctggcatggctttttctatgtcttcgttctcatctggcactgctttggaaggactcatctccatcaagtcatcttttagttcctctagtgtggaattaaaagtgtctattagtggtgtctattagctgttgaatttctccatgatccatatcttgaaacccttcaccctcacctttttattttgccatatccataatctttttcatgatttctgtgactggtctgttgtaaatcctctgaagtcatatataacatctggacatagttttctccaggagaaatatgttgttttaggattgatggctttcatggctttttctataacaattagggcatcttcaatggtataatccttccagactttcatgatgttctctctgttgggttatcttccacagcattgactatcttttccatagagtatggtatgtgatgagccttaaaggtccttatgactccctgatataaaggctgaattagaatgttgtgtttgggggaaattagactacttcgatgccttccatgttgaactcatggggttctgggtggtcaggggcattgtctatatcaaaaaaactttaaaaggcagtctcttattggcaaggactttctgacttcagggacaaagcattgacagagctaatccagaaaaagggtcttgtataaccaaaagataggaagctgatattcatcttttcccttcaaggtttgagggggtagcttcataggtaggggccatcctgatcataaatctgactgcatttgcacaaaacagtagttagcttattctttcctgcctaatcttggtgctcacttctgctccttattaataaatggcctttgtggctttttttttttttttttttccagaatagggcacttttgtctgtgttaaaaatctgttcaggcagaaatcctttctcctcaatgattttcataatgacatctgggaattcatctccttcttcttggttggcagcatgcgtgtctcctgttatcttgacatttttgaagccaaactctttctgatgtaatcaaatcatcctttgctggcattaacttttccagctctagatccttcaccttccttttgctttgtcatataataacttcactttttctcaaattatattagagtctatatgtatacttccttatagcaatcctgcacccacataaaaagctgcattttcaatccaaaataaaaagatattttacaaaaagtgcaagatttcatgcctgctggcatagttgcactggattcatttatcttgaaatggtgggcaactatagctgcagacctcaatgtatagtatacattaagcaactcaatttttttattataatgtcataacttttctctgcttcttgggagcacttccaacatcattaatgacacttcatatggagcccatggtgttattaaaggcttaaggtattgcactaaacatgataaaaatatgtgagaaccttgagagatcactttttactgtgaggcagaatttactggagatatgaactgctcaggtgaaaatgactaatgtcacacagcattttaagtagatactcaaaacacttgagctcactgcaataccaacaagaggtgactgcaaaattattatactagcacattatgtgctatattttatgcagttatgacaatattgcatctttatgtttgtttacatttctgttgactatgaatggtgccatgtatagtctaagagtttgtatgcatttagttttgataaattttaatttttaataatagatttgtgtatattttatggtagtaaatgataaaatagactagtatctacaaatattttatacatggcatctttttcttaattttttaaaatatttctaggctacacaattcatctttgaggttttttttttttgagacggagtctcactctgttgcccagactggagtgcagtggcacaatctgggctcactgcaagtccgcctcctgggttcacgccattctcctgcctcagcgtcccgagtagctgggactacaggcacccgccaccacgcccggctaattttggtgtatttttagtagagacggggtttcaccatgttagccaggatggtcttgatctcctgaactcatgatccacccgcctcggcctctcgaagtgctgggattacaggcgtgagccaccgcgcctggccttgagtttttaaattgctgcaaatctccaaaaaattgcattttttttttttttttttgtgagatggagtctcactctgtcacctaggctagagtgcagtggcgcgatcttggctcactgcaacctccacctccctgattcaagcaattcccctgcctcagcctcccgagtagctgggattacaggtgcacaccaccacactcgactaattttttttgtatttttagtagagacagggttttaccatgttggccagactggtctcgaactcctgacctcaggtaatccgcccgcctcagcctcacaaagtgctgggattacaggcgtgagccaccatgcccaatctgcattatgttaattgaaaaaatccatgtataagtggacccatataattcaaacctgtgttgttcaaaggtcaactgtagtcatttatagagttgtttcttaacctcagcactattgacattttgagccagataattgttttggtgaactgtgctctgcattgttggatggttagcagaatccctgttctctactcataagatgctgatagcatgccctctccactcacaatgaccaaaagtgtctccagattttgccatatgtcacctggagggcaaaattatccctgatagaaaacctctattcttgagttacacaagagaagtgtgatgactgtttactatctaaacattttttgattattgcaagtgttcagaaaatgtaaactctgactaatgacaatattaaagcatattaatgtttttctacacataaaggcacattttaggaacttgctctattagcaagtacagttagctgcttaccacttgagttttttccccattttctcatcagtgtcatccatcatttcattcgtggttggcagggtacatgagtctagaaaagaaatgaagagaaaaatattgaaaaacacaaatcagaaatatataatgacatatgatggaaatcatttggtttttataaactgtattcctgaaaacttttgtattaagaggagctggagatgtctttgatatctttagcaaaataccagttcatagaaacaaagatctgaaaagttaatgaacctttgggaattggaaaagctggcctgtagtgagatagtgacagcagagacatttgtagcttcaaatcactcagtctcttatttcggtaacattatagaggacctaatcctcaacatatgtgctcagtacacttcatgcatataatagcttaataatttcttccttttttttctgtatccttttcctaaaacttctctgaagaaagaatctggtaaaacagttccctttaaggtttctgccattttaaatgaggtaatggaaggaagcataggattttaaacatcttctgcaactatgcaaggtgttttaaggggcagcagacaagttttagctttttgtgaatttcactacatcaatgcaacttcttttaactggtgatggtagcttatttgcctttgtaacagtggaagaaagttactctaaaatttgcagtgcatgaatatttcccagtcatcgttagtgtcttatgtcaacctggtagtaccctatgattgatattggctggacaccctgctagaaagtaagaggccagaattttgttctgcttcgtttgttgttgtgtcctaagtgccaggttagagcctgacacatagtaggtgttcagtaagtatttgctgaataaataaatgataccatttgcttcatgtaaatttcttaggtttatgaactatatccagtcttctcataataccccaggctcttggcattgttgtgcctttcgaaggaaaaaggcaatagaagtattttgcagggagcacctttacaaaagatttcatgatggggtttatttaaatgatgatctttcatggtgtatttgaaatagaaatttatttatctacaaagttttagacaatatatatacatatattccatgattgtaatggtttgttaattaccaatagtgtaagtttttatggattagttatgttaggtaagttatacctatattggtcaatattttggagaatacctgaataaaagaacacttttcaataataatgataatattcagtatgactggagtaaattaatatatttgagacattgcctttctccatgtaatcctcatattcttgatttcctcacataagcatacttgtagcccctggagaccatgaggtctagagtagagggagagaagaagaagattgtcatgagaatcagagtggcctgactttgttattctgacagaagttgacaccagtgaggtttctggcacacctccaaccctcaccagggcccttccaatctttataatgtagcctgacattgcagttatcctctgctatttttttcttgcttaaaatcttgcgaagtccttaatccctatgagaagtttaagctctttaacgtggcttataaacctatatttcttgccactccctgcctctgctttatattcccttccaccaaaatgtttctgggtccttacacatttcatgctttccctcacctttatgacttcctgtatactgtttgctctgtgcaacagtccaactcccctcactagaacccccccaaatttcccctattatggcatcccccacaccccattttaagccttgagaggtcaaggaacatgtttgtcttgttctcattgtatccctagcacagtgctttgcatatagcaggtgttcagtaaatgttcattgataaaatgaatgaaagacagaatggcccacctacttgcaaatactttagcagcccaccaggcttgcaggtctgctgtggggatggcagctccaagggactgaaccaagccaatcacagccaaggttggcttctccattagtggggggaagatgcctttaaacaaggtaacctcattgtttctgcttttcatgatggtctcatcaaggaaggggtaggaataatcatagcctgttgcaaagatgacagagtcgatagcctcaaacatggtcccatcctcaaacacagctgaggtttccgtgaactccttcacactgggcttgatggacagagtgccacacaggatgcgggatgggagctcatcattgaacacaggctcttttctcagggaactacagcaatgagaggcaaacacccttgctgtaaatagctcatttccaagaaatacctgcaacagcccataacattgaaataacatcaagcacttaaacatcagcatgagtgccactgactctcttctctcatggcaattcctttcctaaatgagactaaaactaatttatagacatactaaagtggttaagaacgccaactctggaagcagatggcccaggttcataacctagctccatctcttactagttgttacttttctgtatttgtttctttatgtgtaaaatggggatgatgatggaatcttcctcataggttgttgtgaaaattaaatgatcaattatccttaaagcacttaaaacagttcctggcacatgcaagcactgttgttataagtgcactattatcataactttaacgtcttgtcttacatggagaaatcagacttgcagtggtgggaagttttattgccatgtttggttttctttcatcagctgtgtccacaaaaaagtgtaacaactttgatattgcattttagttgccaaaattctaggaataatatttttcaggacaatatatttcattttgatttaagtttcctttgagattccggaatttcctgcaagtatctcagacacaaagaaaccttgtaaatcctgaaatttgtctctatacttccacatcattttctgtttatctaatcctgcaacctcttcttttaccttacaaggtagcaaaacatagaccacaatgaaacctgtttttcctccccctttctccctccagaaacttagggtaattggaaccctttccaaaaggaagcttagttttcagaatgaatgaatttctaaaactatgttttaattgtctaaatggcaaggccaaaatataatttatagttactcttacaagataaaaaatcttaaccagctcaagctatgggacttactatattaaacataatttttaaaaacttttattttaggtttgggggtccatggtttgttatataagtaaattgtgtgtcacaggggtttggtgtatagataattttgtcgcctgggtaataagcatagtacctgataagtatttttttctgattctcttcctcctcccaccctctactgtcaagcaagccacagtgttaaacataattttaaatgcataaaatcaacatattttaaagggttatagcagcctgcaagacttggtagtataagtgctttggactgacagtttagctcctaaatctggcatttgctcttttgatttacagttcctcctttttcttaccatctttctctaaacacaatgaaactttttggctagcatgggccaggagataaaatttctcaattctttcttttcttaccaacttaaatattctttttttctattgatatgctgattcttctacctggaatgacttcctaattagtaaatgttgggccctgtctctataaagaagtaaataaatgaatctgactaatcttacaggccacgttagttgtgactctccattactttatgtgttccatgcctcctgatggttctgcaaaaatgtcaacatttcaggggtggaggaagtgtgcacttttgttttgagacttcctacttgctgagacatgttgattaacactattttgttatttgctcctttgaagcacattagaaaaattgagactaagaagaaccaatttttttaaagctttatcatttagaaagcaatttttatatttttatattattgaataccacaaccatcttgagaagcaagtattattattgatgtcttcatacacccataagcacggacaagatattcttccaaaaaccaatttgagtttgttcagtcctcaaagttctatgctatagcttgtagccaccacaaatgcatcatgcatgtcagggtgatttatctgcctgcgtcatctccatttcagatttttccataccctttctgtactggactaatttcaataagttttccaagccatacgtggtctctgggcatattccgtcacctgtgaaaccttgagtttaatgtttctaggctcaatgagacaacaaaagtaagttctagagagaataaattcattaaatgagtgccccccttttttgaataaaaaaaatttccatttttaagtacccatttaaaggcatcaggccatagttctcatgcttaaaccacgtgttcatcttctggacatataaccagtcagagatgaatgaaggaaggacattccggagaaaggatgcaaagcgggtaacatacatcatatcccaaggatagccatcatcccagacccgactcatgacccaggaagcacttctggtactgataatgacctggtggggaaaagcaacacagatttcagcattactctgtaagaaataagcaaacacaacacacttctttgggcacttccgtgcattttcctcaatatccaagtaggaacacttttaaaaggcgagtctaaataagttgtctagcagccataaaaaagaatgagttcatgtcctttgcagggacatggatgaagctggaaaccatcatcctcagcaaactaacacaggaacagaaaaccgaacactgcatgttctcactcataagcaggagttgaatcatgagaacacatggacacaggaaggggaacaacacacaccaaggcctgtcggggggatggagggctaggggagggagagcattaagacaaatacctaatgcatgtggggcttaaaatctagatgaagggttgataggtgcagcaaaccaccatggcatgtgcagacctatgcatgttctgtacatgtatcccagaacttaaaataaaaaaaattttttttaaagtctaaaatttaaactagtagagacaggattctttcactgcccctgagggctggtgtgtagttgttgaaaggattagaatcatcactctaggaacaacagggctctgtgttcaactgtgatggtttaatcttcacatactcatagactaagatggcaagtctggtagggaccagatgatccagtgagccccagtggttgtggctggtgatagtggactaggtgtgggaaaagtgtagctaaatctctagctgaaattaggctgacgagatgtcaaggatttaattctgttctctgtctctggttgccttttccagttctccctatacacataccccaaggacttctcctgagcaacccaaaccatggcaaccgcctcagccctgagatgagtctggctgcttatctattttaccgtctttgcaaaatagactttaactttgtgataactgaagggaatttttagtttaaaaaattaaggttttatttacatccatttaagaatttatttattgagaacctgttttcttaaaaatatgttgtttctttagggtctatcgatgatacatgatttagcttggagtcctctgggaagtcttccttgacctcatccaggctaagttagattctcttttccctgtgttgctattgccacacctaattctactggaagactcaccatctcctctggtgatagtctgtgtgtacctgtcaactccatctccatccattgactctttcttgaagtcaggaactagtctaacttatttatgcatttatttttagtttatcatagttctgacacatagtaagcatagtaagtgcccaatatttgttgagcatctgctgttgattgaattaatgttagtaaataccaagtcatgcatatctttcagaacttcagagtggtaaacacagtgctttttgcatgatacgttataataaatactgttaaataaataaagattaagcctgaccaggaactagtctatttggaggtgatcagaatataaaatgaaaacaagaaatacacacatacacactcatctgtacatacacgcactcatgcacttacttctggattcagtggaatgtacttccttactagcacgggccacattacctggcttcacatggaggatgtctcaagtcctccttgatttgaagggccacatagaagaggtggatctcttgtggtgtgacatagaagtaccatcctctgtgccttggctactgatttagtagcacagccctaccttaggtttatttcccaaaacctttacgtcatgtacctgtgtagccagacggctgagctcaacagcaatgtcagatcccgaattccccagaccaatcacgaggaccctcttccccttgaaggcttctggattcttataatcccggctatggaggtagttgcctcgaaactggtccaggcctaagtggaacatggcaagttgtttgaactgattttcagaaattatgaagatgttttctttgtgtctttttaaacctattatcagttgtaattaaaaaattccctagttgaagtgcatttatccatttagcattttttgacattaagccccctaaaacttacttttagttccttaaaaaatcttaaggcatgagaatgtatgtttcgataataataatggttaatatttattaagttaactctgtgggctagatcctctgataaatgctttacacgttttaactatttaatcttgataacatccctgcatggtgggctattgtccctattttaaaagaagaggaaattgagacaaagaagttaagtggtaaggaactagtggaatagtaagttgaggccaggtgttctgatcccatgctcataaacattaaatatgctgcccgttaacattaagagttttaatcttatattcctcctgaaccttcactctttaattttcctcggcctatggacatcatacctagacatggaaactctaatatctttgagtagattgtgttcctgtggcaaggaaggaaggaaaaatggaaggaagcctccatgtatattgtatttatttgaggtttgccactttcggatggtaatgaagtatgctgctatacacacacccatgtgtgtacccacacacaaatcactgagatttctaaagtttatttgcaaattgtggatgaagatgaaattagaaacctaggagtctcctataaataacataagtaaacgtgtctttctttaaaccatttggcagttggactctacttttttttaatgtaactgtgctcggagaccccgtgtgctgttagaacttatatttgagttactgtctgtaacacaggaacttgtgtttgtctgatctctggcttgcagtccttgattattttaacataaggacttatgaggctatttattactatatcctatcattaaacttaatttttttcttttgaaatctaagaataatcattatgtaatacctatagaaagatatgtttctaactcttgatgtttgcatataagtccctagattattatatattttccaaacttaccaggaaaggaatccgttggcagattggggtatacgtgatgtcctgaacaaatcattacagcatcaaaaatagtagattcctgtttcccatccttttcagtaacaacaacccattggcccgtgactaagaagctgggacatttctttataccggaaaccagggtctttaagaaaactagaaaatttatttttccatttataattctacatgtgaaagtttttttccttcttgccttgtttctgtggaggaaataattgttacgagctctcttggtcattcagaaatgtatagaaagatagtaaaattggagtcacagtgaatcttcagtgagtctttgaatctcacaagaaaaattactcactggagtacatttactttttgacatcaagttagttgatttaggggtaaatcacactgaatatttttgtgaatgatgtcatataacaaatctgtgttattttcttatggctaccctctactgacatggcttcctccttttctgacctcatcttccatctactcaataagtatgggaatatctcaaggtttgatcgttggcatctcttttgctctgcataaatactcttatcttagaaatatagcaactttacggccaggcgcggtggctcatgcctgtaatcccagcacttttgggaggccgaggtgggcagatcacctgaggccaggagttcacaagaccatcctggctaacacggtgaaacccccgtctctactaaaaaaaaaaaatacaaaaaaattagcttgggcgtggtggtggcgggcgcctgtagtcccagctactcgggaggctgaggctggagaatcacttgaacccaggaggcagaggttgcagtgagccgagatcattgcaccactgcactccagcctggggtgacagagcgagactccgtctcaaaaaaaaaaaaaaaaaattagcaagttttgtggtatgaatatacaaatacatctatccttggtctctcttctatccagtttagcttgacctttccatctggagggccacctaatacttcctcatatgtagcaggttttgattgacctacttaaatttcctttgaaactggcttctgactttcttatttctttgaatgatgacatgaaactcccagccacttatgcttcaaatccatgacttgttttccttgttatttctccatccttgcctcatgtttaaacagtatttatctcccaatctcacgctttctttccatgattgctaacactgccttcattcaagtccttatcactcccttgcatggactacggcaagaacctatacctagcctgtcttcagcctcccatttcctacaagccatcctttgtcctgcttgtcagattaatcttcctgaaggactatattcatttctcaatttctctgctcaattcactgctcaatttctgttacttcacagcctctaaaacttattctacattttgaatgcgattactattaagtccatacaattttgttccaatttactcttttagttttattttctgttattcccacagacttttctggaacatattctgcaaattgcttccctaatgtccattctcccttcattcttactaacagaaccctgattttgtttggagcgacaacatacacagaaaagggatgcattttccaggttcctgtgcaactagggtggcctgtgagatataagcaatgttggacagttttttcaggagaatttgtaaaaggggagctgattcagctgagagaacatccctttgcccttcattctttactttttttttttttttgctagaaggcagatgtgacggctcaagcttcagcaactgttttgcaccacaaggcaaacgtcatgatgtaggccacgtgctaagatgggtgaagctgaatctttgataactttggtgccatcacataagctctggatgtcccttctttggacttcttttacatggttgcaaaataatcctctatttttcaaagtcacagtacacactagtttactgatatatgtggccatatctcatcctagcatatatatctccctcctaaccaacttggtttgcccactgttctccaaatgagcagggcattttcccacctctctaattttactcatgccactcatttatctaaaacacctactaaatacaactaaattttacctcctctagaaaataccttcccccaaagtgttgcctcttgcttcatgatctccatagcattgttttatttataaacaaatcataaagagctttaaaaaattttctctttgattgaaattgttactggaatctttttacttactctttacatatttattttgaaataacttcttgagagctaagtcttagacctctttttcttttacatataacacatagcacaatgcaagcacacaataggaacttcattaatgtttgttgatattaacaccataatggaagcaaatgaatgtaatgaatgaatggaataaaatgactattggaaaattttattttaactatacatttggggctactccaggtaaaataatgatgtaaatatcaccatggttcataattttgctgattgtttttcccactatatgcaagtgttctgcatttagcagcagttaattgaggttaagagttccaaacatacagacagaaatgctcaataaagagtcccaaataaatgtaaaacattattctcgcagaaacaatgctgaaatctcacctttttaataaaaaaactaatgaactgagtgggtaaagatgggggcaatgactatatttcccatttaagttgttaaccttttcataatgtaatgggagaaaccctaccaaatgctctggttttttgaaccacaactcattggcattgaactgacaaaattcctaatatatactaaagcattttggattatttccaaaacatcagagcatgagggtggaaagtggacaatgatgggctagctgcctccattttctaaggtagtctgaaagctctcagagactagtgaactagtaagtctaggagagaaaaaatcaatgcatgaatgctttataatcagacccaacatttgattactgaggtgcccaaacatttggctctaatttttataatagtttgctgcctcctttttctctaacccacacatatcttaatttcaacagtacaagttatgagacccctacctcaaactatatgtatcttaaaagatccttcttttgagcatatgtctttatatattcctggagcttgctgtggtgtatatagtttgggtaatcatccggataagggaagtctggaaagcacatcatttctttggaagagtttgtgaatacagactggtaaatgctggctctgccttcttctgtgtggtcctagggagaataagaaagcttaaagagaaagccaagaattgtgttcccttcagtgaacacagtggttcaattcttggttgactaaaacccttttcatgtttaaaagcgtaaacaaaaattaaaagctctcagtaagataaggaatggaaagcccttcgcgtaacctggcacagaactggagctctttccatgtgaatcctcttactgtaattaccctcagtgttagctctgtctttatagccacttagtggtttttgctttctcctgtgccaccactggttctgatcttatactcaggttaaaaaaaaaacaaaaaacaaaactgtctagaagaggctctgacttctagcctatttatttgcttttggagtttagcaaactcttcactggcaacaacccaatattgcagtggtttcccagctttggcgtaatgagaatcgcctggaagctccctagaccgtagattcttgggccctattcttagaatttcggattcaatctgtctggggtggagtctggggtggtttgcatttctatcaagttcctggtgatgctgatgtggctggtttaggaaccacactttgagaaccactgctctgttgtaaatgaatcctattctttggctcaccagttgctggacttcactcctcaccaaagaaacacaggaaaccagagcccttagaacatgtgttaaatcttggcacttcattttaaagcctctgtgtaattgaaaagtggcttattttttagaagcagtcaaaagctaaattgaaaataaacatttcctctcagttgtgagggtagggtaaaagtgcacacaatgtgctgccttgaaaatacatttcagagctggcagcttctgcttcccgaggtccggaagggactcttgtgcaatggggggaaagagatggaatgtcacgttgctgctggattcaagatgtgtatctccctctcacaccagatgacctctggaagagggaaacaaaaagtgctggaaagggttgagaggattgtgtccccgtggggaagtggggggctgcccaaagcctcagtattttttctcaagttgaaaacataatcttcctctattcatggttgctgtatttctcataagcgtggaagcacaggaatttaaactttttaaaatttttgtggaggtcagaaaaagggtgaaggctcatgtccagcagtttggcaggctgagtgcttccctttcacccacagctagcgccttctactgatggttgtgagaaggagaggtgggaaggaggttttttcagctgcctgttgaaaggaggcagggctgaactgtgggatggagcctggttaaagaatgtaagactctgttctgggaaacagatgctaaggccttggaatatttccatcttgaatgaatctctgcttttttgccccttgacctcagccaattataacaccaggagagaagagtatgtacactacagctccttggaatttttccgaaaagactgttctccaagtgaacacaaaaaagcaaatgtattagataacaagtcagttgctccagggagcatgcatttttattatttcaatatgaggtgtggtttgagccagtaaggaggaaattcaactttgactctgcctctagctgagggagctttaccctggaaccagagatctaagcagctgtgggcaccatctgtcttggatgataaccgtgttcatctctcatctttcccacgagaacataagtaacttgagggcaaagtcagaggttaatttcagaatgttgtacatgcatctaagcagtttaccttgatcttctttcctattccagctctgcttatgagtcccatatctccttgtctaaatatgcccttgaaatatgctcaaaagttgccttcaactttgtcatggctttctttaccttccctctcagctactgccaaatcatctttagttttactaaggtcccattatccttattgccctaattatatagtcacttatagttattctgatacttgttttctcacggcttttaaagtgctggctggcctcttatctgcagcttatgcttaatatagtaccctacacataaagtacacagtatgtattcattgaatgaacaaaggaataaatgagtgggaaaaagttcaaatagtcctggcttcagcttttgcaatcaaaatgctactaacctattggtaagcattttttttttttttaatggagtctcaactctgtcgcccaggctggagtggagtgcgtggtgtgatctcggctcactgcaagctccgcctcccgggttcacgccattctcccgcctcagcctcccgagtagctgggactacaggcgcctgccaccacgcccggctaattttgtttttgtatttttttaagtagagacggagtttcaccgtgttagccagggatggtctcgatctccctgacctcaggctatatgcccacttccacctcccaaaagtgctggggattataggcatgagccaccgcacctggctgttgagcaacttcttattacagcagtaatgaaatcttttgaggacacgaggccctatttaggagtggatgaaacttaaaacacacattcagcctgctagtatttaaatcccatttggttttcatttctcagaaaaagcaaatagtgaaaagttcagaattaccacgtttctgtctgctagaacaccttctaaaaaaggcttacaagataaagtcttatgtaacacataaaaaaaatccctctctgattatatattgtgccaagcaacttttctaagaaaagaaggaagggctggggtatgtggaggaggctaaagttttgagtatttgtatgggtccatatcctcaccaggactttgagtagaattttgcttatagacatgaccttatggaaaagaagaatttcctcttgtggataactcagaatccaactttgaatcttactgatctttgtatcatattattgcttccttaagtaaactttctgatctggctatattggataactcatggatccctctctgcacacaccatgttcattgccttttctgtgcctttcatggattgttggtctctcttaacctggtgctggcacactgccaatgactgcataggcctatggagtgccattcgcagactttattgggaaatgcactctctaggagttgtgtcacaggtggtcctctattttgcttgtctggggttatccttcaaggctaagtgtcatccctgtgggaggttttctttgacctactaagatttccgtagtccaccctcttctaaacgctcgaggcactcgtccattgaattgatggtgacaaggtctatcttgttgttgtagttatataatctcttattttaaaagtcttagggccagatatattttggaatgtgtacatttttggattttgctccataatactcctagtgagatctggggcagcaatctgtcaaatgcaataaaatttctgccgtgcaacagaaggtgagacttagcttcatgttgatccaattcacggtatttaaccttacgatttcagaagaggttcggctatcaaatgagtttttgcccatttgctatcaaaggattacggaattatattatggcttgcttaatcaaatgaaatggaaccatttacaaggagtgattatattccatatttgtcatcccagtacttagcacaaactaccagaatagatgctcaagcatcatttaattgttactagggagatggtagaaagccattttatgatttactctaagctgtccacatttccctgagcaaatgtaaatagggaaaattaaattcttgaaaaatattaactcttgattaccccctactgggaaataaaaattaatgaccttatatctcatggagtgctttcagggttacaaaaccacaattttttttaaaaaaagcttggagaagaataaaaatgtgttctaagttagcactgatatactctattggaggaggctattggcgcaggcagagcagtaactgagaccaggacaggaagtagttacaatatgaatgatgtgaatatgttttcaagccaaatatgtatcatcgacaactgattacaatggctgggaaatccaggacagaagaactagaagtttctccaaacttggctttgaaatttaaaaaaaaatgtgtttacaaggactatttcctaattatattatttctacaatgagcccaaatggcaaagaccataatttttccctctggatttggagctgataggctattcaacagccgcacacacaatcatcatctataataatttctatctgcccaatagacataagttaattatagaatcatatcctctgcatttgacaaatgagcatttgaggtccagggaaacaaaagcaactggactgaaatcttatctgcctagaaaacctacaagttgaaattagaactcaggacttctgacctcaggatctcagtccaggtttgtttgtctcttttctagtcgtgttcctggcatttaagagcaataaagaatagaattgtttcacttacctgggaagcccatggtatatttttgactaattaccaacattagtgccctttacagcttggagatctggatttcaccatgcaggtgatgatgtttaatgagctgaaaatgtccttttcaggacaaattttgctggtatgaaatagtttttttgggcattagtatgattggagaggtaagattttactttccagatttggagcttttgtgatctgccttctaaatctgaattagaactgatcagatttgatttgcattggaatccatctccttccactggtgttctaatgatgtgccactcactgagaatttccacaggcctccaacatcatcgctcctttcaaagcaagtgggctccagcccctcctccagacagcaccatatggcagccgggaccattagatatggcctgacacctggttaagcctggagcctgggactgtgaggactcacctggcactggggtttagtagtgcaggcctggtaatagggtccagagcaaagttgc

SEQ ID NO: 145915 - DNA, 653 bp, Homo sapiens
agcctctcaagtagctgggattacaggcacctgccaccacgcccagccaatttttgtatttttagtagagacaatttcactatgttggccaggctggtcttgaactcctgacctcaagtgatctgctcgcctcggcctcccaaaggatgggattacaggcaccagccactgcgcctgggctggcctctggtttttaataaaacatgactagagtgactccatcttaaagtgagtagctagggcacttacaaggttcatgcttatgggcctggaaaataaccacatcccagggctgaccaccaattataattacagaatatttatggcccattacagaacatgttccccccaagcctgcagaatgtccaaatgtcctaaggaattgcagccccccatttacttaaatataacataaaatgaggcaagtttgggttgcagggtttaatgggtcgtggataacacccaatagcccctacctttagtgagcttatctgcacactccaagtttaactatagttccttatagtttcttataagtagaaatactaacaaagggccgtgggtttctccccctgctttctgaggacactctactctgtaaaggagtagtttccaataaacttgtttctttccctgtgaaaaaaaaaaaaaaa

SEQ ID NO: 145916 - DNA, 433 bp, Homo sapiens; identical to SEQ ID NO: 509

SEQ ID NO: 145917 - DNA, 894 bp, Homo sapiens
  misc_feature (1)...(894): n = a,t,c or g
cggccgccagcgcctgctcggtgtctattacaaaatggtcgccacgtccagtgcttgtctgaccggctacaatggtgtcaacgcaattacgtcaggcgtcagatccgcgcacgactatagggcgggaaagatttgagctactcctgcgcagagttgataagctgatgtctcctcgacttccaactggcaccttgaacccccatcatttctggaccttgagcattcctcaagtaggaagatgtaatgcaccttgacctcattctaaatgagacacttccccaaataaggggagttgagagtgaacagtcttcacgtctccacccacttccagatcccagaggagacagacattggatggctgttacctcctcctaaaatgtctgcatttacccagataatcttccaatggaaatccatggttcaagtgccacctcttcaggaaagccatctgacttcaatcagaatcgaccacggaaatttgacacctccgggcttggaagcagctctctcctccttccccgctgcttataaacctcagccctgaggctccagctcactctaccccatctccttgccgggtcagccctgacaaaggtcagctagccccttgaggacatcagctttggcctcagggtcctaatggcagcagaaccactgacagagctagaggagtccattgagaccgtggtcaccaccttcttcacctttgcaaggcagggagggccggaacgactaagcctcagcgtcaacgagtttcaaagaagctgggtttaaccccaagcaagtttggcccccatcttggcttcaagggatgttggggctcttcttttgattgaagaaagattgaaagaaggctttgggaattgntggaaattcaagggaacttccgggaag

SEQ ID NO: 145918 - DNA, 808 bp, Homo sapiens
accggctaaaatggcgtctacgcaattacgtcaggcgtcagatccgcgcacgactagagggcgggaaagatttgagctacgcctgcgcagagttgagaagctgatgtctcctcgacttccaactggaaccttgaacccccacatttctggaccttgagcattcctcaagtaggaagatgtaatgcaccttgacctctttctaaataagacacttccccaaataaggggagttgagagtgaacagtcttcacgtctccacccacttccagatcccagaggagacagacattggatggctggtcagccctggccaaggtccagctaggccctttgaggacatccagctttggcctccagggtccttaatggcagcagaacccactgaccagagcttagaggagtcccattgagaccgctggatcaccaccttcttcacctttgcaaggccaggagggccggaagggattagcctcagcgttcaaacgagttcaaagaagctggttacccagcagttgccccatcttgctcaaggatgtgggctctcttgatagaaagaattaaggagcttgggatgtgaatcaggacttcggaggttcaaggttcaattgagtacttggagattgattgggggagcttggccaaaggaaatcaggaaagaagaaaagaccttgaagattcaggaaagaagtaaagccgcctggctggaagatggggttgggcagggcagaacttgatcagggccgagcagaaccgcactcttcccaaataaaagcttcctccttgaaacacaaaaaaaaaaaaaaaaaaa

SEQ ID NO: 145919 - DNA, 632 bp, Homo sapiens
  misc_feature (1)...(632): n = a,t,c or g
ctagggcctcccaaagtgctaggattacaggtgcgagttacaacacctggccaacctttactccttattacactaactttatcgttagtgttctactctacccacaactctggggaaactgaggctggggtagcttgctggtgcactagtaattccaaacttgaacgggagaaatgcttattcggaagcactgtctttatatagtttgcaagttgtcattactttttatttttagagacatgtcttgttctgttgcccaaggctggaatgcagtggcatgccaccaatgcagtggatggtgactagctcactgcaagtctcaaattgctgggctcaagtaatcctcctccctgtaatcccaaangtgctgggattataggcatgcaccagcacatccagctaattttttgttggtccttcttttaaaagcaggcatttctcagaattactaaggcattaaggaattttaagaaaatctgattccagaatactttggttactggtaaatattgacactgctccttaacattttttttctgccattttaacgaaaaccgtatactacatctgcttgctcaaatggcaaaacaggactctggcctcttaagactggtggcctgggaagcctgagt

SEQ ID NO: 145920 - DNA, 558 bp, Homo sapiens
ttttaactggggagaggaggaactctttctgaaggccagggacatttaaatgaatgcgccatttcttctctttgagaattgggccgtaatctctggaatgcatcccagggccgtggtttggaatgggtgtctaacaggaaattctgggcagtctatgcatacattacattcctttcccaccctgaaagagtggtcaacaaacacaactgtcctctgtttgaataaaagggggagtgttgggagtggtaagaggccagggcacaaaccgcacagagttcaaaagcagatgtggctgctgagaatccaaacatccttttcttctagaaaagagactcagtcactaagagtcaccttttggagatacccagtcagtccttctcctatttccatgagataaatgtccccagggaattcctaccggacactctataaaagaaacgtacctttgaaagctcattttcccactgcagtactggcagtagtccctccagcagtgacaaaccaagggaaggagcaaggctgatggcttaacaatgctcatggtgctagctctctctg

SEQ ID NO: 145921 - DNA, 565 bp, Homo sapiens
ggcacgagggaccaacaccacccaggatgagcagcgcaggtggccaggctgtgaccagcaggacgagatgctcaacctgggctgcaccattggttccttcgtgctcagcgccaccaccctgccactggggatcctcatggaccgctttggcccccgacccgtgcggctggttggcagtgcctgcttcactgcgtcctgcaccctcatggccctggcctcccgggacgtggaagctctgtctccgttgatattcctggcgctgtccctgaatggctttggtggcatctgcctaacgttcacttcactcacgggacggggttgctaccaaatccatcagaccacgctactgcaagatccaaaagctcaccaatgccatcagtgccttcaccctgaccaacctgctgcttgtgggttttggcatcacctgtctcatcaacaacttacacctccagtttgtgacctttgtcctgcacaccattgttcgaggtttcttccactcagcctgtgggagtctctatgctgcagtgttcccatccaaccactttgggacgctgacaggcctgca

SEQ ID NO: 145922 - DNA, 1479 bp, Homo sapiens
ctagaacagagctccatggacattcatgggctcccactcgggggaactctgctgccaggccaggcctgtgacactcaccgtgagtgaagtgaacgttaggcagatgccaccaaagccattcagggacagcgccaggaatatcaacggagacagagcttccacgtcccgggaggccagggccatgagggtgcaggacgcagtgaagcaggcactgccaaccagccgcacgggtcgggggccaaagcggtccatgaggatccccagtggcagggtggtggcgctgagcacgaaggaaccaatggtgaagcccaggttgagcatctcgtcctgctggtcacagccgctgttattattactaatatcattatctgtctcctcatctgtacaatgactcaacaacagtatagtcttcatgagattagtggagatgcttatattaaggaacttcctatattgttggtgctctttggtgcatagggccacacaggagccttgcccattcccaggttgccctggggaccagtaagcaaaattccagtggctcccatcagtccagcaaaaccgcttccacaggaaccagcccctgaggttgcctccaatccagacctgggcttggttgactgtgctagtgcagcactgaatgcgatagttgaagttgaagtcatggatagagacaaggttgcctccgtagcatctgctgcagacattctcagagccgctaagcaccttcagtgggcccatcccattggcggcgtactcctgctggagccgggcacggtaatagaagaggtaggaaggcaacaggaatcccaggagtgagaatagcaggaggcccagattcaccttcgaagcaatagccagagacatctttggggttggaaagaaaaagctgcctgtttgtgggacccgtgggtggttggtgtgcttgcacgtgctacatggctctgcttggtgcgagtgtgtgtgagagctcgggagtgtgggtgtgcacgtgatgggcgtccgtgggtctgtctgggccccgtagcccccccagtagtcgtcctcagtaggcgcgtccccgccctggcgcccccgcgagtcttcggcaggcagatctcggtagagggtggagggatcggctgggggcgccccggcctcggccaccccgtacaggtggttggaggagctgttgccgcgggcgcgggcctggaagtcggcctcgcggagcgcgcgcaggtctcggccctggcgctccgggggggtggcgcaggtcacgtcggagctggacacgcgcgcgcgctgcaaccaggcccagagcggccgcgcgcggcagtcgcacgcccaggggttagcgttgagccgcaggaactcgagcgagggcaggtcggcgagcgcccttggcgagcaggggttgtgaggattaaaggagatactactgagctcacagcccaatgtctgcttgacaatgctgacgccgatgatgacgatgatacccat

SEQ ID NO: 145923 - DNA, 996 bp, Homo sapiens
atggactggcggatcaaggactgcgtggacgccccaactcagggcactgtcctcggagatgccaggcccattctcttcttctgtgccccactccaccccacccaggatgacttgttcgcggacctggccaacctgagccacctcttcctccacgggaaccgcctgcggctgctcacagagcacgtgtttcgcggcctgggcagcctggaccggctgctgctgcacgggaaccggctgcagggcgtgcaccgcgcggccttccgcggcctcagccgcctcaccatcctctacctgttcaacaacagcctggcctcgctgcccggcgaggcgctcgccgacctgccctcgctcgagttcctgcggctcaacgctaacccctgggcgtgcgactgccgcgcgcggccgctctgggcctggttccagcgcgcgcgcgtgtccagctccgacgtgacctgcgccacccccccggagcgccagggccgagacctgcgcgcgctccgggagggccgattccaggcgtgtccgcccgcgggacccacgcggccgggcagccgggcccgcgggaacagcttctccaaccacctgtacggtccatccagaggctttacagtgtacatatcaacccatgtgtcattccctatatttatcgggttacagaaccggtttacgcagtttcggcttagtgaaacaaaagaaatcaccaatccgtatgccatgcgtttatacgaatccctgtgtcagtatcgtaagccggatggctcaggcatcgtctctctgagagtcgactggatcatagagcgttaccagctgcctcaaagttaccagcgtatgcctgacttccgccgccgcttcctgcaggataaagccaagatgaaactccccttacttctggctcttctatttggggcagtttctgctcttcatctaaaaacctggttccaggtttcccctttccggccggagttgagccctctgatgccccaggcccaggtgtga

SEQ ID NO: 145924 - DNA, 1105 bp, Homo sapiens
gaagaagatcaagctgagtgggctggccctggaccacaaggtgacaggtgacctcttctacacccatgtgaccaccatgggccagaggctcagccagaaggcccccagcctggaggacggttcggatgccttcatgtcaccccaggatgttcggggcacctcagaaaaccttcctgagagtgagtgtctggtcaaggtgccggccttgggggatagtgatgagaatgatgccccccatctggagagcctagagacacaggcagacctaggccaggatctggatagttcaaaggagcaggagagagacttggctctgacggaggaggtgattcaggcagagggagaggaggtcaaggcttctgcctgtcaagacaactttgaggatgaggaagccatggagtcggacccagctgccttagacaaggacttccagtgccccagggaagaagacattgttgaagtgcagggaagtccaaggtgcaagatctgccgctacctattggtgcggactcctaaaacttttgcagaagctcagagcctctgctcccccactttcctgtggagcctcctcaccatgggcatgacccagctgcggatcatcttctacatggctgctgtgaacaagatgctggagtaccttgtgactggtggccaggagcatgagacaaatgaacagcaacaaaaggtggcagagacagttgggttctactcctccgtcttcggggccatgcagctgttgtgccttctcacctgccccctcattggctacatcatggactggcggatcaaggactgcgtggacgccccaactcagggcactgtcctcggagatgccagggacggggttgctaccaaatccatcagaccacgctactgcaagatccaaaagctcaccaatgccatcagtgccttcaccctgaccaacctgctgcttgtgggttttggcatcacctgtctcatcaacaacttacacctccagcgtttatcactaacactctgcctatctcttgcttattgtctgaccgccacctgctccatgggaatgccacctcctcgatggcaggaatctgttgacttgcttgatcgtggtatctccagcacctag

SEQ ID NO: 145925 - DNA, 552 bp, Homo sapiens
ggtgtgggcacccaccaggccctgccacttgttatacctgagaagtctcatctcagccactttgcagaattgctgaacattaagtgagatactggtggaacaatgactacacataataagtactagctgtatttattctggctccaggacctggagaaaaatggccgcctttcttctccctgtgggagggctaaggggaagatgactccctacttgactctgtttctctctcccttgccccctaaaggtgaaatctggggcctcctgctattcctcactcccctgggattcctgttgccttccctacctcttctattaccgtgcccggctccagcaggagtacgccgccaatgggatgggcccactgaaggtgcttagcggctctgaggtgaccgcatagacttctcagaccaagggccctggatgacaggcaatcaaggcctgagcaaccaaaaggagtgccccatatggcttttctacctgtaacatgcacatagagccatggccgtagatttataaataccaagagaagttctatttttgtaaagactg

SEQ ID NO: 145926 - DNA, 2801 bp, Homo sapiens
  misc_feature (1)...(2801): n = a,t,c or g
atggatcctcttagggcccaacagctggctgcggagctggaggtggagatgatggccgatatgtacaacagaatgaccagtgcctgccaccggaagtgtgtgcctcctcactacaaggaagcagagctctccaagggcgagtctgtgtgcctggaccgatgtgtctctaagtacctggacatccatgagcggatgggcaaaaagttgacagagttgtctatgcaggatgaagagctgatgaagaggatccacttcatccaagcccagcttcgcagacctctggcgcccggcgggttcccagttcccccgcttcttccgaggagacagcggaggcgaggccaccgggctgtcaggctgaagctccgtggcggccgggtcctgcacgcagagaagaccccagcgccggcgcggctcagggctgggcccacgggactccggacgcgccgcgaaagcgttgcgctcccggaggcgtccgcagctgctggctgctcatttgccggtgaccggaggctcggggccagcatggcccccacgctgcaacaggcgtaccggaggcgctggtggatggcctgcacggctgtgctggagaacctcttcttctctgctgtactcctgggctggggctccctgttgatcattctgaagaacgagggcttctattccagcacgtgcccagctgagagcagcaccaacaccacccaggatgagcagcgcaggtggccaggctgtgaccagcaggacgagatgctcaacctgggcttcaccattggttccttcgtgctcagcgccaccaccctgccactggggatcctcatggaccgctttggcccccgacccgtgcggctggttggcagtgcctgcttcactgcgtcctgcaccctcatggccctggcctcccgggacgtggaagctctgtctccgttgatattcctggcgctgtccctgaatggctttggtggcatctgcctaacgttcacttcactcacgctgcccaacatgtttgggaacctgcgctccacgttaatggccctcatgattggctcttacgcctcttctgccattacgttcccaggaatcaagctgatctacgatgccggtgtggccttcgtggtcatcatgttcacctggtctggcctggcctgccttatctttctgaactgcaccctcaactggcccatcgaagcctttcctgcccctgaggaagtcaattacacgaagaagatcaagctgagtgggctggccctggaccacaaggtgacaggtgacctcttctacacccatgtgaccaccatgggccagaggctcagccagaaggcccccagcctggaggacggttcggatgccttcatgtcaccccaggatgttcggggcacctcagaaaaccttcctgagaggtctgtccccttacgcaagagcctctgctcccccactttcctgtggagcctcctcaccatgggcatgacccagcttgcggatcatcttctacatggctgctgtgaacaagatgctggagtaccttgtgactggtggccaggagcatgagacaaatgaacagcaacaaaaggtggcagagacagttgggttctactcctccgtcttcggggccatgcagctgttgtgccttctcacctgccccctcattggctacatcatggactggcggatcaaggactgcgtggacgccccaactcagggcactgtcctcggagatgccagggacggggttgctaccaaatccatcagaccacgctactgcaagatccaaaagctcaccaatgccatcagtgccttcaccctgaccaacctgctgcttgtgggttttggcatcacctgtctcatcaacaacttacacctccagtttgtgacctttgtcctgcacaccattgttcgaggtttcttccactcagcctgtgggagtctctatgctgcagtgttcccatccaaccactttgggacgctgacaggcctgcagtccctcatcagtgctgtgttcgccttgcttcagcagccacttttcatggcgatggacgggacccctgaaaggatagcccttctgggtgaatctgggcctcctgctattctcactcctgggattactgatgccttcctaccgtctctattacacgtgcccggctccagcatgagtacgccgccaatggaatgggcccactgaaggcgcttagcggctctgacgtgaccgcatagacttctgagaccgagggacctgggatgacaggcaatcaagggnctgagcaaccaaaagggagttgccccatatgggcttttctacctgtaacatgcacattagagccatgggccgtaggatttattaaataccaagagaagttctatctgttgtaaagactgcaaaaaggaggaaaaaaaaccttcaaaaaacgccccccctaaagtcaacgctcccattgactgaaagacaagtcccctatcctagaggggttgagctttcttcctcccttgggttggaggagacccagggtgcctcttatctccttctagcggtctgcctcctgggtacctcttggggggatcggcaaacaggctaccccttgaggtcccatggggccttgagggtgcacaacatgcaatgtgtctgtgtatgtgtgaatgtgagaaaaacacagccctcctttcagaaggaaaggggcctgaggtgccagctgtgtcctgggttaggggttgggggttcggccctttccagggcagggaggggcaggttccctctctggtgctgctgctttgcaagtcttagaggaaataaaaagggaagtgagaaaaaaaaa

SEQ ID NO: 145927 - DNA, 648 bp, Homo sapiens
cgttatagtatttgtcagaagttggggtctccgtgggcattgtgatccgtcccaggcagtggattaggaggccagaaggagatcccttccacggtggtaggcttaagatggatcctctcagggcccaacagctggctgcggagctggaggtggagatgatggcccgatatgtacaacagaatgaccagtgcctgccaccggaagtgtgtgcctcctcccttccaaggaagcagagctctccaagggcgagtctgtgtgcctggacccgatgtgtctctaagtacctgggacatccatggagcttgatggggcaaaaagtttgacagagttgttttattgcagggttgaagagcttgatggaaggagggttgcagcagagctcctgggcctgcatgaggtccctgtcagtatacacccctggggtgtaccccaacccttccccactttaatcaacgtgctccctgttgggtgtcatctgtgaagactgccaggcctaggctctctgtagagagtcttcaagatcccggagtggtagcgctgtctcctggtgaaggagtatttgtcacactggaatgtgactgtgtgtgtatgtatgtgtatatatatatatatatatatatatatataaacaagtttgttgacacctaa

SEQ ID NO: 145928 - DNA, 2296 bp, Homo sapiens
  misc_feature (1)...(2296): n = a,t,c or g
attcggcangngggggaggcagaggaggcggaggcagaggcagaggcagagcccggtgccgagaccaagcgacagaccggcggggctgggcctcgcaaagccggctcggcgacgctctcccgacacccgagccggggaggaaaagcagcgactcctcgctcgcatccccgggagccgcactccagactggcccggtaggtcaggggctcaggagcagatcccggaggcaggctttgctcagcctccgtacgcaggggtggccctttggaaggcgccttcaacagccggaccagacaggccaccatgaccgagaattccacgtccgcccctgcggccaaagcccaagcgggccaaaggcttccaaagaagtccacagaccacccccaagtatttcagacttgaatcgtggcttgcaattccagcccgagaagaaccggcgctggctccttcgcgccagtccattcaagaagtatatcaagagccactacaaggtggggtgagaacgcttgacttcgcagattcaagttgtccatcaagcgcctgggtcaccaccggtgttccttcaaggcagaccaaacggggtgggggcctcggggtccttccggcttagccaagagcgacgaacccaagaagtcagtggccttcaagaagaccaagaaggaaatcaagaaggtagccacgccaaagaaggcatccaagccccaagaaggctgcctccaaagcccccaacccaagaaacccaaagtcctccccggtcaagaaggcccaagaagaagctggctgcccccggccccaagaaagccatataaacccaagactgtcaaagccaagccgggcaaggcattcaaagcccattggaggccatacctagtgtaacccaaatgcaaatgtccagttgccaaagagggccgtgcaagaaggaagttgacaatgatagtctttttcttgcgggacactccctcctggtctcctattttctgtaaataattttctccttttttctctcttgatgctcaccaccaccttttgcccccttctgttctgactttataagagacaggatttggattcttcagaaattacagaataattcatttttccttaacccagttgtgcaaggactgcctacaacctatttaatgatgaggaatgtacttatattttgttttgctattaacctacttaccggggttaagggatttgtttggggggcttgtgtgttttgttgggcttgtttggccatggaaggtaggatgtggggtggggagaaggacacaaggcagtttggttctggccaagatgagagggaacccaggaatttgtgaggttagcaggaatatcctttaagggtgagtgagttttccttgagttgggcacccgttgtgagagtttcagaacctttggccagcaggagagaggtggtagggagcagccagccggcaaaggaaggaggtggaaaaaaaccgccaccgggctgacttcccacctcccagtggtgagcaagtgggggcccaaacccagtttccttctcatttttgttacgtttgccctttcggcctccctattttcttagggaaggggagtggggtccaagtgaacacctggatgggaaaaaccccatagtttcccccccagtcagcctagggatgtagcccattgggggatcctttgtggcttcagcaaattctccttgttaaaccggagtgaaaacttcagggggaagggtggggagtcagcccaagtgccctcagtgtgccctgttgaaacttaggtttttcccacgcaatcgatggattgtgtcctaggaagacttttcttttcctctggatttttgttcctcctgtacaagaggtgtctttgcttggtttggtggggctgcggtttacttaaaacctcccggatctctttttgagtcctttattataaagtaagttgtaagcttgccgggagggggagggggagtgggcgggcagtggatagtaagactttactgcagtccgatttgggatttgctaagtagttttacaagagctagatctgtgtgcatgtgtgtgtttgtgtatatatacatatctaagggctagtacttagtttcacacccgggagctgggagaaaaaaacctgtacagttgtctttctcttatttttaataaaactagaaatacattgcacttgcgcgtcccccccgccccaccccttttttgtaacaacagtaaattgggccgggaaaattttgctgtctttgtaattttaaaactttaaaataaattggaaaagggagaaactgaaaaaaaaa

SEQ ID NO: 145929 - DNA, 355 bp, Homo sapiens
ttcactgtcatctcatcctatggtcagtttgtaaacgcagtagcaggccccagccccaatcatcagtcctgccgccatccaacccacttcccgagcccggcccatgctcaagtctgtgccagccttgaggcaatacagtagagggccttgctccacatgattgagaggctgtctcaggtacagggtaagtaagaatgtagggtaccagtagtcagcttgctccaggctcatgcagctctccagtgataaatcagcaaggttccagccaaggcagttttctccttctctcgctgaaacctgtgccgaaacctacaggccaccagacctacgaacctgcacggtccgagctagtttc

SEQ ID NO: 145930 - DNA, 587 bp, Homo sapiens
cccctattactctgcaggcgtgtgaagaaagaaggtttctagctcggaccgtgcaggtttgtaggtctgttgggctgtaggtttcggcacaagtttcagcgagagaaggagaaaactgccttggttggaaccttgcaggtcagtgtgaaggtgggattagcccatgaccatgggtgggggtggcggaggaggggggctgggatatgagagggccatgtccgagtcgccctctcctggccccttttttctccacacccactcccattttagtgcagggaatggggtgtggcggcctttgctgtggaaacggcggactacaaatggggcgtaggaggtcttctctctgaaagtaaatagacgatgtaaaatattttaatctccagtgcctaaaattcacaaaaacagaaattgggacctgtgtcctcagttcatccactacactttcatttctccattgccgcctacctgtctttgcatttgtccttctgccagactctatcctctatcaccgtggagggaccactgacaacagaagacaagggaaaacgaaggaatttatctgactttggtagagattcatcacaaga

SEQ ID NO: 145931 - DNA, 530 bp, Homo sapiens
agccgagccatagtttcaaactcaaaccaaatatcaggctcctcttcatccagctcctggtcatcgtcccactcctcttccccctcctcctccagcttctcactgtcatctcttcctatggtcagtttgtaaacgcagtaacaagccacaagccccattcatcagtcctgccgccatccaacccacttcccgagcccggcccatgctcaagtctgtgccagccttggggcaggacaggagagggccttgctccacctgattgaaaaggtctctcaggtccagggtgagtaaggatggagggtagcagtcttcagcttcttccaggctcttgtagctctcttgtgatgaatctgcaaggttccaaccaaggcagttttctccttctctcgctgaaacttgtgccgaaacctacaggccaacaggcctacaaacctgcacggtccgagctagtttccttctttcttcacacgcatgcagagtaatagggggctggtacccagaagaaggcgaaaagcaggacttgtgctcta

SEQ ID NO: 145932 - DNA, 567 bp, Homo sapiens
  misc_feature (1)...(567): n = a,t,c or g
agagccgcctagagcacaagtcctgctagtcgcctccggtctgggtaccagccccctattactctgcaggcgtgtgaagaaagaaggaaactagctcggaccgtgcaggtttgtaggtctgttggcctgtaggtttcggcacaagtttcagcgagagaaggagaaaacttgccttggttggaaccttgcagattcatcacaagagagctacaagagcctgggaagaagcttgaagactgcttaccctccatccttacttcaccctgggaccttgaggagacctctttcaattcaggaaatgggaaaacaggaggagattcttctnggggaaaccccttgccccattaaacggcccttttcggaacacaatggggacgggattccaccccacaacggcgtttggttttgcaggtgttcaaaggattttgcagagggtgctactggaaggtccagccttagccaatcaccacctcattgggtgaaagttcccgggcttaattccaggaccacattcttattggccgggcaggggctcccacagagctttgagtaacttcttgggttgtg

SEQ ID NO: 145933 - DNA, 485 bp, Homo sapiens
  misc_feature (1)...(485): n = a,t,c or g
aatgagaccatggaannnnccactgagttctctaggaagngcggcggaanttcacagactcagagagaacccaccatggtgctgtctcctgccgacaagaccaacgtcaaggccgcctggggatgttcctgtccttccccaccaccaagacctacttcccgcacttcgacctgagccacggctctgcccaggttaagggccacggcaagaaggtggccgacgcgctgaccaacgccgtggcgcacgtggacgacatgcccaacgcgctgtccgccctgagcgacctgcacgcgcacaagcttcgggtggacccggtcaacttcaagctcctaagccactgcctgctggtgaccctggccgcccacctccccgccgagttcacccctgcggtgcacgcctccctggacaagttcctggcttctgtgagcaccgtgctgacctccaaataccgttaagctggagcctcggtggccatgcttcttgcc

SEQ ID NO: 145934 - DNA, 653 bp, Homo sapiens
ccccgactcttctggtccccacagactcagagagaacccacccatggttgctgtctcctgccgacaaagaccaacgtcaagggcccgcctgggggtaagggtaggggtctcacccgccaagtaatgttgcgaagaccctggagaggaatggtcctgttccctccccccacacccaagccttacttcccggcacttcgaccttgagccacgggctctgcccaggtttaagggccacgggaaagaaggtggccgacgcgctgaccaacgccgtggcgcacgtgggacgacatgcccaacgcgctgtccgcccctgagcgacctgcacgcgcacaagctttcgggtgggacccgttcaacttcaagctcctaaagccactgcctgcttggttgaccctgggccgcccaccttccccggccgagtttcaccccttgcggttgcaaggcttccctgggacaagtttcctgggctttttgttgaagcaccgttgcttgaaccttccaaattaccgttaaagcttggaagccttcggttggccatgcttctttgcccctttgggcctttcccccagcccctcctcccctttcctgcacccgtacccccgtggtctttgaaataaagtcttgagtgggcggcaaaaaaaaaaaaaaaaaaa

SEQ ID NO: 145935 - DNA, 560 bp, Homo sapiens
tttttttttttttccaataaaaaataattcaactttattagtatgaaatattttgagataattagtgacccaaatgcatgattctccaatatgaaaggtgttcagcataagcatacaatcatttagtaaaactgctctttatgagacccccagaaaagctggaggcacttcctttttttggtggagagagaagacactacttaactggccatttccttgctggagtttattccgaattcccttttgtctgattcttcctcctcaaactcgactaaaggagtgtgtctgttggcctgagcaccttctctgtagaacactttctttactgtgccatcctttggagactttatggtatgctccatcttcatggcgatcataaccatgagggaatctcccgctttcactttgtctccagctttgacaaacaccttttcaatgggttccagtcataggagctaagggggccgccctgagtttcttgtgagctcacagaagataagtatttggggactggaatgtcaatctcaatacttccttccttggaaaataggtaaatagtg

SEQ ID NO: 145936 - DNA, 1945 bp, Homo sapiens
ggcacgaggaaggaagtattgagattgacattccagtccccaaatacttatcttctgtgagctcacaagaaactcagggcggccccttagctcctatgactggaaccattgaaaaggtgtttgtcaaagctggagacaaagtgaaagcgggagattccctcatggttatgatcgccatgaagatggagaacaagttgaaatcatcgcagaaggataaagttcgtcagtttatgatcttcacacaatctaggtgaaaaaacagcagtaaggttgtctttctcaaaatgactggaagttagatgttgcaacagataattttttccaaaatccttgacttttatatacgagaagagtgtaaaaggatcattggacaggaagaagttagaacagctgtacaattagatacaaagaccctcaagatgagaataaaattggaatagatggcatacagcagttctgtgatgacctggcactcgatccagccagcattagtgtgttgattattgcatggaagttcagagcagcaacacagtgcgagttctccaaacaggagttcatggatggcatgacagaattaggatgtgacagcataagaaaaactaaaggcccagattccccagatgggacagagatttgaaagaaccaggccgatttaaggatttttcccagtttacttttaattttgcaaagaatccaggccaaaaaggattagatctagaaatggccattgcctactggaacttagtgcttaatggaagatttaaaattcttagacttatggaataaatttttgttggaacatcataaacggatcaataccaaaagacacttggaatcttcttttagacttcagtacgatgattgcagatgacatgtctaattatgatgaagaaggagcatggcctgttcttattgatgactttgtggaatttgcacgccctcaaattgctgggacaaaaagtacaacagtgtagcactaaaggaaccttctagaatgtacatagtctgtacaataaatacaacagaaaattgcacagtcaatttctgctggctggactgaactgaagatcaatcctcacaattcagactgagggttgagacaaaactttaaggatacatcttggaccatatcgtatttcattcttcttaatggtggtttgggcttgtcttctagtctgggccgctctaaacatttataattccaacattgtgggatttcatcttatatctgtggaccatcctagtttattctcccataagtcttacaagctttatggggattattttgaggttttcattctcgcataaagcacaatgctgtcttcatcagaaaacagttggcataagaattaaacatatgaacatcacacaacaatttataaaaacttcttaaatatacgctttgggctagttgcaaagactatgctaatagcacttccagtgagagtgatatatttaagtgtactggatctggaatggtgttttggtttggggggaattttttttttttcctggcaaatcacatatgttgttgatgtgagtatctgatgaaaaaacaatgtcagaataaccgacatgaaaattttttaggataacttggtgcctacctgaaaaatgtattgtgttttagactcttgatttcaaaaggttccacagaactagtctgcgcttaccttacccatgtttatatatagctgtcctacagggagcttttatttagaaaatgtctgcataatgttagattcttctcctgtctacattatgcactacataattggacttcattatgcttttgaaatgcttatctgcctgtcacataagttaaactatttaatttgttttgaatgttttggattgctacacaatacaatattctaaatttaggcatgagggtttttttttgttttatttttacttttttttgtcatcgcactatggaacacaa

SEQ ID NO: 145937 - DNA, 1590 bp, Homo sapiens
atgcagctgctgctggcagagtgcatgggtcagagtgggccaccaggagctgtctgccattgccagagggtgtggcaggccagagccgtccgcagaagcaaaaggccagtcccatcgaccacccaagggctgaagagtgtgggcgcatggcgtgggagtggcaggcagctccacctgcagccccagtacaggatccactgggtgaagccagctgggctcctgagtctggtggggaccatggagaacatttgtgtctggcccagcgattgtaaatacaccaatcggcactctgtatctagctcaagattgctggactcgctgaagagagactacgcaggaaagccccagccacccatcaaatcagagagaaggaatccaccttcttacgctatggcagctgcgcagctccgtgactcagaggagaccgggggatcagagtttgtttttgcggaaaagactttaaggaagtgtgtcaaatgcccacaggtagagctggaaaatgtggcctttgctaaagatgcagaagagtctagagacgcacaacggctgggtcattggtggccctgcatcatggaaactctttctaatgcaagtggtacttttgccatacgccttttaaagatactgtgtcaagataacccttcgcacaacgtgttctgttctcctgtgagcatctcctctgccctggccatggttctcctaggggcaaagggaaacaccgcaacccagatggcccaggcactgtctttaaacacagaggaagacattcatcgggctttccagtcgcttctcactgaagtgaacaaggctggcacacagtacctgctgagaacggccaacaggctctttggagagaaaacttgtcagttcctctcaacgtttaaggaatcctgtcttcaattctaccatgctgagctgaaggagctttcctttatcagagctgcagaagagtccaggaaacacatcaacacctgggtctcaaaaaagaccgaaggccagcgacggctgctcggtgacggcgctgctctgccaccaagaaaaaccccaaacccactgatcccacaaagaggggagaaaaaggaaggcttcatgctgaagaaggagaaatacaaacgtacagaagaacttaaggtcaagttttacagagataaccaaggacatcttaaaggagacaggctgtgcgatcattggaagagggaagctgtggatcttgcattcatgcatttggatgaagatgacactggaaactgcacgttgcaggttgaggtggccaagtatcaacggaatgggaaatatgaggcttcaggaaggaagtgcgcgaaccacaggaaggctccgtctctacggcagaagcggccacgccgcagcccatccaaacgccgcgacacgagtgagttgtcctcatcgaacacatttcatcctgtggattttgaggatggccagagaagaccttcaaggagagtcaagtttggaccaactcggaggctcattgtctttgacagacacccagctggtgaacctgtgtcctggaggaatgcaggagcagctgctcattgtattcaaacctttgatggaaggtggtttgaatga

SEQ ID NO: 145938 - DNA, 3664 bp, Homo sapiens
gtactctttctaatcctgaggttttcaattatggagtggaaacccacgaagcctacaagcaaaggtctctggctagcgacatcactgatgagcagaaaaaggttcgggaggctgacctagtgatatttcagttcccgctgtactggttcagcgtgccagccatcctgaagggctggatggatagggtgctgtgccagggctttgcctttgacatcccaggattctacgattccggtttgctccagcatgcaaccaagatcaccacgtgcacagttcaccgtaggttcactctcctacaagactccaacgctgccactgacctaacaggaggtggagctcaggcggtgatgttcgctcacctgctgctcacctcctgctgcgtggcccagttcctaacagaccacagacggatctgctggggactcctgcatataaaagagatacctgtgatcacatatgaggaacatctgcaactacccatgataatctctcatctgagcatcaagataataatggtgctgaacaccttctgttgtcttgtggggagcatcaacaggcacgagaatgaggagaaacctgtgcaaatgatgtttaagcaatctacttttaagaagacctatataggagaaatatttacccaaatcttggtgcttccatatgttggcaaggaactgaatatgatcatcatgcttccggacgagaccactgacttgagaacggtggagaaagaactcacttacgagaagttcgtagaatggacgaggctggacatgatggatgaagaggaggtggaagtgtccctcccgcggtttaaactagaggaaagctacgacatggagagtgtcctgcgcaacctgggcatgactgatgccttcgagctgggcaaggcagacttctctggaatgtcccagacagacctgtctctgtccaaggtcgtgcacaagtcttttgtggaggtcaatgaggaaggcacggaggctgcagccgccacagctgccatcatgatgatgcggtgtgccagattcgtcccccgcttctgcgccgaccaccccttccttttcttcatccagcacagcaagaccaacgggattctcttctgcggccgcttttcctctcccccctgtctgtctgcacagggcagccagatgcacgctcatgtggctttgctaaaaggtgatgggcggcaaagggaaattaaagttgaaagagtccacaaaccctacatgggacctacacaggagttaccaggtattgaagggttcattttccagagtttcagttacccatgggccaaaaataggtctttagatgaactttcaaccagaaaatcttggaatccacctgcgacccagaagctcccccctgaccaccaccaccttgggcacgtgttctcaggatctccaggggctgtgtcagaggccacggtcactcacatttggctcagaacaaatctcttcaaatactttacagagtttgacagcgtcagcgagtgcgcggtccagtgcggccggaacctggcgcaactcctagagcggtccttggggagacgcgggtcccagtcctgcggctcctactggggagtgcgctggtcggaaggatcgtgcttggctctcacggaacgcgcccacacgcagggtcccggtgtcgaatcgtctggtggaatctgccctcaaccctatggagcgggtgctggtatcatagtcatattacaagtaggaatcagcgggcccaagaggagtgaaaatgaagcatttcatacaaacaacatgatttcgggcaatcactttgggaatcaggataaggtgttcccccagtctgcagaaacactggcaacatttacaaagataatccctttccagacccgccattttggctcacccttattctgcagaccccagccctgtgcctgtgctcctggacagctggagataaggagtgggccctggaagatgctcattcaggccctgctcaagattccagtcctggcaatgctggacagtggcccttgccagttaccctcaattaccaaagaactattaagaaacggcagccgacagacgaaaagagaaaaggacttaggtccctcacctgacctgggcagtggcgacgctgtccaccgaggttcccgagttgggaaagagaaagagagaggcaagagaattccccatgaggagagtgttcccctgtacggagagatcccagaaggacccaaaaatgtcatggactatccagctgcattcctgctctggaccctgctggggctgccacacccactgcacggcagggatagagagatgtgcagcctgaccctacccctgagcctgtctgtgaaggtggagatgggcatgcacccacagcccatgaggcaaggtggtgtcctgagtgtgctgtctgccatcatggatgttctcgcagaagcaaatggcacctttgccttaaaccttttgaaaacgctgggtaaagacaactcgaagaatgtgtttttctcacccatgagcatgtcctgtgccctggccatggtctacatgggggcaaagggaaacaccgctgcacagatggcccagatactttctttcaataaaagtggcggtggtggagacatccaccagggcttccagtctcttctcaccgaagtgaacaagactggcacgcagtacttgcttaggatggccaacaggctctttggggaaaagtcttgtgatttcctctcatcttttagagattcctgccaaaaattctaccaagcagagatggaggagcttgactttatcagcgccgtagagaagtccagaaaacacataaacacctgggtagctgaaaagacagaaggtaaaattgcggagttgctctctccgggctcagtggatccattgacaaggctggttctggtgaatgctgtctatttcagaggaaactgggatggacagtttgacaaggagaacaccgaggagagactgtttaaagtcagcaagaatgaggagaaacctgtgcaaatgatgtttaagcaatctacttttaagaagacctatataggagaaatatttacccaaatcttggtgcttccatatgttggcaaggaactgaatatgatcatcatgcttccggacgagaccactgacttgagaacggtggagaaagaactcacttacgagaagttcgtagaatggacgaggctggacatgatggatgaagaggaggtggaagtgtccctcccgcggtttaaactagaggaaagctacgacatggagagtgtcctgcgcaacctgggcatgactgatgccttcgagctgggcaaggcagacttctctggaatgtcccagacagacctgtctctgtccaaggtcgtgcacaagtcttttgtggaggtcaatgaggaaggcacggaggctgcagccgccacagctgccatcatgatgatgcggtgtgccagattcgtcccccgcttctgcgccgaccaccccttccttttcttcatccagcacagaaagaccaacgggattctcttctgcggccgcttttcctctccgtgaggacagggcagtcttggtgtgcagcccctctcctctctgtcccctgacactccacagtgtgcctgcaacccaagtggccttatccgtgcagtggtggcagttcagaaataaagggcccatttgtgggatgccgc

SEQ ID NO: 145939 - DNA, 1193 bp, Homo sapiens
cccacgcgtccgtgcagtcccgcggcgcggggcaggttccgggcctagcttaagttaggcaccccggtccgttggtccccggtgggcgcatgtcgcatgcgctcccgcgcctccattgcgtcagctgagtgctgcggctccatgtgcggccggaacctaggcgcatactcctagagcggtgccttggggagacagcgggtcccagtcctgcggctcctatctggggagtgcgctggtcggaaggattgctggactcgctgaagagagactacgcaaggaaagccccaagccacccatcaaatcaagagagaaaggaatccaccttccttacgctatggcagatttaggtaagaaagtactcatttgtctatgcacaccaggaacccaagtctttcaacgggatctttgaaaatgggtgtttgaaaatgaattgaccaggcagggctggcccgtcacagtggtccgaatttgtatgccatgaaccttttgaagccgagggccacaagacaaagatatcactggtactctttctaatcctgaggtttttcaattatggagtggaaacccacgaagcctacaagcaaaggtctcgtgcctagcgaaatcactgatgagcagaaaaaggttcggaaggctgacctagtgatatttcaggtccccgctgtactggttcagcgtgccggccatcctgaagggctgaatggatagggtgctgtgcccagggctttgccctttgacatccccaggattctaacgattctcggtttgctccagggtaaactagcgctccctttccccgtaacccacggggaggcacgggccgacgatgtacacggaagacaggagtcaaatgggagattcctcgatacttccctgtggccactccaagcaatggcacattacacttctgtggatttaaagtccttgcccctcagatcagctttgctccgtgaaattgcatccgaagaaagaaagaaaggggatggtggctgcgtggtccccagaagctggcagaccatctggaaaggaaagaagcccatcccctgcacagcccactggcacttcgggcaataactctgtggcacgttgggcatcacgtaagcaagcacactaggaggcccaggcgcaggcaaagagaagatggtgcttgtcatgaaataccacccccaacatagctacctggggataaaaaa

SEQ ID NO: 145940 - DNA, 1723 bp, Homo sapiens
acataatgattatgtatttttctcatttggtcctacaagctgctggccctttgtccctccactgtgggaatcagatctagagcaggctgagcctgcagacacagcaagtggccaaaaggtcactctaagtgttttgtcttgactccttacttgaagtccacccagctagcacacatctggtttatactgaagccccctgcctagaaatactcatttcaggaaccaccagtaagcatctgtgaccacacaggctttttgactgatggcttcccggatctggtttcaagggataaccccgtctgtgtgcatctatggtcttctctctacagcgaggactttgcagtgctgcttgtgatccaacacaaggggctcagagctgagtctgaactgctttcatggtcaccagctcctgtcccttccagtcttgagaggcttttttctccagatgggaacctttccttcccgccgttttctcggtctctggctgtttttctcttgtgcccgtctaattggacacctcctgggcttccatctctgtggttctcctgcctcacttcctgttctgttgtttttccgttttgtcaaaatatctcctatgttcttgggcttccttttcgtcgccagggttttcagcttttcctttaggctcttcttctaaatatgggcttctggcccacaaaagcctgctctgtcaggatctcatggttctccacttgccagaaccttcttcagcctcagttcctcggcctcaacttgtacgtttaacccattgaccaccaccccccaaattcaccttcatttctttgaccctgctcctcactccttttctgttgaggaatctgttgactaactccaggctcactcaggctcaccgtcctgctctctgcaccagcctttccagagcgtgccagttctcatggcttcatctgttaactgttgatcacttcagtcctgatttttagacctaaatggtttccttaacgccattctgaactgcctgtgtactcattttcacttacagtgtttattgtaacgccaaaccaacaaatcacaggtgcttgcttctctccataaatctccccagtctaactttttgtcattcaacatgactcgtttatccaacctgaaatcggcatataggccccaagtatgggtgttttgtacacagggtatttaataagtgacttccagttttggggctctgctatggaataaaaaggaggatttcagttcttctttcactttggaaatctaacaactcagagaacattgaagaaattggaatttagttgggatgaaatacttgtggtttaaaatatttctgttcatattttctaatttgttgccggaggtcttgggttttctatttgagtgcttgcaaactcaatgtgatttctgtcagcatatcttaggtttgtttgttatgaaacttatgcagtgtgaggttctatctgaaaatgttatttagctatcttctgggactatttaatgaaagtggggtcatgaatccttaaaattcttgtgcagctttagagaaacatttctgttatttgggtatcagtttgtaagtgtggtaaagccaagatggaaacgagcactttgctttcttggttgttgttactggtctaacctcctgcttgaactagtctactgtcctgtcaaatgcatctttttatttacatgtcccttaaattaaagctgatcatgaaagtaaaaaaaaaaa

SEQ ID NO: 145941 - DNA, 611 bp, Homo sapiens
tttttttttttacatgtggtagcgcatttaatattcacagcaacacaaatgggaagtaatattcttatcaccgttttacaaatgagaagcccaaggcccagaagagttgaatatcttgctcaagatcacacaccttttgccaccccccattccaagtcccataggcaactcagactcagcacatccatgatggtaacttatcatcttcctctccaaaccatttcctcacttgtgccctactctcagtggggacatctccaatccccagggccaaagctgggaaaccggaagccatttctgactcctccctctccctcacccactccatccaaatggaacccaaggtcctggtacaatgtacttcttccgggtattgatccaatccccgctctcgtctccacgcccacggtgctgacccattgttaggtgcccggctgctgctcctgggtcatcacttcccagcactctctttgcaggcccatctccaccatttccagcatcctacacactgcggctcaggtgtgctttttaaacctcacctcaccgtgtccccacctccagaacgaagcccagcctcctctgcccatcccctcaaactgtaaagtgcagct

SEQ ID NO: 145942 - DNA, 533 bp, Homo sapiens
ctaaaagaaaaagtaagtcggccaccaacatcgaggcctcttgtaaagggttagaccatgcatgcccttgcctggggaatcaaaaccacgccctctgcaggcacgcagctgtcccactggggtccctgaggtgcttgctgccctctgtcccctgggggggaatcagggacttgatgtttcccagagggcccagaaagccatctggcccctcacccaaggcaaagtgcagctgacagagcactggctgcggacagtgtgcaagtagccccccctccccctcgccgggaagggcaccctgtgacagccctatccttgcctgtgatcttggccaaggaggcttcctccagctgcatactcactgaccagaagaaaattgtgctgggactgaagcatgattcatttgctgaatcattgctgagtcattgttgctgctacgtagaatggtatggttcacagcaacgtattgaagctttgcttacaacatagctgacgttttcttttctttcttttttttttttcttgatggagtttcc

SEQ ID NO: 145943 - DNA, 366 bp, Homo sapiens
  misc_feature (1)...(366): n = a,t,c or g
ggaaggggattgctcgagagatggnggcgcaaaagcctgctaggaataggtttttaagaaaatggaatgatttagattatagatgatgaatttacataatgtatgtcttttgagatgggcagcattatgtgtgtctatattgagtaggaatgatcagagagggaaaagctgatgctgcagaaggaagagggaacagttgttggagcagtgcctttagtaggtaagagagtacgtgatctggtacacggggaggagatggctttatcagaacatggacagtttatccacagtagcnnnnnnnnnnnnnnnncttgggggggggcccgggccccaattcccccttatggggggcggtttaacatttct

SEQ ID NO: 145944 - DNA, 1200 bp, Homo sapiens
tgttaccaatctgaagtgggcattcgtactcccaagtctattcgttttcttctaggcaattatttcacacctatcctctgctcataacaccatgaccttcttcccaaactcactctcagttaaaggctttcccttcctattgaggaaacagaagcagacagaagagaactttcaactgccccaagctctatatttacctgcactagttgcatctatgcccatacatacactctgccttttttttttgctactgtggataaactgtccatgttctgataaagccatctcctccccgtgtaccagatcacgtactctcttacctactaaaggcactgctccaacaactgttccctcttccttctgcagcatcagcttttccctctctgatcattcctactcaatatagacacacagtaatgctgcccatcttaaaagaaatacattatgtaaaattcatcatctctaatctctggcattccattttcttaaaaacctattcctagcaggcttttgcccccaccatctcctgaaacagctttgtcaaggttgccagtgactatgacatcaataaatccagtagttaatctgcagttgacctctcttttgtttttgaagcactctctttatttagcgtccatttagctccttcattcgctttctgccccaatgactgcttcttaatttcttctactggttcttcttcatcctcctagcctctaaatgctggactgtctcaggtcttggtcttcaaactgctgctcttctccatctacactcactgcaatctcatggctttaagtgctgtctacacgctgagtattaaatcctaaatgtgtatctttagctgacaacctctcccttgaactctgcactcacataaccaacaatctaaacctctccctcccatatgctaccccatctcagtaaatggcaacttcattcttctagttgctcaagtcaaaaagccttgtaaggccgggtgtggtggcccacgcctgtaatcccaacattttgggaggccgaggcaggcagatcacttgaggccagaagttcaagaccagactggacaacacggcaaaaccgcatctctactaaaaatacaaaaattagccaggtgtcgtgaccctgggaggcggagcttgcagtgaaccgagatgtgccactgcactccagcctgggcgagagagcgagactctgcct

SEQ ID NO: 145945 - DNA, 740 bp, Homo sapiens
gttagattggggtggggggatgggtaaaggagaaaggagttaaagatatctgactggaagactgatttgaagtgattgtggaaattaatggaaaaggctttgatttgtggaagaggattacggtctagatttagacatattgacatcctcacatgaaaatgggaaacaaggatttgaaatcttgggactagagttatagagatttattaatgtagtgtagccatgtttgggaaaaaaatggagttggaggtccagaggtctgtttgcattgaatcctggcttaactaaaaatacattaggtgtgtcccagtttacaaaatagcttagaaatgagatcttttaagaaactctatacaccatggaataatatacagccatagaaaagaatgagatcatgtcctttgcagggacatggctggagctggaggcccgttatccttaagcaacctagtgtaggagcagaaaaccaaaatgctgccctgttctccccttatggggtgggagctgaaatgatgagaaccccattggacacctagaaggggaaccagccacacactgcccgcttgtggaagggtggaggatgggaagagggagaagatcaggaagaataatggatacttattcttcctgaatcacccagggtgatgaaataatatatacaacaaacccgcatgacaccatgtttacctatgtaataaacctgcactaccctgctagttgtactcctgaacttacaagtt

SEQ ID NO: 145946 - DNA, 393 bp, Homo sapiens
  misc_feature (1)...(393): n = a,t,c or g
atagaatgcaagctgtaaatccatcttgagcaggacagtactatacaaatagaatgcaagctgtaatgtaattttatattttcttatagccacgttgaagtaaaaacaaacaggtacagtgttttttaccagctttatagaagtacagttgttacnnnnnnnnnnnnnnnnnnnnnnnnnnnnnnnnnnnnnnnnnnnnnnnnnnnnnnnnnnnnnnnnnnnnnnnnnnnnnnnnnncctgtcatctcnnnnnnnnnnnnnnnnnnnnnnnngataaaaagagagggggaaaagaggggaagagggagaaagaggccggtggaggggcactataggctgcttttaaagaaatatacgggggcgctggggattgttaacttagttttccagagc

SEQ ID NO: 145947 - DNA, 1078 bp, Homo sapiens
gtgagaagcgcagtcgggggcacggggatgagctcaggggcctctagaaagagctgggaccctgggaagccctggcctccagactggccaatcacaggcaggaaagatgaaaggttctgtgggctgcgttgctggttcacatttcctgccagaatcccatgcccaagtggtagcaagcggtgtaaaacaagagccggagccccgaactgcgcccagcagaccgagtggcagaagcggccagccgctgggaactcggcactgggtcgctttttgggattacctgcgctgggtgcagacactgtctgagcaggtgcaggaggagctgctcgagctcccaggtcacccagggaactgagggcgctgatgggacgagaccatgaaggagtttgaaggcctacaaatcggaactggaggaacaactgaccccggtgggcggaggagacgcgggcacgggctggtcaaggacgccgcaggcggcgcaggcccggctgggcgcggacatggaggacgtgcgcgatcgactggtgcattacatgttcgatgtgtgagctataatttaactgaagatatacttactatggttactgttgagatttttttacggggttacaacttttaagcaagacctgacatcctggtatgcaaggtttctgaatctctctggcagattaactattgacaatgattttctgttatctttgttcaaaaagttcatgtcttctcaaaatatggaaatattgctaaatggaagagcatacgggtgacaagtctcctttcccaaccccaggttccctacacccctgctctcaagcaggcagtgagtgtcacacacctgttaatccatcttgagcaggacagtactatacaaatagaatgcaagctgtaatgtaattttatattttttttttagccacgttgaagtaaaaacaaacaggtacagtgttttttacccagctttatagaagtacagttgttacatatttaatgaatacaatttgatgggtctgactatatgcacacacctttgataccatcaccacaatcagggtaataaacatacctgtcatctccacaagtt

SEQ ID NO: 145948 - DNA, 1151 bp, Homo sapiens
  misc_feature (1)...(1151): n = a,t,c or g
atggcggcggctggggctttccgtctgaggcgggcggcatcggctctgctgctgcggagcccccgcctgcccgcccggagctgtcggccccggcccgactctatcacaagaagtcccccagacgtgagactcccactcgagaaacaactaaagaatgccataaatcaacgtggcacaaaaggcccctacattagatactatcctgaggttgttgatcattatgaaaatcctagaaacgtggggtcccttgacaagacatctaaaaatgttggaactcggactggtgggggctccagcatgtggtgacgtaatgaaattacagatttcaagtgggatgaaaaaggggaagatttgtgggatgctagggttttaaaaccttttnggctgtgggttccgcaattggcctccagctcattaagccacttgaatggggtgaaaggaaagaccggtggaggaagccttgactatcaaaaacacagattatcgccaatggagctctgcctttccttcccgtggaaacttgcacttgctcccatgctgggcttgaaggtggcattcaaggccgccctggctgattacaaaattgaaacaagaacccagaaaaagggagaggcagagaagaaatggagccctccccttggcgaagcctccagcaggcccacaccagctgttccccaaccggctgtgccagtcaccttagatgtttcaggaagccggcttccttctcccactgaaggagccctatgaggataaccggcacaataaccttgcctgttccaccgttatggacctcctcatggcaaggcaaaataccacagtttccattggttcctgaatcctgtggtttcctttcagccccactttttatcggccttaaccctagttaatgtatattttggaattgtgtgtatgacctcagaactgaaattgataatagnaagttgcaagttttgatagcccgtgaagtgcataagtatctaattttacctgaattgattttggggggaaattaccagtagaatgccttggtctgaatatttgatagaaccaattgttgtacataaaacagatctgcgcatatatatatatgtataaaaaataataaaataatggaagatgatggtgttctcttgtaaaaaaaaaaaaaaaaa

SEQ ID NO: 145949 - DNA, 434 bp, Homo sapiens
caggaagccactatgccagaaagctgctgactgcagaactaggctccctctgccacggtccgtgccagccaatagatgtcctgcccagaggtgggaactggaggagtgggctgcaagactgagcctaaatgtctccccggccttgacttttctttctagtcctggggcctagattctgcacttggggtctctgacacaacacaccatcccaaagtagtcggaagagctaaacacagggggttcttaaaatggctgcccccgccacccgggcctcccttgggcaaaaggaattgtcagccctaccccaacccttcaactaccagaatctgggccaccccagcagtatttttatttaaaatgttgcccattttatgagttatgatcaatttgtattaaattaaagttacagatgtcagtaaaaaaaaaaaaaaaaa

SEQ ID NO: 145950 - DNA, 1417 bp, Homo sapiens
  misc_feature (1)...(1417): n = a,t,c or g
ccacctctcctccaggtaaagactgacagccttccctggctggtaagtttttggacaggtttgtggtgtggcacttgccagcatgggatatgggaccccaggtaagtcttggcttctctctgaacctcaattttcctcctctgtaaaatgagcataataccatttacccagccgggctgctttgtggattagctatgctcatgtgtgtgcactgcctgggacagagctgggtgggcctgtgtgtttgtcaaaatgaatggaactggctactgacatctgtaatttttaatttaatacaaattgatcataactcataaaatggcgcaacattttaaataaaaatactgctggggtggcccagattctggtagttgaagggttggggtagggctgacaattccttttgcccaagggaggcccgggtggcgggggcagccattttaagaaccccctgtgtttagctcttccggctactttgggatggtgtgttgtgtcagagaccccaagtgcagaatctaggcccccaggactaggaaagaaaagtcaagggccggggagacatttagcctcaatcttgcagcccactccctcccagtttcccaccctttggggcaggggatagagccaagggggcagggacaacccctagntttgggactccacccctctcccgagttctttcacggattggatgctgtggccagaaaaacgccaggtgggggcttgctcccaccccacccctaacttcctttctaagggaaattgaacatttccccaaactccccttgccagcccaaggttctggatctgacttaaagttcccccaaacagaatctccttgtaaaaaatttaagatttgggaactgaagtgaagtgggaagaaggggcaggcctcagaacatttattggctggcacggaccgtggcagagggagcctagttctgcagtcagcagctttctggcatagtggcttcctgcagatggggcaagctttcctggtcacaccagacatgatgaatctggcgctgggagttcctggaaattcagcagagtctgcttctccagctcttccaacaattttgcaagccaccaggggccaggtagtaaatccttgtctaattaaaccagctacaagtggctcttgttttctgcagcaggatcctaactgagatagatgccaagtctgacaaggggtctagccaacagcccctcccagtgcttgggtcctaattacaacaactgcttctggaagcctcctgcaccctagcaggtcacagaggcctggctgaagagggttggctggactcttgttcagagctactggggacctcgatcatccagggaggcttgtcctgcagttgcttttaggctaatgggctctgcatcagctttgggtataccctcaccctgtccctcg

SEQ ID NO: 145951 - DNA, 1275 bp, Homo sapiens
tttttttttttttaaagaagagaggaaacgtttactgtgttgagcagaccttattttcattacagtaccaggaagttcattctcaattcccttcgaacgcagagattctgcagacatttaaaagcccaatgctgttcccaagcaagaggcagcacctgacaacaatgctgcatttaatggagcaggattacagtaacattggatattcataaagaagatttttaaagtacacagtttccttaaaaattataacattttcccacctttattttattattaccacgaataactggttggttggaaaacatggtacttgataatcttttgttgtcaaccttaagttaatgtattttgctttctgctgttgttgttaagagacgttatgcccatttctctggaaatctcaatggtgacaagtaaggcagggcatacaatacattcctgtcccactgcaaccttccacagctagcctctgcactgctgggtatctgggaaagactcaggagaggaccttttgcttgcaaatcctcaaactcctgacctcgggtgatccgcctgccctggcctcccaaggtgctaggactacaggcgtgagccaccacgcccggcgcttgcaaataccgaccacagagtttaaccttcatgggctccttctaggaagcaggcagccacttgccacagactttgcagtatgtttttataaattgtcactgatcaatgacagcctgagggaatgggaccctctactcaattcattgacttcctgcttctactgcctcccagaagtgtcatttcatttctgtatatagagaaatgaaagaccaaagaatgaaatgagaaatctgtatcctctaggcatttcaggtatataccctgaaatatcaataaccactgaagttcatgatgtctcatttgcttgaattcaatcagttaattaccaaaatactgattaagatctttccctcactacctcaaggcagagaaaacatgaatttaaagaagttatcttaccaaactacacacatgacaagctttatttgattaactccaatcatcccacaaaaatgtgcccataaaatcaagtacttaaaaaactaattattaaaattacacaacaatgggacaggcgcgatgattcacgcgtataatcccagcactttggggggccgatgggggtggatcacttgaagtcaggagttagagaccacccttccacacattagaggaacccttatacataaaatctagacaaaaaaggaagaaaatgagcgcccg

SEQ ID NO: 145952 - DNA, 431 bp, Homo sapiens
  misc_feature (1)...(431): n = a,t,c or g
ataataataaggctagtatgactaaggagctannnnnnnnnnnnnnnnnnnnnnnnnnnnnnnnnnnnnnnnnnnnnnnnnnnnnnnnnnnnnnnnnnagaagtgctgctaaagagcaagactgatttttctctctccccgctgacaggaggttatgagggagaggggattggggcctcttggggtttttagatctgacgctggtctgaaatctctacctgagggtaggagggagagtggggctctggaggagtgtgttattcacactcagagagtctgtgattggaaggtgcctgaacacccacttgcacctctccttttggtgtcggttgcagtcttgagaatactggctaagcctctgcctacgcagagagacctgttccttctcctctccaggtcttccctctttaaccaacatttccctctctgcn

SEQ ID NO: 145953 - DNA, 1050 bp, Homo sapiens; identical to SEQ ID NO: 144729

SEQ ID NO: 145954 - DNA, 1246 bp, Homo sapiens
  misc_feature (1)...(1246): n = a,t,c or g
cttttttttagacggagtcttgctcggtcaccaggctgcagtgcagtggcatgatctctgctcactgcaacctccacctcccaggttcaagcaattctcctgcctcagcctcccgagtagctgggactacaggagcccgccaccatgcccagctgattttcttgtatttttagtagagacggggtttcaccatgttggccaggatggtctcgatctcctgacctcgtgatctgcccacctcggcctcccaaagtgctgtgattacaggcgtgagccaccgtgcctggactatttgcccataatcttatggaagctatgctctaagtttctatccctttccactggtgaaggatctagaataagagatttaggtcgaggactcatttgtggagaggtggtagctaaggtcataaacatagctgtactgtcaaggaggatgatgtacgagtgaggaaaaagtcaggaaccaagccttagaagacactcacagttcaggagtatgaaacaagtacctcaggcagagaaggcagaggagggctatggagccaagaaggccgccacagaagctacaggaggagagacgttgcaacaaagacctcattaatagggtcagagtgacaagaatgttaaaaaggatgaactctgaaccagcccctgaaccggtcaggaaaggggcactatgagtaagaaagcaagtcttctgtggcggagggagtgtgtgacaaaggggagaaattgcttcagttcattcatttgaaaagttgcctggttggaggtagcagggacttgcttttgaaggcagaaaggaagaatcagcagagagggaaatgttggttaaagagggaagacctggagaggagaaggaacaggactcactgcgtaggcagaggcttagccagtatcctcaagactgcaaacgacaacaaaaggagaggtgcaagtgggtgttcaggcaccttccaatcacagactctctgagtgtgaataacacactcctccagagccccactctccctcctaccctcaggtagagatttcagaccagcgtcagatcataaaaaccccaagaggccccaatcccctctccctcataacctcctgtcagcggggagagagaaaaatcagtcttgctctttagcagcacttctcaatatggtagcccttagccacacatggctatctaaattaaaatgaagtataanaaaattaaaatttagctccttagtcatactagccttattattat

SEQ ID NO: 145955 - DNA, 310 bp, Homo sapiens
cctgaaaaaaatatatttatctatttttctagaaccaaggaagaataataatatattataagaacacagacacaaatatcccaccatccccttcattatattttgggatctgctaaaaaaaaactatgtttcggcaaaagctattttataagaggaagcagcttcagaaagggccaaggccatgaggagcggggtttaaagtataaaaaaaaaactggggaaggggtttaatgaaagagaacaaagaaacaaacaaaaacaaaaacaaaaaccattaaatacaaacttagcaggtgctgtggaaatgtgc

SEQ ID NO: 145956 - DNA, 422 bp, Homo sapiens
  misc_feature (1)...(422): n = a,t,c or g
nggcttaactttaaacagccgcatgtggttactgtattggatagcacagccctagagcctgaagaaagcnnnnnnnnnnnnnnnnnnnnnccattaaatacaaacttagcaggtgctgtggaaatgtgcgagagaatgaagacacctcggcacctccacactcttgcccaggcagagatatacactctgcacaaaggaatgaacagttaaaaaaacgaacaaacactaaaaatagatttacaaatattctataaatccatttcagcataaactctcagctcttttccccatcctcccccccaaataaaaaaggttgatttccaaaagtcacttgaaagagacatagaatggccccaggtatataccacagagattcccgtagtgtntgtcacgtaacctcgagccggttgacttgcctccnn

SEQ ID NO: 145957 - DNA, 2719 bp, Homo sapiens
ctttttttttttttttttttagaaagtaccaggttttattatctttttatcaaaaaaaaatcagtaactagacaacaggtgtgagaggtgccttacagagggagggtggctcacttcccacacagccccaaggggaaagggcacttgggggcagaagaaggaaccagccagctggggaccctgggttcgcagtggtgacggggagcttaatggcccactgggtgcaagcaagggaggggtggttccccttcaccgcagccactggggtcaggaggaagacacgaacctggccaggctaaagccaccaaggcctccccctctcagggagagggagacaagggtcgtcccagacaacagggccccagctggcgttccaaatcaagccctccccccattctacctacatcctacccagggggagacaagggggtcgtccccaagcacaagcttgaggctgtgaactcggttagagccagatctagtgtctctaggaataagtgctggtccaacagaatggacattgctctccgctgtccagttacagtagcccatgaactcacatacagtgacgccctctagaaaacgtggttaagtgcaactggaggagggaatgtgtaatcttaatgtgattttaattggcttaactttaaaccagccgcatgtggttacttgtattggatagcacagccctagagccctgaagatagcaaaccaaagaacacccagctgggtcccaaccaagaaggcagaaagggtagaacccatccaccttaactttttccagccccatcagaaggccccaggaacagggcaaggagaaaaaggcaaaaacccacccagcccacatgaaaattcactcactcaaccacccagcaacatcaaactggaaacaccacacttatttcctgaaaaaaatatatttatctatttttctagaaccaaggaagaataataatatattataagaagcacagacacaaatatcccaccatccccttcattatattttgggatctgctaaaaaaaaactatgtttcggcaaaagctattttataagaggaagcagcttcagaaatggccaaggccatgaggagcggggtttaaagtataaaaaaaaaaaactggggaaggggtttaatgaaagagaacaaagaaagaagaggggaagggaggccctatctaaagctataaatagtaaaaaaaaaaaaaaaaaaaaaaaattaataaaaatcatctctccggctcttctctcattttcaagaaacaaacaaaaacaaaaacaaaaaccattaaatacaaacttagcaggtgctgtggaaatgtgcgagagaatgaagacacctcggcacctccacactcttgcccaggcagagatatacactctgcacaaaggaatgaacagttaaaaaaacgaacaaacactaaaaatagatttacaaaatttctattaatcccattccagcatagtctctaagctcttttcaccatcctcccccccaaataaaaaaggttggtttccaaaggtcacttgacagagcctagaatggccccaggtatataccacagagattaccgtaggtgtggtcccaagtacccatttacagaaacatctcaaggtgcaggtggttctagttccttcccccatttcctggcagagagaccggctgtgaaaggaagggaggaaggccactgggggaggacctccagccaggactccacacaacatccgttagccccctggcttcagaggagctctggatgaggcatggtcagtatgggcttgagggcggacctagattcttaactggaagtttaagaagtgatccaatcccagtcttgccttcagaaaggccaagttgaaatcatttttactgacaggggaactgagggccaaagctcaagaagaacctggcagaacagtagaagacaatgtctcttctgaacacttcaaaggtaatcagagctggagatactgacaagtcagtattaggttgacctcaccctaccctaatgtccacccttcaaaatcccctggcttccctccccgctaaagtccaagccagtgcccacaagcaagcttcacgcgtagaactcattggtgggggctttcttgtagatgggtttcttgcccaggtcatagctgccttcatccttcttcttcatacggtacatgagcagtaggatcaggaagacggcaaagaggatgcccacgatgccacccacaatcagagctgccaggacctccgttctctcaaagatgttgctgccctgcacagtgctggacattgacaccttgttggacacatcctcactctcttcaacgggtgagattctcttggggataacctcattctcctctagtttcttgggttcggtggggacttggctcccagaccctgccctctcagggatatggttatctagaggcaccaagggatggacaacttcagggccgatcatggagtcttccaagtcatccagatctccagagccagacagctcaaagtcatcagattcctgcccgggccccactacatcctcatcgtctggtagggctccggagaagtatcggccttctaggaggtcctgggggtcgatgacctcagtctctcggatcgactcggcgactccgcctacgaagaacagcagcagcgcgaacagacgggcgggggccatggcaccgcggactggagaaggcgcgcaggctgcggcgagtggc

SEQ ID NO: 145958 - DNA, 711 bp, Homo sapiens
ttctttcagctctcctttctcagacagaggtaggctttgcagactcgccagcctgtctttgtgcaactgctgcaagggcgtgttcagggtttaccactgcaactggttaatgccaagccaaaaagcctccgtggagagctgtattcgggtgctgtctgatgtagccaagagccgggccattgccattcccgtggacctggacagccaagtcaacaacctctttctctagtcccacagcattgtgcagaaaacagccatgaactggcggctctcagcccgcaatgccgcacgcagggactctgttctggcagcttccagagactacgggaatatcattgagagattgcaggacatcgtctccgcgctgtagatgggagcaggtgagacgcagagccccagtactgagaggaggaagccctcttacagggccccttgcccaccccaagtccgtgtctgaaacacggagcgggtgctgcttcaacccgcatttaatgctgtgtaagtagcgataaccacgtacgagtctgtctggttgatttctaatgtgactcctctggtatttcctcctggtaataaatacaagtgtgacctttcagattgcatatctcaaaagtaacattgctaatgttttataataaaatatattatgtgtgttttggttggtgaaaataatacagactacattttaaaagataaaaaaaaaaaaaaaaa

SEQ ID NO: 145959 - DNA, 2586 bp, Homo sapiens
gggtttgatcccttcggaccgcctgataccctgggagaccacgcgtccgcttattggtgttatagaattcttatgaatttaaaatgctacctacaacttcaccttctttattaggtgcggaacactccatcttaagtaaatatgatggcagatagggtcctgcatccatggcctaacgttggagtggaattttacaaaatgctcactaaagatcactgcaggcatttcctaagtgcttcctttgccacagactggcctgggccctttatttaccttccctcattcactttccctcggccaataccacgttcttgattttctttcttcactggaagaaaagcagataaactcctctttggtctgttttcagaggccagggctgattcagatgcctggttgcaattgttgctcctccattgtttgggagggcattcctttttcacaaagaatgttcctgggaaactcttcagaggacgtgaagggaaataccctgaagagtcatggattaacctattgacctattttcctgatttaaaactgcctcaccctgaaattgatacttttagactttacggatcagtaaattattcagaattcatgaagatgctgagtatgttaagtgtcactgcaggaacgggagctgtggtgatcacgttttgcctgcctgtgcccatgtctcttcccttgagcttattctgttgctgattcatatcttgtgttcaattattttggaagcttttcagtcggacattttgtagagtgtgttctgaggaggaacttgtgataagaaagtttattataaatattatgtaaaatatatggctctctctgcaccagttatatcttattggttggtcatatcactggaaactggaacctttggattagcaaaattaatattgaaataagaaatagttcctgtatattgtgtcatttgggacacttttcaagtacaaaatggtaataaataacttgggattgagggcaggaaacacctattttatgggctatctatctaaaacatctttaaaatgggccttctctgtaatacactttctttttaaaagactttcactaaaatctatctttaaaaggaaaaacaaaagggagaggttgaaaatgcgcgacgtgcccgtgcactgtgtgatggctccctccccaggagacgttggacgggggacgaggcacccgcaggacgcccttctgctcactcgctcctctgtgcattcagcgagccacttgccacagatggagcccgtgacggtgtggagggtttcctggaaaggccatcttccaccaggtagaggcgagcgtgcttaggacaggccacagggctccacagaaatacctcaccccagcttcagggttctctctcctgagcctagatttgccagggtcttggtgccacgcaaatggtttcaaactgatctctatggataaatgctgatgttggttaaagaactgaaaaatgtgctcaactgtttcatcttttctattttatttttgtaaatttatattgtaccaccaccccaggaagtaactattttgggacatgttatttttattaaaccaggtaatttactattatcctggaatttagacttaggtttgtttcatttgttgacttagttttccagccaagaagggaaacgactgtctcccccatgttccaggtctcagtttcaagggcagagtcccagagagcagacaggagttctgtgagacgcaggagagcagtctggaaaacccccggctgtgcatacccgtgtccacccgtgggccccctggagatgggagccaggtgagaccgcagagcccccagtacttagaaggaaggaagccttctaaccaggccccccttgcccacccccaaatcgtgtgtctgaaacacgggaagcggtgctgcttcaaccccgcatttaatgctgtgtaagtagccgataacccacgtacgagtctgtactggttgatttctaatgtgactcctctggtatttcctcctggtaataaatacaagtgtgacctttcagattgcatatctcaaaagtaacattgctaatgttttataataaaatatattatgtgtgttttggttggtgaaaataatacagactacattttaaaagataaatgtatagcatgtccaatttttgtgtgtttttacatggcaattagatatttctccatcaccatctctgatgacagatttaacatgaacacagatagatgataaagtgtcatgcttttgatcaatattagcaagaggtttcacactgagaggcagaaacattgctgtttgttctcttattgaaaatattctgcaaattcctaaatctgtgttttcaaaactaatggcagtaagttttgacttcaccaatatgcaggtccaattcagagtattggtgtaattgttttctcatgaggcgtggccaggagaattcaccagtcagccttagtcatgttacttaacgtcattcatggtgcttgtggctttgtgcctgggatgagccaagttcatctgacgtctgtgtttgaagcacttcaggctgtttagtacttaataccacaggagtggaaggacaaaaa

SEQ ID NO: 145960 - DNA, 357 bp, Homo sapiens
ggtattaaaaagttcacaccaaacccagaacctctagtatatgcagaagccatataggtttttgcttgttttttgagaggctgcttctatcaccttacgcattttcagtgagttaaaataccatcagataactgtcactgccaaaagaagcctgtgaagacatagcaactaaattattagctgggcccggtggtgcatgcctgtagtcccagctactcaggaggctgacgcaggagaatcacttgaacccaggaggttggagtttgcagtgagcccgagattgcaccactgtactccaggcggggtgacagagcaagactctgtctcctaaaaaaattaaattaaaagggcttgggc

SEQ ID NO: 145961 - DNA, 861 bp, Homo sapiens
  misc_feature (1)...(861): n = a,t,c or g
ttgcatccacatgtattaatcttagcttctagcaccagcaatgtgagaagctctttacatgttgcagtgacttctgactcctatctcctgaagttaggccggactttcagagtaagggcatagttttcctcaagactgctctctatatcgctctaagtttatatatcgctctaagtttagggattcccagataattttgctcacctctgaccaagtagctacaaatttgggagttcccgtgataatttgttagaatgactgtcagaactcgggaaggtgctggacttacagttttattatagcaaaaaagatacatgttggaagcagctaaagggagagatatatagggtgaaatctgggtggcttccctctttcttcccttttgtaaggacttgtgattactttaggctcattggataatctaggataatctccttaagagctttcatttaatcatatctataaattgcttgtttttttgttttttttttttgtagacggagtcatgctccgtcgtccaggctaaagtgcagtggtgcaatcttggctcactgcaacctctgccttctgggatcaagcgattctcatatctcagcttccctagtagcttacaggtgcctgccaccatgccaggctaattgtttttttagttttttagcggagacggggtttcaccatgttgtgggccaggctggtctcgaactaaaaatacaaaaattggctgagtgtagtggcatgcgccagtaatccccgctacccgggaggctgaggaggagaatctcttgaacccaggaggtggaggttgcagtgagctgaaatcacaccactgcactccagcctgngcgacagagcgagacgctg

SEQ ID NO: 145962 - DNA, 937 bp, Homo sapiens
cttaataatcatggccgtttcagatcctcccatttcacagaactgaaaaaagatgaaaatgtgagcgagcccctgaaaatctggggggggggttctctttccatgtctttaaatgcgtacgtagaaagggagctgtattgcttttaggccaaaatttcatccgaggaaatgtaccctctttaggggtacattcaagggagcccagcacttgtgagcacgcacggcggccatgcggtttaaccaccaactcagtccaaacccacagagcacgcgcaccctcctccagccacgtaggtgggcgagaactcgagtgggtgaaggaatcccgtgtgcgcacccttctccgtcctgttcgccccgccctttggccacacagaaacgcttccaggccaaccgacgaggaaggctagagggactctgctaggaggctctccctacacttgccagaactgaaaacgtaggcaggggttaaaaactcagtgctccaaaaacgcaagaccccgacccgcccacatggccccgactcggccctgggggactcccagataacagcctgccgcccgagccggtggtgcgtcagccaccgttgcgcaagttcgagcgcgcggctctggctgctcacattatggaggatgggcaaggtcttatgcaccagaaagcctgtctatggcacagaacccctgccctacttcccccagcgtcagggaaaggaaaggcaaagaaaggaaagacgaaggaaggagacctacctagctgaggctgcgcgccagcgggaaaggtccgactacctctgatctgcgttccgggggcggctggaccccaatgcgccccctgcggcaacgcgactcccgcgttgccacagggtaggctgccatccctccctccatcttctacgaaatcgtcgacacgggagttccggccggatcgacggcgacac

SEQ ID NO: 145963 - DNA, 2429 bp, Homo sapiens
tccactttatttatttatttatttttatatttttgagacagagtctcgccctaccactcaggccggagtgcagtggtgcgatctcagctcactacctcatctctgcctcccgggttcaagtgatcctcccaatctcagcctcccgagtacctgggactacaggcatgccccgctgtacctggctaatttttgtatttttagtagagatgggttttcaccacgttggccaagctggtctcaaactcctgacctcaggtgatccgcctgccttggcctcccaaaatggtgggatcacaagcgtgagccaccgcgtccagccaaaaaatttttttgaataaagtagatactattatctcaattttaaaggaaactaagattctaagaggctgaagaaataaaaaatacgacaactagaaaataacgtaacatgattcaaatcctactgttgttcttctgactctaaaactcatgctcaaggatgaaagacaactcataggcgagggaaaaatatctacaacacatattacgagggttaaggtttctaacatgcaaggattccaccaaactagatttgaaagcgacaaataggaacacaactttagaataaatggagaatatgatgaagcaattcactgaagagaaaatccaaatgcccaataaagatttgaagagatgctgaacttcattaggagtcagggaaatgcaaattgaagtaattagatactatttctcacgatcatcttgacaaaagtttaaaagagtggtaacattccaggccagttacaaagaaaatgccagtttcttgcacttggtgaaagtctaaaccattaaaacgtttttcagaagaaatctgatacaatatcaaccaaatacatttgtttgaggcaggttcttgctgtgttgtccaggatagagtgcagtgataccatcacagctcactgtagcctcaacctcccaggatcaagcaatctttccacctcagcctcccaactagctgggactactggcacatgccaccacacctagctaattttgtgtttgtttgttttgtttttttagtagagatgaggtctcaccaggttgctcaagctggtcttgaactcctgagctcaagctatcctcccacctcaacctcccaaagtgccgggatgccaggcctgagccaccatgcgtggcccaatatgatatcaatcaaaattgtaaaaaacatgttctctcttagaccgtacttatcacttattgggatatagcttcaacaaaaaacaaaaagcatcagtacatatattcaaagatatttattgtagccttgcttatgctggaaaaataagaactgcttatcagtagttcccatttgagtaaattaaaatatatccatattttgtaaaaaaaaaaaaactccataatacaatttgagaacagtggccaggtgtggtggctcatgcctgcaattccggcactttgggaggccaaggtgctaggaccacaggcaagaggcaccatgcctggtcataattccactttaaaaatgatatatattactcagatttaacatccagaaagaagaaaaaaatggaaagaatgcactcacacaaagagagcaagaaagctgcagtaaaggcacataatttaaaatcatgttcctggtctccaatcttcctctgcaaagtgagacaccctgggccctttctttcacacctggctagttacctagaattgaataaggcccccttgagatgctctagccgctggttccctagggtttcccaaagtccccaaagggacatatgacatataaaataatgaatctttctgagtccccataaaacaatgttatctgtccctcctccaatgtgccaatacactatttacagctcttatgacatttagttcaaaacactgaacaagggctttgatatctgtgtacctgtgtcattatctcccatcagattgtatgcttctaggagtagggtatgtagcccagaatcagacctcaaatactgggaagacctgagaagtcagccagtccaatcacctatgtaaagtctgagagctctccaaaaattctcctctaagcagaggaggaagaactaccccccactccacagtagcttgttcccttttggagaaagtgtagctgctagaaagttctcccataaatggaatgaaaatatttttctcaaattttgaaatttaatcctagtctcaccccatctacagaaaagatcaaatctctcttatcacaggacagcttgtgaatactagaaccttcatatttttccttcaatctcctaacatagtgctttatacatttatttatttatttatttacttacttatttatttatttaatttttgagacagaatctagctctgccgcccaggctggagtacagtgcagtggctcaatctcagttgactgcaacctccac

SEQ ID NO: 145964 - DNA, 3009 bp, Homo sapiens
cgtttgatttgcagagcactttcatacacattatctcagtagatctttatccaactttggaaagtattactattcttatcatccttgtttttcagaagaggaaactgaggttcactggtagaaagaggcttgaccaagctcactgtggctgagctacttattcaataaatatttattaagtgctgctctgtgcctggcagtgagctggccctggggaaacactgacagacagagctgccttaaagacttagtttctgacctcccagagtctgcagcagcagcacaccgagatctagccaggatccaccccaggctcctaacctgcatcctgggccctctccacttcaggtccctgtagtttgggcctgtggcttaagtctagactgttgcagcccgtgagcccttatcctggagcatcttggtataaagcaagccaaggcataagtctctgcaaaccgaacttcaaaagtaacaaaagaggctgggcatggtggctcacgcatgtaatcccagcactttgagaggctgaggcgggcggatcacctgaggtcaggagttcaagaccaagcctggccggcatggtgaaatcccgtctctactaaaaatacaaaaaaaaaaaaaaaaaaaaaagattagccgggcgtggtggcacatgcctgtaatcccagctactcaggaggctgaggcaggataattgcttgaacccgggaggtggaggttgcagtgagccgagatcatgccactgcactccagcctgggcaacagagacaagactctgtctcaaaaaaaaaaaaaaaaggccgggtgcagtggctcgcgcctgtaatccccagcactttgggagatcaaggtgggtggatcacctgaggtcaggagtttgagaccagcctgaccaacaaggtgaaaccccatctctactaaaaatactaaaaaaattagctgggcgtggtggcaggcacctgtagtcccagctactcaggaggctgaggcaggagaattgcttgaacccaggaggcagaggttgcagtgagccgagatcatgccactgcactccagcctgggcaacaagaatgaaactctgtctcaaaaaaaaaaaaaaaaaaaaaaaaagatctggcggatgaaaataaccagaatgaaaatagctagaaaactcagcaagcaggaagctccctttctcacccttttgttcccttgccgatagaatcagtcactattagaaaaaatgaaaagacgctctgtttaaaacaatgatgacagcagtacttaatatgtatttcgaggtgaacttatatagattgagagaggctgcatttggcagactgatgtataggaagacccatttgtttctagcttctccctgcagggaaaatgctttcgtcattatagcctctttacacagactggccattctagtgaaacaggtggtaaacctttgggctgcccagaaacattttatctgttttcacttacctaggaaggggtaagattagcgggtcatccaaaatctgtatgtaagctatcttcattttcttccccaaccttctcctcctgggaaacacaaatgctatcctcatctgacaaaagggtttagaggataaagctgaaaagattggattgggatctttttgtggcttggggcggagccttttgctaaaatctcaagaatgcttgctttgagtttagctagggtggctctcagaactggggtgcctggcattctcagcatttctcaggggcctcccacctctgacaactgcagtgttagctaatacataccttgagcatagaactgaatgctgtaattcagagccatttttttttttcaacttgaacattggtacaattttactgcaatttcctttgaactttcttgccactgtttggaatcttaaaaattcattagccttctcctttctgacataaagctactcttcatcagagatgagttcctatgtatgtcctttgttccttcaatagctaattaatgtgcttgaggatacttcagtggaaaaaaaggtttaaatatgcaaattactaataaatgtgtaaccttatgtaacttgtgttacatcaacgtaacaagctaatccacgtttgtttcactgggactagggcttgtgctccctacttcagtattttggatgctttccttggatcctttgttttcacaaaatgttgtggaattttgggtatccttccaaaccaaatgacctttattagggtttcattttgaaacgatggtacagacaagtccccaacttagaaaccggttttgttcttaagggttcttgcgtcagccattagaagcccactggacctccaccacagcccaaatgggagggctgtgatagcccagatctgggttggcttttggtgggctgacccagacatttaatcaccatctcttatggttgttgccggtaagaaatgcattccaggttgggacttgggatcctgagagcacatttcgccccctgtggtggccgcttgccaccttgccaagatggaagcccagtctccttactaccaaactgtagttgtaagccagaggggaggggtgagatgtttatgggaccattcccctaaagctgggggagtgatttttatccactattccatgtccaactgtaccttgggtaaagactcccctatccaatttaataatatgaaaagccctaaaataaaactatgcatgctattctatgtgcctattttatatcagtaaataagcttatgccttgcccagttgtatacacagttatgaggtgtatagaactgactttgacagtattttttgcactgttttcctatctgtttttataaagtcttatttagatattggaccttgttgatgttctcactgcccttgtgcttgctataaaatgtttcatatgtgcctttacaaatgtgagatctttattctaacctttttttgtaaaagatatctattgatttccactatgcaactaaacctttttttcagagaaaaaaaaaaaaaagtcgagc

SEQ ID NO: 145965 - DNA, 592 bp, Homo sapiens
  misc_feature (1)...(592): n = a,t,c or g
gagccaccatgcccagcctagagcccctttttggccttcaggatgaaaaaagaattcctactcttattcctctacttatggatcagaggcctaggcctactttgcttctttgtggctggcaggacgctctttactcctacagggcaaactatgtgaaccttggaagcaaggggcagatctctctttaaatctggttagnnnnnnnnnnnctttaaccatttaaatgaacaaccggagaaactattccttaagaaaccatagactaaacctgagataggcaagctgagaagaagagaaacatactttaataaaatgaaattgtgctagaccttcccaggtgacctcatacagcctcttaaatatcatctacaacctgatgatttgaaaatacagctttaaggccaggagtggtggctcacgcctgtaatcccagcactttgggaggcggagcaggcagatcacctgaggtcaggagttttgagaccagcctggccaacgtggtaaaacccatctctactaaaaatataaaaattaactgggaatggtggtgccgcctgtagtcccagctactcgggaggctgagggggagaat

SEQ ID NO: 145966 - DNA, 663 bp, Homo sapiens
agactgcatagggctcggcgtggattgtttacatgtgttttaaaatgtttaacagcttccctggggcattcaacccactaaacatttcctgaggtgtgctcaatttctctgacaaatgtttataagcatactggccatgaaactgtaccacttcccacgcaaaacaggggacttactttactaatgagagctagctaggagtgacataaaaattctttttagtataagaggaaatgatgattaacccagttatgggaaaatgatacttcaccatggaacagactgttccattaacaaagagtacttaactaagccgtaagagcctttggatccacagatatacatccaaaagtcatcgttccccccaagactaattaatcacaaaacagctggggctgggtgtggtggctcatgtctgtattccccagcactttgggaggccaaggtgggcagatcacttgagccccaggagttcaagaccagcctgggcaacatgggagaaacacagtctccacaaaaaaatacaaaaattagccaggtgtggtggcacgtacctgaggtcctagctccttagaaggctgaggcgaaaggactgcttgagcctgggaggcagaggttgcctcctacactgcactccagactgggtggcagtgagaccttgtc
